United States Patent Application Publication US 2004/0031072 A1 - sequence listing, part 13

SEQ ID NO: 56918 - DNA, 342 bp, Glycine max
  unsure (1)..(342): unsure at all n locations
  Clone ID: PAT_MRT3847_22407C.1
gcaagtgctatgcaagccattgtgagaagtgaaaagtgccagggcaatacaaaccaacttctaaagatacattgccaggacaccatacttaacagggcgagcatgtgccgctctactgctaacaggttttagggctttgaaagctcgcgacgtatgaacactaataaaaaacccgaatgctgcaatttacatgcacgcttatttgcgtcgcctaattgcatatccatattataaaacattgcaaaatgctgtagatgctactcaatgtgtttggaggagaaggattgcttgaacggaactttncatgcttataatggctgcttgagaaacatgggccctcaa

SEQ ID NO: 56919 - DNA, 292 bp, Glycine max
  Clone ID: PAT_MRT3847_22408C.1
ggcggccttttttttttttttttaaagggcaaaatagttggagtaattaaaattgggaagacccaactttaaaggtaattttggcttattattattattattattattattattattggtggaggagccggtcttcttcttcttcttagggggggaatggccatttgaagtaagcttctggttttaccttaccgaaaactggaaaattccaaaagaaggttgaagggattttagaattatttacttattttccattattaggccacttggcttaaaattaataatttttttt

SEQ ID NO: 56920 - DNA, 251 bp, Glycine max
  Clone ID: PAT_MRT3847_22409C.1
ggttgatcaataaatacccaagacgattgaagcctgattgagagaaataaattatcctcagtgcaatgatgttcaaactcaaaaagaaacaaatgtgaataaattgaatgttgatcaagaataaacttctaacagttccaaggaagctctgcaattgagaaagaaagatatttctcttattgaaagcatacataaagctgccatgcctaccatagcacaaattgcagattttcattctatgcacatgttta

SEQ ID NO: 56921 - DNA, 478 bp, Glycine max
  Clone ID: PAT_MRT3847_2240C.1
tagccgccttgagaaaaccgattgcacaatgcattccacacatcagaggcttgagtgagccaaatgacgctggttgcaatttctggtgtcacagaatgattgatccaagattgaatcaggttggtgcatcgtttccattgagcgaaattaggatcgaaatcactaggtttctgaattgtaccgtcgataaaccctaatttgttcttcatttcgaacatcatggtcatcgcttgtgcccagccgtggtaatttgatccatcaagcactgctgtaacaatcttgctcgaaggattttcattagagtgtatgaaatagagattagagaaatcttgaatagacgaaacggtggaagtcaccgtgggtgaaggagtagaagatgcggaagcagaagaagccattgaaaaaatgtaatcaaagattcgcaaagatcgtgaacgaagaattgcaagagaaactcagagaatcaaatcacgaaaga

SEQ ID NO: 56922 - DNA, 443 bp, Glycine max
  Clone ID: PAT_MRT3847_22410C.1
gaggtatctgaagtcaaagggcaagatgttgtttcacttcccgtgaacacatattcatcgtctgatacattgtccactttggatgcttctcaaacgaatacggattaccctactctcactaataaagacaaggacgttataagcacctgaggagtgaaaaacacaactaattttatgtcactggcatatactccgcacgctaaagacattctccagactggcgaacttgcttacatattcggtgatctcatccagactcaaacacttgccaacatagaaaatactgatgcattgacccatatagatgacattcttcacgaagctagcggtatcatccattcccgtggaatatcaccattgtcttccaccaaagatggagctaatgattaaaaatctgccctttcaaggaaaacacgggtaggagacctgctgtgcttacacgt

SEQ ID NO: 56923 - DNA, 1301 bp, Glycine max
  unsure (1)..(1301): unsure at all n locations
  Clone ID: PAT_MRT3847_22411C.1
gtggcatcctgatgactaatgacattactgataacaataccgaggatgccgtcccctgctttgctctgtcgaaaaatgattcttatgtaatgtcagcatcaggagggaagatttctctgttcaatatgatgacttttaagacaatgacgacattcatgcctccgccacctgcagcaacttttcttgcttttcatcctcaggataacaatattattgctataggcatggatgattcttccattcaaatatataatgtccgtgtagatgaggttaaaagtaaactcaaaggccatactaaaagaataactggtcttgctttttctcatgtgttgaatgtgctagtttcatctggggctgatgctcagatttgtgtgtggaatactgacggatgggaaaagcagaagtctagattcttgcaacttcctgctgggaggactccaccagcacaggcagatacccgtgtacaatttcatcaggaccagatccgcttcttggttgtacatgaaacacagcttgccatttatgaagcaacaaagctagaatgttntaaagcagtggttcccacgggattcatcagcaccaatatcacatgcaactttctcatgtgatagccagctcatatatgccagctttttagatgcaacagtctgtgtattgagtgtttcaaaccttactcgagccgaatcggctcgagcttctgcatatctttctgcaagtgtcagttctaacgtacaaccacttgttattgctgcacatcctcaagaaccaaaccagtttgctgtaggactgtcggatggcggagttcatgtctttgagccccatgagtctgaaggaaaatggggtgtgcctccacccattgagaatgggtcaacgagcaatatggcagctacttcagttggagcttcttcagatgaagctcagagatgatccatgtcagccaaagacaagtttcttttacatacttggcttgctggccatttcaagaactaggtatgtatttgagataatgccattgtgttgtctggcctttgtgcagtcacataccagaacaatggaccaaacccgaaaccaaaatctaaaccttgtaattgctaaaatatgtgaaaatttctttttagtctaatgctacagaagcagcagttctcgagtttaaaccttttctggctatttatttagattggtttatcctaacttctcttttgtaatcccatccagtctaaatgtaacttgctaggataatcttgtcttcatcgctcacagtttatctatatataaatatataaattttttgaaaaaacaaa

SEQ ID NO: 56924 - DNA, 407 bp, Glycine max
  Clone ID: PAT_MRT3847_22412C.1
cagtagcattaaacttgaaagaaattttcacatattttgacaattacaaggtttagtttttggtttggggtttggtccattgttctggtatgtgactgcacaaaggccagacaacacaatggatcaagagaatagttggatcaactaattcagagggtgccctgcattatcataagtacatacctaattcttgaaatggccagcaagccaagtatgtaaaagaaacttgtctttggctgacatggatcatctctgagcttcatctgaagaagctccaactgaagtagctgccatattgctcgttgacccattctcaatgggtggaggcacaccccatttgccttcagactcaaggggctcaaagacatgaacttccgcatctgacagttctacagcaaactggtttg

SEQ ID NO: 56925 - DNA, 267 bp, Glycine max
  Clone ID: PAT_MRT3847_22413C.1
caaacacctaccaccaaaatggccttcaaaatgaacctatggagcttgactcttctcccaggggagaagtaccctatgtacattcgacgggactttgtcctcaccaacgctgctctcggcgaagagctcaggagcaaggacggacgatccgtcgtcaaggtcacccatcagcccttgctgccctctcaattcggggatgacagcgactctgagttcgatagcgacctcgacatcagcgacgaggagggagatgaggatagtacgaga

SEQ ID NO: 56926 - DNA, 840 bp, Glycine max
  Clone ID: PAT_MRT3847_22414C.1
cggccgctcgaggcggcgggccggctccttcacatttcctcactttgtctctctatattggaccacgtactctctagtttttcgtacactttgccgttacatgacatgatgaaacaaagcagagacacgcacttccctctgccacaacatgtgacagacataacgtgcatggacccgaaccggccaccactcgtggcggagaaggtcttcaaaacggtgcgtttcataggcttcttcctacaaaacggcgtttcgaagagcaaggtgcttcatgatgtgcaggacgtgatgaagcgtgggaagaacatagggaaggcgctgaacgacatcgtggctcgccaccaccaggcgctgacgtgtcgcccacgcgacgcgcacgtggccttcgtgtcgccgctggagtaccagttcagctgcagcgggagtccgccgcgcacttcgcatgccggccggaggaagctctctccggcctccgccgctgttcgccgatctccggggcaccgtgcggtgaggatgtgccgtggcggtggtgccgccgacggcacgatagagaggcgcgtgaagatcacggactccgttgcttccatgttcaacgacaccgcggagaaggattttcacgtggacgaggcggcggaggagttcatagcgaggttttacagagatttgaggttgcagaaatggctggatcactattgctgacgtgtaaaaaatgtagttaattaattaattaatagtcttctatgtatgttactgttaatgttaattactgtaatgggtgttcttagcatgttacgaacaaattaaaccgtggctagcttctttacgtttgcttccttcact

SEQ ID NO: 56927 - DNA, 165 bp, Glycine max
  Clone ID: PAT_MRT3847_22415C.1
gtggtgatggtgcattggccttgaggcgcggtggggtggcagttgatgaggtatgagaggagaagttttttggaggtggacgatgttgttttgctgggtttgaaggacaaaagaagtgggttgtttgggccagtagatttttatgcaggtgatatagtgtgggcc

SEQ ID NO: 56928 - DNA, 362 bp, Glycine max
  unsure (1)..(362): unsure at all n locations
  Clone ID: PAT_MRT3847_22416C.1
cacaggagaacacacagcacacaaaggaagcacgttggaagaggaggaggaagacagaggggagngcccacaaannanagggccagcctgtccttttgcnagaggggttgaagaccaacaaaaccaccaagagacacaaaccccccccccaggggggggggagggggcacaacacgccgagagggcggggaaggggaaggcaaaaggccacgacacgcggcacgggaagggcagagagaagacaagacgggggccaggagccacgacagaagaagagccgcgagccggggaggacggacaaagcacgaggagaggggaaaacaacgangagcccgacgacggacggaccgcagaggaaagaa

SEQ ID NO: 56929 - DNA, 255 bp, Glycine max
  Clone ID: PAT_MRT3847_22417C.1
cgcatacaaaagccggcaatacttctccacaacctttcttaatcaacccctcaatcacccaaacacggaggcttcttaaaaacacccgggcctcctacaaatcccccccacctaatctactacctcctcgcacactacaaccaccccgaacccctacatacacaattcctaatactcaaacactcctcacaaacacactctgaacctacatccattcactaattactcccccatatcacactacactccatcata

SEQ ID NO: 56930 - DNA, 261 bp, Glycine max
  unsure (1)..(261): unsure at all n locations
  Clone ID: PAT_MRT3847_22418C.1
agaaggcgacgctcgaannccgcggcgnggcggctaggnggaggaaaagaagccatgaagcagttnctgaagctgattnttgagtgggttcaaaccagccatcttcagaataagcgccgaaaggagaataatggtagtagtattngcagtgtacttcaggcacagtttcaggatcctagtggccngaacacacaaagtggttccatttgcncctgaatcaaacacttgtttcaacaaccaaacaccatggttgagttctca

SEQ ID NO: 56931 - DNA, 469 bp, Glycine max
  Clone ID: PAT_MRT3847_22419C.1
ggcttctacctaatgttattcgcaccaccgtgctcttaccacccctgccagagccagatccccatgactagcgcatcttggctagcaccaagcctaaccagctggtttgctagtcacacaaccacaaacacctcaggaggatattgatgtcatcccactctcttgccgtttagctctatctgtgctgataggtgctgctgctgttggctccaaagtcctgcctgctgatgcatactatggtgaatctgccgctgtgtttggaatgccaacgacagacacagatttcctgccatacattgtagatggattcatgctatctattgtgtctacgtggaacccatgcgaagaatttgagtacacaggtcaagctgctagatatgatgataactgtgactcttgctgcaacgtggttgtcaccagttctgctactgatcagatgtacatctctgactgtggttcagccgaagag

SEQ ID NO: 56932 - DNA, 451 bp, Glycine max
  Clone ID: PAT_MRT3847_2241C.1
atattatcggtggtcgtgctttttgcgtgcttggagtttaccttttttaggatatatttactatacgctaggtttcaaacgaaaacccgcccgtaacccaaaggaaagccgcatatggtagggagcaaacgcaccacaagcatagcaaacagccacaggcgccggctatcacacccctacaggggacacagtagtcgccaaaaaagactgcccaagggcgagcatacgggaacagaggacctatgctgtcgtacacaggaaaggaagcagcgcacacatccaacggggcaaagggcaaatcccataagcaactaacgaccagaatgccatgcacaaaggaggggagccgccgaaaccagattagggaaaataccgggagggctgctaggaatactgtacaggggggggctaacaatagcacagccatggacaagaagtggagagaaaaatt

SEQ ID NO: 56933 - DNA, 912 bp, Glycine max
  Clone ID: PAT_MRT3847_22420C.1
attatacaaccaaccaaaaacccaaaaaaaaaaaaaaaaagagttagcccttgtgatctagtaattcccttgctagctttggagttgagcacaaaagtatcttcatattcagcaaaatcatcatgaggagcttctcaaagaacaagttcctcctctgttttcgtcctgtggttgacatagattgcatgataaaatccgaagttgctcctacttgtcgttttccacgcatacccacttcagagaaccacaacgtgatgaagaactccgaaaccaagtccgtatattttccccatgtttcacaaaaacgaaggatttctcgggtgatcaaagctgtgttctacgaaaccatattgaataaaagagatcaccataaaaatcgttacatccatgattcttttggtccaaagtatttgacgtatggagaaaccaaaacccttcaatcgcctttgtcaacttcatcttcttcacacggtttagcttcaccttcttcgagctcacgcacatcatcacaaccaaagaacgtgtcaagttactactccaccaaggaaaaaaggaaagagggtactggtcatggagggccactagagaagcaaaagaagttcgagtgcttaggaatatacttgattctcataagcttagcgtttacggtgttttgggggaagctttttggtattattttgacctcaacattactctactttttcgctgtttgggactcaagctctccatgccaaaagaggtttcctagttgtccaagacccagacaaagtctacaaggcaaggataatagaaattatttcacgggtcgaaattatcacatggctatggtcccgattaattttcatgtaacacgtaattgacatctacaattactagaaaaagttaatataactcatccattatgtattatgt

SEQ ID NO: 56934 - DNA, 359 bp, Glycine max
  Clone ID: PAT_MRT3847_22421C.1
aagaaaaccgccccatgaactgggaattttggattaagcaccaagcctgatcaggaaagattcaacttagttgctggaaaacaaactgccaagcaattcaggtggaaataatatattaaaacttccccacattggggatatcccaactgaattcactatacagtctgaccaaaaaattttccatttattaggaaaattctgtttggcttaaatacaactatctaatttcttgactgtttggccagcttgcaccactcactatggggagacccctctgtgccaaccctctcatatgtttgagcaccaaggtagtctcgctgagcctgcaccaaagtatctggcaacctttcccttctgga

SEQ ID NO: 56935 - DNA, 361 bp, Glycine max
  Clone ID: PAT_MRT3847_22422C.1
ccaatcgatcaccgtttcggcaaaacggcgtctatatgggtatgatgaaaatggtcacgcttcaatggctcctatactctctatagctattaatgctaatgctaatcatacagatttgcttcgcaattaaaatacttatacagagttctcatctaccaaatgagggttacttcattcccatatgctgctttttgtatactgcgaaacttctttgaacctaatcatcgctctcaacgtggaaatatcgctcattactaacatgatcaactacagaaactcactgtcatggacatcctgtattatcagacaatcatctgtcactactatgtgcaataccattgacatgtactaccatcagaat

SEQ ID NO: 56936 - DNA, 396 bp, Glycine max
  Clone ID: PAT_MRT3847_22423C.1
cataaattgtctctccgtgtttcattccttttgattaactaatgatgatgttcagattcagctctagggttctgaccagattcaagtgaagtgctgctttttttttttttaaatgaagtgaagtactgctacgaactatggactatgaacaagggacaatatctcggattcgtatgaacaccaataggaatggcaacgcaatgttggaaacacataacatgggggaccagaccggactccatgtaagggataaaatgaactcataatgaaaaatgaaaattaaaactatcgcatgacagctggcacatgaatgttcaaagaacttgaactcatacataagaggagaatatatggtataaaactgcaaattgatagaaccaacttaaaaaaaaaaaa

SEQ ID NO: 56937 - DNA, 290 bp, Glycine max
  Clone ID: PAT_MRT3847_22424C.1
ggacgttataacacaataacgatatgcgctggactcactcactgtaccgctgccccatttgttccactgactaccgcgaccagcccgagatgcttgacatactcgcagggctaagctgcataccatgacttacccacacatcaagaacgcggtgacctcacctcactggatcgattccacggaaagagtaccatgggtacaactatgggcacctcgagcgaggcaacagactattacaatgaatccaacctgccaaagcttgatgacgcagactgggctcatggatctaa

SEQ ID NO: 56938 - DNA, 222 bp, Glycine max
  Clone ID: PAT_MRT3847_22425C.1
atggccaagaagcaaaagcttcaatcctccgaccccgaaccatccaagctcctagaccacaaagatcaggttcatggtggtggcggcaccgccaaagtagcacgtcggcgagtccacgcacgagagtccactgggtgtcgacatcttcatgattttgtaaagggtgatgctgttacagtgagtagtgttagtgagagccatgtgaggatgcgctgtttctga

SEQ ID NO: 56939 - DNA, 310 bp, Glycine max
  unsure (1)..(310): unsure at all n locations
  Clone ID: PAT_MRT3847_22426C.1
aaaattactaacacttcgcttttttgttttttttaaaaactctcgcgcccaccatacagacaaaaaaactgattttaaaaattcaacttcccacactctcatgacaacatataaaccatggtaatttccatttgatgttaacaacaattaannggcaaaagatcccccttttaattaaaaaacgacctactttaattcataaatttaaattttttaagaactaaattgccctccaaagcacaaatttactttaactttaacgcaatgtgaactccaatcacatcatttcacatttttacaaatttttaac

SEQ ID NO: 56940 - DNA, 322 bp, Glycine max
  unsure (1)..(322): unsure at all n locations
  Clone ID: PAT_MRT3847_22427C.1
aagattttatccaattgaaattttaaacatgactgggataaacttanganttcaattattganattgaataagtacacaatttaattggattggtcgaatggtatcanaaanatggagtactaactcccatttcttatttatgattgaattaaccgatcaacttgctttgttatcgacatttcntttgattcaaaaattntccgggaaaatttgaatctattnngatatgcgaatcagtcntactacttctggtcctgaggtnctgcgctganaaaaaaatctgggcgtaccgccaatattggtccggcctcgagtgcttcc

SEQ ID NO: 56941 - DNA, 441 bp, Glycine max
  Clone ID: PAT_MRT3847_22428C.1
gatgttattcaattggaaaatcatgttagcaatgggtttgggttcttatcaaacaaaaagccagaaaattgtgaaagaggagttatatcagcaaatcttaagaatttcacagaaaatgcacacaaagatgtgtcagagaagttcaaagctgaggagttaatagaacaacctgtggaaccagttgtttgcaattttctttccgatgatgattttatttgttcaagttctgactcagattctattagcagttctttggaggaggggtttttgtcagacacagactttggaaccactactgagtatgacacattgggaagaaatgcagcataagaggatttggactttggggatgagaaaagctatgagaatttggatgttggatatgagcctgatgattttactgaaggggatgaagatataatggatgagtttggaaaattg

SEQ ID NO: 56942 - DNA, 412 bp, Glycine max
  Clone ID: PAT_MRT3847_22429C.1
gagattcgcctggttgagaaatgtgtccagatgttcatctagattagtggttccattgttctgatctaggttgagtggtttccaacctagggatatgtcagcttccatgatatgatcgacaaagggacgttgataggtagtctgctcttcttggtggtgtatgtgtgacagaatgggatcatcttgggtgttaacagtttgtcaggggtgtgattccccttgagtgcactcatgcattgtgtgggcggaatgctcgttgccctgggggcattgtacatgagcctccaactagtcgtggttagccttcatatttttaagcttctcttcatggtgtcgctccatctctacaatgcgggtttgaacttgttggagaataccaatatatgtcatggttgttgggggcgaaaggggt

SEQ ID NO: 56943 - DNA, 671 bp, Glycine max
  Clone ID: PAT_MRT3847_2242C.1
gacacaaaacccgctaataacaacattcaacagttttctttttcttcatcgtgtccgtggttgcgtggggttcaggaaactcttcttcgtcactgtggttgaaaatcgaatcctttctctctctctctctctaggcaataaagtgaaacgcatcagagaaattcaattcaatggatgcaaatcgcgagcaaattgtggacgttgggtcggtggtggaagccgtttctgctgacgacggtgacgctcctctctacagcctcgaaagtctctgcatgcgttgcggtgaaaacgggacttcaagatttttattgactttaattcctaactttagaaagattttgttgtcagcttttgaatgtccacactgtggtgagaggaacaatgaagtacagtttgctggtgaaattcaaccacgtggttgttgttactctttggagatcccatcatgcgaacaaaagatgctaaatcgacaagtggtaaaagctgaatctgctaccattaagataccagaactggattttgagattccaccagaagctcaacgtggtagtctgtcaacggtggaagggatacttatgagagcagctgatgaacttcaggctcttcaagaagaatgttggacaacagcattaattattaatgtcctagcctgccttaaattgagacctcat

SEQ ID NO: 56944 - DNA, 466 bp, Glycine max
  Clone ID: PAT_MRT3847_22430C.1
aaatttaatataaagcaaatcgtgtgcttgtgttgtgaaattatcattatttaacatgcatgattgtatttatttttggtttattacccagcatttcaacgttcaataaacaaatgtgtatctatcttgtgacctttttattaacaagatctttttttataccagcatttgaaccgggttcattatggaacggacttccatcaactaccatacgaaccaggaatgctagtttttaacaagatttggacaacccgctattttttttgtactttttagattaattattattattatggtagaggcagtttttctatccagatcagctgtccaaccagggaccctgtgaacgggttcccttgatttctgttccagatttgacaattatgttcttatctttttcattttaacaataacaactgaaacatttttatcttggaattggaagtataccatgctaattgtgcac

SEQ ID NO: 56945 - DNA, 283 bp, Glycine max
  Clone ID: PAT_MRT3847_22431C.1
cggcttctgcttcaaggaaggagagcttgttattctctatcaacaagtaaaatgtcaggtgaagagggtgtcattgcagttgagccagctgctgctgctgctgccatcccaggcgagccaatggatatcatgactgccttacaacttgtgctcagaaaatctctgggctatgggtggttgtcccgtgggcttcattgagggtgcaaagttgattgagagcctgcttgcacactccgtggtcctggcagaggcctgtgaccagcttgactaggttaaactggtt

SEQ ID NO: 56946 - DNA, 542 bp, Glycine max
  unsure (1)..(542): unsure at all n locations
  Clone ID: PAT_MRT3847_22432C.1
nnannnannntttggacaanagtttttatttaccaacngaggaaaacacccncttaaacgaggacagaggcacgaagacgcgaatgaggatacattcaacgacactcttaagcactaccagcgaaaaagctcaagtggtaagaaagaccacggactcaagcgagacgagaacccatgccaatccagtcacaagccggtggagaacacgaaagaaagacaaccaaagcaccaatgaaggagaacggcaacggcttaaccgcgagaccgacccagagccggtgcagaaacagggacgccagcgccatagcaggaccctccgcaaccaccgagggaggggcggcccccgcaacaggcaagcctacagaggccaccaccacggccagcgaagccggcaccacgaccagggggggcaccaccaagaccagggaagccacgaccaccgccatggccaggaaaacccgccaccggcgacggccaaggagaagccggcacccgccaagaacccgggggaaaccccgcgggccaaaagccaacccaaccgg

SEQ ID NO: 56947 - DNA, 510 bp, Glycine max
  Clone ID: PAT_MRT3847_22433C.1
gaaatcataaggagaacagaccactttaattcccatgtagagtgtctggcatccatcgctagttattatgtcacggatacattatatattacatttaacagacaaccggcctgcattacgctatctttactaaacgagaatgcgaagctctcattcatctgagccgaaaattttgatgtgatgacaaagcacaagcgttatcagatttgcaatctctgcatgcaatttcatgcctcgaaaggtgctcatgcctatgacgatgcactcaatgtgctgtgcaactgtacttcaaaacttcacttattcacaaattgtgctcacgctaagtctcactaaccatctgtaaccagtttacagttcgcaggacattcagaggagtgatctgagctgactgactggaatgatgaggattggattcccttaactaataggacctgacgcgcgggattacccaacaataccggaccggtaggtgctggcggaccatctcgagctgttatgagaagaata

SEQ ID NO: 56948 - DNA, 498 bp, Glycine max
  unsure (1)..(498): unsure at all n locations
  Clone ID: PAT_MRT3847_22434C.1
ctatttttcttttttttttttttttttttttttttttttttttgccttagcngantcaggctgcttaacccgttgccgccctcccgtgcccgtggtgggtccttttccccccttccccccctgacccaacatagtcctggattgcccttcagtttaggttcgtggcaggagccgcgatgcttataaagctgtgcctccggtttaggcccccctcggttctgggccccgtctggcccccccccctgctgatggccgaccccgggaaccggagtctgagggagattctagtagtcttcatcctcttcctggcccctccccgactcagcacccacttcttcataatccttctcaagggctgcngggtccccccgggcttccgaaaattcgccttcttccttacccctccccgcgtgccagcgggcccgggggcgctgggcctgcctgggactccccttggggtcccggcggccgcccgccttgccccccctgggggggctg

SEQ ID NO: 56949 - DNA, 566 bp, Glycine max
  Clone ID: PAT_MRT3847_22435C.1
attcaacgggacctagaacattttattgttgttttcaagacactgaaatctatttaaatggggtaagagaggctttttcgcctataggtctttctatgaaaaatttcattcccaaataaatgagtagatgtttttctaaatgtattttttagcttctgagctcattttagctataactagcgattactcctgcaggtaaacataagaagcagtgatattctgaggcacagtgccatggaattctgtcaactcatcaaagaatatttgggataatctttaatgggaaaagttaaaatatttgatcattctcattttatatgtggaacaactaaagtctgagtaggttaacatcattggccaaaagttggttttatataaagatacatgaccacctcaaaaatggtgaaagaaaaattattaagtgtctcggtccctcagattggtggatgctctcttcctccttaccataacagaaaacctgtcaaaattgaaacatcattgatgactaaaggcaaaaaactcttgatatattgatctcagcccaggatcaattgtaagaattgtat

SEQ ID NO: 56950 - DNA, 2262 bp, Glycine max
  Clone ID: PAT_MRT3847_22436C.1
cccactcgtacggtcggatcttgctcggactcggtatcggcttcgccaatcagtttgtgccactctacctatctgaaatggctccatacaaatatagaggagcattgaacattggctttcagtggtgcatcactgatggtatccttgcggccaatgtgttgaactatttctttgctaaaatcaaaggtggcggcagaggcagttgattctctctccaccacactccaaagaaaaaagtagctttcaacccttactctggaatggtgtatactttactctctcttttaaatcttgtgcacaaaattataattataaattttaacattaaaaattgttcaaatctttttgactgtttgtacatgtgtacatgtacttctcgtatctccacgtcctagaaccagatctcttcagcagccaacagacacagaatttacaagaccggtttttgctccttatcttaagcttgtgccaaaaattttatctatcccaccttcccacaacattgccacctacctaccatttcctgtagtttttttcaaatcttggggtggttgaaagttttaaacttttcttgatttgattgcaagtttggtcttgaatgaatacttctaagaaaagggtactgcctcgtgtcattggatgtgtgaatttctgaactcatttcacagaggtcatgcattattctgctgcctctctttgcatccaatacctgctgtcggtttagacttggaattcctgattcaggattgttctaatataggtgtgagctggataccccttcaatcctctggtattggcatgtaccaaatttgagaagcctgtaaaggtttgctggggaagtagaggatctacactaatttgaatggggcattctgcagctgtgtgggactatagagcagcaactgaaattacaaaggactggaatgggattcatcaaattgtgcttcggactccaaggggtgcttcagcacaggtatgcttacatggggcgcaggtcacttcatggcggaatgagcatggggaagaacttctattcacaagcagcaaggcaattttcaaggctccaaaagccatacgaggaggaattcctatatgttttccacagttcggaaactgtggatcgctggagctgcatggttttgcgagaaatagaatgtgggcaattgatgataatcctcctcctctgcctgcaaatgattctagtgggaaatccttcattgacctggtactaaaatcatctgaagaagatatgaaaggctggccatatagttttgaattccatcttcgggtgtctcttacatcagatggagacctgactttgatatctagagtcaggaatataaatggggggccatttagtttctcatttgcatatcacacatacattattggtctgctgacataagtgagataaggattgaaggtctggagacactggattacctagacaaccttttccaaaaggaacggtttacagaacaaggagatgcaataacatttgaatctgaggtggatcgagtgtatcttagctctccaaacataattgcggtgctagatcatgagaggaaacgaacatttgttataaggaaggatggtctccctgatgttgctgtgtggaatccatgggagaagaaatcaaaatcaatgtcagactttggtgatgaggagtataaacaaatgctttgtgttgatggggcagtaatagagaaacctgtgaacttgaagccgggcgaggaatggactgggcggctgcagctctcgattgtgccgtcaagtttttgcagcgaccatctaggtctggacagaagtgatctttgaggaattgtacaaaatcggtcagaggtttatgctacatcctgcaatgtagcattaagttgtagaaatagtgctcctccttaggagtatccggtttttctgttgtgtgatctttttaggctagaaagagtgttttagagtggcctatgttttttgtgagaatggctatcaaatgttacccggttattagttagttggttcggttctgctatggactcttcttgaagcgttagatttgttgtgtagatgttaagtttcttccctggatggattttatgatcttccacgtaatggctatattaaactttcttgttccaatttactaatattgattgggtgggtaggtatggtgcttgaaaggttaatttggaacatgatgatccacctttcatgagagaataaaccgactctgtattttataattatataatgatacttgaataattt

SEQ ID NO: 56951 - DNA, 618 bp, Glycine max
  unsure (1)..(618): unsure at all n locations
  Clone ID: PAT_MRT3847_22437C.1
gcaacaagaaagtttaaattaggcattacgtggaacatcataaaatccatccagggaagaaacttgacatctacacaacaaatctaacgcttcaaggagagagtccatagcagaaccgaaccagctaactaataaccgggtaacatttgatagccattctcacttaatacataggccactctaaaacactctttctagcctaaagatcacacaacagaaaaaccggatactcctaaggaggagcactatttctacaacttaatgctacattgcaggatgtagcataaactctctgaccgattttgtacaattcctcaaagatcacttctgtccagacctagatggtcgctgcaaaaacttgacggcacaatcgagagctgcagccgcccagtccattcctcgcccggcttcaagttcacaggtttctctattactgccccatcaacacaaagcatttgtttatactcctcatcaccaaagtctgacattgattttgatttcttctcccatggattccacacagctgcacaaatcatacaagtacagatgaactgcaattaaatcttctatagcaattacaaaattagtgntgctgattgcaggaactagacagatata

SEQ ID NO: 56952 - DNA, 1356 bp, Glycine max
  Clone ID: PAT_MRT3847_22438C.1
ccacgcgtccggaaaatgctactcaattgctcccaggtcttgtagttacagctcctgagtttcctgatggtgaggatgaagacggtgatgcatcaggacaagaaataaactcttcgaaagataaaggaaagcagtcaattgatgatgctttatcttctgctttagctagttttttgtcttctttgtctttagactctccaaagtatactaaaagtttaagtgttaaagcccctgagttttcaaatgaagatgaagatgacaacgagagtaataatagtgagatagcaaaaaattaccaagttcatctaactgacagtgaggaatttagtctcatccaagtgttggcttcatccagtacttgggaaaacagtgagaagataaacccagattctaatgataaacactccaaaaagactgcccaagaagctgaagaaaatgaccagctttccagtgcagaaggagatcaagatgaggtgtgtgtaaaaactggttttattgacagctttgaagaagacaaaaatggtaaagtcaattatcagaaaagtgacatttcagatgagttggttgacaatcagaccccctttggtcatagtatcaccaaggaaggaccatcttcaggaactgaacttactgttgcagcagaggtccctagaaaaacattccatgagaacatcatagagaatgttcttggatttgcacttgcttcctctgttgtagattttgaaaacccaatattggatgtgaaattcatttctcagagaagtcctgctaccgagcgtttccttgaagaccttctagtgggaacacaagatcaaaagaccagttcaagagatcaacctgtcaaggaaagcaatgatgatgttaccgttaaggaacaactgaaaagcaatggtgatgtctcagttgaggagcagtctaatttgatttcaatagaagatggggaactggtgattccagctagcgatagccattttgctgtggacaaagacttgtgtacttcttcgataattgcacctgtgaacaatgaagatgataatctgccactgccggaggatcataaacgaaaacgtgatcaataactgggtcaagtttcgtatgaagtggtttctagttcctgattgagttcatgaatctaaatcttttaggcattgtatatatagcctattttcatgaatatcatcttgctccccttctctaaatttcaacaatctttagttttttttttggctttatgttgcatgcatgacaacggtaaatagtcaatcacttcttggttgtagttgcattattattcggaggttatatattttccttatatgcattaataggcaattaaatcatatttttttcttcttt

SEQ ID NO: 56953 - DNA, 648 bp, Glycine max
  Clone ID: PAT_MRT3847_22439C.1
ccggtttttgctccttatcttatgcttgtgtaaaatttttatttattccaccttcccacaacattgctacctctcgagccgaatcggctcgagcggctcgagcttggggtggttgaaagttttaaacttttcttgattcgattgcaagtctggtcttgaatgaatacttctaagaaaagggtgcctttaaactttttgaacgcttcttcttcttctttgtcatgtatgtatctctgcacttgatcaacaggtactgcctcgtgtcattggatgtgtgaatttctgaactcatttcacagaggtcatgcattattctgctgcttctctttgcatccaagacctggtgtcgatttagacttggaattcctaattcaggattgttcaagtgtgagctggatcccccttctatcctctggcattggcatgtaccaaatttgggaagcctataagggtttgctggggaagtagaggatctacactaatttgaatggggcattctgcagctgtgtgggactatagagcagcaactgaaattacaaaggactggaatggaattcatcaaattgtgcttcggactccaaggggtgcttcggcacaggtaagcttacatggggcgcaggtcacttgctggcggaatgagcatgggga

SEQ ID NO: 56954 - DNA, 396 bp, Glycine max
  unsure (1)..(396): unsure at all n locations
  Clone ID: PAT_MRT3847_2243C.1
gggagagcccgatttttggccaggaaaataacctcttcggcaacccttccacccagcgaagagaggctcgagtctggattgtacagtagattttaccttgaaaatcagatggctgttgccctgggaggaagggcctttgaaaaatggtggtcnnngaggggaannncaccaccaaaacancaaacgacaaaaagcaacccccacgaggggggagggggggggccaagagacggggaggcagcagaaaaaggggacaagnagccaccggaggaccggggggaaacccaggcggggggcaacagaagccagcgaaaaaggaagacgccacggcaacggcggaggcaggggaagcggaagggagggaacgggcanagagaggacacgccagggcaacac

SEQ ID NO: 56955 - DNA, 317 bp, Glycine max
  Clone ID: PAT_MRT3847_22440C.1
atagccaaaaaacatacgtggggcatttattcaataccatattctacaatttaaaccttaccataattttacggaccaaatttaattacataaaccatttcattaaacttatttatataacaaggatttactttctaaatctatcaacttttgactttaattacaatatattcttgtccaaaaaaaaacactttatttcatgctaatttaaatcactctctcttctttacaaatttcgtttggttttaatttacctctatttttatcttcaccaaactttcacatattttattcccattatttttaccaattttcta

SEQ ID NO: 56956 - DNA, 267 bp, Glycine max
  Clone ID: PAT_MRT3847_22441C.1
tagtcaaagggaatcattttttttctttcaagaaacgccgtttgcggtgaaaacaggtaatgcgaacaggttataaattgaatcattttgcatttttttttaattttggtacaaagtcgttttgcacttcttgtgatggtctaaatcaccttttgaagttgaagttgttggtgattttcattttcaataccacattgtccacacgtacgacaagtacaattcagagcaagaaggttgacgcgccactcgcaattgcggcataaaaca

SEQ ID NO: 56957 - DNA, 469 bp, Glycine max
  Clone ID: PAT_MRT3847_22442C.1
gaaataaaggacagatacatatactcttggataacagtgactagctacacctgacctattatcttacctaacctctctcacacttagttgtgacatgaccaaaacaacaactgctcattctacatgagtacttgaacatgctaaatcagaaaacaacctctctacatactagcacatgtttcggaaacaaccgcatacagctgcgacttaatggaccacaaaagcagtggctaaccctccttcagctacaagagtgcatcgagctctcttttcttcagtctctcccctggtcctgaccttacgacacacagcttcttgccccaaactgcagccttaacctgattatgaacaccatgctctggctgtgcctagccgattatgagctccacatgtagcttacttggacctgacatacttctacaatactgagatgtaccctgtgactgaagcacaagagatgattaccccc

SEQ ID NO: 56958 - DNA, 222 bp, Glycine max
  Clone ID: PAT_MRT3847_22443C.1
cttggaagaaaggctgcttaatgataaaaattgtggtgtctgtgaatgcagcagggaaaaggagtgattgtgcctcattgaaaccaggagttttaacaaacagcaacattgcacatcattattccaatgaatgtattacaaaattcttaccacattcaccatgataggggagttgaatgatgtatgtttgttctaataactggtttaaaatctgtttttttt

SEQ ID NO: 56959 - DNA, 553 bp, Glycine max
  Clone ID: PAT_MRT3847_22444C.1
aggaaaaaggattgatcccacagtctaaaaaagtgcttgatggccacataggtctaaatacaaatgataaaatataacaatgtctcagcgaataagggattcaaaaagttgttctacacaacatatggatactacttccacatataattgtttaccaagcaaaatgtgaaaattaaaacttgatttagagggttaacttttccatctctgctatgggtagattcagctccaattctccatcagtgttgtctctctgtgcattgtgaggcagagtagtagttgaagaaaagaatgagcagcaactgaagtttaagcctggataagagtagttgcagattgattccatagttcctgtgtcaaagttgtaagcaacaacagttcctggaagctgcaaatatatgatctgtgcttcttcgatgtaggcaataggtgcaaccttgtaaggctcccaatcaaagaagctgccaaaaaagtttttggttcttaggcataagcacttcatgcatgacactatgaactagtttccatggaaacctttttgtatcataataat

SEQ ID NO: 56960 - DNA, 377 bp, Glycine max
  Clone ID: PAT_MRT3847_22445C.1
ctcagaaaacggtcttgtatgatctcttaccctcactatgagaatctcacggtactaatcgccgagatcttgctatcaattagccttttgaatgctattggacaaattaaatgttgtttaagagaacgatgtcaagcggcgcaccacactggcgttatgcatgcaaacagccaattgtgcttgatgggagagatcccgcttgcccttactgagattgacgagcagtgcaagagctagacgagtagcgaggaattgcacccaaccataaccataccctgtcgtggcagacgggacacactcatccaaagcctgacatttacaatgctgtacatgcttttatggggcagagagggtctgaccatagatatgagcttatg

SEQ ID NO: 56961 - DNA, 499 bp, Glycine max
  Clone ID: PAT_MRT3847_22446C.1
cccacgcgtccgtacggctgcgagaagacgacagaagggaggcgctgtgtgttatgctcaagtgaagacgagactattaaacacatttttttggactgcagagtcgcaaaaaaaatatggcagcaggtttgtctttggctggatgttccgattgtggaaggggaagatattcaagcccactttatggcattcgggaagctaattaaagggaagaaacaaaagtgagttaaacatcttatatggatggcggtaatttggaatatttggttgacaagaaataaggtaatctttaaagaggaggctgctacaattccggttatgatttcgggtataaaggattgcgcttgggcttggttcaaggcgaggcaagggagaacttgttgggttggatggtcgggctggataatttcccatgggatgtctactttcattgaaccgcaagttgggggacgtacaccgaatactgtagacagtaaggggaggtttagctttggggaat

SEQ ID NO: 56962 - DNA, 392 bp, Glycine max
  Clone ID: PAT_MRT3847_22447C.1
tccagacttcccgtttacacctacaatttattttcctttttttatgatcgacaaatatattatttgaactttaaaggtgtacttctaacaggggaatttctttaccatgatgcatatgtatattttctcaatttcattcactattcatttgttatacactctgcttaatattatcaatctttttgtgcttaatactacatatcctacttaacaaatccaattcaaattattcactcatttcataatcgtttaatctttcatcgttcaacattaactcaatttcttcgatgaatttttcattgatcagctttaacatttgacaatttgattaacattataaattttcacttatttactacaattttttaacattttataaaattcaaattata

SEQ ID NO: 56963 - DNA, 458 bp, Glycine max
  Clone ID: PAT_MRT3847_22448C.1
gtctatccaggctcaagttcaggccggatccctggtggaccccggtcttccgattagcccgacttccagcttctccagcatctcctcggccgtgcagtcattcagcggcttcacgagccctcagtaccacgacaacatgtcgtatccgccgcccgagcactaccaattgaaccctgcaactccttcgaccttcggcctcgagacccttgctctcgcagcaggaggacagcgcaagttcgaggcataggtcgcctgagggacttccgcctggaactttcttcaattacattctcggctttcggctggcgaagggggcgtcttactaaagatggtccttggacgatggctatactttatggtctagtaaatttttttttttccttgactaacgagcattccacgcaataaacgcatgccgtcatggttatgaccggagcaaacaggcaaaaaggcgtttt

SEQ ID NO: 56964 - DNA, 286 bp, Glycine max
  Clone ID: PAT_MRT3847_22449C.1
tccgggccgggattcccgggtcgacccacgcgtccgctctctctctcctttctttctttctgccctgtcgatccgagttagcattccaaggagcgaggaagtgactcgggggtacaggcgggggtttctcggttcgccgagcatcatgagatgctcgctccgttccgcaccatgaggaatcgaatctcccgatcaatcacgagatattagatctccttctaagaagtgtcactccagattgaaactggcgcgcacgcactcacactctgtgttcttagcatcgcgg

SEQ ID NO: 56965 - DNA, 383 bp, Glycine max
  Clone ID: PAT_MRT3847_2244C.1
gagctcgattaatactgtaaaatgtgaattaattatttgtacatatttatacaccctttctttgattctacgatgtccataagcaccccttttcaccaaacttacacgcacttcaagtgctaaattatgtaaattattgttacatctcattacacaaaaagcagggatgctgtagtccgtttctctcgatcatcaataaaggggtgatattcttctgtgacttctcccgaatttggatcattttcttgctttaggagctttgaattgtcattgtcttcatgtatttgttgctctctttcatttccatttgcagtactgagtttctttcctaagcttgtgaaatcatatttttcatattgacgattatcatagtaagaattaca

SEQ ID NO: 56966 - DNA, 667 bp, Glycine max
  Clone ID: PAT_MRT3847_22450C.1
aattcggctcgagcggctcgagctaaaaacttctctccaaccaaacgcctcctacgggtcaaacactcaaacctaaataattattattatttctgtttcaactttcaaattagttttcacattacatacacagagtgacagagaagatccgtggacggaaaaaaaactgaaagcaagtgatgacaagtgccttatggaagaaccaaatgactttgtttgttagggtttatagcacggtgttacttcactgaagcagcgtgcattgtgttcgcaggtggcaccaattgatgaggaggctaggaagcattcggagctatgcaaagcatcttcgtatagatggtgtgaaggatactatagctgttgcctctggcaaaggtggtgttggcaagtcaaccactgctgttaatttggctgttgcacttgcaagaaagtgtcagcttaaggttggtttgcttgatgctgatgtgtatggacccagcattcccaccatgatgaacatcaatacaaagcctgaagtcactcatgataagaaaatgattcctattgaaaattatggaatcaaatgtatgtcaatagggttacttgtgggagaaggatgccccaattggttggagaggtcccatggtatcaaatgctcttgaaaaaatgacaaggggagttgactggg

SEQ ID NO: 56967 - DNA, 615 bp, Glycine max
  Clone ID: PAT_MRT3847_22451C.1
ggctcgagtggaattctttatcaggcctcatcccggaaaccttctcaaatctctcaaaactttccaacttggacctctctcacaacaagctctcagggagtctcagaatactgggtactcttgacaatctattttctcttaatgtctcttacaacagtttttctggttctcttcctgacacaaaattcttcagggatcttcctcctgctgcatttgttggcaaccctgacctgtgtattaccaagtgtccagtaagtggacatcaccgtggcatcaagtcaataagaaacattatcatatacactttccttggtgttattttcacttcaggatttgttacatttggagtaatgttagctctcaaaatccaaggggggactaactttgacagtgaaatgcaatgggcttttactccatttcaaaaactcaacttcttcatcaatgacattatccataagttatcagattcaaacattgtgggaaagggttgctcgggagtttgttaccgtgtggagactccgatgaaccaggttgttgcagtgaagaagctgtggccaccaagcatgatgagacacccagaagagacctttttgctgcagaagttatacccttgat

SEQ ID NO: 56968 - DNA, 275 bp, Glycine max
  Clone ID: PAT_MRT3847_22452C.1
attacaaggacaaacattttcctgaagcccaacagtaatggttattttaagccccaattttcagaaaccttgggaaatatggctcaaaaattcaaaaatctccaaccaccttaattccctgacgtatttataaaccttgctaaaacgctgaagggggaagaaaaaagctaaccccgaacaattataaatcaaatttgccccattgtctcagctctgggggaaggtctcgccgacttcgggcccacatgtggtctattattagaggccccctttgg

SEQ ID NO: 56969 - DNA, 417 bp, Glycine max
  Clone ID: PAT_MRT3847_22453C.1
gtggcttatcacatgacaatctgagcattggctctcgttcttagaattctttgattgcggaggatgttacacacacagggctatagcaattggcatctcacgcacatgagccatgggtataggagactggcagaccgaggttgttgaccgaggaaaagtggcatctctcgacacgctacagcatgtactccacgtatgggctcgagacgtgtagcctagctcttgcctacatgctttcatgtggcacactcagacgcctgctgttaaaattgcaagatgtgattgtaggggccagagctttacatactcatacgtgccatggcagctgccatcatagccgagtgctgttgctttagcagacctaggcttcttatatagagctgacgaggacttacaccacttgctgaacgagtgagc

SEQ ID NO: 56970 - DNA, 146 bp, Glycine max
  unsure (1)..(146): unsure at all n locations
  Clone ID: PAT_MRT3847_22454C.1
gctttggggagattattattttcatccggntaccagagccttcaanaagaaaccccctgccantgganggggacgctcntttatngaatttatnctggnnncatttacnagatatatancccagngttggggaacntaaaaggnng

SEQ ID NO: 56971 - DNA, 445 bp, Glycine max
  Clone ID: PAT_MRT3847_22455C.1
acggctgcgagaagacgacagaagggtcccaaatacaataaaggaagatggcaaaatgtttgatgaagagacacctaacaatagagctgacccagtcttaatttgtttccatgctcattttctttgtttttgttaaaaaattgtgccacatacctaacagatgagccattgaataatatatgggaaaaaccatattgcatttgaccagttattcaagaaaaaagagagatttaaaacaaagatagattatagaaaaaagaaatgtatatataagtaaatggtccataagaaagtagaatatcattagcaaatattacagcaaaatcataacgtgtaacttattacttgatttagagaatataggcacaacatagaaattgttgtcattgctagctaacgaaaccaggtttcttgtatgcaaagaggaatttttcttttaaaagat

SEQ ID NO: 56972 - DNA, 257 bp, Glycine max
  Clone ID: PAT_MRT3847_22456C.1
catttgttataaagaaagatggtctccctgatattcctgcgtggaatccatgggataataattcaaaatcaatttcatactttcttgataaggattataaacaaatgcttcacattgatgggtcaataacacataaacctgttaactttaacccttgccaggaatgtacctttcagctgcaactctttattgttccgtcaaatttattcaacaaccatctagctctttacagaaattatctttgacgaatcatacaa

SEQ ID NO: 56973 - DNA, 430 bp, Glycine max
  Clone ID: PAT_MRT3847_22457C.1
ggcttcaaacctcaacctccacgagctcttggacttggaaaaagaaccaccaacctcttgcagcgctggacctgaagccaaggacctgttccattggccaataacaagaacgggtcctgctgataatccttaagctggatgcgtattcccaattcctattcccttccctcctgattatccttttcagactcctaacgttgccattaagactaatgagcctcaccccaacatcaatagcaacggtagcatttatcttcataacctgaaggggcaggggggacccgccctctccaacgcacaggtactgatttcttcctggtcaacggtgactgatccaaatgctgaagatccacctgaaaccggaatcgctcacatgtaccaaactgaccagtacaaggaccatgccactgcccgcagctcgaaccagaac

SEQ ID NO: 56974 - DNA, 404 bp, Glycine max
  Clone ID: PAT_MRT3847_22458C.1
ctgttaaatcattaacgagagtgtcactgaggctggggactctttgaaacctttcatgcgtgctctcgggggggggtttcatggcggatgagctgagcaaccactgtttggttgtgctcaaggaaacgtgcttctggatttgactacctcctaacccaccaagccatggaggcggttgacaatggtacacctattatccgtgacttattcagcaactttctgtcagacccatggcatggagccatttatgtttgcgctgaactgacacccatagtagacatttttgtgccaccagattcagactttgttcgcacagacttgcgttccagcacctagaacttaaaatcaactatggctctcactctcaatcatgtggagatttcctactactgcccttttgttgc

SEQ ID NO: 56975 - DNA, 370 bp, Glycine max
  Clone ID: PAT_MRT3847_22459C.1
atacaaaccaaaaatttcttaattttctactgcggctccattaattgttacctccgaaacaaggaaaaaatcatttcccgaaaatgcaaaggagtaaatgggacgctaaaatgcagccataactaacacccaaagaactcacacctaagaaaggctgcgggggcccccatctgaagactcgcctctgggaagttaggggggaataaaccccaaccaatgccgcctatagagagctgcgcagatccacgcatagacccggttggcccacccaaatacttccgtgcggacatgggacaggcccactttcctcttcacaatcgatgggggcccacgcgatgttagaaacactgggaattcttatttgttgggg

SEQ ID NO: 56976 - DNA, 187 bp, Glycine max
  Clone ID: PAT_MRT3847_2245C.1
ggtgtcggcaaaaccaactcctgcacttgtggttaatggcatcctaatcgcgttgcagaaccatgagcacactcactcgcttaccttctctcactctcactgccgcacaaacatctttgctcactttgaatcataaccgcacatgcaccaccgcacacactcggcgtcccaattgctccatcctctc

SEQ ID NO: 56977 - DNA, 2298 bp, Glycine max
  Clone ID: PAT_MRT3847_22460C.1
tcgcccacgcgtccgaaacaaccccttcttcacgttacctacgttttcattcaaaaccacagtacgacatcgaaaaaaacaaaaaagtcataatatatatcaacaaaagggaacgatattttcagcaaagttttgctctccacgtttattgaatcaaggtcttttctaatgctaggtgttgaatttggttaaccagtcttggaggtttatctgctattattaaaagtgttgggatacaagtaccaagcagaagtttgccaaggcagctgcttttagctgatgccatcatcatagtatggacttgaatcaatttttaaattttaacgttattagttcggaaggattcccttgcacatcgtcttgtactcctatttcaccaatatccaaccagttgcttggatccttgaaacttgacataggaaactcacctaactcggccctttctagtcattttgattctgatactctttcttctgcattaagtgacagtcaggaattgcacacctctggggaaattcactctggtgtcaactcttgcaagtctttgcaggaaagcaatcattatttgcacaggccagtctcatttgtagaccatctccaagacggtttacatctatctactaggagctttcttccacaggatgcaagttatgaccatgaaactagacatgcattgctggaattagaaacagctttgatggcacctgatggtgaagatcaaatcaccacatcaagcacttctttgggtgttggcagtagaccaacaacatcttgccaaagaaataggtcctggagctctgagggccagtcaagtgatgttgcacatgtagagaagcaccacaaatcagtggaggaagaatcgctgcaaggatttccatcatgcaatttgaaacaattgctgattgtatgtgccaaagccttgtctgaaaacaacatgcaacattttgatcaattgatagaaaaagctagaagtgctgtgtctataactggggagccaatccagcgccttggtgcttatttggtagaagggcttgttgcaaggaaggaggcatcaggaaataacatctaccatgccctaagatgcagagagcctgagggaaaagatttactctcttacatgcagctactgtatgaaatctgtccctacttaaaatttggttacatggctgccaatggcgctattgctgaagcatgtaggaatgaggaccaaattcatatcatagactttcagattggtcagggaactcaatgggtgacacttcttcaagctcttgcagcaagacctggtggagctccccatgtgcggatcacagggattgacgatcccctttctaaatatgttcgtggtgatggactggaagctgttgggaaaaggttggctgcgatatctcagacatttaacatccgagttgagttccacggcgtgcctgttttagctccagatgtgacaaaagacgtgcttgatgttaggcctggtgaggctttggctgtgaacttccctttgcaactccatcatacagctgatgaaagtgttgatatgagtaatccaagggatggacttttgagattggtgaaatcactttctcccaaggtaactacattggttgagcaagagtcaaacacaaataccactcctttcttcaacaggtttatagaaaccttggattactacttggcaatgtttgagtccattgatgtgtctcttccgagaaagagcaaggtgcagattaatatggagcaacattgtttggctcgggatattgtcaacattattgcttgtgaagggaaggaaagggtagagagacatgagctgttaggcaagtggaagtctaggttaacaatggctggctttcgtcaatatcctttgagttcttatatgaattctgtcataagaagcctgctgaggtgctattcaaaacattataatcttgtggagaaggatggggccatgctactgggatggaaggacagaaatttgatttcaacttcagcttggtattgattacatgcagataggaaataatgcagtggtagaaatatgttgccgactgaggtttatgttgatttctagggccttgtgttccttaccattgttctaaaggtcattatttgataaattagtctattgagtttcatgtcatagtgatgcagataactgcataccaattcttttataaactatttaggtatgtacagtgttttgatctacaaatattgtacttgtacctgaaacttatccttggtatccaatataaattaaatgaattcacagtaaggttattgacaaaaaacaacaag

SEQ ID NO: 56978 - DNA, 187 bp, Glycine max
  Clone ID: PAT_MRT3847_22461C.1
ggtactataaaacacctgagcttatattagccgcaactgaatacaccaccgacattgatatctggtcagccggtcgagaactgagagaactattgcttgagcaaccgatattacatgtggagagagagatgtaacagcttgttgacattattaacgtgttaggaacctacactagggaagaaattaa

SEQ ID NO: 56979 - DNA, 543 bp, Glycine max
  Clone ID: PAT_MRT3847_22462C.1
gggtgaatgatatttttgggggtatttctaaaagaaatattgtcgagggtgcctagagacagaccccagagcaagggggcaggtgcttattttctgggaatcccttcatcaaccacacccagaaagacaattccaatcccgaaaggaggagccccccccccagagggaaagaacggccggggggggactgcccccgcacaaaggaagggcccccccatcgcgcccccccccgctttgaaaaaagagagccccccccgcggtatttctcccaaagaaaaaaacacccccccccccccggggggtttcccccccttggggggcgccccccaagggctaagcgaaaactagaacgagcccccccaaccaaaggaaccccaaaaaaaaaaaacccccccccccccccaaaaaaaccccccggtatctccccaccaccaaaaaaaaaaaaacccccccccctttttttttctcaccaaaaaaaacacccccccccaccccaatggtgtaagagaaaaaaaacaaatccccccccaaaaccaccggggg

SEQ ID NO: 56980 - DNA, 467 bp, Glycine max
  Clone ID: PAT_MRT3847_22463C.1
gattcataagctcggtgttttcagaatttaatagtagaccaataaggtgtaaaaataaatgcaaaagtcctcggttttctgatcacatgaaacactcactgagatgtatacatacaaaatgtgagcctccgaattagcttataatacatagctacaccacaaaactggaggcacgttagtattagtattacaaataaaacaatgccacaaagtttagttctactttgctttcttatgcatcttctataaactgcacatataacttaaaagacacatgaccaaaatataacagctacaaaacaataactataattacaacccaaaacacaatacattaaacctgtcttttggtcttctagcagttaatgccacactcctcaacatcaggaccagtgacccttgtggtgaatggatcaattctaacccacaagagtgagaaaatggatgcaagaagaatggaccacacc

SEQ ID NO: 56981 - DNA, 232 bp, Glycine max
  Clone ID: PAT_MRT3847_22464C.1
aagaagaagagaagaggaaagatatcgggcatctgatatcacacacaccacatgggcaatgattgatgatgttggattcatcataccctacgcctccaacaaatatggagcaaactgcggagctgaggctgtctggttcaagactggagctctgcttcttgatgggggtaccttgaactacttcgggagacctatccccatcaatcttatagaggctgtcattgctgagatt

SEQ ID NO: 56982 - DNA, 403 bp, Glycine max
  Clone ID: PAT_MRT3847_22465C.1
gggggggggaataaacttatttttattttgggcataacctttcctgatgaaaccatttgttaaattgaatcaatgacaaaaaattttccaaaaccattgaacaaaatttgtttgtccaaagtaccaaaaacaaaaccccattccccccttttttctaaaaaaaaaccttaaaaggaaatttaacccaccgggttggaattcaaaatcattttcgcgatttccccccaccaaattcattttcaatcatttaaaaaaaaatttttgcaaacaaatctaccgggttttataattttcccctgaaaacaaaccccgccttttgggggttaccggaaaggggttttccaccttttgttccccccctaccttttttttcccaaaataaacccccttggggaaccaaaac

SEQ ID NO: 56983 - DNA, 302 bp, Glycine max
  Clone ID: PAT_MRT3847_22466C.1
gggcacccggggctttaaaccaattgggttttggtagggatgagaggtcttggaaggattggaggttaagggaagggaaaatgggaaggtgggttttgtggccaatttggggttacttggttaaggctttggtaacaggtgtgggccattcccaaaccttcttagatcattgggttgaccccggccccaacacctttttgcccagtttaaagttcaattaaaggtttaatataatattctttaccttttgggcctgggttctggttcgtttggaagttccaaaagttaaaccactttttttt

SEQ ID NO: 56984 - DNA, 231 bp, Glycine max
  Clone ID: PAT_MRT3847_22467C.1
acctatgctattccatttcagggtgcttttggaaatattggctctatttagtttgagaaaatatttttctgttttagtttcatgatttcactaattactaataattatatatgttggagatgaggagaagaacgcaaacacactctagagagaaaatgagaggaatggtagaaaatcttattgatcacacaatcacttgtgttctctgtgttagtcataggtatttatacg

SEQ ID NO: 56985 - DNA, 965 bp, Glycine max
  Clone ID: PAT_MRT3847_22468C.1
gttttggatttggttccctctattgatctcatccctgccaaattggggagaaagggtcatgtttgttttggccagttttgctgtttgctccatccaacaccttcaattttgtttgaaccatttcgcagcagatgtgtatgagggcccaccaaatggcaatgactggtttgagaagcaaactggtggcacattggacatctcttgctctacatggatggattggttctttggcggcttgcaattccaacttgagcaccatttgttccctaggctcccaagggcacaattgaggaaaatctcacctttggtgattgacctttgcaagaagcacaatttgccttataggagtttgacatttgttgaggccaatctttggactcttaagacccttaggactgctgctctccaggccaggaatctcagtaacccttcttcccagaatttgttgtgggaagcttttaacactcatggttgatttggatttttgaaaagattgatgatcatcaatcaaagtttctctcttttccacccttttgaaagactattaattaattatcaacatcttgtcaatttattagatctcacatttcttaattgggcattgaatttttaatctcccttttcttgggtatggaataaaatgatgatcacagcttgttatgcaaaattcagatcaggttcagaggttacaatctggtgggttcggcaagaatctcttacttggaggagcgcaacttggatgatttgtttttttggtactaattgcgttgcttattttatatttttatgatattttctattcttttttggtgaagaatttttatgttgtaaacccaacctatgtagaacaattattttcatttaggtgtgcaacttcgtgctgagtttactacaaagctgggtccacccgtagttgcttccacgtgaaaatttcgtacataataataaatcaaaataacctgcgt

SEQ ID NO: 56986 - DNA, 2356 bp, Glycine max
  Clone ID: PAT_MRT3847_22469C.1
gtttctcataaaaaaaaaaacagttagacacgaagatactcacaaagagggagattgaaggagggatatcagatccctatttgtatttggggttgtctttctgaacaaccccatcatatatcattaagaggggtatcaagatcaatccttgattagcaagatcataaattttcattcatatacacaatttacatatcgtaacaagatcacatttgttttgttttgtgttgtttgtgttgttgttgtgttgttgatctcataataacaacatggagggtgagaacaagaagtacatcacatctgaggagctgaaggagcacaataagccaggggatttgtggatttcaatccaagggaaggtttacaatgtttcagattgggcaaaggaccaccctggaggagaggttcccttgttgaaccttgcaggccaggatgtgactgatgcattcgtagcataccatccaggctcagcatggaagtatcttgatcccttcttcacagggtaccacctaagagatttcaaggtctcagaggtgtcaaaagattacagaaagcttgtgtctgagtttgtcaaaatgggtctttttgagaagaaagagcatgttactctttacacactgtcctctgttgctgtcatgttttcaattgttgtttatggtgtcatagggtgcagtagtgtgtgggctcatcttggtgctgcccttttgttgggcttgctttggatgcaaagcacttacgtgggtcatgactctggccactatgaggttatgtctagccctggctacaacaaattggcacaaatcctttgtggcaattgcatgactgggataagcattgcatggtggaagtggactcacaatgctcaccacatctcatgcaatagtcttgactatgatcctgatctccagcacatacctgtctttgccgtgtcgacacggttcttcaattcaatcaaatcttgtttctatggaaggaaattggtgtttgattcattatcaaggtttctcatcagctaccagcacttcacattctacccagttttgtgctttgcaagggtcaatttgtacctccagactttgttgctgttgttctctaggagaaaggtgccagatagagcctttaacataatggggatccttgtgttttgggtttggttccctctgttgatctcttcactaccaaattggggagaaagggtcatgtttgtgttggccagttttgctgtttgttcaatccagcaccttcaattttgtttgaaccatttctcagcagatgtgtatgagggcccaccaaatggcaatgactggtttgagaagcaaactggtggcacattggacatttcttgctcctcatggatggattggttctttggtggcttgcaattccagcttgagcaccatttgttcccaaggcttccaagggcacaattgaggaaaatctcacctttggtgattgatctttgcaagaagcacaatttgccttacaggagtttgacatttgttgaggccaatctttggactcttaagaccctcaggactgctgctcttcaggccaggaatctcagtaacccttcttcccagaatttgttgtgggaagcttttaacactcatggatgatttttgtgaaaagattgatgatcatcaatcaagtttctctcttttttttcccacccttttgaaaagcttttaatcaacatcttagttgtcaatttgttagatctcacatttcttaattgggcatggaatttttaatctcccttttcttgggtaaggaataaaatgatgatcacttgttattatgcaaaattcatatcagattcagaggctattctggtgggttcagcaagaaatctattacttggttaatctcccttttcttgggtaaggaataaaatgatgaccacatgttattaagcaaaattcatatcagattcagaggctattctggtgggttcagcaagaaatctattacttggttaatctcccttttcttgggtaaggaataaaatgatgaccatatgttattatgcaaaattcatatcagattcagaggctattctggtgggttcagcaagaaatgtagtacttggaggagcgcaactcggatgacttgttttggggtactaattgctttgcttattttatgtttttatgattttgtatttgtattcttttatggtgaattttttatgatattgttgtaaacccaacatatgtagaagaatcttttcatttaggtgtgcaacttcgtgctgagtagtttactacgaagttgggtccacccgtggttgcttccacgtgaaaatttcgtacataataatacttccaaattcgtgttgatgtcttcctaacccagt

SEQ ID NO: 56987 - DNA, 455 bp, Glycine max
  Clone ID: PAT_MRT3847_2246C.1
aaaaaagggggaacctgtgggctgaatgcccattgggggggaaaagaaaatcccaaaacatgctaacattttccggggatatttcagcccccctaaaggacatatcaaaatcctcataagaacactcatcactagacggggctttaaatgggaacatggaaaaacaaaacagggatcacaatcattatgaaaaacaaggtgccaataacgaaaaaatgggggggggaaactttaatttgggaaaaatttcttttaaatggaacatagctcatccttgcttgaagcattttcccccattagtttttaaaaaaaaaacccacccccccaaattatttctccattttttccatcccaggggtttgtctttacaattgggggagttccttaaaggggcaaattccctttgcctccacgtccagtttttttaaaaattctataatttggccaagttcaaa

SEQ ID NO: 56988 - DNA, 127 bp, Glycine max
  Clone ID: PAT_MRT3847_22470C.1
cttctttaccacccattacgcagagaagggcacatcctaaatacagctcaagcccccactgaatgcagtttcttggaactcttataagataataactaataagctataagaaaatggtcacaacttt

SEQ ID NO: 56989 - DNA, 370 bp, Glycine max
  Clone ID: PAT_MRT3847_22471C.1
acgagatgaaatgaacgccttaagctttagaggcatataaaacttgcaattcatacttagagacctccatccatagcctacattccaaattcatataccgtttgccttgacctgtataaacgatctcgataaaagatacacgagacgcataatgcggcagcgtcacagagcgatcaaaatagagttccagatgagaaaagcactgtctgactgcgctgcatacagggatagacccaacgaacgtgcttgagcttgcgtgagaatgtatgtgcttgacagtgacattgttaagcttgtagagcgctacaatgagagttagatatcctcatgatacatgctataccgatcagacctggtacccattgaacat

SEQ ID NO: 56990 - DNA, 428 bp, Glycine max
  Clone ID: PAT_MRT3847_22472C.1
ccgggagacatctctacctacggtgctcctacgatgcttctcatctgctattttggattgctccctcttatgcggagaggcatgttgcactctgccctgtggaattctccccagaagacaagggacctggtttttcccacttgcccatggagtgagaatccacatggattgatccccaaagatgcactcatgtgatgcaggcaacgtttccactattatgacgatggcatagctctcttatcgtctcgctaatacatccggtgtcacctactcaccataactatagtctgatgctaggaagcttggaatgagtattatgtgaacactcttgagacctgcctgttacttctatgaccgacctacacatcagagatgtgaatattaatacttgagatccaaccgtatgtgtggaaattcttgcttcctat

SEQ ID NO: 56991 - DNA, 477 bp, Glycine max
  Clone ID: PAT_MRT3847_22473C.1
atataaacaaactggaagaaatagccataaactaataaaacgttcaccctaaaggatgtacaatggcatcaccctagaggcggccgaccacacagctataaaaaacgaacatttgaatacccactcccaagaactaaagccgcataaaagtttataaaacactaaaattaaacagcaccctttcccttcttcctctggagttactatatggaaaactacacctccttacctccaagaatgttcccatgagccctgccacattggccaggacgagaagaaataccggccaacaatggcccaccaccaaattgctcttaaatgtgggagtcaagaacacgatctttctggcggatgtgaagtactctctgcacatgggtactttccttaagtacttgaacagccaactgaccttgctcagaagaatacttgttggctgccaacacttttttttctaccaatttcaacaccatagtgccc

SEQ ID NO: 56992 - DNA, 311 bp, Glycine max
  Clone ID: PAT_MRT3847_22474C.1
ctgctagaagaccacagattgggaatcgaatagaggttatagttcttaaggtctgggtcctccttcgtgggtggcgatgatattcttctccttagcggatactcagatccattgagcaaactcatattattaatccaaaacctctcagatcctcggaggcggcgttacttaaatgaagtcctcaagccgtctctttacgatcggactgttgacgtcgttgtactcctgcaacattgatgtactgatgctcaacaaggaccttctcagcaactatggcttcaagtatcctatcttactcaccatgtgccaca

SEQ ID NO: 56993 - DNA, 160 bp, Glycine max
  Clone ID: PAT_MRT3847_22475C.1
ctcgagccgattcggctcgaggcggaacaaggctcttgaatccttcaaagtaaataacggcatgaataactaaatgcatgacatccaagttttatgttgtgtgatgctttaaaaacttattgaaaaatatcttatctttgtttaataaactgtgtttttg

SEQ ID NO: 56994 - DNA, 310 bp, Glycine max
  unsure (1)..(310): unsure at all n locations
  Clone ID: PAT_MRT3847_22476C.1
ctccggcggcnggtcgtcgccgcgccgtgagcgcggncacggccganaggaagaggaggagcgggaagaggagcaangcggtggcggtgggcaaaaggcgaggagctacaggcaggtgaaatcccgnctcagagagggctccgtcatcgtgatcccggcggggcacccgaccgcgctggtcgccggcgaagacaagaacctcgccgtcctctgcttnnaagtgaacgccagcttcgacgataagtgttctcgcgggacgaacagcgcgttcagaagatggataggccggcgaactgctggcgttcgggcg

SEQ ID NO: 56995 - DNA, 814 bp, Glycine max
  Clone ID: PAT_MRT3847_22477C.1
tacggctgcgagaagacgacagaaggggactacacagagccacagtccaaagaatataagaagaggaaagcgaattcccaagcatccattcatcagagaaaccgcaaaatggcttcagtagcgactaagcagcaagagggtgagaaaccggccaagagaaaaccggttttcaccaaagtggatcagctgaaaccgggaaccaacggtcacactctggttgcaaaggtgttgtcctccaacactgtgttgcagaagggacgaccctcttcttcgcacaacattcgccccactctcatcgccgagtgcctcatcggcgacgacaccggcaccatcatcttcaccgcgcgcaacgaacaagttgacataatgaaaaccgacaacactgtgattcttcgtaatgcaaagattgacatgtttaagggatcaatgaggcttgctgttgacaaatggggccgcattgaggttactgatcctgcaaaattcatagttaaagaggacaacaacctatctctggtcgaatatgaattggtgaacgtggctgaggaatgattccacagaagagtgcaagtatggctttatgatctgtttatgatacaatggatactggtgatcatgaaggtaaaacataactgttggtggatgggttggtatacattcttacttctgttagctggtattttcctataacatgtttgacatcttttagtgttaagttgatgtcacttgaacaatgttgtgtccgtgatcaagttttgctatcatctatgtaagcaactgtatccaatgaacttgagaaaagtataatatttttgtt

SEQ ID NO: 56996 - DNA, 156 bp, Glycine max
  Clone ID: PAT_MRT3847_22478C.1
agagaaactagattaaataattcatcagcaccagcaacatactcatatggctatagtagcaagaatccaagctacgttgcacgttagcccatgtcaaggaatttaaaccctatggtggattcatcagcctcaaactccatgtctatgattgttaac

SEQ ID NO: 56997 - DNA, 661 bp, Glycine max
  Clone ID: PAT_MRT3847_22479C.1
ttccttctcctcttatttgagttcatctcatgttatctctttttcactctattcattcattatcaaatatcccatcgtattgatctaggtgtctttatttgtttctacaagtcaacggattctagtactcttaagtcttggttgttgagtgagtaacaaaacaatccttttatcaagggaatctaactagatgattgagtgagttattggagactattacctgtaaaaaaaataaaatcttttcgcggttattgtcatgattaagagtggtgtcctattcctatctatctattatctaaaaccatcactcgtcagtttgagttttgctcaacctatatattgccaaaagaaattaccactttgttgttcaaaagttgtgctaggaaaaatattttagtgaatttggtcatttcatttttttctggagaataaataataataccttccatttcctgcactgaattgtgttttcctctgcctttgtaaaaaaactgtcgtactaaagaaataagaggatcctaattgaattttggcttcccatattcacaaagtgcttcaactacctaacagcatcttttcaataacaggggcacatacaattggcctggctgaatgcaaaaatttccgagcacacatctacaatgattccaacgttgatccc

SEQ ID NO: 56998 - DNA, 155 bp, Glycine max
  Clone ID: PAT_MRT3847_2247C.1
tttcttttttgggcacggaaaatgcgactcacaatagcaggcgaaacgggggggcttggttttttaaccccgaacgaaatatccggtcacagcggggccatcttacaaacacaaaagcagatattgtatagactgaagagggaaatggggcccgg

SEQ ID NO: 56999 - DNA, 1470 bp, Glycine max
  Clone ID: PAT_MRT3847_22480C.1
tacttaacagttttcctggcaataatattttccacaatatgtatttgcattattatgcatctactgatgcaattttgcttcaaagcatctctagcatgtgattgaaacactgaactacatattggagatccaaatgatccagcccaggagaaaatggctagagaagtttttgatagaaatatttgtgagaaagagtgaaagacagatgtcgttttttcattgcagaagtctgattgtattcaactatgaagagaatgtgttaaagcaccagtacattaatgtatttctcaattgaagtagtatggacacattccatatgtatgagattcaggctccatctattttgctaccacaaaaatgtacaatgttgaaatgttcagctggttagaagttttgcatcccatcacacgtcattcttccttcaaactttccaagttgttttgatttcaaaatctcttgccagaactcattccatacaatgaagcatgtaccactaaggtgctcaaacttctgttatgcatgcgagtttgaatgtttgatctctgagaacatcatggtaaccttccacacagatgaaaccaccacctcccctcttatgttttgcatcaaaagctttgaatgtaagatttcctttcttccagttctttcccattcagtgcactagtgtaagtgcaaatcagtagtatgtaacagaattcacttctaataacatgtacaggctactttgagcattttgattactgaccaaacttgaaaaaattcatagattcaagcaacatgggaaattcaacctgtacttattgggataaacctttcagaagtgccccacctatatatatccatctttgcaccaaacacaaaagtgattacctgcctagggagcagtatattacaatttcctaggaagatctgagatcgtcctgtgtagttgtcctgatatgcatggcttttcatcctctgtgtttgattacagatacagcagtgctaccgccacaaaatccatcagtgtcaatgttcttagcaagcttttcatctattcactgaagcacctcataaaggttccctcccatgaaggaaaggacatgttttggttatcctcaacatggacatcatatgactgccaccatttgtagtagaaccatccaagagcatcccattcttctttgtgattccaccatactatggccatatctacaatatcagtatttacatgtcaagattatgaaaaatgcaggtgctacaagggatgtctattgttcccactaactttggatcaggatagggttatagcaggctaatcttcgagatcaagcatatggatgagcaatcatcagccttgaaaccatgcttatatttccaagcccgaacagcatggttgactaacaatttggctgccaaggacctttttggtgctggagcaactatgtttattacttcaaggtttgatagcacaatcccaaatctcgagcc

SEQ ID NO: 57000 - DNA, 452 bp, Glycine max
  Clone ID: PAT_MRT3847_22481C.1
ccggttggcttttcggtggaggccctttttttttgaatttagcaaattatccttgaagcggccagcataaatgacggggtaagggtataacatcagatttcctacattgtggccacactttacactcaacagcataagactgtgcagcacctactcataattgtcttaaattctacgcatatggaagactttttatgttggaaagattgcgctcagctcactggattatgttacttcaatattgcctttgaagacaggcgagtatgatttccatttgagctctagaccgtgaaccagatgagggaggactgtaaaccctttgtggaattcatgtgctgggcgacaaagataactcccatcaccactctgagacgatcttctctcatgctgaggaacagagcaccctggtgtctgggtcgaacaaagccaatgtctccatgatacgtgacaag

SEQ ID NO: 57001 - DNA, 170 bp, Glycine max
  Clone ID: PAT_MRT3847_22482C.1
tcaaattcagcatttgattataaccacggttcatatttacaagacaggggaaattcggggaaacttctctttcgcgggacatcgcccgaaaggggtaaaaatttttttaacaccgggcttgacaaatgcgtgggaacccgcgccaaatttacatgtggggaagggggacc

SEQ ID NO: 57002 - DNA, 461 bp, Glycine max
  Clone ID: PAT_MRT3847_22483C.1
cagccacataggggccttcggaattaatgtacaggtctgttttagcatacctgatacatcctcatcacctgaaggaactttgatcaaatgtggagctagtatgaggacaagccgctaagatgtgtacagaccacaactagttcatggataagcgttctgaatatcagacggagacttatggtgcttctttaactctcgagcagttaccaatccaaatggaggctaataggtcatacatctatggctgatgatgattgttcacgtgcaaaccagcacagataatatcagaccggatctattcttgttcagatagtgctgatgtcccaaaagggaggccgatggctactgtagactttagacatggatgtgctatgagcgagatacaatgttcatgactgctgcctccactggaagggccagggcacatgcttgaagcacatcttttggactcgcttatggac

SEQ ID NO: 57003 - DNA, 346 bp, Glycine max
  unsure (1)..(346): unsure at all n locations
  Clone ID: PAT_MRT3847_22484C.1
aggcgtncgaacacctccgagagggaccctacgggggcttcagatccaaccaattgcatagttaccaggaacaccccgcttgcctattcagatctatgtaactattgaactgtgattgtggtcacggtcagcacctccttcgatatctataggatgaacgaccgaggggcaagagcaagggcagcggaaagccttgaagaatgatgtcacgacatatgaccgcgtattaatattatctgatgctggctccagacgaagatggatgggaacgcatacatcgcacaaggaggcgctcctacagacctgaaacgatgttaccgctcacaacatgtcgacactggtactc

SEQ ID NO: 57004 - DNA, 1891 bp, Glycine max
  unsure (1)..(1891): unsure at all n locations
  Clone ID: PAT_MRT3847_22485C.1
ccacgcgtccggcgcgatccgagagagacctacgtaaggtacggggagagggaggataagcttgatgggattgcggtcgcacgtgtggagaggtacgagagggagcacatgtgcgacgcgcctgccaacacgagtgttgggtggagggaccctgggtttatccacgacgccgttctcataggtttgaagaagggacagaggtattattacaaggttggaaatgataacggaggttggagtgcaactcaaagttttgtgtcgaggaatagtgattcagacgaaacaatagctttcctgtttggtgacatgggaacagctgtaccatacaatacgtttctgcgaacgcaggatgaaagcatatcaaccatgaagtggatcctccgtgatgttgaagctctaggcgacacgccagcctttgtgtcgcacattggagacattagttatgcaagaggttattcctggttgtgggaccattttttcgcccagattgaacctgttgcctcccaagtggcataccatgtttgcattggcaatcatgagtatgactggcctttgcagccatggaaacctgattgggccagttatggaaaagatgggggtggtgagtgtggtgtgccttacagtttaaggtttaacatgcccggaaactcttcagaactcactggaaatgctgcagccccaccaactaggaatctttattactcatttgatatgggagcagtacactttgtgtatatttccacggagaccaattttgttcctgggagcaaacagtacgacttcttgaagcatgatttggaatcggttaacaggagcaagactccttttgtggtggtgcaagggcacaggcccatgtacactaccagccatgaaaatagggatgctgctttaagaggaaagatgcttgagcacttggaacctctgttggtgaataacaatgtgacacttgccctttggggtcatgttcatagatacgagagattttgtccactgaataacttcacttgtggtgttaatgcgggtcacaatgcaggggacaaaaaaggatatactgttcacattgtgatcggcatggcagggcaagactggcaacctgtctgggaaccaaggccagaccatcccgatgatccaatctttccacagccaaaatggtctctgtaccgcggaggcgagtttgggtacacaagactcgtcgctacaaagcagaagctcgtgctttcttatgtgggaaaccatgacggtgaggtgcatgatcagttggaaattctggcatctggggaagttgtcagtggtgacggaggctgtagtattgctgatgctaattctaaagctggaaatgtgattgtggaatccacattgtcttggtatgtcaagggaggaagtgtgctgctgcttggtgcattcatgggttacgtttttggttacgttacaagtgcaaggaagaagtctgaggtgccagagagcaattggactccggtgaagactgaggaaacttgaactgtagaggaaacttgaactgtatattacagttactgtttaccaaattttcaagtaggtcatgaaggttcacagaaaagaaaaacaagatggcatgaaggttttgaattgtgagatttccactcgtttttgtttgattaagacacctaagctgtcacctcatatacttgaggacttatctttgtatatatgcatttttttttcttgcttaattatttcttttaaggcatttcatataggaacttgtgttgttgtacattattcaaggtaatatgatctgttggatgagaccatacactattgtaacaaagaaaaaaaagtgttagatttgattgtactattgatacaccaactttgatttcgctaaannnnnnnnnnnnnnnnnnnccccnna

SEQ ID NO: 57005 - DNA, 250 bp, Glycine max
  Clone ID: PAT_MRT3847_22486C.1
acaaaaaaacaaaaaaggggatttcctaaacaattactacaaatgagtacgacgaacaatttactactactaaactcctctttaatactacttcacattggagcggttacaactatacgaatgaaactgatctctttcaaaagacaacagacatcaacttatgatgataaacactatatcaaaaccatcctgagatctctacatatgcacacgcttaatacctccttaatgaaggtgacaagatattaaa

SEQ ID NO: 57006 - DNA, 336 bp, Glycine max
  unsure (1)..(336): unsure at all n locations
  Clone ID: PAT_MRT3847_22487C.1
aatctcanncncgcttacntaagctcgaaattccnctcgacataantngnannaacctnttnncaanannnngaancttgatcagtnttggnncgctcttcctnntcctcctcctgcctncgccangctncatgcgnaacgttcaganccacaagacnnaactctnnatcatcncaagcngtcnntccncgcacncanncgccntctactcngntcganncnaactgaancngatcctcttcgnnagcttgatcccnaacgaanatnannccntgntnccatctncacgaccagcacntcngtccagaanttccccggattnngcgacagatcctn

SEQ ID NO: 57007 - DNA, 220 bp, Glycine max
  Clone ID: PAT_MRT3847_22488C.1
gcgtcgccacgcgtcgaccgttcacatattgagtcagactgaagctttctgatgtagggtggtcatgggcgttagtgtggagcgattgttggtaattcgtacgaacgaacctacctgtaatgcttgtgagtacctcacgcagttttaagactatggcgttagcacgagttgagcaatacagtttatgccttaatgttgccgacgcgcctcactgtgattc

SEQ ID NO: 57008 - DNA, 340 bp, Glycine max
  Clone ID: PAT_MRT3847_22489C.1
ggctgcatatagcagtttcgataggaaaagttccatgattcggctaacagaaaatggcggggagtccaaacatttttggtggccggaggagcaacgtgttcgatcctttctgacttgacatgtgggatccctacagggatgttccttacccacattccgtctctacttccttacctgggtctattcgggcaaatcttgcgctagtgagcactcaattggattgcgaaggagaccccagaggcacacgtgttcaaggccgctattcccgggctgccgaaggaagaagcgctggtgcagattgaagatgataaggcgctatagataagctgagagaggaacg

SEQ ID NO: 57009 - DNA, 368 bp, Glycine max
  Clone ID: PAT_MRT3847_2248C.1
ctcattccctcagatctactgcacgtgtatgggaccatagtagcgagggctgtgcctaaatatctctatactgatatctctcatctcatctatatctcgtattactgccttgctccctatctggcgaccaatatatgatgtgatgaaacacagctatagatacaacgtgcatgtatgtggctgctaatcccagagctactaccctcagagatgactggttcgaaaccccgctactgggacaatgtgtgataggatattataccacagaaatcaaagacgcaattatcagaccgaatcgcattacatgctacggagctgtggtacattcggccgttgtttaaagcagcatagccggacactagcttcaa

SEQ ID NO: 57010 - DNA, 653 bp, Glycine max
  Clone ID: PAT_MRT3847_22490C.1
ccacgcgtccgcttttttaagtgatatcctcgtcattcatcatctctagtgtcatgaaaaaccatagtaccaaactactacttgggagccaaacttaggatctgacttaaaaccaaattggaaccattattgggttctgttctgttctgtgcttgttgggtttcctaacactcttttgtgtgcctaacacatttggttctcactttttctcagatggggttctcttgtttgagtggtttttaggtggactttgttgtttactactatggatttctatgtgtgtgtgtgtgtgtctttctcttattgtttggatatgagggtcttttaataatgaaggtgtttttattggttttcttttgggaaaggtttatgatttggcccagttgttgattctgcttctggctggtgttttaaaaaggcaagaattattatggcgggcgaggttgaggaatcattcagcatgaactttcaggtagattctatacttccggttctatctcatttgggagatttgagaatgagactttatcttgggaaagaaggtcctctttctctacaataagtacttggaggaggttgagaaatgttaaaaccaggttcagttattgagaaagaggcatattttgaagctcatttcaagaagaaggcatatt

SEQ ID NO: 57011 - DNA, 492 bp, Glycine max
  Clone ID: PAT_MRT3847_22491C.1
gcgagctaataactcggcctcccgaacagaagcagagatctccgcgaggcgtctcagccgagaggttcggtcccaagaggctgaacgtgcacacttttccattccttaagggacactccggctctggcacgaatacataaccatgtcctacttcgagcacgtggacgtcatagacgacgagggccatctacttgtccgtatggcctgcatcgtggccaagctcatgctcaactgtcaaaagagcgtcattagttcgcgccaaggctctgaacatataaaaacgagtgtttgccgcgcgaagatcagataccacgcctacctgcgcaagatgacctcgaacaaccacacccgcggtggacccttccacttacgtgcccactgcaagatcttatacaacgcctttcaaggcatgaatccccagaagaccgcccactgcgccgacgcccttgagcgcatcaaagtcttagagggcgtctcagctccctacgacac

SEQ ID NO: 57012 - DNA, 1098 bp, Glycine max
  Clone ID: PAT_MRT3847_22492C.1
gacggatgggagtagtcgacaaacggggaacgacgtaagcattaaccacagaagttgtgcttgttcgcaaaaccatcaatggcatcagcattatcttctctctcctccacctcttcttcactgttacagcacagtttcaccggaaactcgaaggctcctcccactactcaattccccaacaaaaatgtacgcttttcggtcttcgctcaaaagaaggcaaagaaacttcgaaagattattttgaaggaagatgtggcttatgtaggaaagcaagggcaacttcttgatgtgaaggctggctttttcagaaattacctgcttcctatgggaaaagcacaacttgttactccacagcttctcaaggaaatgaagatagaagaagaaagaattgaggctgagaaaaaacgggtaaaagaagaggcacagcaacttgctctaatttttgaaactgttggggctttcaaggtgaagcgtaaaggtggtaaaggaaaacaaatttttggaagtgtcactgctcaagatcttgttgacataatcaaggcacaacttcaaagggaggtggacaagagaattgttgatcttccagagatcagggaaacaggagaatatattgcagagttaaagcttcacccggaagttacggctagagtgagggtgaatgtttttgctaactgagcattgttatgctctaaagttcctgtactaaatggacaatttggagctagcaacttgcattgatacaaggtgcataacatcttatgatgataaatcttcagacttcaagcttcaagcagtctgtctgtactctgtagtcttgtaatcatgccccaggctcagatgaggaaggattcctaatgggaactgctgcttatttgaacatttttttttgttcatacccaattcttgaatatgtctattcaattttcaggacaatgtttgtaatgtaatgtactactttgttggtggtaaaagattttttttctttggtccttcaaaaaaaaacataatcactataaaaaaataaaaactataacaatatcacacaatattaaaattccttgaggtgggggggaaaataaaaaaaaaagggggggcccc

SEQ ID NO: 57013 - DNA, 225 bp, Glycine max
  Clone ID: PAT_MRT3847_22493C.1
cgaagaagctgagtgtcaccgggcatatgattctgctactgatgtttatatgtcttcttttgaccgctcaacgccacctgaggaagttgctttgagggaagcacatgaacaagcaaaacaaaagtcaatggctgcttttaatgctattgccataagagttggttcagccaggaagacatatgaggggctccttcttaaattcttcaaaaaggcatttgaggatta

SEQ ID NO: 57014 - DNA, 339 bp, Glycine max
  unsure (1)..(339): unsure at all n locations
  Clone ID: PAT_MRT3847_22494C.1
actttgtttttaccctgtcttggggnnggggtnnaccaaaaacaggatctaaattcaatgttattattttgtatgggccctatttacaacagactaaaatcactgaaggaatccaataatgaaagaggggccaaagccgttatgcttttttatgaattaaaggggtacttgaacaactctttaggagcaaattttcaaatttttcaaatccaagggaaacttgtcacataaaaattgaaatacctcattatgaaaagggcgccccacttttctgaaacaacattcctttgaaaatcttggataaccaaaagggtttctcccttggggaaaccttgtttt

SEQ ID NO: 57015 - DNA, 377 bp, Glycine max
  Clone ID: PAT_MRT3847_22495C.1
acgagaaagtgtaagaatagtgacatttgtaaggattagaattgaaactatacccaagggtacttgaaaactaacctgcaatgggtagtatttctatcgatcaaataactgtctgggtactattgtgcttactgcactctatacctactacacctttgtgtatacgtacaatagttataattctatacatatttgatattttataactagaatttgaaaaatatttgaatattttttaattgagttagatgttataatctacattttgctttatttttttgtagttaatttagtattaaaataatgttattttattagttcattgaaaaagctctcgttaaaagatcatatttcatttaactaaagcatgaactatg

SEQ ID NO: 57016 - DNA, 534 bp, Glycine max
  Clone ID: PAT_MRT3847_22496C.1
ctccattcgcgaatggcatcctccgaatcattgtatgttacatcggtcgacgggaacagtgcattaccttcatcgcacacaagcccgcgggcttataaggcattgatctatatgcggaggatctggtgccacccaagtctgtctgatgaacttaacctacagctgcatttgaatgtgcgtgatgagagttcagacatcctcgtatttgaggtttctgagatcacacttcaatgcataaaatgggctgactccttctgcatagcatttggaaatttggctgatgataccatcaattttgaggcttttccccacaagctggtgcagtttggagagattcaggaaaaagttgtattgaaattttcacagggggaatttcttacagcttggtcaactcacgtgcgtacatgaacaactctgtcggctgatgggtctacatatttgtatgcaatggtgcatgatacttcagtgtctacaataccacgtgattttgtcattgaagtgaagttgacaaccataaacaatatgtgtgcatat

SEQ ID NO: 57017 - DNA, 324 bp, Glycine max
  Clone ID: PAT_MRT3847_22497C.1
ttttttttttttttaaacaacacaaaaatagagaaaaggaaaccacaatgaagtggtcccggaaattaatgggagaacatagggaaaacataatctatagaaaaaaaaaaattaaaaccttgtaaaagaccaaagcacagacttgtcattaacggcaactggccgaggaaaaaatgaggggctggaacggggcgatttaaaataaatagggactaaaggaacacacaagggttctaaatgggagctcaacaggttagaggggcggtgcaaaaaaacctaaaacaaaaaagcaaggaaaatgttcgaaccatgtagggcgtcacc

SEQ ID NO: 57018 - DNA, 691 bp, Glycine max
  unsure (1)..(691): unsure at all n locations
  Clone ID: PAT_MRT3847_22498C.1
ccacgcgtccgatcttactatactgctgtagcatttttggggtcagttgctatttgatattgatgactattctgtatggtaagtaggtacacttagtttctaacctcccatctaaattacaatgtaattcttgtagtcaaagtgactaacaatgaaaaagccattggcataaactgccgcttcatacatctattttgggcctaattttagtcaacatgttcttagtcccttgtaagttaaagatgttttcagggttttagtttggtttgattaaaggggttgattgtttgggaatagacctcctattgggagagtctatgagaggatgcatagggaagctgtagggcatcataacccttttagttagttgtatgaaggggttgattgtaaaaagtggcagtgattagttagttgctagagactaaatatgtgaaggtagggtctgttgaagggcatacagattgtaatttgggaacttgtgagtgagttgggtgactcaaacttctcagcagcctagagtaatcgttcttcatctgatcttaagtctgtttcacattgcagtcttggggattagtgataaaatcattcttgctttcaattcttggtactggtttctatcattgatgcaatgcaaatatggctgangcatggatacctgcatagccttggagtgcatttttataatgccttt

SEQ ID NO: 57019 - DNA, 490 bp, Glycine max
  Clone ID: PAT_MRT3847_22499C.1
tcccaataatttacgtactacatgttagcttgcacgtctaccttcttggggggggggggggggggggggggggggggggggggggggggggggggggggggggggggggggggggggggggggggggggggggggggggggacccctaaaacccccggtttttggggggaaacccccaaaaatttaaaatttcccttttataaaaagcgggtgcaccattaatatgcccaattggaaaattttccaaattttgaaaaaatcccaggtgttgaaaaaatttaatttaaaggtttattaaaccgggccgctaattaaaagcaactattttgggggattgggaaaagtagttattttagaaatgaaatttgtttgcccaaatggcctcggggtccttaaaatttggtaatttctggttttgcgggggataatttttaaaagccctttttggaggaaccccagccttaaagcaaaaatttcccccgggtaaaac

SEQ ID NO: 57020 - DNA, 281 bp, Glycine max
  unsure (1)..(281): unsure at all n locations
  Clone ID: PAT_MRT3847_224C.1
acgtcgcangcacgcgtacgtaagctcggaattcggctcgaggnnctatgttgataacncngagaagatgncngcangctcanggcatgngttatgacggcantganncggnggcatncggangcnnaaatnnagtatnngcngaagtttnatgnggaactcgncaanctcangganaagtaccaccccgttggcnangttcactggtatcntaacatnggggcntttncnnnnanangnnnanacngattntcncngccaaatagctagcnacaataatg

SEQ ID NO: 57021 - DNA, 3597 bp, Glycine max
  Clone ID: PAT_MRT3847_22500C.1
ggaagaaggaaggggtcattcatatgatcccgtgtttgtttgggtcttttctcaattcttcaaccaacccattccttccccacgcgtcattctccggccaccgtccacgacggaacgccgttaccgcttcaatattccccaaaaggcttcggcgaccgcccgtgatggataaagtcttcaacaagctccgcaatttggacgcttacccaaaagtcaatgaagatttttacaaccgcacgctcgccggcggcgttgtcaccgtcgtttccgccgccgtcatgctctttctcttcttttccgagctaagtttatacctctacacagttacggagagtaagcttttggtggatacttcaaggggagataccttgcacatcaattttgatgtcacttttcctgctgttcgatgttcaatactcagcttagatgcaatggatattagtggcgagcagcatcttgacatacgacataatatagtgaagaaaagaattgatgctaatggtaatgtgatagaagagaggaaggatggaattggtgcaccaaagattgagagacccttacagaaacatggtggcagacttggacatgatgaaaagtattgtggttcatgttttggtgcagaagagtcagatgaacactgttgtaattcttgtgaagaagtgcgtgaagcatatttgtaaaagtgctgacctatgacaaatatggatttgattgatcagtgtcaaagagagggttatgtgcaaagggtaaaggatgaagaaggtgaaggatgcaatcttcaaggatctcttgaagttaataaagtagcaggaaattttcattttgcaactgggaaaagctttcttcagtctgctatatttctggctgatgtgcttgctttacaggataatcattataatattagccatcggatcaacaaattaagttttggtcaccatttccctggattggtaaatcctcttgatggggtaaggtgggtgcaaggacctactcatggcatgtaccagtatttcataaaggtggtccctacaatatacacagacattagaggtcgtgttatccattcaaatcagtattctgtgacggagcatttcaagagttcagagctgggtgttgcagttcctggagttttcttcttttatgacatatctccaatcaaagcatccatactgcttatgtgagagcaataagatccgctgagcactttgtatatactgagaatcagtattttttgggctcctcctatcattgcccttcatataaaaacaatgcaggtagataaactaaattttccaatatcttcaactttataaggcatttttagtttttgcgttgttacaaaatcaaattctgacctttaggtaatgtacctatatatatttcacatacccacccgatatatttgtgtatctatgaggtgtatttactgttgcgggaataatagattcatcgatatattatggttagagaacaattaagaggaagatggagcttggaaaatttacatgatgtggtcaaattctgcatgagtgctctaatatcctaattgatttgacgtatttggttggctggtgcattgagtatcgtttataatatggtagcatatgcacataatgccaagggtaagcagagccgtaggttcggttgatgcatgaagtgtattttttggatcatgatttttcctttaatgtgtagcaatttctattaagttgctactttggtgggtttttaatatatggatgaagatgaggaatgcaaagagttgttgggaactttttagatatttttgctgcataatacatgacatggttgattatgcataacaaacaaaacatatcactgtcgtaatcctaaatataattaagactagaatattaaagcaatttgagaagttcacattgctgtagttttttttaatacactgcaagtgtaaggtttttatttcttatcttaacaggtgctaaccacttggttcccatggagttggctttgaaaattgctggtacgatcgaacaaattaagttttggtcaccatttccctggattggtaaatcctcttgatggggtaaggtgggtgcaaggacctactcatggcatgtaccagtatttcataaaggtggtccctacaatatacaggacagatagtgtttgtgatatccatgcttgtcgctgatgtctttgaaaaagcagcactatcttatcagcatgatgcagaagattatctcgatttctactgccttggaaagagtcaactccaatccaaaaatatttcagcaacaccaaatccatctgaaaaccgcgctttggtatcagttaaaaaattcagacgttttatgatttatgttcatgccaaaggaatggtagttgatgacgaatacgtaattattggatcagcaaacattaaccagagatccttagatggttcaagggacacagaaatagctatgggtgcctatcaaccaaaatatacatggacagaaaagaatgctcatccacgtggccaggtgtatggatacagaatgtcactgtgggctgagcaccttggcagtcttgatcattgttttgctgaacctcacaacctggaatgtgtcagacatgtcaacaaaattgccaaacgaaactgggacatatatgtgtctgaggaagagaatcggatgaggggacacttgatgcaatatccagttaagatcagcagggatggaaaagtcagtgcacttgatgattatgaatcctttcctgatgttggtggcaaaattcttggatcaccaaattcacttccggatgcattaaccacctgattaaccaaagtcttagaatattcgcctacagatatatatagccgctaagaattgcagctcaaaaaattggtaatgatggtaaagccaatttatatacacttaaaattaccttttgtatgtaaatttctgtatttgatagtgagtgcatagatctcttttaatatatatataggtgcgagtatgggactagttgagtactagactagtagtactcgttcctgcatccatcccaggaaattttgtggtaaatagccagaccctgatctgttcccattgagcgggtatccatagagtctggatataatatctatccctaattgtcatataaaaatctttagactgacaatgtatcaaaataaagctctaaatgaaagtagtacaatttaaatttgtagctagtatgaactagatgtatcgagggcttttgctactcataatcgatttgtctgtacattagggacatgtaagtttttgtctcacgcaactgattaaaaatggatttcagccttcctgcacagttatatttaccgttgtgggaacaatagatacattatggtcagagaacaatcaagaggaagatggagcttggagcttggaaaatatagatgatgtggtcacattctgcatgagtgctctaatttcctaattgagtctgcttttgacgtacttggttggctggtgcattgagtaacatctataatgtggtagcatatgcacatgtataatgccaggggtaagcagagcagtagattcagttgatgcatgaaatgtatttttttggatcatggtttttcctttc

SEQ ID NO: 57022 - DNA, 405 bp, Glycine max
  Clone ID: PAT_MRT3847_22501C.1
ggctcgagatgaattctagcattggtttgtttggcgaacaaagaatgtctatataaaatgggcgagggggcccataagagacctaattgcctcaaacaagggcttaactgacaaagacatgctccaatgactactacattgagatctgaacgaacagccgctatttaacgaactcctacgctgcctcgcagaggagaaagaacggattcgaatgatctcaagagcggatatttgcagacactttgaaacggaccgggccatcggtcctttaaggatacaaaaagggattttagatgaacaatacccggtcaggatccgagttgccaggaacgtggtcgagaaatgtgggggtttcttggggtccggactaggaacaaccatcaccaggaacgtctagaaaatgct

SEQ ID NO: 57023 - DNA, 313 bp, Glycine max
  Clone ID: PAT_MRT3847_22502C.1
tggggggggagaagagtttgctgaataagagaccatcggggatttactaactatgaattgaactttcttaatacctcacattcccaacctaaacattgctgctgtcaatctcacattcattaacgagcattcgcaaaaagagctccttaacatcctcaataatgttcgaagaaagaagtgtttagtcattgatcccaatctcagagactctctctcgcttatcatacagacatccattcttcaggatcatgacattgaattgctgcatctttccgggcacccaattaaaacttacttgctgaaagtaaattta

SEQ ID NO: 57024 - DNA, 201 bp, Glycine max
  unsure (1)..(201): unsure at all n locations
  Clone ID: PAT_MRT3847_22503C.1
ggtgtggggttttttttnntctaacctcntcctgttggtataaccttgggtttataacttattttggttcaaacttacctttgcgctttgttttgccttctttttctnccggtctccggtgctaggcccctttaacattctttccgnggttctgggcgtgggggagggttgagtaacctaccaggggaccccttgggaaaa

SEQ ID NO: 57025 - DNA, 265 bp, Glycine max
  unsure (1)..(265): unsure at all n locations
  Clone ID: PAT_MRT3847_22504C.1
gcgnncgttagctaggaattcggctagagaaaactttaagagtctttaggtttcagttttgttttagctatttatcatcattccttcttatcagagtattcgtatgggacttagatgttgtatttttattttttttcaacttctagcaaatgagattttgaataaatagaaaatgctagaaataaaggttttcttggtaaaatggaagtaggggatttgtaaaaaaaatattaatatttttgggcggccgccgacttgtgagctc

SEQ ID NO: 57026 - DNA, 492 bp, Glycine max
  Clone ID: PAT_MRT3847_22505C.1
gcggtttcttacgatactattcttggttgtcttagccgagcaggtctatttgaagaggctgcaaagcttatgcaagaaatgggttcaaaaggattccagtatgacctcatcgcctactcttcagtaatcgaggcagtcggaaaggttgatgattgtaaaaaggtagtcatgagagcaatctggttttaccttttagagtgactctgtcattgcttattatttattaatcaataccttggattttttgaaggtttaggaacaaccaacgaaaaaaaccaattttctgtataagtttcaaaaaccacaaaaaaagtgttccatgtattcttgtttagaaaccttgaaaatgtagtagatctcaactgaataaggaaatttctgatgatattaaaaaaaaaaaaaaaaaaaaaaaaaaaaaaaaaaaaaaaaaaaaaaaaaaaaaaaaaaaaaaaaaaaaaaaaaaaaaaaaaaaaaaaaaaaaaaaaaaaaaaa

SEQ ID NO: 57027 - DNA, 247 bp, Glycine max
  Clone ID: PAT_MRT3847_22506C.1
ctctcttcggaaaaagaccattaggcgcttcgaaagatcaaaccaagattgaaaagaaacaacggcatccagcgcttgcggtggatgaatacttaaaaaacaacagcaatggggaaagaataaatttttttacgcccgtggtgtggagaaccctgagccctggaatacaaaaaaaaagcgttatatcaccgatggctggaatgctacaaaaccggtgccctatacttgcaccatattgtccgatgga

SEQ ID NO: 57028 - DNA, 670 bp, Glycine max
  Clone ID: PAT_MRT3847_22507C.1
ctcacgtcatgcaccttttcctgatcaaattggtctttgtcaatggcatgtctatcttcatcaacatctcttagtaaacaattttggaatgcttgccagtggcctccatcagcatccttcccatgctcagtttcttccatatcagatgaatccaatttcttcaaagattcttttccgggttcccttctcttagaggtcttcacagattccttattatcttcatcagtttctgaggcagaatctgaatatgatccactgccagaattttctgcctttgttatgtaattgatgttccgaatgaccaccatgccagatttctgtctagctgatcgcctatccttcttcctttgatctccagtatgcaagccttccctctccatatccacttcatcctgcgtttctggttcagtattgctgtgtctactatccatggaatgccttctgcgcccgttattttgaccagcagttagtctggggtcctccataggagaataatttggctgcataaatggactgtttcctggatatgctggatagtagggaatgccttgcactggatatggtgaaaagactggaacagaaccttggggagaatgaacaggccaaggagggaacatatggtgtggaaattgaccttgaatattatcatggttgcctacagatggttggc

SEQ ID NO: 57029 - DNA, 565 bp, Glycine max
  Clone ID: PAT_MRT3847_22508C.1
gttttctttgaaacgcacagcttcaatcaccgaccacaccacccatcaacgacatgcttcctctttcccttctcaagactgcccaaggccaccctatggcaactcacttttcattctcttctcttttatttctaacttattattattatgatggtgatggtgatgttgatgatgatgtaacagttggtggatctgaaaaatggggagacatataacgggcatttggttaattgcgacacatggatgaacatccatctgcgagaagtcatttgtacatctaaagttattgataaagttcaagaagaaaccaagagccgtgcagatcgcaaaccacctggtgttgggcgtggaaggggaagaggcagagaggaaggtcctggtgggcgcccaacaaaaggaattgggcgtggtcttgatgatggtggtgctaggggagctggaggaagccgaggcaggggtggtcccagtggaaagcctggtggaaacagaggtaaatcataaatccactcattgcatgtattacccgttcataatcatttctagccttctatccctctaattcact

SEQ ID NO: 57030 - DNA, 208 bp, Glycine max
  Clone ID: PAT_MRT3847_22509C.1
gactcgctagttcaaaccactctaaacaatatggtggtgcctctactccctaataagattgttactacaatggtgaaaacattcaagaggcctcacacagacaagaaaattctgtcacgacaaactggaacagactatagggtaccgaatcccatgtaaggagaatgttcaaggtatgcactttgattccaaacattgaatatggttc

SEQ ID NO: 57031 - DNA, 627 bp, Glycine max
  Clone ID: PAT_MRT3847_2250C.1
aataaacaaactaagattactgatttacttcattgctcatacttattaggactttctccttatacacaaagaaaccaaaaatatgaagctgaattaattaatgataacaggatagaaaccattcttgctaaggaaatcttagttgccaagacacattgctaatatttactatttggaagttactttggtgtttgagggcgatggggagagtaatgcagatgcagatttgtgctgctggtgcttatcattgacattggttcttcagtgagatgatttctttcttgttgctcatttgcagaagatgcattaagaagcatgtcaactttcacacattcctctctctcctgcctaatttccttcatcattgctaccacatctttcatggtcggtctgtcatctgggcttgagttcacacacagcaaagccacacctaaggtctgcaacatctcctcaatttcggattccggccgagctcgcaagctttcatctagcacttcaactccacctcttttatgtcttacccaatcaacaatgtggagtccatcaggtattgttggatcaattggttgcttccctgttagtacctctaatacaacaataccatagctataaacatcacttttctct

SEQ ID NO: 57032 - DNA, 1107 bp, Glycine max
  Clone ID: PAT_MRT3847_22510C.1
tttttccaaatccaattgcaattgaccaaaagggagaaaagaaaaaataacagatagtggtgtatgcttggtgccaaatatacaattgtcaaattaacatctctaaatatatcaaggttgagttaagtatttcacgcattgcgccatcattacttttcattggaaggaaagaaagggaaaggcacgttttctgttaggaagggattaaaaaggagatgggggcagtctggcagagaaactttcctcgagtaatataatagcactaacatttttgtgatcataaacacaagaaaaacacttcaagttaaaagccaaggcaaggatgcacaggtaacactggcagtgaagttgctaccgatacacattaagtagttcctgtcacttgttagaatcaacctctaccacgccctctgtttccaccaggctttccactgggaccacccctgcctcggcttcctccagctcccctagcaccaccatcatcaagaccacgcccaattccttttgttgggcgcccaccaggaccttcctctctgcctcttccccttccacgcccaacaccaggtggtttgcgatctgcacggctcttggtttcttcttgaactttatcaataacctcatcaggtactcgaaggtacttgattgtattgcctcgtatgtagcattcaggcatcctccaaaatctatctccgtctttagatgtacaaatgacttctcgcagatggatgttcatccatgtgtcgcaattaaccaaatgcccgttatatgtctccccatttttcagttccaccaacatagggtggccttgggcagtcttgagaagggaaagaggaagcatgtcgttgatgggtggtgtggtcggtgattgaagctgtgcggctcgtagttggaccttgggttgggtcgatcggtccgcctccggtgtgcaccggtcggctcgtcccttctgccggcgatgcgctcctgtccttaactggccgggtcgtgcctccggtgctgtccctgttaatcattactccgatcccgaaggccaacacaataggatcagaatcctgtggtgttatcccatgctaatgtatacagagcgtaggcttgctttgagcactc

SEQ ID NO: 57033 - DNA, 1450 bp, Glycine max
  Clone ID: PAT_MRT3847_22511C.1
gatctatctgtcctgcataattttactacctcacctcgaccattgcttcttattatacatcacatctattgtatggccactgaaatattatagactgcgtactcattcataacatatcagctgtacgtgtttctgatatatatttgcctcttagtgggtcgatattaattgaagatcatggctgagggaaaaacagcaactcaaaaatctcttcaggattttgatcctcaaaagacacccagaaggaacaagtatgctttcgcctgtgccattttggcttccatgacttccatattacttggctatgatgttggggtgatgagtggagcgattatatacataaagagagacttgaaattgacggacgtgcaaatcgagatcctgctcggaatcatcaacctttactctctgataggctcatgcctcgccggcagaacctccgactggataggtcggcgttacacgattgttttcgccggaagcatcttctttgtcggagcacttctcatgggtttctcccccaactattcctttctcatgttcggccgtttcgtcgccggcatcggcatcggctacgccctcatgatagcccccgtctacaccgccgaggtctccccggcctcctctcgtggcttcctcacttccttccctgaggtatttattaatggagggatattacttggatacatatcaaactatgcattttcgaagctgacactaaaggtgggatggcgaatgatgcttggagttggtgcaataccttcggtactcctaacagtaggagtgttagcgatgccggagtccccaaggtggcttgtgatgaggggtcgtttgggagaggcaagaaaagtgcttaacaaaacctcagacagcaaggaagaggcccaactaaggctagcggaaatcaaacaagccgcagggatccccgagagttgcaacgacgacgtcgttcaggtaaataaacaaagcaaaggtgaaggtgtatggaaagagctcttcctctatccaacgcccgcaattcgtcacatcgtaatcgctgcccttggtattcacttcttccaacaagcgtcgggcgtagacgccgtcgttttgtacagccccaggatcttcgaaaaggctgggattacaaacgacacgcataagcttcttgcaaccgtggccgttggattcgttaagaccgtgttcatcttggcggctacgtttacgttggaccgcgtgggtcgtcgtccgttgttattgtctagtgtcggcggcatggtgctctcgcttctcacgcttgcgatcagcctcactgttattgatcattcggagaggaaattaatgtgggccgttggatcgagcatagccatggtgttggcttacgtggccacgttctccatcggtgcgggtcccatcacgtgggtctatagttctgagatcttcccgttgaggctgcgggcgcagggtgcaa

SEQ ID NO: 57034 - DNA, 484 bp, Glycine max
  unsure (1)..(484): unsure at all n locations
  Clone ID: PAT_MRT3847_22512C.1
ggatcatcaacctctactctctgataggctcatgcctcgcggcgacctccgactggataggtcgcgttacacgattgttttcgccggcgccatcttctttgtcggagcacttctcatgggtttctcccccaactattcctttctcatgttcggccgtttcgttgccggcatcggcatcggctacgccctcatgatagcccccgtctacaccgccgaggtctccccggcctcctctcgtggcttcctcacatccttccccgaggttcgttnctttaattctatatatatatctccatcgttatatatatatatatgataatatgattttgcaggtttttattaatggagggatattacttggatacatatcaaactatggattttcgaagctgacactgaaggtgggatggcgaatgatgcttggagtgggtgcaattccttcggtagtcctaacggtgggagtgttagcgatgcctgagtcccc

SEQ ID NO: 57035 - DNA, 354 bp, Glycine max
  Clone ID: PAT_MRT3847_22513C.1
aaaacaaaaaattcttgcctttcaaataaaagatcaaagaagcccaaaggttctttacattgggaggggatatttaaaaccctaactaaaaaatacccttataaacatgatactagttaatatacgagaggggggggaaaaaaagccttaccagggggggggcccttaccccccctataaaatctattttcaaaacaaaatagtcaatttaacggggaacatagggctcaaaaagtttaaaacagggattgggaccattcgggaaaatttcaggaggacgctcaaacttttccctgaaaactttgaggctttggttatctaccccccgccctaaatcatgagatttttcaaaag

SEQ ID NO: 57036 - DNA, 110 bp, Glycine max
  Clone ID: PAT_MRT3847_22515C.1
gagaaggtcactgtcctacacaatcgactgatgtactcaaccatactacgcaatcaagtaggacggctcgatcatgaagaacacacagctgacaatctgtccatccgatt

SEQ ID NO: 57037 - DNA, 518 bp, Glycine max
  unsure (1)..(518): unsure at all n locations
  Clone ID: PAT_MRT3847_22516C.1
ccctcctcttcgggcgttcggaccgttcgcatcggccccgccgctccgtacggctctggatgccttcttacgaggcggcgcgccacccccccccccccccccccctccgacacttcctacactctccttgaacttaccactttgttactcatggtactatacttgttagatgtttatcgagcttttatatttaaactcttaatccttaatatttcactaattcactatttattataatcatttaatttatacttaaatcacattggccctatcttagaatattatcatacggatatcccgtttaaaaacctatattatttataaattttgtgatttcttacatacattataccatgtgattgatacttccattattctaactgatttaatgtaaattactttggctgatttataagagaatgtacttatattctttaaatatcacgtgttgaacaaagccagccttccattcttaatctccttgactttgagctcancaaaattgactgngncatcag

SEQ ID NO: 57038 - DNA, 757 bp, Glycine max
  Clone ID: PAT_MRT3847_22517C.1
aaataaaacacgaggtactattattgatgcctttgttcaaatggaaattaaacaggaattagcttacatcttcatattgatcatacggcccctttaacgctcaataggatcttgattatttcttttcggctacaatataatgtcgaaaataaaaaacgaacaaagacagtaccaaaaactcccaggtcccacccaattgaattcgtttttttttttcctcttatttaaacaaccgctcattatatatactcttatacatttccccgtcacagtaaaacatgcactagattctatgaaaacgctatactctgcctccagttattattcaggctttcgacatgtaatgatggcaaacttaatcagattcttcttgtatccttttatcatcaatggcatagccaaagctccctttatggctttaagtccactgcgcaagagtgaagtgaggccattccatgtcaacgcggagcgtatcactgcgggccaaaagggagcaacaaagcgagaccaatcttctgacttgatgtcctgaagtgacagggattggagcaatttgacataatcagaagctgagcaccaagctggaaggtaatatgcatcgcaaatcttcttcaagagatcttgctcccatggatgtaaggattgttcatcagggccaagctccctgtggcaccatgttactattattatagtggcacctggtgctgctacccgagctaattctccaacaaacttagctttgtcaggcatatgctct

SEQ ID NO: 57039 - DNA, 412 bp, Glycine max
  unsure (1)..(412): unsure at all n locations
  Clone ID: PAT_MRT3847_22519C.1
tctagctatgtcgatcgaactgtccaaggtcctgtcaccgttacgcgtgtgggtaaacgctgctgctgcttagtaggcgattgcacgtgacacgtaccgaattcgtagtattatgcttacgatccgattagcctgcactggtaagtgggtcgggtccgttatttagaggtgtatggttttagatacaattgctttgatcacgcggtaacttttaagttctggtgttgttgtcgtttcctcgtcttagtccacatggtcgttgtcattgtgttcaaagtgtggttntgccgtgtggtcatcatttgtgttgtaaaaatgttcagcgtggttgttacttgaagtgaaagaacgggcgagtatgcccaacgttagtggccaaccaagtgcacgttatgtggtaaacntggggagt

SEQ ID NO: 57040 - DNA, 448 bp, Glycine max
  Clone ID: PAT_MRT3847_2251C.1
cttttacatgctaaattgaatttaattgcatttgttatctgaatttcagaaagaaaaataataggtagaatatatcgtttcttttctacaatattgaaatttgctttaatatcttgcactgaagttttaaatttcaaacttctcttttattttctatactatttaaaccatatacctactactacctctgttaattctcaaattgtcttttattcagtaaaaaaccttaatcccttgtcagctttgcttattcataaaagcaatcagatagggctactattcccaaagtgagctttatctaaatgctcacatgggacaaaaggtcttgaatgtagagttaataattgcaggttaattaaatatttaaaaataaataattcaatcagttgtccttttcaagattctttacctgtacaccctaatgtatcttttgataaaacaaaatgca

SEQ ID NO: 57041 - DNA, 327 bp, Glycine max
  Clone ID: PAT_MRT3847_22520C.1
gtgtgtacaccacaagtgccatctctacgcagcgctcgcataattgttgttgatacagaatttgtatcattgataattcgagtgttcgcctcttcaagaacttaggtaactgtacatcatcatacatctgtacgttgttatgatggtctcctaggtgaattctgatcacacaacatactaagactggcacaccatagtcgctacgctcacacacctggtcctacgactatatattagtcctacaggttcttgttagccatgttacctacttacgacatttcatcaacacacttcgacaagagtaggatcaaacgtgcttaaaggact

SEQ ID NO: 57042 - DNA, 387 bp, Glycine max
  Clone ID: PAT_MRT3847_22521C.1
ttttcaaaacaacttaaccaaaactcccaatttccaaaacctcttttgggttcaacaaaattttcttttatttttcaaattccctttttcaacaatgggatcatgaaccctattataaattatttattaaaaattcggcccacgattgggcacccgaaaaaactccccgggatcaccttctcgaaaaaccttatattaggaggggcgaccaccggaacaccccaacacaaccttttataaaaaaaacaacgggacccccccccggggaaggttggcccttggccaacacaaaacgacgcccacaccccctgggggtattgggggggaaacacccaccctccctgggcttaattttattatccgacttatattttttttttacccccc

SEQ ID NO: 57043 - DNA, 660 bp, Glycine max
  unsure (1)..(660): unsure at all n locations
  Clone ID: PAT_MRT3847_22522C.1
attcggcccaaggacgcggagagtttgagtttcaccctttgattgaaggtttcggtgctcggtgcttttctgactcccatcatcttctcatgctttctgattcaataatttgaatgcgtgtatcgctattcactctgtttttttaggatttctttttcaatgctggatagtttgctggaacgatctttttaatttgatgtttgtttttctaatacttcactcagatcgacgttcataaactgttttagtccttttgacgcacattcacaagttagggtttttgttagtaccatctgccccaccagtcatttcgtgctttaccagttatcttatctgggaatatctgctatgccattctaggattaagaatataaaaaaaaattgttgacagagatgtcagcgtatgacaatgttgttggtgggaaattgaagttgaagggaaaagcactggatgtggctggtggagtgaagaagaagaaaaagaagaacaagagaaatcaggaacaacttttgcaagtcgccgaagatgaagtttcagcaggttggttggtatatttgtttgagagcaacagattatcttgtatgcatgttctattgttcttttcattaactgagatctgttgttaattacaatgtngtcctggtcgtaactcacctaat

SEQ ID NO: 57044 - DNA, 564 bp, Glycine max
  Clone ID: PAT_MRT3847_22523C.1
ggagaaatcagggtcaaaagggtttctaatggcactttccactccaaatgggcagtataagagctccaagtgcacctacataggtgaaaatgacaggaagctcaagaagatttctgaactcctataatgcgaatttgcacgagtagagtactataagataagacaacacaaagacaagcattgaataaaaagccagatagggagtgtctataaattatgcaatcttgagagcaccttcgtttaatattctatgcatgccaccaggccaagttctatacaaatcggcattgatcagctagaatgctacatgaaagttgcgaagacattaaaaacatactatcttacctcacccctgtatttgatatctctatggacctccaaatccttaaccagcttaagccatacgtccttgactataccaggttcaagatccttcaaggaaacttgggcacagccaataagttcagaagcctgaacgccttcatcatcgacaattcttactgtcgagagctgcgttgacgcatcttcaataatgaattcagagtgctcattccatactggatt

SEQ ID NO: 57045 - DNA, 322 bp, Glycine max
  Clone ID: PAT_MRT3847_22524C.1
aattcccgggtcgaccgactcgtactgcccaacatcattctttccccaatagcaatattgtctacagtctccaatactatattaacgatgttgtgtgtaaattgaagatccactagaaactataccaatgacaaacctccaaataccaaaccctgtgacaaggatgatatttatcaacgacgatccataatcccttcctatgatgacacatataaacccctttataatatacagatctattccaagtctaataaatcctttatattatcaacaaattattcaatactgtgattataaaaaaattcctatactaactccacta

SEQ ID NO: 57046 - DNA, 346 bp, Glycine max
  Clone ID: PAT_MRT3847_22525C.1
cccacgcgtacgctagtactagatcgcgagcggccgccctctctacactttggaagacggatttgtcattctgaacatagcaaagaaacacactgattacttttcaattgaactgtaaccctagtttagacagctaattacttttagggccaattaaagatagtttctatgagcctagggcgtgacaatgaaaaaggggaatgggaggaggggtttgtagctgaaatcaccagcggggggtaaaaaagaaccgaattaacgcccgcgggcaagctagaagatacctattgtgtagggatagcaaacaaggatactctggccccagatgaccaacgaggaaaacgga

SEQ ID NO: 57047 - DNA, 655 bp, Glycine max
  unsure (1)..(655): unsure at all n locations
  Clone ID: PAT_MRT3847_22526C.1
atgaattgacatggccagtgaacatggaagggcaaatacaagtgaaaaaatatcagtgggctacctaacctgnccgggatagtaatgtttnttgctttctntgcaggtgaacagtaccagcacccactgttgggtctgtttggcagccagtgtgccaccttnttgtcttcaagaatgccatgccatccacatgcacaaccaactcaacacacctntgcagtgaccccaggaattcggcacgaggggcgagagaagttcacgcacatgacgagtgacgcatcttctgtgagcatcacactagaaccacctccttctgcctcaaggcgtgctttattaacaggtgaacacccattgcaactacgggcctttgttggctgtcatggaggtttttcggcacaaccacacgattggaaccgtctttattttcatttctgttgggtttaccacatttgtagcaagcttggttcatatgacatacatgctcctgcttgagggagagtgtgaaatatatgatttgatatgttttaattacagcaggttagtatgggattatttcccttattactcattatttagtttccttattttgtaagcctctttcattataaataagagtatttcgtgtggtctgataagacaacacacaacagtatat

SEQ ID NO: 57048 - DNA, 821 bp, Glycine max
  Clone ID: PAT_MRT3847_22527C.1
ggggacctgagtggcacctggcctttgaaggctgttgaattggctgtctataatgggaagaacctacattgtagaagagactgttggccagtatctttcaagcatcaacctccagggaaaaccttttgtctctggtcttttgataggacagtgttcttcacaaaaggattatgtgattcttgccactagaacaccacccaaagaggaacaaaatgacaaagtcaaacagccgagagctaagttggataatttggatgaagaatgggccacagaacatgccagccaggtgtccagaatgctccctggaggacttgtggttcttggaatatttattatcacaactttagaactagcagatgattttcaaaatgccctgcgcagactaatattttctatggaaaaatctatgagtagaaaaagactatgggatgtcacagaggacgaggtctcagaacgagtgacacttcacatttgttcttctacaaaaaaaatatcttgtcgaacttacgatgtccaagatccaaagagttcagcaagacccgcagattggaagtatcagagtagagtgtctgcctcatggctgtctctagactgtactgttcacgttaacattcacatcccactgtcggctacttctgtcagttacactctggaaaaaacacaaagagtggacttacacgctgggccaagcaaatagaaaaatggtgtttatctgattaatggacaagttaaaggcaacgattgtgacttattagaaggacagaaaaaaagcagaggaaatacgcaagcaactgctcattcttttgagttccgagtgctaa

SEQ ID NO: 57049 - DNA, 423 bp, Glycine max
  Clone ID: PAT_MRT3847_22528C.1
tttttattcaatctagggccatgtgttttaggggggctaatgagaactatttccaatgaaatatttttttccttaatttacaggttaatggataatctatttaataattctaaacatacaatgtgaaaacttggaactaagcttacatacataaatataaaggcgtccaaaataaagaaagaaataatctgcagccaggctatgcaaaataccgtcttcaatcggaacttattgatccaacaactttttagccaccaccttctaaggtctaacttttttcaacttacactacctggatccactagaacaaaaacatttgcattcacaggcttatccggtttgatacaacccgatttttaaaaacatttatgagagcattaattcagaaggttgttccactggcacttaaagaatacacaacat

SEQ ID NO: 57050 - DNA, 172 bp, Glycine max
  unsure (1)..(172): unsure at all n locations
  Clone ID: PAT_MRT3847_22529C.1
ggatcactctgcaatgaatgataaaatgcacatcaatctcaaatatacagacccaactgacaagagtngggcaatgacaagcgaagcatcagacaatgtctactgtacacttcttattcagagtgcggtccatggtgcacaggcaaggtatacagtatttacagctggactg

SEQ ID NO: 57051 - DNA, 698 bp, Glycine max
  unsure (1)..(698): unsure at all n locations
  Clone ID: PAT_MRT3847_2252C.1
tatttattagcgtggctttattacgtaacgagtttctctctgtctggctcttcttcccttcgcctcttcttgttcttcttcttcttcaatatttcggagcaactctacatatctttagcctcctcttatatatttcggaagttggtttctgctggaaattttgcaaacaaattcatatactgaaaggactttatgactagggagttctatacaaccagaatcggaatggatctgagcactattgaattggcgaagggctaatgaagcttaatggtttattcacagggagcacgagaagctccagagaactctttacatcattattaagcagtcttatcaaaggtttctttccaagagatgttataagatataattggtaaaattaagtttattgaaagattttgcgaaactttgcctgggatatagtgaaaatggacagatcagatacatcaggctttgtaagtggtggaagctgtatattggaatttgtttttctagccttaaagttctggtagttatgtgagtattgtagcagcaagtggtgaactgttctgctacttcaaccctctatagctgtagtgcacaacatctggataatggatttgaacatgaaatctttactgtctnctcatgatactgaacttangaaaagatgacacttcggtaatactaaattatgcttgaatggcattggcttt

SEQ ID NO: 57052 - DNA, 262 bp, Glycine max
  Clone ID: PAT_MRT3847_22530C.1
ctcgacttgcgtgtagctttctctaactggtgctgtgatcgtatagtgaccgtttaccttggcggtagctttaatgaagcatgctaactatggacctgtgctgtattacactcttgactcgtaagtctgtgcttacccaacgggctgacgcagctttgaagatatcgggtgaaacgaacgattaaggttggcataccagtgtcgaacagtatgacacgcgtagacatagctttttgtggaatgctgtagatacggagacgtc

SEQ ID NO: 57053 - DNA, 608 bp, Glycine max
  Clone ID: PAT_MRT3847_22531C.1
ccacgcgtccgtggctcaagacaatgctgcatgcaacaatgaaagaagtgcccctgacagaaatgcagatggtgctagcaaaaaagaaagtggcttaaaaaactggaggaggtgaagccgcatgctgtgcaagagcaattacctggagttcaatattgcatcaagagtcctcctccatggcgtgaagcactgctactggggtttcagcattaccttctgactcttagcattaccgttctgattccaactatacttgttcctcaaatgggtggaggagatgctgagaaggctagggtgattcagacacttctgcttgcttctggaataagcacatttctgcaatccttattaggaactcgacttccaattgtagttgttggttcatacacttacataatacccataatttctattattcaagccaacagatataaatcatacacagatccttatgagaggtttactcagacaatgagagggattcaaggtgccttgatcacaacatcatgtttccagatggctgttggattttttcgtttatggaggaatgctgttaggttccttaagccactctgtgtagtcccttatgtaacttcactggactcagt

SEQ ID NO: 57054 - DNA, 487 bp, Glycine max
  Clone ID: PAT_MRT3847_22532C.1
cttgacatgctagagaccaccctagttgcattacaagatataactttagagaaaatatttgatgatcatggacgaaaaattctcttttcagagtttccacagattatacaacagggttttgcatgtcttcaaggtggtatttgtctttcaagcatggggcgacctgtctcgtacgaaagagttgttgcttggaaggtgctgaatgaagaagagaatgctcattgtatttgctttatgtttatgaactggtcttttgtttgacattttgttctaagtacagtagggcttattgtaatctaaagtgttagataaagatttactcaagacacttgagctttgttggttggtattttactgtatttgcactaaaaaaaaaaaaaaaaaaaaaaaaaaaaaaaaaaaaaaaaaaaaaaaaaaaaaaaaaaaaaaaaaaaaaaaaaatttttaaaaaaaaaaaaaaaaaaggccccccacctccccttttttt

SEQ ID NO: 57055 - DNA, 168 bp, Glycine max
  Clone ID: PAT_MRT3847_22533C.1
ggtagatagggagatatcttaatataaaataaaaagcaaaaattgaatgaatacgcaaagactcatattttatctcagttaataaattgaattaaaacactcattctaaattttaaccgttcctccatccagcaattataaatggagagctgctattataaatatata

SEQ ID NO: 57056 - DNA, 893 bp, Glycine max
  Clone ID: PAT_MRT3847_22534C.1
gtgctacttgggtgtggagctacttaaatctaataacgaggggaatgaatctttggtcaagtccttgtggcatcactcagatgcaatattatgctgcactctaaaggcattgccagtgtttactttctcgaaccaggctgggcttgacatgctggagaccaccctagttgcattacaagatatacctttggagaaaatatttgatgatcatgaacgaaaaattctcttttcagagtttccccagattattcaacaggtctactattttgttgtaataaaagcattgattccacacttccatgtggcttgctattggatgttatttttttactaaatgtatggctacatatttcttgtatgtgttgtatagttattttgcattaccagattatgcttcacttgataaattatttttgcagaaagtgaacttgcttttttttccctctctttctttccccctctgaattggggtatgctgtcaacagaactgatgctttttattaatttctcctttttttgggtagggttttgtatgtcttcaaggtggtatttgtctttcaagcatggggcgacctgtctcgtacgaaagagttgttgcttggaaggtgctgaatgaagaagagaatgctcattgtatgtgctttatgtttatgaactggtcttttgtttgacattttgttctgagtacagtagtgcttattgtaatctaaagtgttagataaagatttactcgacacttgagctttgttggttggacttcactgtatttgcgctaaatacttggattgcacattttatgactatttatgtgttattagcttagtatgtaacttgtttccttattcaacctccagctaatatttaatgcaatcttaagaagtgttgcacctttg

SEQ ID NO: 57057 - DNA, 3651 bp, Glycine max
  Clone ID: PAT_MRT3847_22535C.1
tcggctcgaggagctacttaaatctaataacgaggggaatgaatctttgctcaagtccttgtggcatcactctgatgcaatattgtgctgcactctaaaggtatgcttgaaatttaattcaatttcatagcgcatgtatctatttcgtgcttataaaaaatatatatatctattttgtgctctgtccataatgcaattcaaattctctaactcataaaggttttactctgaaatagagggtatcattgtatcaacatgggctatatagcctgagtagtagcctagtaaaatatgtgagatgaatttgtattatgctggcctaagttaaatttgccctgacctggtccaagaaaaatttcccccaacctcaactatagacccatttctgggtagtattctgcaaagagctttactggtcacttgtcagcgtttcaagtctattattcattcctcttccaactacagtgcatataagttgtataacccaacatggatgacatgttattctgtactgtctaattttgttctaacagtggaaatggcttgaaaacagtttcaactctagtcaagtgaaagtatctggtttgggtacagagactggacggagtgaatgctcgaaaaactttctaaagtaggcgggtcaagagttgatctagctggtcgatccgctctccctcgtcttctcactttcacacatccatccatgtcttgaaacgatgctctcgcagatcaagcatagtctgattccaattcgcgcaagctcatggacggagatcgctgatgcggcggagcaaatggttgcacgagattccacacatgacactcgatcttagttaggagcagtgctggaaagcagaacctacttggttcttttgaaggtttgatttggatgtggaaagtatgtcctgcaaggatggtagcagaaacggaatcggaatggataacgggaagtacgtccgttacacgcctgagcaggttgaagccctagaaaggctctatcacgattgccccaaacctagttccattcgccgccagcagctcattcgcgagtgccccattctctccaacatcgaacccaagcaaatcaaggtttggttccagaacagaagatgtagagagaagcagagaaaggagtcgtcgcggctgcaagctgtcaataggaagctgactgctatgaacaagctgctgatggaagagaatgataggttgcagaagcaggtgtctcaactcgtctatgaaaatggctattttcgtcaacacacccagattactacgcaggcaaccaaagacacaaactgtgaatcagttgtgacgagtggtcagcagcacaatttgataactcaacatcccccacgggatgcaagtcctgcagggcttttgtccattgcagaagagactttagcagaatttctttctaaggctactgggactgctgttgagtgggtccaaatgcctggaatgaagcctggtccggattccattggaatcgttgctatttctcatggttgcactggtgtggcagcaagagcttgtggtctagtgggactagaacccactagggttgcagaaatcctcaaagatcggcctttgtggtttcgcgattgccgagctgttgatgttctcaatgtgctgcccacagcaaatggtggaaccattgagctgctttatatgcagctatatgcaccaaccacattggctcctgctcgagacttctggttgttgcgctacacttctgttttagaagatggcagcttagtgatctgtgagaggtcacttaaaaatactcaaaatggtccaagcatgcctcctgtgcagcattttgttagagcagagatgctgcctagtgggtacctgatcagaccttgtgaaggaggtggttccatcatccacattgttgatcatatggatttagagccatggagtgtgccagaagtgctacgtccactgtacgaatcatcaacagtactggctcagaagacaactatggcggccctacgtcatctaaggcagatttcacatgaagtttctcagtccaacgtcactgggtggggtagacgaccagcagcactacgagctcttagccaaagattgagccggggtttcaatgaggcactcaatgggtttactgatgagggatggacaacaattggcaatgatggtgtagatgatgttactattctagtgaattcatcccctgacaagttaatgggtctgaatctttcctttgccaatggatttccgtctgtcagtaatgcagtgctatgtgccaaagcatcgatgctattacagaatgtgccccctgccattctcctaaggttcctgcgggagcatagatcagaatgggcagacaacaatatggatgcttacacagctgctgctattaaagtcggcccttgcagcctatcaggatctcgtgttggaaactatggaggtcaagttatactccccctagcacacacaattgagcatgaggagtttttggaagtcattaaattggaaggaatagctcattctcctgaagacacaataatgcctagagaaatgtttcttttgcaactctgcagtggaatggatgagaatgctgttggcacctgtgctgaacttatatctgctccaattgatgcttcctttgctgatgatgccccccttttaccttctggatttcgcatcattcctcttgaatctggaaaggaagcttccagccccaatcgcacccttgaccttgcatctgcccttgacgttggtcccagtggaaaccgagcttcaaatggatgtgctaattccagctgtatgagatctgtgatgacaatagcatttgaatttgcatttgaaagccatatgcaagagcatgtagcatctatggcacgtcaatatgttcggagcattatatcatcagtccaaagggtagcattagcactttctccttctcatttgagttcacatgcagggcttaggtcaccattgggtactcctgaagcgcaaacccttgctcattggatctgcaacagttataggtgctacttgggtgtggagctacttaaatctaataacgaggggaatgaatctttgctcaagtccttgtggcatcactcagatgcaatattgtgctgcactctaaaggcattgccagtgttcactttctcgaaccaggctgggcttgacatgctggagaccaccctagttgcattacaagatataactttagagaaaatatttgatgatcatggacgaaaaattctcttttcagagtttccccagattattcaacagggttttgcatgtcttcaaggtggtatttgtctttcaagcatggggcgacctgtctcatacgaaagagttgttgcttggaaggtgctgaatgaagaagagaatgctcattgtatttgctttatgtttatgaactggtcttttgtttgacattttgttctgagtacagtagtgcttattgtatcctaaagtgttagataaagatttactcaagacacttgtgctttgttggttggtgttttactgtatttgcactaaatacttggattgcacattaaatgactatttgttgtgttattagcttatgtaacttgtttccttattcaacctccagctaatatttaatgcaatcttaagaagtgttgcagctttttatgtgagtgg

SEQ ID NO: 57058 - DNA, 230 bp, Glycine max
  Clone ID: PAT_MRT3847_22536C.1
ggttccaaaagacgacagaaggggatacagtagtgagtatgttgagcgtcattgtgagcatcaatatgatgaaatcatgtggcctcgtcttcttcctcgtcatcattgtcgttgcatcgcaattggatgcgtacgaggtgttcacactctgtgtgtcaaatggccatggggtccatggtctggatgtgaaatacccaagttgtgcgtttgccggggggacacacagtatc

SEQ ID NO: 57059 - DNA, 277 bp, Glycine max
  Clone ID: PAT_MRT3847_22537C.1
ggtcgaccacgcgtccgtgaacagaaaaaagaaaaagaagaatttaaacaaggtgaatcggtcttggcaaattctccaattcggcaaaaggagggaggaatcgcaacccaaccaccattgttccccttcgcatgctctttccatcgcaccaccacaccattcccctgcaccctcacacaccagatccaacgatgaacgatttcgatggcctcttcacctccgatttcggcctcaaaccccagggcaaatgcagaccaatgggtcgccgatgcaaggg

SEQ ID NO: 57060 - DNA, 434 bp, Glycine max
  Clone ID: PAT_MRT3847_22538C.1
ggctcgagcgcacagccacggattgggtatatccttttctgcttcgtcctacataaggacaccctgtgggtggctcaagatcggtctccttgatgttggaagaaaatctcatgcagggcatgcaataagggggcgacccctgctcatattggtgtctttcgtcgcgactttcacggtattggtcagggcaacagcgggactggcagcaacatcctacccatgctcaaagctcaccggcttgcgcctgaaattccacaggatctttaccatttgcttaataaggctgatctacttaggaagcctctagtgagggacctgagtgacgagggctccctattccagctgcttcttggtgagagcatattccaccgactctctcggtcctacaagatgaccactaagctcccaccactctggatgtatgattcaacgac

SEQ ID NO: 57061 - DNA, 354 bp, Glycine max
  Clone ID: PAT_MRT3847_22539C.1
gcagaccccccaggaaaaagtttcaaaaccagcctccttttgggaataagtttctaaaaggaacctagtttggtcaatttgccttttaattagctatattttcgttgatttctgtctttgtcaaattagtaatgttgttaattagtttgtgatgttgataaatatatatttcaatacattacccatgattttcatgatatatcgcaaattattttattctttttattcattaaattatttcagggcgggataagatcaataaacaaagaagggcgtgaacaagccaacaagttcggcgtagagcaggttgaaatgccacattattcgtaagatcaggcattgtttgaagacctg

SEQ ID NO: 57062 - DNA, 233 bp, Glycine max
  Clone ID: PAT_MRT3847_2253C.1
gggcccacttcctgtgcctttaaaagagagttcatgttcgacaaccattctttgttgccctcactggtccagcccctaaagatcacaaaaccttggcctgaaaccaaagggcaattgtgggtataaataaaaaggttcaagattacaataaactccaaacaacaaagggatggttgttgagaaccccctggcctttgaccatgggttggtttaataaaaaacaggccgggcaa

SEQ ID NO: 57063 - DNA, 325 bp, Glycine max
  unsure (1)..(325): unsure at all n locations
  Clone ID: PAT_MRT3847_22540C.1
acangccnntccantannacgnngcntagnnagnncgnnaagtnggctcgantgcagctctancnagggtttcgcaagtncnnatcnangnanaataacgncgatggcgatggctgcanctntncntctcnaannaatgcgtttgacccaancnatnanccgantgccactctncctntcaattcctnnctccatnnctcnanacgaagcncntncatngngcgcncnccatttncactccaanntngtaggnacngattnangagtgtnaggnatatnnagaatatcnccanggccatnatgatggtttcnncgtctnagctgg

SEQ ID NO: 57064 - DNA, 343 bp, Glycine max
  Clone ID: PAT_MRT3847_22541C.1
gggggaaaacccctttgggggggaaaaaaaattggccctgaccaccccaacaggggcttggaatgaaagacccccccattatttttaaggtccagaacgacccccccgataaaaaaaaatagaaaaaaacccccgtataccccccggaaaaccccccatttaaacggaaaagaccccttaccaaagccccccccctaaacccatgggcccacaagggggcccccaaaacggaaaaaatttcccccccccttttccaactttggccccccctgtttaattttccccacccttcccaacgtttctgtactgggaacgttggccccaaaaaaaggggccacccttt

SEQ ID NO: 57065 - DNA, 3035 bp, Glycine max
  Clone ID: PAT_MRT3847_22542C.1
gctgttcaagaaaatcaggtgggcagatatttctatctattgttacaaaaatgtcttatttaccatagtttattgacttgattcataataagtctgcaagaaataatatctatagatcttcatggaagtaagaaagggcaaactttattactagatctatgggtggagtacattgtgaatatggatgatacattgtctgtttggacttcttttcctacattgtatttgactgtttttgaattatcatcaattgcagttattattggttatagttatatctttggttcttcaacagcataaaatttggcttgtgtttgcacaggtattagtagtttcaggagagacaggttgtggtaaaacaacacagttgccacaattccttctggaagaagaaatatcttgtttgcgcggagctgattgcaacataatttgtactcagcctcgtcgagtatctgcaatttctgttgcagctcgaatatctgctgaaagaggtgagagtcttggggaagcagttggataccaaatccgtcttgaatcaaaacgttctgcagaaacacgccttcttttctgcaccactggtgtattacttcggcagttggtacaagacccagacttgactggtgttagtcatttgctggtggatgaaattcatgaaagaggcatgaatgaagactttttaattataattttacgtgaccttcttcctaggcgtccagatttgcgtctcattctgatgagtgccaccattaatgctgatatgttctctaaatactttgcaaatgccccaacaatgcacataccggctgctgcttaccctgtggcagaccacttcctggaagatgtgttggagaaaactcgatacagcatcaagtcagattttgacaattttgaggggaattcaaggaggagaaggaaacaacaggattcaaagaaggatcctttgactgaaatgtttgaggatattgatgtagatactaattacaaaaattacagcttgggtgttagaaaatctctagaagcttggtcaggttcgcagattgatttgggtttggtagaggcaacaattgagtatatatgtcgcaatgaagctggtggagcaattcttgtatttctcactggctgggatgaaatttctaaactgcttgacaaacttaaaggaaataacttagttggagaccctagcaagttcttaatccttcctttacatggctcaatgcctactgtcaaccaatgtgaaatatttgaacgtcctccccctaacaagagaaaaatcgtgctagcaacaaatattgctgagagtagcatcaccatagatgacgttgtgtatgtcatagactggggaaaagcaaaggagaccagctatgatgctctaaataagcttgcttgcttgttgccatcatggatttcaacggcttcagctcatcagagacgtggtcgtgctggtcgagtgcaacctggagtttgctataggttgtatccaaaactgatccatgatgcaatgcctcaatagcagttagctgaaatccttcgaacacctttgcaagagttgtgccttcatattaaaagtttgcagcttgggactgtaggatcatttttagaaaaggtcatgttggtctgagtcctggcattcttaagaatttataagaactataatttaggtatggggctttatttgaacctagcaatagtatttttctggaatgggtacttgcaatatctgatttctttggttaaaaagggaagagtgttttgatagggaaaatagacaaggtcatgaatcaatttcacagtggattcttctgcctgaaggaacactgtagccttgggctacatataaacagatttgactcagccgatgcagcaaaacaatcttttgctggtgattcttgcagtgatcacttagcccttctcaaagcttttgaaggatggaaggaggcaaagcgaagtgggaacgaaaagcagttttgttgggataatttcctttcccctgcaaccttgcggttgattgacaatatgagaatgcagtttctcaatttattatctgacattggatttgttgacaagtccaggggtgctaatgtttacaaccagtatagtcatgatttggagatggtttgtgcaattctttgtgctgggctctaccctaatgttgttcagtgcaaaagaagaggaaaacggacagcattctacactaaagaagtagggaaggttgacatccatcctgcttctgttaatgctgggatctatctcttccctcttccctacatggtgtatagtgaaaaggtgaaaactaccagcatctatattaaagactctacgaacatttcagattatgccctacttctatttggtggtaatcttgtccctagcaaaagtggtgagggcattgacatgcttggaggttaccttcatttctctgcttcgaaaagtgtcatcgagttaataaggaaactacgtggggagcttgacaagcttctgaacagaaaaattgaagaaccaggatttgacgtttctgctgaaggaaagggagtggttgctgctgctgttgaattgctgcacagtcaagtcatgagataatttctttttccagggctaacagcatgttggtctgagtcctggcattcattagacgttataattagcataaattttggtagtttttattgattgctagcaatagtatttatctggaatgtgtatgtgcaatatctgatttctttggttaaaaaggagatagtaataattgataagggaaggaggcaaggccatgatcgaatttcacagtggattcttctcctagaggaaacactgtagccttgggctacatatagcaatatttgattcagcatactgtagttataatctttcactagattatacttctgcattaactggcccatgacatctttttgtataacgttttactttagattatccaagaaagtatcagtttgtgcttctaaaaaaaaaaaaaaaaaaaactcgagactagttctctctctctcccaaactaaaagtctccagttttttacatt

SEQ ID NO: 57066 - DNA, 536 bp, Glycine max
  Clone ID: PAT_MRT3847_22543C.1
acgtaagcttggatcctctagagcgggcggtttttttttttttttttttttttttttttgggatttggcaaaaaaaaaaatttgggtggctgggcccaaccttcccaaaccctggttaacacatttgcccccacccacaaccaccaccggaagaactttaagccttttacctttccctgggaaaccctggtttggttttaaaaggggtcaaagcaaaccaaacttctgacaacaacaatcttcatgttcaaaacatgggtggtgatgatgccgttcctgttcctggcctcaagagttgggaagtgaggaacttccaagctagccatgcacatgagtcaaagatgattgttcctcatgtggaggaaaatgctggtgaatcagggtccattggatcaatggcttatggtgacttgcaatcgttgagcttgtccatgagtcctagctctcagtctagcagtgtcacaagttctcaccgtgcttcacctgctgtcgttgattctgttgccatggatactaagaaaagggggcctgaaaag

SEQ ID NO: 57067 - DNA, 2092 bp, Glycine max
  Clone ID: PAT_MRT3847_22544C.1
tacggctgcgagaagacgacagaagggggattgagaaggaatgagaatggggggaggtttttgtctgatgatgttggtaggtctagcaatcgagggcgagggcaagggcaatcttctcgaacgaattatgggaggaatggagcggatggtgatggcagaatgaggaagaatgggaatgggagaaggtttttgtccaataatgttgatcggtctagcggtggagaacagtcttctcctttgaattatgggggggatggaatgaatggtgatggtagattgaggaggaatgggaatgggaggagggttttgtctgatgaggatagtaacgatggacagcggtcttctcatttgagtcaggggaggaatggggataatgttgatatggatgcttgcattgcccagcattcaacgagacgacagaagggggggatgggacatagccgaagtgctgaacggaaaaaaaaaaaacagaaaactaatcacacccacgacactgaaacgacaatgcgtttaagctttggaaatgcagaagaataagaagatgctctgctacttcttctacctctaccgtgttactgttagggcttactgagttgcaagattcacttcaaattatgcgtttcgctgatcggttcctcatcacatcaaacgacgtcgcagatcatcgcaattccttgattatttccttttgttgatacgcggaatcgcgcacacggtgctggtgtgtgcactgaggtagaaagaagaagattgaattgtaaacagcatgaattaccttcttggagctttcaagcctgcatgtaatgtcttgatcacgtttaatgatgggaagaaccggaagcaggttccgtttaaaaaagaaaatggtcaaatggtcacagtcccacttttccaaagtcaagaaaacattggtgggaagattacaatagaaccaatgcaagggaagaagattgatcacaatggtgtaaaagttgagctccttggacagatagagatgtattttgacagaggaaatttttatgactttacttcccttgtacgagaactagatgttcctggagaaatctatgagatcaaaacatatgcatttgaattttctactgttgaaatgccatatgagacatataatggggtgaatgtgaggcttaggtatgtattgaaagtgaccattaaccgtggctatgctgggagcatagtagaataccaggattttgtggttcgaaactattctccacctccacaaattaacaatagcatcaagatggaagttggaattgaagattgtttacacatcgaatttgaatacaacaaaagcaagtatcatctcaaagatgtcatcattggtaagatatactttttacttgtcagaatcaagataaaaaacatggatcttgagattaggcgtcgggaatccacgggatcagggaccaacacccatgttgagacagaaacgttggctaaatttgagttgatggatggtgctcctgttagaggtgaatcgattccaatcagattgttcctcagtccctatgagctgaccccaacacatcgtaacattaataacaaattcagtgtgaagtactttttaaatcttgtgttggttgatgaagaggacaggcgatatttcaagcagcaggaaatcacaatgtataggctgcaggaagaaacttcatgattacttatcattcggggagtgagtattattaggtttggtaacaaataaaaaaaagattgtgatggacattgaagacctcttaaatcagggaatagtctcgtgaatcatgttctctaaggtgtaaaatggcttggtatagcatgctttgaaattcatcactttcggtcatgtatatcgacagatctctcattcatgtcttgacatagttctgtaatttttactccattgagggaagcatcttaagaaatgtgttggatcgttgatacccatgagaaagtgggtgactgaatgtatacttgagtgtgatatctgtagtactttggtttttgttatcaacttttgcttggtttacctgatgaacataatgatatcctttttcaattcttttgaacagacaaaaaaaaaaaaaaaactcgt

SEQ ID NO: 57068 - DNA, 220 bp, Glycine max
  unsure (1)..(220): unsure at all n locations
  Clone ID: PAT_MRT3847_22545C.1
gnntgaaaagtgtggaattgagaaggagaacaattttaaggagtacggagagagataaagatattgggaaagtgagaggnaatatagatttaattgaagatggggtgatgatttatatgatgaaggggtgagacatgaaatcngcagtgtctggatatcttactgccctcaggatgaccgttttctaggtcaaaagatagcatctcgtctgagaatgaag

SEQ ID NO: 57069 - DNA, 392 bp, Glycine max
  Clone ID: PAT_MRT3847_22546C.1
ggtgaatcccgtcgccgaattcgatcgtttagatgattctaatgttatcgggtatggggtggcttccactctctattccgttcattggtttgcagtgaagcacaattccattttggatcgacctagcgtgttttatttgggtggtaaaacgtttaagacttgccctgtggctcatgcttgttggagtcctcatgtaatggaagagagtctcgttttgttggaaaatggacagttattcttgtttgatttggagtctcatgacaccacaggtactgctttcaagggaactaggttgaaagtaccttggaatggtttgggtttttcgggaaacaacatggtgtggttgagttgtgagtttagttggcaccccagggttttcgtcgttgcgcatt

SEQ ID NO: 57070 - DNA, 567 bp, Glycine max
  Clone ID: PAT_MRT3847_22547C.1
caaaggctatgaaaaaccaagttgaagcactttttttttgaaagggacccttttttgttttgggttctacaacttggaataaccttaattaaaagtttgaaactacattcttgaggggaatctcttttgggaaaaaaaaaatctgttatctggggaaaaaaatcataaacccattttttgtaaagggcaaaagggtctggcaaaaaggaaatctagcggggtagctggtctagtaaaggctagttctaaagttcaggggggaactgaggaggctgggaaattcaatcctgctctaattgggaacggggtgggttaggggaaatctcatcttgaagggcgaggactggatgtaccccaaagttagaggggaaccaatataaaaatatatgggcacccttcttctctatctctttatttatttttacacaagtctaaaatctatttttaattaaaaaccctaaatcagttattctacatcttaactaacatataaatcaagttttaattaaaagggttttattggaaactcatctttaaaatcaagttttaattaaaagggttttattg

SEQ ID NO: 57071 - DNA, 451 bp, Glycine max
  unsure (1)..(451): unsure at all n locations
  Clone ID: PAT_MRT3847_22548C.1
atcagaatcaaagcatgagtaatcaagcttcaagtcaatgaagctagactcatccatgcctgtgaaatcactctctctgaaagaagagaaggtatcaccccccatgttgttgctcatttttgcagcagaaaactcatgctttgattctgatgagtaatcaagcttcaagtcaatgaagctagactcatccatgcctttgaaatcactctctctgagtgaaaacacacgcctatttaccccaccatagaatccaccaccatcaccaacaccatgcattaatccaacaacctttttcacaccacccttgagatcacttccactttcataattattgttatcaaacatgaaatcccttctctctactccatcaaaaccactccttcttggctcaacttcacctgatccacttntcctgccagattccaacatattaaccccaggacttctagct

SEQ ID NO: 57072 - DNA, 450 bp, Glycine max
  Clone ID: PAT_MRT3847_22549C.1
aatgggtcacctaatttctttcaattcactttcattatagtatttcctgattttccttcacacgctgctgtgtggtctttcttaatttgcctcttcttttctcttttcttgttgtcgaaccatcttggaaaagaagttggctgatgctgatgtctctgaggaggatcaaaacaacctgcttaaatttttagagaaaaaggaaactgaatatatgcgccttcagaggcataagatgggtgttgatgattttgagttattgacaatgattgggaaaggtgcatttgttgaggtcagagtctgtatggagataactagtgatcatgtatatgcaatgaataagctgaatatattatatatgcttcgtatagtccaggttgtgcatgttaaagctgtaagggtatttcttgcagaggttgactgaaattgctttgtctaagctttattgttctt

SEQ ID NO: 57073 - DNA, 310 bp, Glycine max
  unsure (1)..(310): unsure at all n locations
  Clone ID: PAT_MRT3847_2254C.1
agtcgcatgcancgtacgtnagctcgtangtctgatcgagctgaggngnacaananatggtcagggntnaaataagaatgtaaaantnggcaggncagcatctgccacaacagnttgantanaggcaaagnatatgttaaatttatccnnccantnggttgcacctggtgaccatnttggngacttgaancntccanatnnatcggatgtctctggnattattttcgagaaagaagnctngctgatactaaagctnnttgaanccttctgngctctttgaanacatcnagtgatggtgctcctgctgtaa

SEQ ID NO: 57074 - DNA, 382 bp, Glycine max
  Clone ID: PAT_MRT3847_22550C.1
gagggagggaatggtgaatgtttctaatccaatgtatgaataattttaaacaattactcttcaatttcataaacaatattcctatctgaaactgcttaaaatttacaaaaaaacaaaaaaaaaacacttggccaagaacgaatacattactggattaaaagtccacaagaacacagatgcaatacctccttgggtcctgaaagactttcttcagcaacatgtaactctgcatctttttcagatataagttttctggctttgctgatttctgcctctgccttggtttgcaagacagacaaagcaagctgaaagcaataataatatgcaactgagttggatggattatggaataagtctcatacattgaaaaaagggatgagag

SEQ ID NO: 57075 - DNA, 248 bp, Glycine max
  Clone ID: PAT_MRT3847_22551C.1
tattgttctacctcaggatcgtcatttacgtgatgcatctctgtagcaactatgtcgaactctaaggatttccactacatgttcatcgtcggtcaatcagctggccgcattcgtgatggagctttacgccgacgtcactctccgcattgtcgagaaccttcgcttgctttgcaccggcgataatgtcgtaggtctgtttggcaagctccgtcattataatggcacgtccgtccaccgcgagagcccga

SEQ ID NO: 57076 - DNA, 177 bp, Glycine max
  Clone ID: PAT_MRT3847_22552C.1
ttcgtttctttttccccaatttggattatgtatttctttaagttatgtttccataaatacttgctatatataagtaaaatataaggttcctccaaaatcaggcttattagagacactatctgagaggattaccccggtaaaccctgcaattatggttggccatcaaaaaaaaaaaca

SEQ ID NO: 57077 - DNA, 406 bp, Glycine max
  Clone ID: PAT_MRT3847_22553C.1
tgcttggaacctttgggctgatttatgtgcttgcatggtcgtggaagatgatagaagggcatggtcgtgagaagatgatagaaggggagtgccgcgtttaatcgaacgcgggaggtgaggaaagaaaagtaccagaacagtgccggaggaggacttgctactttctgtaaagcaccatccccgtagagtctactaaattgaattcctacctttgttcctatgcccctcccttccctattaataataatccccgccctccccttcccccaccgcaccggcgaagtcctattacaacctaaccacgagtcttattatcctgaaagttatgcttatgacccgaccttcggacttaatgtacttaccaagtccctgtgacggtgcggcccagcgggaaaaacatacgggg

SEQ ID NO: 57078 - DNA, 109 bp, Glycine max
  Clone ID: PAT_MRT3847_22554C.1
cagaggatccacaaggcaaacacagactaggtgccaagttggaaggccaggccccatggtgacaggcccactataaacaaattggggcctcatctagatggaccgcaag

SEQ ID NO: 57079 - DNA, 261 bp, Glycine max
  Clone ID: PAT_MRT3847_22555C.1
tttttctctctcttccctttttcttttcttgtgtggcattcgagaccttgagttctgttaatacaagcttactgcttccccttaaagtgatccagagatttaacagtgtttcattggtctctaaggcatgttacatcaagttttactggttccaagttaatcttccattttcatttgaattacacaactttttcttccccatccgtaggcatgtgtcacccgacgcgacgcgtacgcgtcgcgtacgcgtggtctacccga

SEQ ID NO: 57080 - DNA, 392 bp, Glycine max
  Clone ID: PAT_MRT3847_22556C.1
gcagttatgcgttcgttgttaaaaaaacagggctgtcaacctggcctcagacaggggcagctgattaaggcttaaattgcctctcgatgatgttgaaactgccaaaggccccatgtctgatcttacaatttctcaatgtaaaagagcacttcccataaacacatctgggaggaaccattctggggctcgatctatcgggagattctatgacatagggcagtatgagagcacgggtcagattggagagagcactcccagaactaatggaatgatgaaatgggggggcacaggcggtattcctgccaatacatggatagcatgggcctgggctatgaatcgttgctttacggggcgtgccaggcttgaatttacaccatcagtactaagactgc

SEQ ID NO: 57081 - DNA, 531 bp, Glycine max
  Clone ID: PAT_MRT3847_22557C.1
ggctcgaggaaccaagctctcgatctcacctagcggtcttctgctgcgcaagaagaagacgcatggcgactgggagaaacttgcggtagaatggacacggtcctacgccaacggaagcggccccagtggtgaagcgctatgctcctgccaaccagaagaaaccggtcagcgaacaggcgcatagcatgtgatcggcttggatcggacagacagaaccgggaatgactgagagaggaatcaagatgcttatccaggaggtgcacacattgcagatcacggagatgctggcagcaatcatggtggtaatgagaatcactagccaagagtaatagctgtagcagggcgaagttgtatgcgcagctggccacattgcaacaccgcgctggacctgagcccgacgatcacgggcccaaggctgcgattctcctcattgcacggaacaggcttcctttggaacaggtatgtgaagctcgctttaagggaagcaaccgcacatctgagaaacgtacactgcaagcctgagtgcttctc

SEQ ID NO: 57082 - DNA, 433 bp, Glycine max
  Clone ID: PAT_MRT3847_22558C.1
ggggaaaaaaaaagatcctgccctttaaaaaatcaagacagaataattcctcccaacaaaggggaaaacaatgggtttttccctctaatgaaaaaaagccaatggccttatgggtaaaggaacgtttatttaacccgggcaaaacaatttgtttcccctcccacaaaaatcataaaaggtaaaattcaataaaaaagcctcaaataagttttaaacaaaaaaaggggggaaagccccccccccttttggcccctttctcaatcttggggcccgccccccttccccccgaaggggccggtttatttttcttgggtggcccagcccccgccccccccatggtggggcccgcccccccttgggacattttggcaaagaaaggaatggaaaagccttccaaatcccttattttggccccaaaaacaattggttttgg

SEQ ID NO: 57083 - DNA, 322 bp, Glycine max
  Clone ID: PAT_MRT3847_22559C.1
atatttaaacacactcgttgcacatagtagtgcgctctatcgaagtgaatactatactacatactaggtcacagatgctgaaggacactcatcagccagatatctgggactgttacagttgtcacgaagccgcgtcagcataggggtagtggcgttagaactcagaatcggattcttaacgccaaaacgaacagccagtccagctactggatatggatcagctctagtaagcataactagtttcttacgttgcgcaagtgctgagcgaatccttgagttgatatctgaggagcgattgttgactgcagaactaatccaagca

SEQ ID NO: 57084 - DNA, 541 bp, Glycine max
  unsure (1)..(541): unsure at all n locations
  Clone ID: PAT_MRT3847_2255C.1
ggctcgagctttgcataaattagtaaataactttgaaggggagcttcttgatggaaaccatattattaattgatctttgttattttacagttttatcctgtaaaagattggttgacaggatcatccttgccttctaaatttagcccaagtgttatccaaatggtactagatcagctttctccaaacaatgttcggtaggtgtactaaaattaaaactgtaaatttatgtataagaagcatgtgaaggactaactctcctaaaagcttagctgttatttcactcaacatagaaaaaactattaaggtgtttgagaatttgtattagtggggctgtttgttataattaaatttaagctaactcattctcgagcagaatcttttgggagtctaaaaaatttgaagggcttacggataaggtagagccatggtatggaactgcatattcccttgaaaaaatcactggctctgcaattcangggtgggtgctttctgctccagatgaaaatatgcatcttacagctgctaacanattctttcaact

SEQ ID NO: 57085 - DNA, 342 bp, Glycine max
  Clone ID: PAT_MRT3847_22560C.1
gctcactggagaatgcaacaactgatgatgttactccaatgtctttactgtaacactgaagattgcccctatgaattacttcatccccctgaagattgcaatgtgaactcatccttgtcattcacacttcagatctgcagagtcgaggacatccttgttgaaggccttataaaaggttctgtcgttcatttccacagggcgaggaccataagtgttgaatcttctggaacaatatctgcctctggaatgggctgtactggtggtttgggccgtggaaatactctaactaatggtattggcagtggtggtgggcatggtggtactggtggtgatgcattttat

SEQ ID NO: 57086 - DNA, 648 bp, Glycine max
  Clone ID: PAT_MRT3847_22561C.1
accaaaactaaaaaagaacatttgcaggaggtataagatggcattagaaaattgaatgttattaatttcttcatccacttccactatttcaaaatcaaaatgattcttatgttcttccttggatgatggcgcttcaactttgctatatgtgaagggagttctgaaaaaaacttgaggaagaagaaaagatttcaataagctatgttgataaagggagatggagaatgatatagagggtgtgcattggtgcaacatatgctctaaaatggtgaatccaatgagtgatgatgagaacatatgccctttttgtgagacagaaatttctgaggtaatggacaacctaagggaccagaatgatgtttttgacttaaggtcagcttgggtgttctcgctttacgccccaatttttctcggtttgatgggtgctttcagcccttccctagcaagaattgctccacatggaggcagcagcagcagggggggtgtggaagaagaggttgagcaagagagggaaaatgaacttgtgcttgggagaaggagaagaaccttaacttacatgatgcacctttatcgcggtcttcacattaggatggtgtctgaacttgaaaccctgaagacataataggaacatggatggcagcagcatac

SEQ ID NO: 57087 - DNA, 318 bp, Glycine max
  unsure (1)..(318): unsure at all n locations
  Clone ID: PAT_MRT3847_22562C.1
actttccccaaacaatggttggtttttgggtgcaatcaatgattggcacttctaattgctacaattttttcttcttttatttatttgtttatggatgattgttcaatgtagcgttttgttttacctgtattgtaagatttacacgatataacgttctcgttacaatattttttggggaatgttctcgcatcaattttaataatatgatcattactaaaagttagaatagaaaaaaaaaaaaaaaaaaaaaaaaaaataaaaataaaaaaaaaaaaaaannnnnnnnnnnnnnnnnnnnnnnnnnnnnnnnnnnnnnnn

SEQ ID NO: 57088 - DNA, 327 bp, Glycine max
  unsure (1)..(327): unsure at all n locations
  Clone ID: PAT_MRT3847_22563C.1
ccttgcacagcgtaacgttnagctcgggnattcgngctcgagncgntncnnnggannctgtagaaaaggcnnttggcgaagagtcacggcagttgnnaaagtgacnagngangnggttaanancctgggnaagtgtnggttaacggtcagaannattgnataaaaatnntgaaatctgaaatccttagcnctcatttggtggaagcaatgnaanaagnccagaangctngnnaaggtagggngnnggaancntacgggaaaanttgnccnnngctcgggagaagnccnannngggagcctggtggctctgagaganaangantgngc

SEQ ID NO: 57089 - DNA, 2587 bp, Glycine max
  unsure (1)..(2587): unsure at all n locations
  Clone ID: PAT_MRT3847_22564C.1
nncacggcgcgagaagacgacagaaggggtcgccaccagcacctctaaaaaccacgccaccaaatgcaccggctgcggcaactgcaccagccccgccgaaaacgggatcgagatcctctcccaaatccccagcccccgcctcgtcaacctcatcggcttcagcaccgacccaaacggcaacaaattactcgtcgtcgaatacatgcccaacggctcgctccacgatctgttacactccgttaaaaaaccgcccggttggaaccgtagggtccggttcgcgcttcaggtcgcaaaagcggttcgcgaactacactcttccaaccctcccgttattcaccgtgacgttaagtcttccaatgttttaatcgatcaagaatggaacgccaggctcggtgacttcggcttggccttaaggggacacgtggaggacgttcgcgtcaagtgcactccccccgcggggaccttagggtacctcgacccgtgctaccttgcgccggaggatcttagtgctaagagcgacgtcttcagtttcggaatcttgctcttggaaataatcagtggaagaaacgctattgatgttaactttagtcctccgtctgtggtggactgggcggtgccgttgattaagatcggcgactttgccggaatctgcgaccgccgaatcggccctccgccggaccctgccgtggtgcggcagctcgcagtgctggccgccagatgcgtgaggtcgacggcggagaagcggccgtcgatggcggaggtggtggagtgtcttaatctggcgaggaagaggatccgcgcgtcaccgatttggaacagtctgcggcggcgcgtggcacgcgtcgagagcgcgcttccggtgtttgacggcaatgattgtgatgggagtgaggaatttgtgaggatggtgaataaaggtgggagtgggagtaagaggaacgggaaagtatcgagtgtgtcgcgtgtagggtatgggagtgaggcctccaataataataaagtgatgaggtcaaagtccattggttctggttcgttgaaagggagttgggtcaaaatgcaaccgcaccaaacggagaatgaagggtttgggagaaggaaggtgaagctaaaaaggtcaaagtctatgggggttttgcaaggttcgctactgatacattatggcagcgagaatgatgtagtaattcgttcgggaatggccaagttggttgttaaggataagttggaaaaaccgttagtgaaatcgcgttgaggatagagaatgaaggaatcatttgaaattggattggattggtttcatgcagcacatgtgggagtgaataataatatccttgccttgcaaaagagagagagcgagataatgagctgtttgatgtttcggctgctgtgcctgtgaatgtcatatgattgggttgggttgctttttttcaaaactcattcattatttctgttccaagaatcggaaggaccaatgttttttgcattggatgcttttcaccattcaaccaaatttgtactgtaattctgtgtcattaatactttaactaatacggaacttttgctgtagtcctaatctattctttattttggacaatgttgtcttcatcctcggctgcgagaagacgacagagggttggtgggatttcaatatcactcattgtaaactgtaaagttggcatattgctcattgttttcctttcttttttgccggaccgatcctaatgctatgtagtacttccctttgccaagttaggtcctatatactccacctgattgcaactgagctgacccatgcttggttagaaattgtatatgctctgaatccgattatggtacaaaagaacgctacatttagttgtttagccgtatcttaacaaagacagcgtatctattttttatttttatttttgagaaagaaagaaaatggattttttgttgtttcaaataagaatataccaaacgcagtttaatcaagaagtgacaattcgcaatactcccttgaaaaataaattaaagatcgagatcggttaacaagtatttatatgacagtgaggtaatttacattggccttggacatatgaaaaaaaaagaataaaaaagtagtgtcagaaaaaattgaaaagtagttataatataaaagtctagcttttaaagtaaattttacaacatttaataaatttatcatgcatatgccaattgagtgcatgaattattcttttaaaaaatatctcatgctaaaaaaaactttttgataatttgatcgttagttgaatggaatgacacagtacaatctatgtagtcaacgtgataaggctgttgttttgttgttatgcatgtgtaattataatattatttgtacttgtataaacacgtatgtatggaattagtttttttttttttatagtcttattttttaaattacatcttatcattttaatatagttttaagtttattaattgtttttcattagtttcaaaattcttaatatcccaggttttattatattgtatttttgacatacaacaaaatcatgattatattataaggttttaaaaataaagaaaaaatgaaattatgtttgggttgtgt

SEQ ID NO: 57090 - DNA, 481 bp, Glycine max
  Clone ID: PAT_MRT3847_22565C.1
attacgcgtacggtcatgccttaggggcctgtatatgagtcgatcatggggcttgtgatagcgataatcattaggggcagcctgagttaggctatagaagctggtcctggctgaatagcatggggaatggaccacttgttgctgagagaactgagtgatatattgatgatggctgttcgtgcattcactgactgagaaggcctgttgggaaggtcatggcataagcgtatgatgtatggaccattaaggcgtatatgactacggctctcactcttaacctggaatgggtgatgcagtaactatggtcatgagttttcgtactgcatagtcgaggcattgtgttcagtactatgtttggagagtgtaatgagtcattaaacttgccttgataggtttattgagtctactatcatgaatatcatgtcacactatgtagcgatatatggtaagttatatctacgtaagaatatatgagtgtata

SEQ ID NO: 57091 - DNA, 1214 bp, Glycine max
  unsure (1)..(1214): unsure at all n locations
  Clone ID: PAT_MRT3847_22566C.1
ttcgcttgagtatttggacctctccgctaacaagtacttgggcgacattgcacgcactctctccccttgcaagagcctcgtttaccttaacgtctccagcaaccagttctccggtccggttccttcccttccctccggttcgctacagttcgtgtcccttgtttggaaccactttcaccgccagattcctttctccctagccgacctctgctccactctccgcgtccgcccacgcgtccgcaacaatctcaccggcgctcttcccggcgcgttcggcgcgtgcacttctcttcaatcccttgacatctccagcaacctcttcgccggcgcgttgccgatgtcggttctcacgcaaatgaccagcctgaaagagctcgcggttgcgttcaacggcttcctcggtgctctcccggagtctctgtcgaagctctccgctctggagttgctggatctgagctccaacaactttagcggctcaatccccgcctcgctgtgcggcggcggtgacgctgggattaataataatctgaaggaactttatctgcagaataaccggttcacgggttttattccgcccacgctcagcaactgttcaaacctcgttgctttggatttgagtttcaacttcctcacggggactattcctccgagcctagggtctctttcgaatctcaaagacttcatcatctggctcaaccagctccacggggagataccgcaggagctcatgtatcttaaaagcctcgagaatttgatcctggatttcaacgacttgactgggaacattccctctggcctcgttaactgcaccaagttgaactggatctccctctccaacaacaggctcagcggcgagattccgccgtggattgggaagctttctaatctcgccatactcaagctcagcaataactctttctccggccggattccgccggagctcggcgactgtactagtttaatatggttggatctgaatacaaatatgctcaccgggcccattccgccggagctgttcaagcagtcggggaagatcgccgtgaatttcatcagtgggaagacgtatgtgtatataaagaacgatgggagcaaggagtgccatggtgcggggaacttgcnngagcntgcggggatcagtcagcagcngctgaacaggatttcgacgagtaatcccngnatttcactagggtttatggaggtangttgcagcnaac

SEQ ID NO: 57092 - DNA, 386 bp, Glycine max
  Clone ID: PAT_MRT3847_22567C.1
ggcaaaccgaactttctttcttgcaagctaacacagaaatggaagcagggccaggccataccctgatgttcctggcacgtgtttcaatcttcatacgcgctctaaccctatgcgctgctcacggaagcaccacggatcatgacattgcgagaaagttgaaactcagcgacaactagcttctgctcactgagaagaagttcaaggttttcatggagaattacaggaggtgctactccacataggaggagtatctgcgccatgaccggattctcgcccataacatggtcagagctgcggagcatcatgcgctggaccccaccgtcgagcacggcgtcacgcagtactgccatctcactgaggacgagtttgagaagctgtacactggc

SEQ ID NO: 57093 - DNA, 318 bp, Glycine max
  Clone ID: PAT_MRT3847_22568C.1
gaggtgtataccgtttttatttttgggggccccaaggcataatccaattgccataataataataatgaaaatgaaaaccaccctgtttaaaaaaaactgtatcagcagtcaagactgtttcccagaccatatataacataattgatgatcctttttgacctgggggggaaaatcccctgaaaaccagggctttgagtttaccaaaaggataccctataataaaaacctatatataagcctatactactgcgttagctacaaaaaacctgcttaaagcttatgtggaggttattttatcttgtggcttatgccgtcggg

SEQ ID NO: 57094 - DNA, 604 bp, Glycine max
  unsure (1)..(604): unsure at all n locations
  Clone ID: PAT_MRT3847_22569C.1
gtccttaacgcctctaaacgtcttcccccactcactgttccccttcacgatgccctaggcaaggtcttggcccaagatgttcgcgcccccgatcctctccctccctacccggcctccgtcaaggacggttacgccgtcgtctccgccgatggccccggcgagtatcccgtcgttgccgaatcgagagctggagatgacgctctcggcctcactctctcccctggaactgtcgcttacgtcacaaccggaggaccgatacctgatggtgctgatgcagttgttcaggttgagaatactgaaatagtgaacaatgcctccgatggtactaagagggtcagaatattgctacaaaccaccaaaggcaatgatatacgcccagtgggaagttgatattaagaaagatgcagtagtcttgacatctggaaaaaggttaggtgcttcaaaattggtttgcttgctacagttggtgttacaatggttaangtgtatcctactccaacagttgctgttctttctactggaaacaagcttngtgagccaactactgggcatctgaantcgtgtcagattanggactctaatcgtgccatgctgcntgcagctg

SEQ ID NO: 57095 - DNA, 360 bp, Glycine max
  Clone ID: PAT_MRT3847_2256C.1
ggagcatgaatgaagagcgatcagaatggctcccaagggcttaatgtttttcgctgcgttatgcttgttatcactgccactgagtcggagccttgccgaagataccggactcggtatcaacctctacgatgaatcataccctcacgctgatgacattatctgcgaacacgtcaagcttctctacaagcgccacaataacactgatttctcctggctcataaacatcttacatgactgtgctgttcagagccgtgatactctactgatgctggactccacatgacagagcttgtctgagaacgaaacctatagaagctctcggctgagaaatttgaggttcattgagaccatcaaacaatc

SEQ ID NO: 57096 - DNA, 651 bp, Glycine max
  Clone ID: PAT_MRT3847_22570C.1
atggcctccagaaagagaaaagctaccgcttccagacctagggaaccctatgatactaccaggttcacatctgagggcgcctgggagaggtacgagcagaacattcactcccggaacatccttccggagaggaatgtggttttgtacatatcggagtatgatgagttccgtagagaactagagaggcgctgttggcacaaggccttgaccaggcagttggatgggcatattgatgtggccctggtcaaggaattctactctaatctctatgatctggaggacaaatcatcgaggcagatggatatggacgtgggcatggctagaggagtcatatctgactctctcaccttcgagtccctaatccctgccattaatttggcatacatcaggaagaactgttggaacccggatgatcccacgatcaccttttcggggacccgcaaagctagggctcggggaccatcagacacttctgctccttcctcttcagctccagctccttcttcttctgctccaccagcttccattcctgctccagttccagctccagtaccttctggcacctccgctcagagcacagtgttattagtgtcgatgctgcagagcttgcagcatggcttatgtctggtgatgcagagtatccatgattag

SEQ ID NO: 57097 - DNA, 1831 bp, Glycine max
  unsure (1)..(1831): unsure at all n locations
  Clone ID: PAT_MRT3847_22571C.1
gcaactcaggcctccccaacccaaaacccaaaccctttccctattttttttcatctttgtttttcaatttccatcttcaacttcaacacttaaactccttttagtttcaataatccacaccccaaaccccaaatctttccctatttattttcatcttagttttccctaggaccatatattataccatatttatatatcttcacatacttaataatatataataatgggtgttgtacggacgtgggagagcaggagggcggagctggaggcctttcgccggagcctggtggcagccgccggcatccagcggcggaaagacgatgagggggggagaacccacaagtttgtttcctcctatgaacatgatgatggaaagggtaccttaatctgtttcccttctggagttttctactttggtcttggtttagttaatgttatgtgcatccagcaatcggattgtttggatcagaagtcaattcgaggtgtagatggaacttgaagcaagtaatcaacccaagcaagagcgttcaaggacaagatggacagcatcccttgacaagatatttgcagacttggttgtcaagcagattcaactggggaacagaccaaacaatgtttttgacaagaaaacatggaatcacattcgtgatgagtttaataggcaaacagaccttaatttcaacaataatcaattgaggaagcatctagatgttcttcggactcgccactataatttgaaatctgcttatgatcaaaataatgactttgtaatggatgattcctgttgcattggctttgaacagtgggaagatataggggtgcagcctaggaatgaaaatgttaaagtgaaagatagtccaatatatgagcaactctgcacaatattcatagattcagctgctgatgggaaatatgccaaatctagtcattacgaagagttggaaaaatctatcgtagcagatgcaacaggctttactccatgtccataacttaaggtctcacattaggaaaacccaacaacaacaaaatttaatccagggaatatctcaactgctgagaagctgaccaagaattctatagataagaaaaggaaacgatgatgagagacgcaaacgactagtcgggatcaagacacctgcaatgctatggtagaagccttgttagggatggttgctgtttcaaggttaagggcagttgtttcaagtgtaagtgatgataaattctccataacaaactgcattaaggctctagatgagatagaaggcattgatcaacagctctatttttctgccctggatctctttgagaaccctagcttaagggagacattcatttccttgaaaagtgtcaagatacggttgacatggttacaaggaaaatgcagcaaaactcccttccattagaacagacttaaagccattttgaaatcaactgtaattacttagttataaatacttcgtttagtatacccttctttttgtttgactgtaagtaatcgcatttgaagttttaactcttgcaacaagtggtagttgtttacaagtgttatttcatctgaaactcgcgaccagtgcaagcaactaaaatcagcatgctgagataaattttaagaaaatgtcatcgataaaagtctgcgtgttagatgtcaaagatcacannaattgaatggttaaatcctcctgaaaattagaagcaatttcaaagcataaggattatgttttctcaacaaaggtcacgttagtagagncagtattattgtatagcaaaagaaggatacaatggctccagacaatcaaannnagnnnnacacaatgaannaagcccnngntca

SEQ ID NO: 57098 - DNA, 967 bp, Glycine max
  Clone ID: PAT_MRT3847_22572C.1
gcctcgcccggaccgtgccggaatggcatgctcgacccgcgcgtccgacggctgcgagaagacgacagaagggtacggctgcgagaagacgacagaaggatacggctgcgagaagacgacagaagggggaaagagaaggttaccaattaacccacactttaccaattattcactcactcactcactgttgcagcaacgccattgtgtgaaatcaatgttttgagatttgttgggaacaatggggagcgtttcgtccgaagatggttccgaccgttgtgggagttatagcctcagtgctgatgtcagcgagtccgagagctgcagcagcttctccgcacgccgcttcgacgccgagggagcttccagctccgccaacctctcgccgcggcccgtcgctgctcactttaacttcccgccggcacaggtaatgcttcccgtcattggcggcaaagacgtcgtcgtttgggatcacaagcgtgacctcgatttgtcggagcaattgcattttgcagaagtggaaatgatgaaggagaggtttgctaagctgcttctgggagaggacatgtctggaggcggaaaaggggtgtgtactgcacttgcaatctccaatgcaataactaatctctctgcaaccgtttttggcgaactgtggaggttggagccactggcgccacagaagaaaaccatgtggcgtagagaaatggagtggctgttatgtgtgagtgattccattgtggagttagtgccatctgtgcagcagtttcctgggggtggaacctatgaggtgatggccacgcggcctcgctcggatttgtatatcaatcttccggctctgaagaagcttgatgggatgctgcttaatatgcttgatgggtttcatgacacgcagttttggtatgttgaccggggaaatatatttgggtgattccaaggattgtgatgcctatggtagaccttcggttaggca

SEQ ID NO: 57099 - DNA, 200 bp, Glycine max
  Clone ID: PAT_MRT3847_22573C.1
tccatttgtggatgtgaaggaataggaggttgttttggggtgaaatgagttacactaggaatgtttatatactgggtaactcacctcttttggcaaacattcttatccaacagggtgggtggtttcttggaaaatacacttaagttaaacattttcttattaaaaataactataattaccataaaattaaaataatttta

SEQ ID NO: 57100 - DNA, 600 bp, Glycine max
  unsure (1)..(600): unsure at all n locations
  Clone ID: PAT_MRT3847_22574C.1
cccgcgtccgcttctctttttactgttgcagtaacggcattgtgtgatatcaatcaatgttgtgagatctgtgtgggagacagtggggagcgtttcgtccgaagatgcttcagaccacatgagcaaccgttgtgggagttatagtctcagtgctgatgtcagcgagtcggagagctgcagcagcttctccgcccgccgcttcgacgccgagggagcttccagttcagccaacctctcaccgcgccccgtcgctgctcactttaacttcccgccggcgcaggtcttgcttcccgtcattggcggcaaagacgtcttcgtttgggatcacaagcgtgatctcgatttgtctgaagtggaaatgatgaaggagaggttcgctaagctgcttctgggagaggatatgtctggtggtggaaagggggtgtgtactgcacttgcaatctccaatgcaataaccaatctctctgcaactgtgtttggcgaactgtggaggttagagccgctggcgccacagaagatagctatgtggcgtanagaaatggagtggctgttatgtngtgagtgattccattggtggagttagtgccatctgtgcagcag

SEQ ID NO: 57101 - DNA, 141 bp, Glycine max
  Clone ID: PAT_MRT3847_22575C.1
ctttgcacttgtctccgaattagttatctgggagaagcattattcccattcgcgagagattagggctagcatgaaggttacaggcgggggtgtgatcatcggcatggccgtggtgggtgcaccgatgatggcgcaagccat

SEQ ID NO: 57102 - DNA, 443 bp, Glycine max
  Clone ID: PAT_MRT3847_22576C.1
aactcccaaaaaagagggatttcggggagggttcgcggttcacttgatctcatcataatcgtcagcgtcaattgaagaagatggcgatcagaaacatcggcggcggaaggactgaagaggcgactcaccccgacacgttgaaggcggctttggctgagatgatctcaagcttcatcttcgcgctcgccggatcaggctgcgggatcgcctacaacaagctcaccgacaacggaggtgccacgcctgccgggctcatctccgcctcgatcgcccatgcattcgccctcttcgtggtcgcctccgccggggccaagatctccggggggcacgtatatccggccgtcacctccagcgcgttggtagctgccaagatcacctgcctccgcggcatagtctacgccatggcccggcttatcggctccaccggatcctcccccccactg

SEQ ID NO: 57103 - DNA, 841 bp, Glycine max
  unsure (1)..(841): unsure at all n locations
  Clone ID: PAT_MRT3847_22577C.1
ccacgccgtccgaaaaaagtaaataaatactaaaaagagtttttgcagagagagatgaaatgaaaaatcccgccaatgctttgttgcagtagcatttggaagtagagaaccctctttcattctgtttcaatccaatcgtcgcaataatcacttttttctagggtttgctttcctatcgcatttctcttctgaaattaagctaagggaatatgttgtttggttggtactgaaatgagacatggtgaagccaattcgggccagggtcccaaggtcaatttgttgcagcatgccaatgctcttgagaatttctcctcccaagccaaatttttgagctccacttttctgttttctgtcccacctaagaagccacaccacgaacaaccaaaccccgggtttgtatttcgacgaagtgaaactattcaaggttcacagagagtacaggtcgagaaggctttggctgctcattcaagtctacaaaattctagtaggaactatgtccaaccaggaaaaactcaggttactcctcagcttcatgaagataggagaacaacttccttccatggaggctatgagaatggcaaccatagatgtcctgatgttgctgcaactccaattgttaacaatcataattctcggggtttggatggttcggtaaacaatcatactaattacacaggccaaatcaacaagtcttccaactgcatggctgtagatattgatgatgatgattctctacttgcgaacattgatgttgaccaaattgttgaagactattgcactcccaaaccatcaatatccaagcttnctnctataacaccaactgccgataaagaaaattttg

SEQ ID NO: 57104 - DNA, 376 bp, Glycine max
  Clone ID: PAT_MRT3847_22578C.1
cttggattaccttgagagaaatggcgatttcatgggtggaactggttggaagatgaccgaattcggttgggatggaatgtatgcctgtgttcaaacattacttgccttgttgctgatgcatggcagagctatgcatcatgctgcaaattgctgagagatatcagcaaagagctgaacttcctatgtgttcgtaccctgtaaagggtcaccgaaacggtcagaaaactacgcgtggtctcatcttacacccgtgatagtacaacatgccctttgtaacaagtgcctcattcttagtcactggacactctgactacctaggtatctgtggtcgaaacctgaggcgcagctcacgctatgttccccctgatgttcttat

SEQ ID NO: 57105 - DNA, 358 bp, Glycine max
  unsure (1)..(358): unsure at all n locations
  Clone ID: PAT_MRT3847_22579C.1
gggggaaagttttcttgggcaccctatttgcaaattttcaattttcaattgcggactgagaaattttcaatttttgttgggttttctgagtttcggataaagaatttctggggggtctgaaagattttgaggagtaatttctgggtttgatagtaggggggagtatagagataattaccaattggtggagagaaaggtgaacttttttttattggcggagaaaaaaagagaggagttgggggtaattaatttgtgggtttgatagtaattgggattggggggtatgcgggttatgtaaagataattaccaatttgttgaaagagaaggaagaggagaanagagagagagaggagaaaa

SEQ ID NO: 57106 - DNA, 1773 bp, Glycine max
  Clone ID: PAT_MRT3847_2257C.1
gagaactagtctcgagttttttttttttttgcttagaaatacaacatcttatttataagtcacagtgtacagcggatataacgggaaatcataaagtacatttaacaagatcacatgattctaaaacactactactaaaagtcagttacccacaccaaactttttctatgaaataaaagcacaacatggagtaattatggcttcaagctactactaataagaagggttgacttatatatgtgctactaacttttatatatatatatatatatatatatatatatgtgtgtatgtatgcttatatgtgtgtgtgtgtatgtatgctgaagagtactagtattgtccgctaccatgtctttagttccgcagttaattagagtactactactgcgtacaacgtacgtggtcgatcatatcactatcatcctggtatacaggatggcgagcttgcatactttggcagatgttaataataaagagaaccttgccaccagttcccccttgaagcactgtttgaatcattaccatttggatcatcatcatccttatctttcttaaaaatatggtgggattcagtggtcctggttcttggggaataattttcttgaccaccataatggattgatgaactgtagtagctgggctccactgtctcattctgatgataattggtactagtagtattattgttgttggagacaccgctagcgctgctttcacctttgtaactgtaatttcctggtgctccataatttttgcatcccgtgtcctgttttgttgaatctctccctccaacagtggaaggaggtgggaaaatggagccaaagatgctggtggatgaagatgaagtggtggaggggtccttgggaccaaaaagatgatcaaagttggtgaatgatgatgaggaagaacctcctcccactttctttttgttgttctccatgtcttcttgggtggtgtgtgtgtgtgtgtgtgtcacttacgactagctagtaatttagctagggaagcttaattacttagcttttatgtttttggagaggtatgataaaaagctagccttttcttttttctttgtcaaccaacgaacaaaactactatagtttgataagtatatatcctataacgaccaaaagattggatatttgcaggttgggaagaaggcaacaaaattaaagagataacgaagggtgggaaaaagggtagagagagagagagagagagagagagagagagagagagagagagagggtggtggaagagggcagagacgagggagaggagagcacgtgatggtagcagatgatgtgtataacattatacgtataagagtgctatttataagcccaaaaatatgctgcgcccatgtgcccctcattcaatttccatccctttccctatcttagacacatcgacacccacttgggccccacgtggacttgataaattcaaacccctcctaccatatgtcttgctcctccatctttcactttctacgctctattttacctactcaagtgtattaaagcaataattttttttagtttttgaaattgaacaccataccaaaaaatttacaatattgatttatcgtgctcaaacaattaatctatttttttattattaaaacaaagatttgagtaatgaattttgaaacatagagtgataattgagtccttagaatctcgattattctcatttatttaattgtgataaattaaatgagtataataaatatttattgatataattcaatatgtacttaaaactgct

SEQ ID NO: 57107 - DNA, 494 bp, Glycine max
  Clone ID: PAT_MRT3847_22580C.1
cggctcgagcggcgtgcaggagcttgtgaacaccttcttcagcttccttcgacgcaaaacagactttttcattggaggagaagaagggatggcagagagcccggcaggaggccgagcggcgggagaaggcggagcgggcggccagactggccaaggaagccaagtcagagacctcagggccccagatcaaggagctaactgatgaagaggcagagaggctgcagctagagattgaccagaaaaaggatgcagagaatcatgaggcccagctcaagaacggcagccttgactccccagggaagcaggatactgaggaagatgaggaggaagatgagaaggacaaaggataactgaagcccaacctatgcaacggagcagacctgcccaattaccgctggacccagaccctgtcggagctggacctggcggtccctttctgtgtgaacttccggctgaaagggaaggacatggtggtggacatccagcggcggcac

SEQ ID NO: 57108 - DNA, 864 bp, Glycine max
  Clone ID: PAT_MRT3847_22581C.1
atataaaaggggatcttactctgatgaacttaagatacctgtagttgaacttaaagagatcatgtcattgatatatacatttatctgcatttctgcatgtatttcttcagcatacactattaatacatgcaaaaaagatggctgtagacactaatgctcacaagtttagataggaaatacaatttaaaatgtcaattaattagcttattcccccctcctcaaagtataagtataggtagaaaagatagttggcatattaaggccgaaaattatttcttaaactggttagccagaagtcctacttggaaaacagcagttgtctgcaatgcttaccagaatggttagctagtccacttctcacaacttcagttatcaaatctttgaagatcaaccgttcaatatccaacacgacatttggtatttcactgtaactgtttgtgtaaattgtgggacagtgcatcaactcttcccacaggagacttgtcaaattctcatcctcatcattcaggttggcatttgtatttttatgttgcaacttatcaatttctgtgcaaagctcatccaaaagcagctgtcctcttagttttctacctgcttgctgatttggttggcaccacagagtagaactttccagtattattttctgagctagaatgtcattaacaacatcaaatattagctttctttgcatttgctcaggactattcagcccagtaatattcttggcattatgttcaatgttgaagcacatcttgtttgtcttgatttgctccagtgcaaggaacaactttgggtttattgggtaacttgatgaatgaaaaacctggctagagcttggactgctgagcagccccgatgctaaca

SEQ ID NO: 57109 - DNA, 382 bp, Glycine max
  Clone ID: PAT_MRT3847_22582C.1
aaaaaaccccaccctttttcccagggttgggttaaaaagggggggggaaaaaccaacccttatggcccaaaagggggggggatttttttttaaaaaggggtgggtttgggcagggttaggttttaaaaggaagggcccttccattcccaagaaaaaaagggaaaattcccagggttggggggcatgggggggggttcagggggcccaaccccgaaaatccctgaagggaaaaaaaggggggggcccaatttggggccaaaaggaaaacgggccaggttaaaaaaacccccaaaatttttagggggcttaaaagggggccaagctttttccggaaggggggccctgaacattcaaacttttgggaagggcctaaaaacccccc

SEQ ID NO: 57110 - DNA, 360 bp, Glycine max
  Clone ID: PAT_MRT3847_22583C.1
acaagggctggatgtaacttcttccttacgaggaggacttcaaattccatgattatagagccgtcatcaaatgtgaagacccaaatgcaaatttgtattcatttgttgggagcatggagtttggagagcaaaaatatcctctttctgcccaacaacttcttctgagagactctaagcttcgtaatacagactatgtgtttggagcagtcatctttactggtcatgacacaaaggttatccaaaactccactgatcccccttcaaaaagaagcaaaattgagaagaagatggataagattatatacttcttgttttgtgttttatttctaattgcatttgttggatctattctctttggca

SEQ ID NO: 57111 - DNA, 186 bp, Glycine max
  Clone ID: PAT_MRT3847_22584C.1
gaagagaggagcccgaaagggtgcacggcttcggagcccgaattttacttgcagtgaccgaacaggaggaggcttacctgtcttagggggataagaccctaggatttcatcgagactcaacatgatgaatcagaacgaaacttgattctgcactgcatcattatccctatgtatacactgtgccca

SEQ ID NO: 57112 - DNA, 318 bp, Glycine max
  Clone ID: PAT_MRT3847_22585C.1
agggaatatggaaagtgagagtgaggtgacgatgatcccatgttttgatttttgcaaggcattagaagaaggcagtgaggaatggaaagagatgagcaagaaagtgagagaagcatgtgagagtcatggctacttcctcttgatgtgtgatgagatcatccctgagagtgtacgtgaagagatgtttgatggtatgaaagaattgtttgatttgcctgaagaaacaaagcagcaacacatatgtcaaaagccttataggggctacattggcaagaactctatcattcccctctgtgaaagctttgggtcgatgatgct

SEQ ID NO: 57113 - DNA, 217 bp, Glycine max
  Clone ID: PAT_MRT3847_22586C.1
ttttcgtccgttaattcctcaggtgattctctcttctgtctctgatcgcttcgcgatttaaagggtttgctccgaccaagttcaattatcttatccttttgcttttcatttgtgttttgacgaaattgatggcaaacaagttccaataaatgaagaatctggagcgatcgacaaaatttggtgggttttggttgaaattatgcgaaattgattcttt

SEQ ID NO: 57114 - DNA, 280 bp, Glycine max
  Clone ID: PAT_MRT3847_22587C.1
ggctcgagactttttctctccagtgttcttcctttggttcctcccatcattctttttttttttttaaaaaaaaattctctcccttgttccaaccacagaaggttctctcctacagatcaattctttcagattttcaatttccaaccctgaaaaggccataaaaatttccctgattttcgttcaggaaatttccctccctcctattttctggtgtttcattgatcaaccccaccaaaaaacacttttttttttacaaaaaaagtttcctcctcaacccgcc

SEQ ID NO: 57115 - DNA, 281 bp, Glycine max
  Clone ID: PAT_MRT3847_22588C.1
cccacgcgtccgagagtacatgccaagtttaactggcagggtgatggatgaaagtggggctacattggagctgatggataggaacatttgcagtgctgctggtggtgttggatcttgcatccttctcacagaacggatagtccaattgtgtaatgtattgatatccaggtattatgatctgactgcaggtgattcgtacgatcggtagcggatcgggcagtcttttgactgttacctggatatggcacagggcacgcaatcattcatgccatgatctataa

SEQ ID NO: 57116 - DNA, 450 bp, Glycine max
  Clone ID: PAT_MRT3847_22589C.1
gcgaagtgaaatgtggagtggatcaacattgatgaacaaatcaatggcataaattttcataaaacgaaagcaatcagatagcactctctatgaattaacaaaaactaattacttcatcaataactagttaactaccaagttgcactattgcatcctgcatttaagaagagacaactattattagtgccccccctccccctcctacaattggggtaaagtgaggattatccaagccttatatagactacttagccatatcacttggcgtgtgggattaaacacacaccctcactcctaacacaatgatggtgctggaggctgaaatgaaggcatccaaaaaggctgcaattaaggcagactaggggtaaccgcaattaaggcagactaggggtaaccgcaattaagccagctttccaacaccaaccatccaccagagccattttgatttat

SEQ ID NO: 57117 - DNA, 146 bp, Glycine max
  unsure (1)..(146): unsure at all n locations
  Clone ID: PAT_MRT3847_2258C.1
cttttttgaagatgttttggtgaatggtaaaccatggactgctngagtcccggaggtgnttagtggtcacatgtgtatgtanntgctcatggaagtcgtgacgtgagatnttgtggttgtggggcantctccatcnagnaactgcc

SEQ ID NO: 57118 - DNA, 471 bp, Glycine max
  Clone ID: PAT_MRT3847_22590C.1
aaaaaaaaaaagcaaaaagattttttttgggcaaaataaaacaaacatttttttcagggaaagtaacatttaaattactggacaaaggccttttcaaaagggggaaagcaactaacctcccctatatccgtagaaaatggagggaaaaactttataatcccactacagtactagttacaagcttaagccaataaaactttctcgaaaaagttaataaagtttctctcaaaaacaaatatcggaattccccaaatatgggggggcctatgaggaccaaaacaaagggctggcccgggggttttccaccaggctaattaaaggaaatacgattttcccaaaacataaaaaaaagccacaatctctaaggggctaggaccttaaattatgggccctccttacaggggagccttggttaaattaaaattatccccccacaggcaagagggatcaagtggaattaaagctccaaat

SEQ ID NO: 57119 - DNA, 418 bp, Glycine max
  Clone ID: PAT_MRT3847_22591C.1
gcacaagtcatgcatcatgtggattacaatctactagttttcattctccattccctgccaggattttcttattttttgaaacttagtgaaagagttgtccaactaatagagaataaggtgcattaggagaagaagacgaaattactttatttatcaagatggtatttgggtgcattcatgcatgtcaccaatctatgtgcctttaaactggactctctcgaataggacttttgtacaaagcaatcacttcaatatatgaaacgggttattatagcatatattatgtgtgaatgcgttcgttgaccttgcttgagaaagagaggatgcttcacaatctcggggggaagggatgtgcattgttataataattgtctacaatacaaatagccgcttgatctgctatcaatgttgctaagaa

SEQ ID NO: 57120 - DNA, 239 bp, Glycine max
  Clone ID: PAT_MRT3847_22592C.1
gcgtacggatgggagacgactgaaggcgcaaacacaaacactatcaacaccgccacctaattacggttatattcatagtgttgttgataaataattgttgccattttcaaccacttcaatttcctaagctttctacagcacataacaaactccagttacactatatactaattgtacctctttgacggcttgcttacttgaaattcatccactaatctctttaactcggacgtatatga

SEQ ID NO: 57121 - DNA, 706 bp, Glycine max
  Clone ID: PAT_MRT3847_22593C.1
gtagagaatatttgcccaaatactagaacataaatgtacgcaataattatatgttcacaatattcacatagaacactcaccacatcttgatatctagtacatatagttcagaatcaactacaccatttcggattttaccaccaaagaagtaatcattttcatggctgacataatgagccaaagcacaagtttaaattggccatgaagaaaaaaatacacctccaaaaacaatttctcacacaaataacctccacatgaagaaggcaaaagctccttccagctatagctagatgggagcttaacttcatgatatgacaaaaaagttgcatgagttgaggaaccaaaggcagtagtatttccacttactagcatgaagcatcacatgatggcaacctaagtttcatacattatatttgctgcatccagaagaagaaaaaccacatcaattgaaggactagccaggcgattgaatggaacaacttctggatttggtacctaaaagaacttcatgcatgaagcacctcataacctgtccatccagtcaagaatactactgtcttgagaacaaaaatataaactagaaagatcaaaatctggagtatccaattccagtgtatccaggagagaaattccgcaaggttcattatcatttctagccctttgtgtagcatagcttgcaatgtcatcgaaattggtgtagtccaat

SEQ ID NO: 57122 - DNA, 339 bp, Glycine max
  Clone ID: PAT_MRT3847_22594C.1
agggggaacgttttttttgaattttattcaaatattttaatatttattcccttaaaatacccttaaagccccttaatttttatatatatctgtcccaggggtaatacacctataggaaattttgattgcctgatcttattacttgggatttttgtttgggtggaaacccctgtcgggaaaaatgggggtaaaatcacattcttttgccttaatggcacaggctatagagggggttccacacgcattaacacattgaatgacccttgcaaaaaaaacatttccacttttttctggctcaaaaactttgtcaacattcaccccttaaagcttttctgaaaa

SEQ ID NO: 57123 - DNA, 487 bp, Glycine max
  Clone ID: PAT_MRT3847_22595C.1
ggggggggaagtaacgatcacttttttgattaaaaaaagagaatgggggtcccgaaaataaaaaagaaaacaagggggatagggggaattaaagagagaaaaaattaatcctgcttcctcaactccttggaaaacctttttataaaatttttgggggccttattaaccaggggggcgttgtttttatcggggtttcccaaagggaacggggagtccctaaccctaaactgccttaccataggggtccgtccaaaccctgggagggcaggggacgctttaaccttaacggggttttttttgttgttgttgaacatttccatcactgccttcattggggtcaccggcacaacatcgtcgtccttcgtgggaggggcgtggacacaagcaaaaaaaagggggggggggggcttccctcctgtggggaaaaaaaaattgtggggcgtgttgctgcaactgaactcgtactcccttggggcaaaaaacttaa

SEQ ID NO: 57124 - DNA, 502 bp, Glycine max
  Clone ID: PAT_MRT3847_22596C.1
agattgcgatgtttgggattgcagcagtcagaaggagtgattgggcctaattggcacaagtggttctaacaaacaggcacaggacagagcatgttgatgcatgtcagtggacataatcagaaccacattcctgggaattaatctttccaatagaggtatgtgtgacctaataatggatttgaaatgaggagatctgagtgggcaaatcagacttcatggcattggaggatgcttattgacaatcccaaacagtctacagtctttgatattcgcttgggaatcatctatgattttgaaattgctggtaatactctgatgccaactttttctggtccacaggctactgccagatcttctgaaaatgcggaatcctctgaatgatctggaatataggttgactatctcttgctcagaaggctaattcaataaatgaaattaaggctgaccctcttgtgtgagaatgctctggctatataaaaatttccacacctcttttaaatga

SEQ ID NO: 57125 - DNA, 373 bp, Glycine max
  Clone ID: PAT_MRT3847_22597C.1
tccaaccaaaaaaaaacgctatttcttacaagtccaattcacaggtcaactttacctaacaatctcaacgactcgtgttatgactattgactcgtcaatttcacaaaaatgtatgttacaacgtgttttgggtttcgatgggagaatttggatgaaagaattttaaattctttaattgaattttttttatttttaaaattttgtatttgaataaaaaaaattaaaattggaagggtgaaaaaaatgaattcaaagaaaagagaaaatatgattaatgtatttttaaagagaaaaatattgatgcgacataaggagttgcaggaagaaaatcgggaaacagcgacactacatacagcaacacacccgacctaat

SEQ ID NO: 57126 - DNA, 238 bp, Glycine max
  Clone ID: PAT_MRT3847_22598C.1
acggctgcgagaagacgacagaagggttccccccatgtactcaactgtgtttcacacgagtatagtcatggcatttgcactcatgctaaagggaaatttcagcatccttgttatactttcaatttctttgttttgcttttactcaggttatgattatatctatctatggcttcaactaagttttctttttaaccatttattctatgcactacggatcctaatttatacaattttgtgg

SEQ ID NO: 57127 - DNA, 1873 bp, Glycine max
  unsure (1)..(1873): unsure at all n locations
  Clone ID: PAT_MRT3847_22599C.1
ctgttccaccgaagcactctctgtctttctctgttgttgtctcgaaaaccctgaacccaaagggttcgtttgtagcttcttcctccctaaacataccgagttcgccacctggaacccacaactgagtcgtgactcggttctttcacactgaaccatgcaagttttctctaacgctcgccgagcctcttggcttctcctctttcctcatctccgaacctcggaagctcctcactccaccgcgctctctctcttctcagggctcgcgcaacgtgattcccggcaagtgaacaccgatccggtacactgtttgtcgaaagcttttttctcttccggaatggataccggtgaagcaactccatcagaggatgtgaaggaattatacgataaaatgcttgactctgtaaaagttaaacgatcaatgcctccaaatgcttggttatggtcaatgattgcaaattgcaaacagcagcacgatattagacttctgttcgacattttgcagaacctccgcagatttaggttgtcgaatcttcgaattcatgacaattttaattgcaatctttgccgagaagttgctaaggcatgtgttcatgcaggagctcttgattttggaatgaaggctttgtggaagcataatgtctatggactgactccaaatattgcatctgttcaccatttactgacgtatgctaagaaccacaatgatactaaactgttggtggaagtaatgaagcttctgaagaagaatgatttaccattgcaaccaggcacagcagatataatttttagcatttgttataatacagatgattgggagttgattaataagtatgcaaaaaggtttgtcatggctggcgtaaaactacgacaaacctcatttgaaacagggatggaatttgctgccaaaagaggacatactgagtcattatggaaaatagaaaagttgagatctgaatcaatgaagcagcacactttgataactgggttttcttgtgtcaagggtctactgttggaacgtaaacccagtgatgcagttgctgtcattcaagttctaaatcagaccttgtctgatacaaagaaatcaggcatcaagggtgaacttcagaagcttgtatccgagtggcctttggaagttattaagcaccaaaaagaagaggacagaaaggcattatcagcctctttgaaatctgatatccttgtcatggttagtgagttactgagcgtgggtcttgatgcaaatgtaagtttggaagacctggacagaaaggaatgtattccacgatagcatggagttcagaatttgatgacattgtgtttcagaatgtgcttgtttgcagagtatctccttaccaggatgcttcctagccctggttagatactgagtctgcgaacattgcaaacgttgattactaaattaaaaattattattttgcttcaattcttactatttcttattttctgtacaacaagtacttacggttttggtagcatagtagtgggatttagtacgtgttttgagaactgaaatttggatatcagtagattatgttgggacaaaaataatctagcacatgtcctctactctgaactgccagaaattgctttgtttctcttcaagtgaaagatacaatcgtggctttttaacctctagttcaagtgggccctaccgcgaaggaatgctaaggcctaatagttgcaatttgtgtcaactggtcgagcagaaggtccggtgtaagtgtaacattcaattgttctacttgaagtcttgaaccaatgtttgttttttattcacgaattgtaggtaatatgggttaacttgtttatttaaatgctaaannactgtgtgcatagtgacctactacnnngnactcaa

SEQ ID NO: 57128 - DNA, 282 bp, Glycine max
  Clone ID: PAT_MRT3847_2259C.1
cactcactatagggaaggacgctgcacctcctggtgccgccgcgccataattgccgggaccaaccacgccgcttaccacgcgttcgcaccttatggcgagaccaccggttatatgttcggacggggtgaaacttacaatttccaaccgatgcttttggacccaattcaccaacacttgctgtgagagtgcgaatggattgatccagccgctgataggctgtagctaggataatccaagacaccctttttgaactcataattggaggatgatcgacgagagct

SEQ ID NO: 57129 - DNA, 142 bp, Glycine max
  Clone ID: PAT_MRT3847_225C.1
tctgctgcacacactgtcatcaattccaaaacaccttaactttattgagcacaccagtgatattggctggaaggaagatcagagagccaagcctgttatcattgatccaactctttataggggcaaataatctgctttattt

SEQ ID NO: 57130 - DNA, 375 bp, Glycine max
  Clone ID: PAT_MRT3847_22600C.1
gtaattgacttacaggatagagacaattaccttctgaaggtaattgacttacaggatagagacaattaccttcagaagctgtcgttgtaaatgttacatgtggtagtggacgtggtggtttacccacctctgcttggatttgttatgcggattacaatcgataataaagcgtcaacaaatggattcgcactgcacttgggaaaggtttgaaaattgtgtttcttactagagttgatccttttccagtagctttattggctgttcttttgggggttaagaatgagattctgtgttctgacctcactaaccatatgatgtctcgactttttgagaactgtacgaacctaaaatatcttgacggtgagcgttcttttg

SEQ ID NO: 57131 - DNA, 562 bp, Glycine max
  Clone ID: PAT_MRT3847_22601C.1
cggacgcgtgggcggacgcgtgggtcaagcttaagcccaacaaagcttaaaaaaagaagataagaaaacccaataattactaactcttgaaaaatgaagatgggtagtcctagcatgggaggctcaaagagaaggctttcaagcagagggcttggaggagcccttagggagcaaagggcaaggctttacataataagaaggtgtgtggtcatgctcctctgctggcatgactagctagtagtactagttgaggccttcaaagttgaaatccaaagcttgcttccatgactatggaacaagatttggttatcttctcttcctttgttttattcttttcttcttccttcctttgattcatatggtggagtgtatatagctgacggctggtttattgtgggagagatgcaacaattttttgtatggattgctggccttataaatacatatatggcttggctttatgtacatcagaagtaacagtgaattatttataacaattccaatttttatcatctcgagactagttctctcctcgcccacgctcaaacgtccctcaaagacg

SEQ ID NO: 57132 - DNA, 366 bp, Glycine max
  Clone ID: PAT_MRT3847_22602C.1
cgacccacgcgtacggacaggtgcaaaaacactttagaacgtttgatatatttcaagcaaacattaatactggccgccgagcatttttataaccgcgcgccaaaaaaaatatctttttctaaaaacacattctcctaaaaataaaatacggaaatgctccaaaccacagaccagcatggtacaatatttcctattccaacgaactcgtatcaaaatcacaataatgctactcgtactatatctgattcaacaaaatcatcatatcagaactaactgcctataatatccaaatgtcattaactatcgaaatcaattatctcacatcatacaaaacaaaattaatcttgaaaacaaataactaaaaat

SEQ ID NO: 57133 - DNA, 266 bp, Glycine max
  unsure (1)..(266): unsure at all n locations
  Clone ID: PAT_MRT3847_22603C.1
aattgacttacaggatagagacaattaccttcagaagctgtcgttgtaaatgttacatgtggtagtcgacgtcgtggtttacccaccacgtttactaccacatgtaacatttacaaaagcgattcgcacagcacttgggaaaggtaagaaaattgtttttcttactagagttgatccttttccagtagctttattggctgttctttttggcactaanatgaaattctgagttctaacgccactaacctatgctgacgcgattcttg

SEQ ID NO: 57134 - DNA, 309 bp, Glycine max
  Clone ID: PAT_MRT3847_22604C.1
gaaaaaccaaatacgtaaccaatttataagtttaaaataataaagttccaattttgaaactaattttgtttcagtttgtttgcatcatcggacaaatggtttttttttaaaatgaatttcctagccactttaacggttttaaccttaggagacacagggctttgttgcaaactccaaaaaagaaaaatgttgcagtttcacacttaacggggctccagagttttttttgttttttgaaagcatatccttttaaaactggcccttgttaaggtcactgccatattttttaaggcaatcctggaatgcctt

SEQ ID NO: 57135 - DNA, 285 bp, Glycine max
  unsure (1)..(285): unsure at all n locations
  Clone ID: PAT_MRT3847_22605C.1
ttgttctgagataatncagataccctttaaggtacaaaacctctgtttttgtcagagtagatttaaagtttctccctttatttttattcatttttgtgtttggattattggtgtggtagactttgtgatattcttcggttcaaagatttaatggggttatctgagaatttaattgatgggttttgttttgttgattgagttttattgctttaccggcagttattccttgaataaaagaagatccgtgttcatctcactaatcaggtgctgaagattcgttttnnt

SEQ ID NO: 57136 - DNA, 170 bp, Glycine max
  Clone ID: PAT_MRT3847_22606C.1
caactacctctcccctagaccacagtttcttcactacaaaccgaaatctcgaatggaactctgcagggaaagggaattggatgacagcttcatatctggaagcttttcagatacagaagtcactgaggattcccagtctgaagtctcacagaaggaatcggaggatgttt

SEQ ID NO: 57137 - DNA, 333 bp, Glycine max
  Clone ID: PAT_MRT3847_22607C.1
tcgcttatgtcttaagcaccaacttggccttgcttgtgtggcacttcatttacctgccttgtgtagtttacaggtctcttttactgactccagagcaacatattatggtagccctgactgctatgggaatccaaggggagcttgtggctttggtgaatatggatggacttgtgatgatggaagagtggcacgagtgtctaggctatggtggaatggaagtggttgcggtgcaagctgtcacgctaggtgcagaaaaccacaatactgcggtgcatacgcgacctttgtcgaggtttcagactattgctaatgtgactgaacagactctatatt

SEQ ID NO: 57138 - DNA, 254 bp, Glycine max
  Clone ID: PAT_MRT3847_22608C.1
cgtgttgattcttatttttggaactgataaaggaaacatttttattaagatttgaaatcacagctttcaagatagtacaatgcgcaacactttttaaaaaggctttatgactataaactataaaagctttgccccgatgaaattacactggaggcatatttttgatgcgccttctagctcattaattttcattggtgcccaaatgtttggttggcaacatttttgattgacccctggatggcgacccgacgggg

SEQ ID NO: 57139 - DNA, 396 bp, Glycine max
  unsure (1)..(396): unsure at all n locations
  Clone ID: PAT_MRT3847_22609C.1
ggcgctcaggcgcgggcgggagaatccggaccgcgatttccgagnagcccatcaccagaacgcgggggtagccgtggcgccgggccttgagtcctgccacgcgctggtgctcaacgccgactttcggccgctgtcctactttcccttgtcgatctggtcctggcaggatgccgtcaaggccgtcttcctcgaccgcgtcagcgtgatctccgaatacgatcgcaccatccacagcccgtccttcgagatgcggctgcccagtgtcatcgccctgaaggaatacatcccggcggcgcggcgcccggccttcacgcggttcaacgccttcctgcgcgaccgcttccattgccagtattgcgccggtgacttcgcgaccaacgagctcaccttcgacca

SEQ ID NO: 57140 - DNA, 279 bp, Glycine max
  Clone ID: PAT_MRT3847_2260C.1
gctcgaaggttgatcaaccttgggctccctaggaccatggacttcctgggtgtcaaccccaacagcttcgacgggcacggcaactacagccttggcctccgtgaccagggcgcgttcccgagatcgcggacgaggtggacaggaagaagaacggcatggacgtgtccatcgtcaccagcaccaagacggggaacatcaagaccgacgtggtgatccggaagatgaagttgaagcgcgaccacttcctgagcaagggcaaggggaaaggacgacgacggt

SEQ ID NO: 57141 - DNA, 127 bp, Glycine max
  Clone ID: PAT_MRT3847_22610C.1
tgaggccctcaattaacaaaacatctttcattctttgttcagtaaacagtgtccatattaccattgtcactcccaacacatttctttcaagagcataattccaacccgaatgagttaaaaacccacc

SEQ ID NO: 57142 - DNA, 1318 bp, Glycine max
  Clone ID: PAT_MRT3847_22611C.1
attgaaaaactattcatttcttcatcagcaacttcacggaggagagaaaggcatggctggcaatataatagcttcatcagtgcccaagagcgtccaagaaatgtccatggatggtgatgaaccaccatcaagatatgtagttaatggaaatagctttggatctaaagattcttctgtacagtttccaatacccatcattgatgtgcgtctcctctcatcagaagatgagctagagaagcttagatctgctctaagttcagctggatgcttccaggcaattggtcatggaatgtcaagttcatatcttgacaatatacgagaaactgcaaaacaattttttgcactcccagaagaggaaaagcagaagtatgctcgagctgttaatgaatctgaagggtatggaaatgacagagtagtttcagacaaacaggtccttgactggtcctatcgcctaacacttcgagtttttccagaaacaaaacgaaggctttctctttggccaaaaattcctactgattttagtgagaaattagaggagttttctacgaaagtgaaatcaatgatggaatatctcttgagatgcatggcgatgtcactgaatttggaagagggtagcttcgtggaccagtttggggaacaaccgttgatgctagcgaggttcaacttctatccactttgttctagacctgatttggttcttggcgtcaaacctcatacagatagatcaggaatcacagtcctgttgcaagacaaagaagtggaaggtcttcaagttttgatagatgacaattggatcaatgtccccacaatgcctgatgctcttgttgtcaaccttggcgatcaaatgcagatcatgagtaatggaatattcaagagcataatgcacagggttgtgaccaatacagaaaagctgaggatgtctgtagcaatgtttaatgagccagaggccgagaacgagattggacctgtagaaggtctaatagatgagtcacggccaaggttatacagaaacgttaaaaattatggtgatatcaactacaagtgttatcaagagggaaagattgcactagagactgtcaaaattgcagataactctaatcagaggtgagactgtttcatatttgaattcccaaaagacaagattcatctagaccagccggttggaaagtacattaaagtttttgtaatttaagtcaaaccaatgaactaacagaaaaaaaatatgtatggttctcttactgtgaaaaaaaaaaaaaaaaggcatttcaatctcgtataaaatggtacatcaactagttttagcttattctagttaatt

SEQ ID NO: 57143 - DNA, 153 bp, Glycine max
  unsure (1)..(153): unsure at all n locations
  Clone ID: PAT_MRT3847_22612C.1
cgtttttgataccatganaaaaacgtncttntncccggagaaatttatgtggananaactagtttngnctatcatgctgaagtgaaaccgagtaatacncgatcnctangagacagnatacanagaaatttcnccggggaaaagtaggtttnt

SEQ ID NO: 57144 - DNA, 193 bp, Glycine max
  Clone ID: PAT_MRT3847_22613C.1
ccggaactggatttactactgccgcgctcggtttgagatgcggatggcatcatcataaggcttccaccaatatattcaatcatgacggacatccgaagctcatcttctcttcatggaaggggctgcatggcgtaatcaacaaaagcggacacaacaggcaatgcacgagaccttcgccaattaaacagaaagg

SEQ ID NO: 57145 - DNA, 520 bp, Glycine max
  Clone ID: PAT_MRT3847_22614C.1
aaaagctcaagtgcaaatgaaagcgtatgctgaccgatccaggcgtgctgttaccctttctgtgggcgactgggtctatctaaaactccaaccctataggctgaaatctcttgctaaaaagagaaatgagaagttgagcccaaggttttatggtccgtaccaaatcaaaaagcaaatcggcctggttgcttttgaattggatttaccacctgcaagaaaaatacatcctgtttttcatgcctctcttctgaagaaagcagtggctgccacagctaatcctcaaccactccctctgatgttatctgaagatttgagctccgagtttttccagctgaagtcaaagctgtccataacaattctaatggtattgctgaagttctcattcaattggaagatcttccggattttgaagccacttgggaatccgtggaagtcatcaaggaacagtttccctcatttcaccttgaggacaaggtgactcttttggggggagtattgttagacctcttataaagaatgt

SEQ ID NO: 57146 - DNA, 475 bp, Glycine max
  Clone ID: PAT_MRT3847_22615C.1
caagccaccacctaagcgtagctcgcttcgtctctgctcttgcccgcaatgtcctctcccttccttggagacatcctactaaggaagacgtcgacctcaatgtcttctaccagagctcgtagtaatggcttcatttccaatttgcctgattgtaaatttgctgcatcaaaccctaagattcgccaatttttttgctatgaagctccgaagaagagcgggttttatcggtgatgttgcgtgcttcgtgtgtgattgaagctgcttcgcttaatttggttttcgacttactgtgctgctcttcagttagtgttttgattgggatttttcgattttcgactgattataagaacttctatcccaaggaaaagaaggtagttccgaagaggaatgacatgaaacatgagttccttgggttggggcgccccggagtcttcattcgatcataacgattatatactggtgtacatgttaactt

SEQ ID NO: 57147 - DNA, 395 bp, Glycine max
  unsure (1)..(395): unsure at all n locations
  Clone ID: PAT_MRT3847_22616C.1
tcctttacctccttaatggcactctctttgacatctaatggggtcaatgagtaccaaaaatgtgtggttgaagaggaagatggctcacaaagtactaatgggctcagcaatgattcagcttcagccataaccaattctcctcctctatgtggcaatgagtatgttcataagagcacacattaccaacttgaagaagcagaatccctgattaatttcaaagccaatgatcaatacaacaacctcatgcaaggtagtgaatcttttcttagctttcagcagagnttgatgttctccaaagagagtatttgcattgaggtataaccagtggaaccatgttattagcctaaaagccccacagatatgcggctagtgcaaaaatttagttgctttgaaca

SEQ ID NO: 57148 - DNA, 289 bp, Glycine max
  Clone ID: PAT_MRT3847_22617C.1
gactacgagaggaagcgaaaggaatcacaatcacgttttgcgacaaaatgagaaacagcgctttcggtttaagcagcaccgttaacaatgtttttcatattggattcggggtaggcacggacatccgcctgagattgctcacccaaaacctctggtctcctcttctgatctcacagagttccctaatctccctcgcactttcgacgacgttcgctctccactccaactcaaatttagccatcaacccctacccaattactttgacttctagcaaatcggaccttgcact

SEQ ID NO: 57149 - DNA, 594 bp, Glycine max
  unsure (1)..(594): unsure at all n locations
  Clone ID: PAT_MRT3847_22618C.1
atggtcgacgtggaccgcagacccaccggtccaaacccggcccacgcagccggtctaaggcggctcctggctcgagccgcttcggtgtccgcggcgtccaccgttcgcaaccgcaacagccttcactcattctccgcactctcggaaaaagtcataacccacctccgcaactcgggaatacaactccacgcgagtcacgccgccgagttcgctcgctctgattcggatcccattctcaggaagcagagatccgtatccgagaaccactcctctgccgccaacaagtgccccgcccccggcttctcccgacacagcctcgacgccgccgtcgaacgccgccggagatcgaagtgggtggagggatatgtggggatgatgggttcggttctgagagaaggagggtggagcgaatcggatatatccgaaatggtttctgggtcgggttcggtttcggttttgttggataatgaagaggtcttcgatgcggagaggttttcggattcgntgaagaaatccgggtggagttccgaggaggtcaaggatgttcttgggttggtttttgcgaccggaaaaaaaggaacggaaaccgcctaa

SEQ ID NO: 57150 - DNA, 152 bp, Glycine max
  Clone ID: PAT_MRT3847_22619C.1
caatatgtttgtttcttgagtacaggaagtttgagtgttgatccttgctttttgttgccttttacatttttaaagatatagcttcactttttctacaattgtgttttgagtgaaggcttactttctcaaaagccatgaggagaatgtatggg

SEQ ID NO: 57151 - DNA, 526 bp, Glycine max
  unsure (1)..(526): unsure at all n locations
  Clone ID: PAT_MRT3847_2261C.1
gggattttntatgaggtgggacatctgatcaaaacaagattccttggatccggtgggaaacggtatgtttgccaaaggtacaaggaggactaggagtcaaggatatcacttcgttcaatatatcattgttggaaaagtggaaatgggacctgtttcagaatcaaggggagacttggacaagagttcttgaatcaaagtatggagggtggcggagtctagatggagcttcgaggactagtatcgaatccttatggtggagggacctgaagacgataaatcatcattcacatcagggacagcagttgaataggtcaactttgaggaaggtcgggtgtggggacaagttcaaattctgggaggataagtggataggtggagatactcaattgttagagaaatatccaagattatacaccacatcggctcagcaacaccaattcattcaacaattaggatcttttcaatgaagaaagggtgggagtggcaaatttccagtggaagaagaaccaattgtttgataagtgag

SEQ ID NO: 57152 - DNA, 276 bp, Glycine max
  Clone ID: PAT_MRT3847_22620C.1
gcattttacattaaaaacctcatggcaggtggagtctattctaaggcggttaactttggaaacctttccaaaccacggaaccatctccttggtatgcaactccgggtttacaactcaaaatcctaccactttgatcgcattttctttgccaacaatacatatatttcaagcgagacaccgggtccacttgtgaagtgcagagaagaagaattgtagaatgtgtgaggggatgggactcgtgagcgcaacgaatgggatatgatctatgattatgat

SEQ ID NO: 57153 - DNA, 345 bp, Glycine max
  Clone ID: PAT_MRT3847_22621C.1
ggctcgagatggactttgacatggacaccggacacggacatttcgacacaactaatgtctaaaatataggacacaagaacaccacatacacacacaaactgaaagattctaattaaatgaaatatgaataacataacaaaatatctaagctgatggtatatacatctttttaaataattttttttatgttttttcaattgtattaggtgtttaaaggtgacaacttaagggtttaagccaccaaaaagtaatttatgaattagacacttaataagaagtgtcaaattagtatttaggtgtgccgtgtgtcgtgaattagacacagcaacactttgaacaggagag

SEQ ID NO: 57154 - DNA, 418 bp, Glycine max
  Clone ID: PAT_MRT3847_22622C.1
acggctgcgagaagacgatagaagggtagaccccaagtgggagaattattagagttttgcggttttagttcctttgtctcacatcgcttggtttgtaaaaacttgtgtctcattagtgttatatatagagacaccttataaaagttctcttagtgtagtcgtggacgtaagtacatacattgtgtgctgaaccacgttaaaactttgtgtcttttctcttttctccttattcatttctcttcttcttattgctctatactaataattccaaatgataaaatctaaaacactattctggaatgattattccagaacacgtttggggatttacaaatattttatggaatattcattctataattcacctttaaatctgaaatgggttccaaactacttattctagaaaacaaaataaaat

SEQ ID NO: 57155 - DNA, 327 bp, Glycine max
  Clone ID: PAT_MRT3847_22623C.1
aattcggctcgggcgaggatctcttcctcgacgagggcggcacgaaccagcccgccgggttcctgtccatcctccgcgctgctgtcgccgttcctccctcgcccgcgccacccgcccccggcgtccgcggctgattcaacattcccttgtctcatcaaggtttccgccaccgtaatttggacggtaacatcaatgtttttttttagtgtctgtgattacaattattaggaccatattgcaggctgcatttgcccacaatttattggatatgaacaaaagtgacccatatttaaaaccttgtgtctcataacaaaaaaaaaacaaacc

SEQ ID NO: 57156 - DNA, 1276 bp, Glycine max
  Clone ID: PAT_MRT3847_22624C.1
gaacccttctacatttcccgtcaaagagaaccttccataacctcacttcaatggcggaagattgcgcgggaagtggagttcaacagcaaggttgaaaagaagagaagaggcttgattccccttagggatatgaatttggatgactacaaggcttataaggaagccaaattggcgcagatgaagcttctcgattactcttctagttttccggtggacgaaaatgtccctgaacctcaattgaatcgcggagaaaagtttgaggctgaagctgaattggatggtggtgaacgtgttgcgcctaagaaccctaggtgggctgtttatgggaggggtttggaggatgtcactgagtttttcaatagtgacaactatgaccctactgctaaaacccctggaggtcgccggaagttgtttaataaggaggagaaggttttgttgaataagaggataccagacttggcagctgctacttcagataaatggcttcccctgcacactctcgctgcttgtggagaatttcaccttctagattctttgttgaagcataatgttgatatcaatgctgtggataaggatggtttgactgcccttcacagagcaacaattggaaaaaagcaggtcataatcaattatctcctgagaaactcagctaatccctttgtacaggataatgagggagccacattgatgcactatgctgtactaacagcttctacccagacaattaaaatactcttattgtataatgtggatataaatctccaggacaattatggctggacaccattacatcttgctgttcaagctcagaggacagatttagtgaggcttttgctaatcaaaggtgctgataagacattaaaaaatgaggatggtttaactcctcttgacctttgcctttacaatggtcaaagtgccagaacatatgagctaatcaagttgtttaagcagcctcaaagacgtcttagtcatgtatcagtatgacagacggggctaagaaacaatacgacttctgaaagatttggaccaacaaatgaagattaaccgttgccaaattttgcatgacaattagcatcccttggtcacatggaaattttgggacaactacggtattgtactatattaaaattaaaatgtatattttaaatgtgataggaaggaaaataggaatattttcatgaaaagaaagaaaaatggtctgccatttttaaattgcgtctttcttgaactccgggcaaagcttttcttttctctatcaagtgtcaaaaaaaaaaaa

SEQ ID NO: 57157 - DNA, 354 bp, Glycine max
  Clone ID: PAT_MRT3847_22625C.1
ccacttacaacgaggctgtgttaactcgtgtgaagggattggaacctggcaaaattttggtggatctcttcataggaccgcactagacgacctagttctggggggccggaggcgctgacctcttaggagattttaagatcactctggtgactgtctttgacatcacgaatttgctcctcagcaagggtaagaggtgcttatgggctgcacaggctcactctcgggcttgcacttcaccccacttctggtggcatcatgtaggacatgctaggtatggcatactctcagtgtgcgagtctctgacagcctgcaatctcctttaggtcctgagtgctcggaagatgactgacagct

SEQ ID NO: 57158 - DNA, 413 bp, Glycine max
  Clone ID: PAT_MRT3847_22626C.1
agtactagatagaggtccttcatgcgcacctatgtcgatgacaggttggcagaaccagttactgtacactgaaaatgactacatagatgactttagatgaacatgagattgcatgacattatgaaccggggatagagcgatacctgaatttgaattgaattgaatataccataatagaaaccataattggattgtgaagcgggtttggagttttggatcatccaggtcaaatcaggcataatgttatgttttttttattatagttgacttaagtagattgagttcttaaataatgttatgttttatgattattgaattctataaatgattattatttatcacatgaatagtatttttctcgttttcttgtaaaataaaatatcttattatgtttgagccaaaaaaaaacaaaa

SEQ ID NO: 57159 - DNA, 214 bp, Glycine max
  Clone ID: PAT_MRT3847_22627C.1
gacccactcttacgcttacgcattctttcactattcctacacctttcctgctttaacaaactcctaattctcagtttctttggataaattaattgcatacactgactcttataaactttaaattaacttaccatctacaacaaaatattttatccaatatttatactaaaaaatctaattaatcatcatacttcaaattataaaactccctttt

SEQ ID NO: 57160 - DNA, 650 bp, Glycine max
  Clone ID: PAT_MRT3847_22628C.1
tatcatgcaatacgtgcatcaccgttcatgttcccgaaaaactaaatttatggaacgctccaattattcgaagatccgagaacatggacatcaagtaaaactgtaaaaggttcatattttaccttttttctccttgtctttctggtagtggctgtttcgctgggattagcaaccttagatcttgaggtctgggatggtttggactcctcgtagccatcgaggttgccgccgcttgctgacgtggcgccgctccatgagagcggcgtggtggggctggccctggtggactccgctttgttgtgagcggatctggagcggcgctgacgcaccgtccagtggaggttgaggcagggcggcggaggcggagagcggtggaggcggaggagaaggtcgacgaccagggagtcgtcggccatggcgaccttgacccagtgatcgtcgcacatctgatgggaagaagtggtgggtgtcgttggaatgttaaataaaaatgaatggaagggatgagtttatatgatgtgcctccctgcctccctctgtgctgcatatcaccactcatcacaaatcaaataaccacacattaaattatgttttatttaggtttcttgcttctaaacttttactttttttattcagtctctcaatttata

SEQ ID NO: 57161 - DNA, 374 bp, Glycine max
  Clone ID: PAT_MRT3847_22629C.1
gaagaagtatcggataagattgagaggaatctaatccttctgggtgccactgctgtagaggacaagctccaaaatggggttcctgattgtatcgacaagcttgcccaagctaagattaagatttgggttttgactggggataaaatggagactgccatcaatattggtttctcttgtcgcttgcttagacaaggaatgaaacagattataattcatttggagattccagatattcaagcattagaaaaggttggagacaagatggctattgccaaggcatcaagggaaagtgtgcatcatcagatatctgaagctgctcaactgctttcagcatccagagggacctgccagacatctgctctgataattgatgg

SEQ ID NO: 57162 - DNA, 467 bp, Glycine max
  Clone ID: PAT_MRT3847_2262C.1
aattcggctcgaggcccgcaagaaagccaccccgccccaacccgccaagaagctcctcatcaagctccacaaaggtccgctcttcctattcaactaaccctggcccctgtttaaaagagcgtttttctttctctctctccgattcgccaatatcccttcctttcctcttcttcaattcttcgttcttgctgcttaaattaggttttagcatttcaattccttttattgatctgtaattaatttgttcccaaactgcttcgcatgattcttcgtctccatttcttttctgcatcgaattgagcttcctttctagcttattattgttatttctggagtctagagtgccaaaaatttataacctaagtgagtttcagtttcgaaccccaagcggagctaaaagcagttcctataggctttgcttggatgagcttctcaatgaacactaattaggaggagaaaataggaaa

SEQ ID NO: 57163 - DNA, 831 bp, Glycine max
  Clone ID: PAT_MRT3847_22630C.1
ttattcgttctggccatcactactaaaagttccatcttttatggttgaatttaccactcccataataagggcttttcattcaaacgggacaaaattatcattttattccatgcctgaatatgaatcatggagagaaagcttggggaataatgcaaatggttggaagataaagtactataagggtttgggtacaagtactcctcaggaagggagagagtactttcaagatcttgataagcataagaaagactttgtttgggatgatgagcaagatggaggtgcaattgagatggcattcagtaagaaaaaagctgaggataggaagatctggattcgtaattttgagcctggcacttgtcgtgatcatatggccaaatatataaactacagagattttgttaacaaagaacttatattgtactccagggcggatcttcagagatccattccctctatggtcgatggcctcaagcctggccaaaggaagattcttttctgctcatttaagaagaagttgttcaaagaaattaaagtaggccagtttattggttacgtttctgagcactctgcgtaccaccatgggtgagcaaagtctagctagcacaattattaatatggcacaggatttttgtgggtagcaacaacattaatcttcttaaaccaaacggtcaatttggtactcgtaacctgggagggaaggatcaggcttgtgctagatacatctacacttgaactgagcactatcacctcgtttgcatatttcatgaagaatgatgaccagctttcttgaatactttgaatgaggatggccggtggttttgagcctacatg

SEQ ID NO: 57164 - DNA, 184 bp, Glycine max
  Clone ID: PAT_MRT3847_22631C.1
tttgctggggtttaactttctcattttttcttcaaacttccagacacatatggttcccatttttcaaaactaggatttcaaaagcaagattggaaggttgtgcagagtttgttttatatcatgagttctgaggccatgactatcattatttttaatttatttttagtcaacttgtctaccgcaa

SEQ ID NO: 57165 - DNA, 232 bp, Glycine max
  Clone ID: PAT_MRT3847_22632C.1
atccacccacaccactcaaacaggtacagggtgtcagttttccaagagatgtgattgctgaagaatgtatacctgcttctgtaaacaacagaaaaactgggatttctaatatgattgacatggagaggaggaaagagactggcactgtgggttgttcatttggagaaaacagagaatcaaatcatgctgatagtattacatgctcagttggtagttgtagtatcactagcag

SEQ ID NO: 57166 - DNA, 354 bp, Glycine max
  unsure (1)..(354): unsure at all n locations
  Clone ID: PAT_MRT3847_22633C.1
cacgcgtcaagttaagattagttattcattgcaaccattggatttcaagaaaatctttgagtaacttgatccctcctcatatatatataggcaatatcatgcttttgccttttgtttccttttatattaattgaatttagttatgtctaaattatgctaatgctgattcaaaagtaacgtgcaccataaatagagatagcaatggtgaacagtgcttttagactacagctttatatgttctctttattgaacaatctctttgattgactaaaatttattggaaatcacatatttttgtaggtcncacttgttatttaataattctctcttttgattttgtaattttctataaat

SEQ ID NO: 57167 - DNA, 326 bp, Glycine max
  Clone ID: PAT_MRT3847_22634C.1
gtgctagcttctgttccttgtagttgaagtctctccccctcattcttccttttctacttgccactgtttcctattcgtcattgccgcaaatgaattccgtcgcttctcatgcatgatcgcaccttcaactctcttcttcttcaccatggctttacttcaagtagcatcaccttatcatcagcttctgcttgctttcaccacaacggcctcactatttggtgtgttccatgtcacaaaaaacgaaaggagatattccttttacccactcctcgtcagggaagatctgaagcagcgctagctagcagcacacgttctctaatggacgc

SEQ ID NO: 57168 - DNA, 508 bp, Glycine max
  Clone ID: PAT_MRT3847_22635C.1
ggctgtgcttgcttctgttccttgtagttgaagtcgctccccctcattcttccttttctacttgccactgtttcctattcgtcattgccgcaaatgaagtccgtcgcttctcatgcatgatcgcaccttcaactctcttcttcttcaccatggctttacttcaaggttttggcgctgtggagttcgttttggtgaggattctgattaaagagttttcttttattctttcggagaagcgtctctgttgcggtggattcttaaaatttgctaaatctttttttctctattactatcctgcgtgtggcttgtgattggaatgcttagagttataattgctgttaccaaacagagacggatctctacctattgttcttgctttctgtttcttttgcagtagcatcaccttatcatcagcttctgcttgctttcaccacaacggcctcactatttggtgtgttccatgtcacaaaaaacgaaaggagatatcccttttacccactcctcgtca

SEQ ID NO: 57169 - DNA, 762 bp, Glycine max
  unsure (1)..(762): unsure at all n locations
  Clone ID: PAT_MRT3847_22636C.1
gcattttcaccaggtatnnngngattttttannnctccttgaagtgtnnnaccaccacggttactctcaaggaaggttaccagagtgggaaattggtggacccgcatnnncttgctcggcatagagataagttctaccatgtgatgcagacggggctgctttatcgcggtgacggatccttgaaacctcgggagaacaagattgaaaatgatgagctaaggagtgaggacgaggttgaaatgagtgaccaactctgcgagagtgaatgagattttgatgcagaattttgttagctcgatccgggcaaccggataattcgttttaaagaaaaattgtttcctccccaggtttgcaagaaatatcataggagtggaaagaagatcattttaggtagaaaagtattgcctgatgcaggcaaggaacatgatcttccttgagaaattgttgcaacaaaatgttgtgtacctgtgtgagcggctttaaactttcttgttcgagggcagtttgttgaagctattgaatatgctggagatcactgaaactgaactactctggcctgaatggtttacggacattatttatcagctgtatctactaatcatgttacagtattctttattttttgccactttggcgatctgtcaacccgcacttatgttttgattctaaggtggaaatttgagttgacaaataacacaaaatgtaggatttttttttctcccgatgttagaatttgtgcacnnaagttnnnnnnnnnnnnna

SEQ ID NO: 57170 - DNA, 247 bp, Glycine max
  Clone ID: PAT_MRT3847_22637C.1
acttatctctggtacatactactgtggtacggcaaataatgctggggcaatattacttttaggtagagatctaggagtggtctctaaatagattcatccattaccatctgcaatttcttcaccagatacattaccataacgtcatatctaggatacatggatgctggagatgaatgctcacagaccaccaacacctactatatgccgttctctagtcacaaatgaccgaagatctcttgcttggata

SEQ ID NO: 57171 - DNA, 249 bp, Glycine max
  Clone ID: PAT_MRT3847_22638C.1
ggctcgagcctcttaagaaccattcactccaaacacaacaaagtgaagtctgatgagcatcacatcaggatacgcagacatggtgctggatcacgaccttgcataacactatgctctagtgagactgacaatcaccctttgctgctcatactgtgaagatagcgacacgggtcgattttgagaggtggatgaaacctcttgtcacgtgcagcattatgaacagagatgtttaggatggaactccatgtg

SEQ ID NO: 57172 - DNA, 529 bp, Glycine max
  unsure (1)..(529): unsure at all n locations
  Clone ID: PAT_MRT3847_22639C.1
acgagactgatgctttggagatgctggtgcgcatgacgcacagaggtgcttgcggctgtgaagccaacactggagatggagcagggatcatggtggctctacctcaccagttttacaaggaggtagtattctattttattttcttaaaatttttatggagaacttttgattttcttaactagattaatatatgactttactaaatttcagtaaaaaaatttattgttaaatatgactttgcggttttatcatccgctctatttacaatattttggttagttgtttggccagtccgtttcattttttctaatagaaaactactattttaaaaaaattaatcaaaatttgaaaaaaattcatggaattacttcagttttttttttaaaatcaaaagtaaaaaagtataaaatcaaatgaaaataatatattattttaaatagttntctatagaatcatttgctntttcaaaaaaagagaaagtttgttttttttatgatggtaaacaaatagtataaacaaataaactaac

SEQ ID NO: 57173 - DNA, 240 bp, Glycine max
  Clone ID: PAT_MRT3847_2263C.1
cccactcatccacacacacattctcccacacaaccaatttcctacctcacccttccaatatacaagaccgacataatacaatcactggcagaactatcactctccaacactctaactcacataccatatatcaaatcaataccatctcttaaaacacaccaatgatactaacacctcatccacgacccatttattctcacaacaaactctactatcctctacccactactcattataaca

SEQ ID NO: 57174 - DNA, 187 bp, Glycine max
  Clone ID: PAT_MRT3847_22640C.1
agctccgcaagataaagaaaggtcttagaatacttgcaaacacacaaacacaaaacaccctttttccacgcaacataggatagagatcaacctcagagctgtgataacttgttccaatgagcatgttagggtgagagacctagttctcatagctcaaaccccttattcccttcacgagcaacaccaa

SEQ ID NO: 57175 - DNA, 256 bp, Glycine max
  Clone ID: PAT_MRT3847_22641C.1
tctttatctcattttccctgtattatgagctcccactccttcgaatttggggctacttccgtgcactcacccaccctaggccgaaaaatacacaattccacaatcaaacaaggtaactggggtccccccgggtggaggccaaccacaaaaagtcgctcattaaaaacccgggggggggaaaccaaacctaaaaaggttcctctatcacggggtataacaaacaccccacccgggggggggcagggggaaccaccca

SEQ ID NO: 57176 - DNA, 298 bp, Glycine max
  Clone ID: PAT_MRT3847_22642C.1
gggaaaaaaaaaagagctgttgcaggcagggaggccgttcggggaggcaagaaaacgctggacacgccctcaaataaggaggagaagaagaggggtgttgccggaaaagggggcggggggcaataaaaatacggcgagccaacggaaggagttaactttacaaatccaaacacaggtcatgcaactacggggtcaggggctttttataaccaagcattagcaactttaattaaaattggggctaaaaaatctttgcttggggagggggaccaggtcaaccaatctatctcctcggggg

SEQ ID NO: 57177 - DNA, 243 bp, Glycine max
  Clone ID: PAT_MRT3847_22643C.1
ttggtactgggtgaggatgacaacagaagggtgcggctgctataatacgacagataggtactgttgccataagacgacagattgtgattttttttgaattgaaacctaggagagactgctgctacattcatcatcatcaccttatggacggacgcgatccacaagatctaaatcagatccctgcttacatgactgcctttgtgcaaaatctttttcagcagatgcaaaatatgttccaaacaa

SEQ ID NO: 57178 - DNA, 277 bp, Glycine max
  Clone ID: PAT_MRT3847_22644C.1
gtctgaaggtttgacgtcaataaagggatactgccacaatttttatactgctatttctaaagatgtcacttataaggaacttaaaaacctgttgaattctaaaaatattatgttatttgatgttagagagatatgggaaattctggagtatcaaaaaatccctgagtctatcaatgtaccattggatgaagtaggtgcagctctacagatgaatccaagagacttcagagagacgtgcactgcagtacaaccatccaaatctgacagctagtgtatt

SEQ ID NO: 57179 - DNA, 604 bp, Glycine max
  Clone ID: PAT_MRT3847_22645C.1
attgaattcaaaaactaagttcatttcttgtgctttgctttattcctcaaaaccaaacatgtcgaacacatgcggcaactgtgactgcgctgacaagactaactgcacgtaagtgcttcatttgttttctgcatttgtgtgtaaagcaagatttacatatatatatatatatgtagttcatgttacaattagtcaattaccatatttgatctctaaaggattaatctgtataggacatatattatgcatacagtagactgaggtctgatgtatagcttgcatgatacatataaaggctgttttacttatatccttacatactatgccatgcagcaagggaaacagctatggtgttatagtagagactgagaagaggtaaaagttcactttttgtatccattgtattaggttttgaatactttagagccgtttgatttgagaaacattttttgttttcgttttctatttcaaatttgtataggaaaagtggaaaagaattgttttcaatattttctatacaaacttctaaacacagaacacattaacaggtggcatttttttttaaaatgaaaacaggacaagttttctcaaactaaacaccctc

SEQ ID NO: 57180 - DNA, 826 bp, Glycine max
  Clone ID: PAT_MRT3847_22646C.1
agagggcttggaacaaaataacttccaaaatgctagtcaaaacctcaattcacttcttcttgacaattcaataagggtcaaggctgaaagaattcctgatgcaagctcccagactaatctcttccctgagcattatgggcaggaggatctaatgagtgcacttctaaaacagcaagaaggcatgggaccatctgagaatgagtttgactttgatggatattctctggacaacattcctgtctagaacaaacccttcccgattgaagttgccagtgtaaatagtttgttacacaagcacatgatcatcctgcagttagctattttggaactgagtcaaaatttggttgatgtcaaatattcagacttctgggagtagtagtgtattgtaatggtttagtctggatgctcaacatgaatcagcttcaaacctcaactgcatatattcacaaagcatgtgcaaattttgactgctatttatagcaaaattgctagcaagcttctaattttagggtgttcttgaaggtgttggcttagggcagaattgcagaagcaaggttttgatacatctgcaaagttgtcctaggagcatttctaacttgaataacaaattatgaaatttttttcttctgttccttttgtaatttatgtcattgaaagcaagtaacgacttccgtaagcatgtaaatattgcatttggtagctttagacatctggtctggtcattcttttatggttgattctgtactttccgatagatatgcgctgttttttatgttccctgtgtcttgcattctttgtacatgaacctgattatgtgatttgtgtg

SEQ ID NO: 57181 - DNA, 560 bp, Glycine max
  unsure (1)..(560): unsure at all n locations
  Clone ID: PAT_MRT3847_22647C.1
gcgcgacatacctcctgcctctggcacctaccactctagaccacactcgtgtttcctgactttacactcatatcttcatcttcgccaacatgttccaatcaacctccgcctaaacccctcttcccataaggaagacccgtacccacgtccagctcgacccggcttagccccttctaccaacaactacccaacccctccccacttttctggtcctacacaggtccagcttaattcggcccgtcatggcgtccactattcagttcccccctgctcaacagcaacaacaacaacaacaacaagaagctcaatcatccctgagcctaccaactgccaccacccggtgtcaggcctgtccttcccaataccttacttaggcgactctaatctgcctaagggcatatatcaacaggactttagtcacagcaaatcaacaagctctctcccagcgttgccaagggttctacctnccccacccacgagacatcgcgcaaagctaccgacttttgagtctagcatttctctcaaccaaaagacgacagacgttcgtcaaaataagacac

SEQ ID NO: 57182 - DNA, 399 bp, Glycine max
  Clone ID: PAT_MRT3847_22648C.1
tcgaccactcgtttaacgcctccgaaagggggcggactcaacagttccttttatcttttctaccggggagcagttcacagttccaaatgttctaactaaatcaataaatcaattctctttacacatctatgccatgtatttcgacggtggatggcaaactaccaacgaaccatccactaatacgtctttctaggccgacaccactaccaaagacaccgttccaagttcgccttcgtcgtcggcacacacttttcgtctatgtaatgccgcctacttacgccaaatcatcttttacaccgtcagttgcggatccagctcccgctacgccgcttgatccaacatcttcgacgagaaacaacacctccatcaataacaacaacttgatgagactacttatat

SEQ ID NO: 57183 - DNA, 352 bp, Glycine max
  unsure (1)..(352): unsure at all n locations
  Clone ID: PAT_MRT3847_22649C.1
aaananacacnaacaaaacaaaccccgtgaaagcaaagcaccccaccgcgctcgtgggccgggccgactcacncccatggaatcccatctaaacgacgccgtttttcccgaagaagatctcgacgacgacgacgaaactccagaggatgaagaggaggaggaggacgacgacgtcttatatgacgatgaaaccgaaccccctccctccgtcatcgccgtcgcgccgnccgnttcctaaactcttgtcacctcgttaattccgatctcccccgncgcggannccccnccctgnccgctgcgcacggagctaatcgaggagaaaaaagcgctggacgattcgcggcgactgttt

SEQ ID NO: 57184 - DNA, 308 bp, Glycine max
  Clone ID: PAT_MRT3847_2264C.1
agacttttgattccatacgatttcttgtttctgaatattatcaatcaaacacacataactatctgtgaggaaataaatcacttgcattcacacttccgcgtcgtgactcagctaattaattgtatttgttctgtacctataccattgatgatactacggttctgatttgatcgacaaagctcagattttttttatcagaatggtttcggttgataatgggattgggaattccaaagatgaaattgaggaatctaatgggaataaagtgaatgagtttacatctatagatattaactactcataaaaca

SEQ ID NO: 57185 - DNA, 284 bp, Glycine max
  Clone ID: PAT_MRT3847_22650C.1
ctcgagccttattggctcgagcgctacgtacccataagacttttctgcagaatcgctgtcttgcacaaagcatactgctacttgccgatattaaaccgcccccgcggcaactttaagggaaacatatcgacaaccaactcacatgactgaaagaaaagatgtcataaagcccgatgggaatgtcgaatctgatgcacgtacaatggctaatgattgtgacccatctactaatggcaacgctaggattgacagacagattaagagttgtcaagagcatgggatca

SEQ ID NO: 57186 - DNA, 226 bp, Glycine max
  Clone ID: PAT_MRT3847_22651C.1
ggaaaaaaagggcaaatttttattatacagggttatttggaaagacttggccatcaccctatgatccccaggccaatgggcagtaacaaaacaggaaggaagcctcaaggggtcctattcaggaattgaatatgaaaatccaagcaaagggcccgagcagggaaagaaggggcaaaaataaaacgaattacggattctttttttgaccaaagggggcttcaacacc

SEQ ID NO: 57187 - DNA, 353 bp, Glycine max
  Clone ID: PAT_MRT3847_22652C.1
cacgtgacaactaccatttatgattaagggggattatcctaagacacgcgaacatatgtatgcaaggccaaccataacaaatggccgctaaagagctactgatatcaatagacgggggacctgcccatgtgttgaaaaacacaaggtgggtcaaaactaatagggattgttgttatcaaatcccaggggaagaataccgacacaggtggaaattcaaaggggaaaaaagaattattactaacaagcggggtgccaccaaaagccgcataatttgaagcaataccctagcttgaagtttgccgccacaagaagctacacaaagttgatttagcgaagaaacatcagagaaaacg

SEQ ID NO: 57188 - DNA, 1182 bp, Glycine max
  Clone ID: PAT_MRT3847_22653C.1
cccacgcgttcgcccacgcgtgcggccttcctgcttataggacctttgctttggatgaacttaaggaagctacaaataatttcgatgaatcatctttcataagtgaaggcccacatggtcagatttataagggggttctctctgatggaatgcacattgctattagaggtttgaaaatgagaaagaaacaaggccctcagacttacatgcaccatgttgagataatttcaaagctaaggcattcacacttggttagtgcacttgggcatgcttttgagtgcaaccaagatgattcaagtgtaaacaatgtatatctcatatttgagtttgttcaaaataaaagtttaagaagctgtgtttctggatacggctgcgagaagccgacagaaactcagagaataacagctgcaattggaggggtgaaaggcattcaatttttgcacacagggatagtgcctggactatattcaaataatctgaagataacagatattcttttggataacaatcacaatgttaaaataagcagttataatctaccactctctgctgaaaataaaagaatgatcagcaagggaacctcccctggattaaaaggaaaagtccaagcaaggatccaggatgcagacaagaatgatgtctatgatattggagtagtcttgctagaaaccattctgggaagaccaataatgttccacaatgaagttggaacactaaaagatcttttacaggtaagcatcaaaaccgatgacatagctagaaggagcattgttgacccagcagttcataaggaatgttcagatgagtcattaatgacaacgatggaaatatgtgtaaggtgtctctctggtgacccaactgaaaggccttctgtggaaaatattctctggaatctgcagtttgcagcacaagttcagaattcatggagaagagactcaagtgatcacgatcacagttactcaccagcgccatcctccagggagacataattaagatttgtacgagatttccagccactaatagtgtatcagtgtatgttaccaagtacaaaagttcaatttcatagcatgattgtgacaattttataatcctgttcatcatcagaattcaattagtacgtgtgcctgtattgtttcccccttattgatttatttattttccccttatttttttaaaaccaaa

SEQ ID NO: 57189 - DNA, 353 bp, Glycine max
  unsure (1)..(353): unsure at all n locations
  Clone ID: PAT_MRT3847_22654C.1
gcacgaggccgttccaggggatttggatttgtttcttttcggaatcagcaagatgcccaaagtgctataaatgatttgactggaaaatggcttgaaagtagacagattcgttataattgagcaaccaaaagggccagtgccagtaataaaaaacagagttcaaattcaaaaattatcataaaattaatcaataaatcatccgaagaaagccangaaacaaccaataataacactcccaagaaaaatcctcaatataccactatttatattaacaatcttactccaagaaattacttctattaatctccatcaacattttcattctcttaataccagaattattaaagatatta

SEQ ID NO: 57190 - DNA, 473 bp, Glycine max
  Clone ID: PAT_MRT3847_22655C.1
gaccgacgcgtccgatttatccaactaatcatccgtgggcctatggctgactgactgagggccaaacttagctgtgttgcgaacctaactgctccgatggtgtggttaccatgcaagctattaggcagaccacctgcgtcaacacctccatctgctgcggtgatgaaaaattccagcgggcgaaggccccgccgctggcggtgcgcctccacaggcacctccatggggaccatgacgaggagtaggtcaaggaggaccgcatgggagccttccgcagatcctagtggaccgtggagctcatcgcggagctcgtcctcgagatcggcctcaagagctgactcgggagctgcttgagggagtactagcaggcgttactgctctgggtaacggtgcgcaaggcggggcacagggtgccgcagaggttggactgctgcgtggagtgcgaccccgtgcgcgagcgcgcgcacgacaag

SEQ ID NO: 57191 - DNA, 263 bp, Glycine max
  Clone ID: PAT_MRT3847_22656C.1
gtcgaccgactcgtccgttcatagtctacataaggttgatctagagccaaaaatgagccactagcagtctagcacaagggcgcactgtcatgtttgccatttctctttcctttcctccttttttcctttatcagcacccttttgatttgccacttgtacttgcagaccctaatcaacatatttttcaatgcttcttctctcattcaacctatgttcgtgcgcctctaattataattgaaaatctccgatcttcaaggtttttc

SEQ ID NO: 57192 - DNA, 346 bp, Glycine max
  Clone ID: PAT_MRT3847_22657C.1
gctaggcgcacgtgcacacgacattgcagtctgaaagcatcgtgaacactatactcttcggtcgcaggtatacaagaaaaaaatggtccatctcggcaactaacttccggcgtgactatacatgatctcacatgctcatggttatgtcagcaacgtgacttgaacccatgcccatgctacataccatggtggaagacatgcttctggaacaacgtatgtatctcgggggcatcgaaaccatgatacacaaggctctgggcctgacacagatgcacatatcactgacttactcagcaatgactagcatcagcactcatgcgtactgatcaagagtgcaaatgaccca

SEQ ID NO: 57193 - DNA, 353 bp, Glycine max
  Clone ID: PAT_MRT3847_22658C.1
ctgggtgattaccgactgttcgtctcgtgagttcaccgtgactcagtcttcagcgctgatggtaatggctgtccctgatgagttcagcgtctatcaaactgggttatcatggcgctccgacgccattgttattatgtgtaggaccacctgtgacagatgaactaacagcccgtctgggatcgcttgccgatctaataaaccctgatgacagcctggcatttactatagaagttcttgcactacttacagcttagctgaatgttgagctcgactacactaagcctaacgttgatgctggccgacgattcacatagtgctgactgcctatacactggagttacccaacttaaggg

SEQ ID NO: 57194 - DNA, 127 bp, Glycine max
  Clone ID: PAT_MRT3847_22659C.1
tgaattccggggccgaccacacccgtccgattgggtcccaaataattaggttaattcaagagtttaaatggattatgaatttggggatgaaatggtttaaggcaatctggttcgtccagtttagatt

SEQ ID NO: 57195 - DNA, 1658 bp, Glycine max
  Clone ID: PAT_MRT3847_2265C.1
aagcccgcgtgaggaaaactctagcagcccttaagattttggccacacatctctgatcactcgttgatctatcatccttcatcgaccaaccagtctccaaagttagtgagtgagagagtagcagctagcaatggagatttctgccctagcttcttctgctactccaagaccttctcttacaactccttccacttctccacacactgtagtcaccaccaccttcagcaaacctcaactgagacgctcccacgtagcagtatcacttcctacctcaaccaccatttcactgctcgctctcttcgcccctccaagcgaagccaaagccgctgtcagcatcgccaaagaccagattgtctcatctctcacccaagtggagaaaacgctggatcaggttcaggaagtgggttcgggtgtgctggacacggcacagcgtattgctgaagtgatagggaacgctttgaagcctggcatcgaaacggcgttgccaatagttcagcaggccggagaagaagctttgaaaattgcttcccctgccatctccgaagcttccaagaaggcccaagaagcgctccaaagctccggtgttgatactgaacctgttatctctgctgctaagacagtggcagatgctgcacaacaaacaaccaaggtgattgaagttgccaagccaatagcttcctcaaccgtcaaaaccatatcttcttcagaccctactgtgattgctggaacagcaggagcactatttgttgcttacctcctaattcctcctatctggtctgtcatctcgtctaatcttcgtggttacaaaggagacctaactcctgctcaagcccttgatttgatatccacacaaaactacgttttgattgatattaggtcagagaaagataaggacaaggctggtatccctcgccttccctctaatgctaaaaacaggatggttgccattcctttggaagaactgccaagcaagctcagagggcaggtcaagaatgtgaagaaattggaagctgaaatagtcgctttgaagatttcatatctcaagaaaatcaacaaaggcaccaatgttgtgatcttggattcgtactcggacgtagcaaaaacagttggaagaacactaaccagccttggttttaagaacacatggattgttgctgatggattctctgggaacaaagggtggttgcagagtagactaggaacagattcgtataacttctcgttcgcagaggtgctgtcaccgtcaagggtcatccctgcggctgtgagaagttttggcacaaccagccaatctagcacgaagcttcttcctggggctgaataacttttttcttcactaaactcttgtgcaaatagaaattcactcttgtgcatgctcgagtcatcgaatatatttatttgattatttcatcaatgtctaaatgttttatttccaaccttttacctttgtgggtgtttcgagtggctgcggctacatgctcttccctaagttgcaacgaccgaggagaatgccaaaaggttgtagttgttatatatacttgtattggatgctttggccgaggatgtttaggcgtctgtttggtttaatgttggaagacttaaatgatcattgaataaaaaattctaaattcttacttctcaaaaaaaaaaaaggcggc

SEQ ID NO: 57196 - DNA, 631 bp, Glycine max
  Clone ID: PAT_MRT3847_22660C.1
agggataaattctgcatagctcgtctttcttgtcagtaacaatgcaaagtttaattcggaaagaattggattgcacatatatactatatacgtggaggataagcagaagcatttctccacagctacattgatttttaatggagttcttcactcattgaaaataatcattaaaaactagcatagtcccccaactaccagaaatctccacaggtacacaatccgtttttgaaatgatgaaagcgcttgttgtcccttacaataatatcccttttaacaacctttgagactaatttaattgcattgtgacagtctacacatatgcgcggacgcgtggaaaccctcaacgttgtacctttagccgtatttaacagaccaaaagaaattgcaagcttctcgctgtggctcttaagtatcttaatctttccctcttcttccagttcatgaagcacacaacttgtgtcaggtttatatccaattttgcttatttttttctccaatttaatccaggtctgctgaatcttttttgattctgaaagtgatccatcactaacaagaaatctataaaccattcctcctatttcaatccaactgcagcctgcatctttatgaaggccattcttcttcattctct

SEQ ID NO: 57197 - DNA, 977 bp, Glycine max
  Clone ID: PAT_MRT3847_22661C.1
ctttcctgtcctagaaatacgcattattctcctaacgcttattcttttcagctctctgcctccgacagaaatagtttcatcaggctcatttaatttacctcaaaataaaacaattttatcttgttatggctcttttggtgtatcttgtgcttttcctagccctcactgatcattcaagtgctctttattgtttatgcaaagatggtgtgagtgatcaaacccttcagaaagcaatagattatgcttgtggaagtggagctgactgtacccctattctccaaaatggagcttgttaccaacccaacactgtgaaggatcactgtaactatgcagttcatagctattaccagagaaagggcaatgctccgggaacctgtgattttgcaggtgctgccacaaccaatgcaaatccacctactgcatcatctggatgcgtctacccctcaagtcctagcaatacaggaacaacaccatctattggttcaccaccaggcacaacaccatcaacaggtggtacaactccagggacaagtacaacacccaccacatttgaatgagtccaacatctacaactggtatcaacaatgacaatggagctaattcaaaaggcacagacgatactaagttgctattgctcttttttgttgtaaccctttggttagcaatcaggatctagactaaaaggtacagtgccaccactggactaggaaaaaaactcgtgcgggggttttcatgtaattttacttctgggaatcatccacaaacaattcaagcaaaaccgtttttgttttttgtttttctttcctcttccttgtgaaaaaagagtagggaatttggttttcttgtttagtggtgatatattttgagtatgaatactaatgggggatttggaggaagtagaatttgattgatcattttcctcttggcttttctccatttgtacatctaagactatgacagacactattttttaattt

SEQ ID NO: 57198 - DNA, 978 bp, Glycine max
  Clone ID: PAT_MRT3847_22662C.1
tttccaccgttttaaaacccgggcccggaaattaaatttgggggccccaaaaaaaaaataatatcttgccaaccccgggtcgttaaatttggttctttaaaaagggccccccctttttttttttttttttttttttttttttttttttttttttttttttttttttttttttttttttttttttttttttttttttttttttttttttttttttttttttttttttttttttatagaaacttacatagcacatatattgattaacaatcatcattcaaaaaccacacatgataaaactttgtccaaaagaaaacgaaaaagtgcacatcatcaaacacgatataggagatatttgacacactctaatcatcaaacacgatataggagatatttgacacactctaataatcatcatctccttcaccatcatcatctccatcaccagactcggcaccaacctcctcataatccttctcaagagcagcaaggtcctcacgagcctccgagaactcaccctcttccataccttcacccacataccagtgcacgaatgccctcttagcatacatgagatcaaacttatgatcaatccttgagaacacttcagccacactggtggagttagaaatcatgcacacagccctctgcaccctggcaaggtcacctccaggaacaacggttgaaggctgatagtttataccacacttgaacccagtcgggcactaggtctatagagaactcgacctctttctctggtggtaatcctgacacctcctcaaacacttctggaaactctctcaccaatggtatatcactcacagggtttgtagtctcgacactcatactagctaagatcatgtatacccgtgcatcctccctcaaagatgcctcagcttggttagcagacaaaaacatatcaccttcactcacaccagactcaggaaagacaccaagcttctctaaccaatttaataagac

SEQ ID NO: 57199 - DNA, 1912 bp, Glycine max
  Clone ID: PAT_MRT3847_22663C.1
ggctcgagtgggaattgaaaaatcgctactacgggaattcattcattgagtgtcatccacgtattcgtttccgttctagattgcaaccttccttcgtactccgtgtttacgtcgttcgtgtctggaaagtggggaaaaaagataacaccacaatttcaaagccccattgcttttccttctcctctaatccaatcgccacacacacttgcgagatctaattgttccagagaaccaacaatcaggggatggcggacgatgacaaagcggttggggaaggtgagatgaaagagacgacgggtggtaccagtccttctgggagtggaaagaagaagaacaaaggtttcttgttgcgtatttggaacgggatatttaggttacacggcgatgattttgagaagagactccagtacatttctaaagaggaagctcaagtcatgactagaatgaacaggagatcccgatcctggaggagaatttcccgcaatcttattgtattttctgtcatatttgaggtcgttgctgtagtttatgctattatgacaactagatcaatcgatctgaattggaaaatgagggcaatccgggtttcaccaatgtttcttttgcctgcactagcagctgctgcctatacaacatttgtcagcttcacaaggatgtgtgatcgcagggataagaaaattcttgaaaggcttcgagctgaaaggcaagaaaaaattgatgagctcaaagaaaggacaaattattacactacacaacagctcattcagagatatgatccagacccagctgcaaaagcagctgctgcaagtgttttagcatctaagttgggtgcagattctggtttgaaagtgtacctgggagatgaatccagtcccagtgctccactggggaggagcaatgacattgaaattgtgcagtcctctggacttcgaaatcggagacaacttcaatctagatccactagtccagggacaaccacaccaaattttgctgatcaacaactagttggtccaggaggaatcgatcaaactcagacttttgagctcaataagcctgttgttgttgaacatcacttacctcaaagttcaaccacacaagatggaggatggattgcacgaattgcagctttacttgtgggcgaagacccaacacagtcatatgcgctcatatgcggtaactgctatatgcataatggtctggctcggaaggaggatttcccagttatcacatactactgcccgcattgtcatgccctgaacaaaccgaagcaatcagatgagcatatctctggtcttacttctccaaacacgggggggactccaaacacagatgatggtgtgacggatgcagttaagaatgctagggcttctgcagccgagagtgtaatcacaagcagtagtcccggaagtgcttctagctctgagattgaggaagtatcagaaagggcaagcgtggatgagaaaattgattaaaaggacagctgttttcttttttatgattcagctgtcggaattacatgtcatggcccttgttctggacacaaactgactatatataaggggagaattgcaattggtttccttggtggctttgcaacaggaagagtgatgaaatacttagatacatagattacacgtattgcttgttaaggcagttttggctttattttttcgtttttttgtgacattatatcgtgacagtgttctagttctagttttaaaacttggattgtacctgaaagaaattttgaaaacgggatttgtatccattgtgtttaatggatttaaatttgatgtatccatgagctataatttcattctaggattaccgacttagtccaatgttatgtttctggttttttgtatatatactgtatacgcaagaattattattcatttgtttcgaacaaaaa

SEQ ID NO: 57200 - DNA, 273 bp, Glycine max
  Clone ID: PAT_MRT3847_22664C.1
caaaagtgagtataatctctgtgaaatattaataattgggagaatatggaaactctgatcgcgattaaaaatgtctaacttgatgaaatatccctcttgatggcgaccgctttacataaccttcctacacaccatatgtggttatgtcatttgcacacactatcctcacacattatcgaatgctagtgatgatctctctcccacagatagagtcatattcatacatgatgtcgcaccacaagggataaaagaaaaaacttaatactacatggg

SEQ ID NO: 57201 - DNA, 134 bp, Glycine max
  Clone ID: PAT_MRT3847_22665C.1
aaaagaacacaagcgtataattttactgaaattgaatcaacatttcatttccaaattttggcacacaatcaaataaaattcagctctcaacaattttaaaaaccagaaacagaacgactcgagccgctcgagcc

SEQ ID NO: 57202 - DNA, 376 bp, Glycine max
  Clone ID: PAT_MRT3847_22666C.1
gtaaatgtttttgcttagcaacgttaattaacgctgaagatctcgttcaaagttgttttggactgtgttttttctatcttgaacaaaatcgcatccgtacctttgcgtcaagtttttgattgatgataaaaaaaagtggctatagttgatcatgggattgcttatttattacttgttcctatcaatagtttaggttatgctcatagattttactacgaacaattgcatggtgattttgtcaccctaacgtattttagttgggtgaagaaagaaatgaatcaacgcatggatccatccacgagttattgtgtattttaaattatggggaagggtttcgtgtttcatgttgagattgggaagtaatgattcataatgt

SEQ ID NO: 57203 - DNA, 247 bp, Glycine max
  Clone ID: PAT_MRT3847_22667C.1
aactggcgttcgattccatcggcagcgcgcttaacgtatgagtccagaacgagagagatggtacggtaaatctctcgcctgggatcacatctgactcagaatcgagtgccgcagttcacggtgccatctaacgtatatgtgagcgcttgtactaccaatgtctatacctactatgcttacgacgtctgcggaagttcttaatctgaacctgaagacgatgctatagatagtgctaggatctacactc

SEQ ID NO: 57204 - DNA, 1052 bp, Glycine max
  unsure (1)..(1052): unsure at all n locations
  Clone ID: PAT_MRT3847_22668C.1
gcaagcctagcctatgcctaaccttgcttgtcttggtttatgcatgaatggctcatttactggcgagcaaccccaatgcttcacagaaacttaccttctcaaacttggggtattatggtgttagaagaggatccagaaccaaaggttcgtgttacagagtgggaaggaaaaggcgaggtggtttggtgttgcaatgcagcagcacaactgatcaggatgtgaggttgcagattgagagtggtagcatcggaaagcttaagcagcattttgaatatttggtgtgtgaatatgggtggagagtaagaagactatttgaaaacgcagatgagataaagaaggcatctcatgttcaggccgaagcattccatgttcctgtctctcttttcaacgaattgttcttccaattctttcaggcggaagtgctttcggggcttctttacaagcttaaaaactcacctcctaataggtatgcttgtttggtagctgagccagcaataaacgatccagattcaccaaaacaacttgtaggtgtcatagatgtcactgtcttacgcgtcacatacgagcaatagccgcttccaaaacattcaggaggcgaaaaatagcgactgccctgttgaaagcctgtgacatgctttccattttgtggggtttcgagtttcttgcccttcgagcttatgaagaagatctaggtgctcgcaaattgtacacaaatgctgggtaccaagttgtgtctcgtgatccaccatggacaagtaattggattggaaggaaatgtcgtgttcttatgatcaaaagaactagtttctccaaatagcttaatttaattagaattctcaaggcatccaaacaagataacagaagcagcaaatgtattctagctaggtatatagcatgatttgttcattatttcccactcacaatccttcattgccccgtcccaaataccctttcgactattttgacactcccttgcttcctgtgtatctcactgattttcaaatctaatcacaaattaaatctacaaaaaaaaaaaaannnnnnnnaaaaaa

SEQ ID NO: 57205 - DNA, 183 bp, Glycine max
  Clone ID: PAT_MRT3847_22669C.1
gactcacgagggtttggtgaccgggatgactataaacacagtcacttacttcacttcactcactcccttcgtgcctacaactttcttatgtataactctgccaaaaatgcgagatattctctatatacatgaacatcaattcttaaaccagaactgagcaaatttcatgcacatgttgtacgc

SEQ ID NO: 57206 - DNA, 834 bp, Glycine max
  Clone ID: PAT_MRT3847_2266C.1
gcagagggaaaccttgactcagattcaccctcaacttcctcttcttctccttctccttttgccactgaccaaacggttttcgtgactggcgaggatgttccattggagggtgtcatccagttcgagaaacccacctcttctcctccttttgaaaaatgggggcgtgtggctcttctagctggtgcggatgtgttggccttgtttgtgtttgcgacgattggaagatacagtcatggactttctgttttggaccttgagactctgcgcactgcagatccttttatagcggataggaatagtaataagggcagcagcatcaggtcatctaccgaattatggttttgtacttgttagtctgggaagcactgctgttttacttatcacattcagagcattattatatgctattcttcccgttgacaatagcaagaagagcgatgactatcgccgtggcagtccctttgaactctttgagttgctcacatcattagtacggcggtggtagtaatggtttgcatgttcacggcaacataatacacatctgaatgtcagtttccatcgctaatctccttgtactatcggctcatgaaaaaagtaagagtagatgtatactgctgttgaattttattcaactaaatgtgtacactattattacacctttgatcaattaaaagtgcattaactatcaagtaatttgaatcatgctctggtccaagtaagagcaagatgtttactgcagtttaattttattccacgaaatgtgtatactattattacacaccattgatcaattaaaagtgcattaactattaagtcatttgaatcaaaaaaaaa

SEQ ID NO: 57207 - DNA, 451 bp, Glycine max
  Clone ID: PAT_MRT3847_22670C.1
ccacgcgtccggcgcaggaaggaggcttatggtgtcagattcttaccgcgggtgaggtgctgggagtaccaccagcaaccttctattgtgcgtttgacaagggctactctagcagacaagggtgggcactcgggtttcaagggtgagcagaggtatgtgatttaccgtgttcgagttctaaggggtggcctagaagagaccagctgcacaatgtgttgtttatgggacgcccagcaaccaaggggtgactcaactggaatttgtggtggggagaggtctgtgggctacgaacgagctgtaagggagttcaatggcctcacggttctaagttcatactagatgaatgaggactcgactcacaaatattttcaggtcattctcgtggatgttgcccacactggctggtccaaatgatccatgaatcgactgggtctggaacccagggcataaa

SEQ ID NO: 57208 - DNA, 305 bp, Glycine max
  Clone ID: PAT_MRT3847_22671C.1
attcggctcgagggaatacattgataaagttgttcttgttttttcttcagcttgcaataaggctaagcttcttaaagtgaaagtgttaattgctgataaagagtatgagagtgctattgctgagtctggttttcttcttaaggaagatgaaaataatttagaggcattgttgttacgtggtcgtgcatattactatttagctgatcatgatgttgccacgaggcattttcagaaaggtctccgcctagatccagagcatagtgaactgaaaaaggcatattttggattgaaaaatctactaaccc

SEQ ID NO: 57209 - DNA, 264 bp, Glycine max
  unsure (1)..(264): unsure at all n locations
  Clone ID: PAT_MRT3847_22672C.1
aagaaattcttgctcatgcagttggggaagatgtcattatgaatgacagtaatgttgtngattttgttgatcatggagacaaggtaacagtggagctggagaatggtcanagcatatgatggagatcattggttggagcagatgggatatggtccaaggtgaggaaaaagttatttggccaaacagaagctacttactctggctatacttgttacactggtattgcagattttgtgcctgcggacattgaatcngttgggtacc

SEQ ID NO: 57210 - DNA, 369 bp, Glycine max
  unsure (1)..(369): unsure at all n locations
  Clone ID: PAT_MRT3847_22673C.1
ntttatttttttttttttttttttttttttttttttttttttttttttttgtggcgttgcaccaccgggctcttaaaaggatttttgtgaactcccaattgcagaagtttgggactggtcttaaaaaaaaatgctccttaaaaacagttgggtttgacctaaacaggtgaacctacccttgttgcgttcagtgcgcacagaggaaaggactgctgctggtgttgccttcaatcattttttttccaacacccatatatgttttggcatgcccggaaaatccgtatggtattaagtctttccaaaattacctaaatttgcaatgccgtatgggatggctcctttaaaagcacacttcccttgtgggggaaa

SEQ ID NO: 57211 - DNA, 657 bp, Glycine max
  unsure (1)..(657): unsure at all n locations
  Clone ID: PAT_MRT3847_22674C.1
tttttgttcgtattttttntacttctaaaaagctttttccatgaggatcatcaaattaatgtaaagaaagacctggacttgacaaaatatttgcaagtcacagctacaacagagcaactgtattacatattcaggcaaaagcactcgatgataggctaaaccatagggcagcatgagaaaagaaataaagaatactaacatttttcttctggtgtcacttttctattacctatatttacatcattcctaatgctagtgtaacactaccaactgccagtccagaaaccatttgaatcacttgtaattgccatcattctccaacaggtttacaagcaagccaagaatagcatcaacaagaaagtctagctcacagcctcacagtggcctatcatagctgcaacttactaggaaaccaactaagaggcgactcatttttacatacatttttggaaatggaaaatacaaacagttctagagttgaaccatccaatgatttgaatatctttcactagtacaacttcaaacagaacacagactcactcaacaagcagtaatggaatgaaacttgtcaaacatttggaaccaaaacattcatcaattccctttgtttagtcatccatttccagtcttgggcagactacaaaagaaataactcat

SEQ ID NO: 57212 - DNA, 249 bp, Glycine max
  Clone ID: PAT_MRT3847_22675C.1
tcgggtgcctatcatgaggctggtcatgctttagagggggctaaatgccacaatatgaccctggacccaagatgtgaattattccttggggccgagcgggaggtctcacatgctttggtcccaacgaagagaggctcaagtatggattgtacagaccaagctaccatgcaaatcatacggcagatgccctcggtggaagggttgtcgaatagggtataaatggccaggaaaatggcacgcaccggatca

SEQ ID NO: 57213 - DNA, 351 bp, Glycine max
  unsure (1)..(351): unsure at all n locations
  Clone ID: PAT_MRT3847_22676C.1
cccgtcgcanacaagcgtacgtnagctcggaattnggntcgagngcatncgttgnttgnaatgnangngctactctgaangggaaantacgacgtcgannnaaanggggnntgccttnagcnnaacntgcaccgtgcaagnccgtgcgcacgttcaagntncnagnnctncgtnacggaagccactttcnttttacggccccagacttcaccggnttnggcnctcgccgtcnaganacccggttgccttcatcgtnggntacaacgttcccaataangatttcggtttcagtgtatgaacacngttagggttgtggatangccnttgnactttccntacgcgcanagnagn

SEQ ID NO: 57214 - DNA, 456 bp, Glycine max
  Clone ID: PAT_MRT3847_22677C.1
cggctcgagcgactcgagctcaatccgaatcgtctcgagcgggatctcattgctctgcattgcaacactcacacaccaatggcactcagacccatcgacaacgctcttccgacaacaaccccagagagacccaaaaaacaacctaaaatcgctgttgcaacccaaaaacaacaagatcgtgcttccgtcaacggcgaaaacgtagttccattgccatcatctgaggatgccactgttgactatgtctcctccgacaaccttaaacccttggcggaccccgaagttaagattcagagtttggtggaagatttggattcgaaaaattggatcaaggtttgtgaatcgttgaatgatgttaggcgcttctcgttactccactcctctcttctattcccaatcttgggtaaaattgtgttggtggtggcgaagacaatgaggaaccctcgtagtgctctt

SEQ ID NO: 57215 - DNA, 723 bp, Glycine max
  Clone ID: PAT_MRT3847_22678C.1
caaagtttgtgataactaataactggagtgtggaggttgtgagcaactttcactggtgtcgtctggtctccatgcaccttctcaaatttcctcgctctccatcttccttcgggaatgcgttctttctggtgggtcatcatgttttggacataagagtgttccgtaagaaccagagatgtttcagagcgtccatatcgtgttcggctgttaggaacggttctattgagcaactaagtgatgcacggcttatatactccgtcgctccatctatgggccacaaccaggagtctcatccagaatcacattttagagttcccgcgattgtcaatgctctagaagaaatgcagctcacttccaagttccgtggcccagaggtaattgaacttcaacattttgagcctgcttcagttgatgatattgcaagtgtgcatgcaagagcctatgtttctgggcttgaaaaggttatggatcaagctgtggagaaaggccttattttccttgatgctgccactccaacatatgccactgtaactaccttcggtgagtcaatagccgcagttgactctggattgatcttagttgactcagtggtgatctcttaacctggcatgtccatctcttggtaataatctgtgtgtgtgttttggggaggggtaagtgagtggatatggatatgtacatatctacttcttctggtgacttcatacttgaaaggactatttg

SEQ ID NO: 57216 - DNA, 259 bp, Glycine max
  unsure (1)..(259): unsure at all n locations
  Clone ID: PAT_MRT3847_22679C.1
cgcgaaaagttcagtgttgccaacatcgccttcagggggaagcacanattccttaggcgcaagcgtgacaactccttcagcgtctggagaaaatacctctaatgttgcttctcgaaatggctatacatgcccgcagccggcttggttggcaaacgacgctcccggccccgtgctggctcaactggcttccgatcttcactcactattggacttggttacaaaacattttgtgaaagagaactgncggattaacgagggg

SEQ ID NO: 57217 - DNA, 693 bp, Glycine max
  Clone ID: PAT_MRT3847_2267C.1
cctcgagccgaatcggctcgagctcttcccgaattcatcactgttacaaacccaccaacgttttccaatcctgcacccaaattcatccctagaagaagaagctccacaagaccctttcatctcacactcgccaaagcagagggaaaccttgactcagattcaccctcaacttcctcttcttctccttctccttttgccactgaccaaacggttttcgtgactggcgaggatgttccattggagggtgtcatccagttcgagaaacccacctcttctcctccttttgaaaaatgggggcgtgtggctcttctagctggtgcggatgtgttggccttgtttgtgtttgcgacgattggaagatacagtcatggactttctgttttggaccttgagactctgcgcactgcagatccttttatagcggggtggtttttgggtgcttacttccttggaggttttggggaggatggccgcgggatgaatggtctctacaagggtgtagttgctactaccaagtcatgggctgttgggatccctgtaagctgaatgcttgctttttggtgtgaagcttattggtttaattgcggccatcttgatagaattttagaaaataaatcttggatttttttacacaaagatgcgtaatataatatgttcacaccatgctaatttaatctaagagggtttttacac

SEQ ID NO: 57218 - DNA, 418 bp, Glycine max
  Clone ID: PAT_MRT3847_22680C.1
ggaatcctgtttgggaggagcatatactaaattctcaactaggggaccacaaactcacttgtctctctaacaaatgaacggctagacatgacttttgacagaataatatattatatgaataaaagatggtaacttctggtgatgttctttacagtgtttagtgtggtcacagaaaatgccatcaagtttgagcatttcaatgcatggtttagtactttattcaagacaatttttatctaggaaactagtggttcccaattgatgtcagatttactggctctagactagattatctgattttgtgctttgttttgttgcagctcatctcagctcctggaatccttgccactttcaaatgtgagaattttatatctttaatcaaaatgagattgacttaattgcttatctatgctactat

SEQ ID NO: 57219 - DNA, 411 bp, Glycine max
  Clone ID: PAT_MRT3847_22681C.1
tttaaatagaccgattaaataagtggacgtgatgattaggagttgagattttaaaagtttaaattaatttttagttttttttaatttattttttatatttaatttgatactttatttttttttcaatctacttcttccacctaaatagtaaaaaatatattttatatggatttaaaactgtcattaagtaattttaaaatatcataaaatgtacattttttaaaaaaataaattaattctagaaattagaaaaataaattgaaaaagaaataaataaaaaactaaattaaattagttttaaaaattagaggatcaaattgaaaaaaaaattaaaagatgaaaaacttaaataataaattagatgactaaaaggttaatttaaccattttaaaactaatgttctaaaatcat

SEQ ID NO: 57220 - DNA, 414 bp, Glycine max
  Clone ID: PAT_MRT3847_22682C.1
tacccagttgccaagcatgcttctattgtgagagagcttagaccgggggattttgatcctaaggagaagttctggacgaggtttccgccggaagggtctaagtttacaccccagcaccattcagtggacttcaggtggaaagactactgtcccatggtgttcagacatctaagggaattatttgccatagatcctgcggattacatgcttgctatttgtggaagtgacacacttagggagatgtcttccccgggcaaaagtggaagcatcttttatctcactcaagacgaccgcttcataattaagactgtcaagaagtctgaagtcaaggtgctcataaggatgcttccaagttactaccaacatgtttgtcaatacaagacctccttggtgacggcatttctgggcgggcat

SEQ ID NO: 57221 - DNA, 800 bp, Glycine max
  Clone ID: PAT_MRT3847_22683C.1
cgccctattgaaagaaaagaaagagtttggcactgataatggcgggaaaggaaatctaactataaaaccctaaccctaaacccattcgaatcggaatcggaagaagataatgtcggaggcggaggagctaccccggtctattgtgcgccgcgtagtgaaggataagctgtcccgttgctccgaagacggagaaatttccgtcagcaaagacgctcttctcgcattctccgaaagcggtaggatcttcatccactacctttccgcaacggctaatgatatatgtaaggagtctaagaggcagattatcaatgttgaggatgttttcaaagctcttgaggaaactgagttccctgagtttcttcgtcctctgaaagcttcccttgaagagtttaggaagaagaatgctggaaagaaagctgcagtgtcaaagggaaaggatgatgagccgagaaagaaaaggaagttggaaggtgagtcacctgataagggtgagggttctgataaagctgagttatcggataaaggagaggatcctgataaaggtgagagtgataaaggtgagagtggtgacgagaccaatgatttaaaggaatgaaggcagttgtatttgttatgactgagccagcgcgtttatgttttgtgttatgttgggaatgtgcatgactccttgtttattggatgcagcttggtattaatgtcaaaaatgtagctttttgattgtttctcagtaaaacacatcccctaccctaccccctgatgtatggagcatttcaggaaataaatgatattccatcttatat

SEQ ID NO: 57222 - DNA, 867 bp, Glycine max
  unsure (1)..(867): unsure at all n locations
  Clone ID: PAT_MRT3847_22684C.1
cccacgcgtccgctccctttccctttccctttgctcattcgatcggctcttaaatctatgcgagaagaagatagaaggggaggggtgatcagaaccaaaatggccaatcttagtagtcctggatttaacctctttttggtgtctctcttggttacattggtccaaatccaaaccaaggtgcaatgctaccagtacaaagttggagatctagattcctgggggatccccatttcaccaagttcacacctctacgacaaatggtccaaatatcacaaccccaggatcggtgattcgcttctgtttctatacccaccaagtcaagattcagtgattcaagtaacagcagaatcctacaagagctgcaaccttaaagatccgattttgtacatgaacaatggcaactccttgttcaacattacatcagagggggacttctacttcacaagtggagaggctggtcattgccaaaagaatcaaaagcttcatataactgtgggagttgggggaaacacgaacgcacttgctccaacttcattgcctgaaaacgcaacctcttacccaactgtgtttggtaacattcccatggctccttctagttctaggagtacttcttcctcacctcaccgaacttcaaaattttccctcttaattattggattcttcctgtgtgccctgctatctagcctaatgtgacccccgacaagtaaagataacttagaaatatacacggtaataccgttcttgagttctttttcttttttccaaggcaatgtaactatttgtcatgtattagtacttttttttttcttttaatttatccattttttattattttgcaaaaaaaaaaaaaaaaaaaagaataanata

SEQ ID NO: 57223 - DNA, 615 bp, Glycine max
  Clone ID: PAT_MRT3847_22685C.1
cttgttccaaaaaaaaaaaaatttaaaaaaaaaaaaaaaaaaaaaaaaaaaaaaaaaaaaaaaaaaaaaaaaaaaaaaaaaaaaaaaaaaaaaaaaaaaaaaaaaaaaaattaaaaaaaaaaaaaaaaaaaaaaaaaaaaaaaaaaaaggggggggccgttttaaagaatcaaattttacttccccggtcttgaaagttaaaattttttttatggggcccccaaatttaatttaatgggccgggttttaaaaacgtgggaattggaaaaaccttgggttacccaaattaaatcgctttgaaaaaaatccctttttcccaagttgggaaaaaaaaaaaaaggccccccccaatcccctttcaaaaaatttgcccaccctaaagggaaaagggaaccccccttttaccggcctataaagccgggggggggtgggggtaacccccaaggaaccctttacttttgccagcccctaagcccccgttcttttggtttttttccttttttttatcgccactttggcgggttttccccgaaaagctttaaatggggggcccttttaagggttccaattaagggttttaggggcccttaccccaaaaaaattttttagggggaa

SEQ ID NO: 57224 - DNA, 359 bp, Glycine max
  unsure (1)..(359): unsure at all n locations
  Clone ID: PAT_MRT3847_22686C.1
ttctttgtagtataagatctccaaacttcaatggttcttaagtacttcattgttgtatgctttccattaaacatagggttgtagctaaatgcgattttatttttccaaaaatgaatttcattattgattataacctaggaggtgtactttctaaccttttaaatgctaacatatattgcaaagtttactaaccaattctgaagttcatcgggatcaagatacaacttttgaactctaccagttattttaactagacaacgaatacagtagctgattgatttttatgcgncgatgcaactcatttttttggcttatncatatgcactttnctctacatttttcttcactttaatttcact

SEQ ID NO: 57225 - DNA, 458 bp, Glycine max
  Clone ID: PAT_MRT3847_22687C.1
acgaggggagttgaggacgcgtgggctctgctacctacaggctctcacgtacagactagagatatacaaaggctttgtccccttaaagttcttatagtaaaaatatcaacttcacacgttgctaaccaccccaaaaagtcacccttaatgatgatgtccccaacatttcgaccatgcaccgcttctacattaccaatgaagatctgtgttacgtgcagggttgttgctgaacttcgagggtgatcacctccagaaataaagaaggaagaaagagaaaataagctggtttcgaggttaccagtgtctccagagaaagaagaaaagcaaagaggagagtaatttgttaatttcattcatgattgatgttgttattacatagtcatatatatactgaattctaattttgacattttgtgatttcgagaatgttcaaaattcagcaatttggttatttttgt

SEQ ID NO: 57226 - DNA, 2446 bp, Glycine max
  Clone ID: PAT_MRT3847_22688C.1
gtttctagagagcgagcgagtagattagttcatttccgcgaggagagagaaagtgcaagaattggaagagagagagagagagaggtttggtttgtgatgtggtagctttgaagatctagttcactgttgctcattttagtgtgtatctaatcgaagacgagggggttccgatgtcttctctcagtagggaattggtgttcctgatcttgcagtttctcgatgaggaaaagttcaaggagactgtgcacaagcttgagcaggagtcagggtttttctttaacatgaaatattttgaggatgaagtgcacaatggcaattgggatgaggtggagaaatacctctctggtttcacaaaggtggatgataataggtattccatgaagatattttttgagataaggaagcagaagtatctggaggctttagataagcatgaccggtccaaggctgtagaaatattagtgaaggatttgaaagtgtttgctacatttaatgaagaattgttcaaggaaatcacacagcttcttacattggaaaatttcagggaaaatgagcaattgtctaagtatggtgatacaaaatctgcacgagcaatcatcttggttgagctcaaaaagctaattgaagcgaatcccttatttcgtgacaaactgcaatttcccaaccttaaaaactcaaggttacggactctcatcaatcaaagcctaaattggcagcatcaactttgcaagaatccacggccaaatcccgacataaaaactctttttgtggatcactcatgtggacaaccaaatggtgcacgagctccatcacctgctaataacccgctattaggtgccttaccaaaggctggaggatttcctccacttggtgcacatgggccttttcagcctactccagcaccggtgccaacacccctggctggttggatgtcaaatcctaccactgtagcacatgccgcagtttctggaggtggagctataggtcttggtgctccatctatgcctgctgctttgaagcatcctaggacccccccaactaatccttctgttgactatccatctggagactcagatcatgttgctaagagaaacaaggccaatgggaatatcagatgaggtaaatcttcctgtcaatgtgttgtcagctacattcccaggtcatggtcaacatagtcaagcttttaatgcacctgatgacatacctaagactgttgtgcgaactcttaatcagggttcatctcctatgagcatggactttcatccaatgcaacaatctttacttcttgttggtacacatgtgggggacattgctttgtgggaggtgggttctagggagcggttggtctcaaggaatttcaaagtttgggatcttagtgcatgttcaatgccatttcaggctgctcttgtcaaagatccgggtgtttctgtcaatcgtgtaatttggagtcctgatggtgctttatttggagttgcttactcaaggcacattgttcagatatactcttaccatggtggggatgaaatacgacagcacctggagattgatgctcatgttggtggagtaaatgatctggcattttcccatccaaataagcaactatgcgtgataacttgtggtgatgataaaaccattaaggtatgggatgctgcttcgggtgcaaagcagtatacttttgaaggtcatgaggctcctgtttattctgtctgcccacattataaagaaaacattcagttcatcttttcaacagcattagatggaaaaataaaagcatggttgtatgacaatttgggatctcgtgttgattatgaagctcctggtcgttggtgcacaaccatggcttatagtgctgatggtacaaggctcttttcatgtgggacaagcaaagatggggaatcctccattgttgaatggaatgaaagtgaaggagctgttaaaaggacttatcaaggatttcgcaagcgatctttgggtgttgtgcaatttgatactaccaaaaatcgatttttggctgctggtgatgatttctccatcaaattctgggatatggataatgttcagcttttgactactgttgatgctgatgggggtctccctgtaagttaattattttattgcaaattggagagctggactctagaaatagtagttgcttgctaattgttgcctaatcttaaactttaggcgagcccacgcattcgcttcaacaaggatggaacacttttagctgtctctgcaaatgagaatggaattaaaattttagccaatggggatggtattcgtttgttgcgtacgctagagaattctttatatgaagcatcaagagcatctgaagccttgacaaagcctacaattaatccaattcctgcggtggcggtggtgcaaccagtgctgcactggcagagagggcttcatctgtagtaaccattgtcctggattgaatggg

SEQ ID NO: 57227 - DNA, 1520 bp, Glycine max
  Clone ID: PAT_MRT3847_22689C.1
tggtacgctctgcaggatcaccggctccggaaattccccgggctcgacccacgcgtcccgcaaatgtgggggacattgctttgtgggaggtgggttctagggagcggttggtctcaaggaatttcaaagtttgggatcttagtgcatgttcaatgccatttcaggcggctcttgtcaaagatccgggtgtttctgtgaatcgtgtgatttggagtcctgatggtgctttgtttggagtcgcttactcaaggcacattgttcagatatactcttaccatggtggggatgaaatacgacagcacctggagattgatgctcatgttggtggagtaaatgatctagcattttcccatccaaataagcaactatgtgtgataacttgtggtgatgataaaaccattaaggtatgggatgctgcttcgggtgcaaagcagtatacttttgaaggtcacgaggctcctgtttattctgtctgcccacattataaagaaaacattcagttcatcttttcaacagcgttagatgggaaaataaaagcatggttgtatgacaatttgggatctcgtgttgattatgaagctcctggtcgttggtgcacaaccatggcttatagtgctgatggtacaaggctcttttcctgtgggacaagcaaagatggggaatcatccattgttgagtggaatgaaagtgaaggagctgttaaaaggacttaccaaggatttcgtaagcgatctttgggtgtcgtgcaatttgatactaccaaaaatcgatttttggctgctggtgatgatttctccatcaaattctgggatatggataatgttcagcttttgacaactgttgatgctgatgggggtctccctgcaagcccgcgtattcgcttcaacaaggatggaactcttttagctgtctctgcaaatgagaatggaattaaaattttagccaatggggatagtctgtttccaaacagcaaaggatagcaatgaaattcttaattcatgggcagcaaacttggagaaattgcttgatcttgtggagaagagttgtcatcaaatacacaaggaaaccatggtccataaagctgctttgaaggtttaagaaggttcacatactgtcacagggcatctcaatattgatgtgattttgtactgaagttgccttttcaggaatgttctattgaactgtcactgactgagttggtgaagaatttcgctaaacgattatcgctttttcttttttatattttgtcactcatgcgttcagggtagagctggatatatgcatcatagtactgaaagtagcattgttgtatactactggtacataccttaccactgacttatgactggatcctataagatcttgattgaagcagtggctagaaattgagtgtttgctcatttatattcttttgcctggttgatgttttttcctctcgtattttttccctctattacattttcttgtgaaatttggacgtcgttattttccctgaatggcaatttcctaactgcaagcct

SEQ ID NO: 57228 - DNA, 1084 bp, Glycine max
  Clone ID: PAT_MRT3847_2268C.1
cctatatttacaacgcaatgaatgaatcatgtattgtgtggatgaggacagtgtagtgtagtgccattgagaagcattaatgatactagttagccatatccaagctccttgcgtaggagccatgttttcaaagtgttgttctctattgtctctacccaaattcatcactgttacaaacccaccaacgttttccaaccctgtacctaatttcatcactagaagaataagctccacaagaccctttcatctcacactcgccaaagcagagggaaacctcgattcagattcaccctcaacctccacttcttctccttctccttctccttttgccactgaccaaacggttttcgtgactggcaaggatgttccattggagggtgtcatccagttcgagaaaccagcctcttctcctccttttgaaaaatgggggcgtgtggctctgctagctggtgcggatgtgttggccttgtttgtgttttcgacaattggaagatatagtcatggactttctgttttggaccttgagacactgcgcactgctgacccttttattgcggggtggtttttgggtgcttacttccttggaggttttggggaggatggccgcgggatgaacggtctctcgaagggtgtcgttgctactgcgaagtcatgggctgttgggatccctataggaatagtaataaaggcagcaacatcgggtcatctaccgaattatggttttgtatttgtgagtctgggaagcactgctgttttacttgttacattcagagcattattatatactattcttccagttgacaatagtaagaagagcgatgactatcgccgcggcagtccctttgaactctttgagctgctaacatcattagtacggcggtggtagcaatggtttgcatgttcaaggcaccataatgtgtatgcatctaaacatcagtttccatcgctagtctccttgtactatctgctcgtatgaaaaaagtaagagtagatgtttactgcagttgaattttattcaactaaatgtgtatactattattacacctttgatcaatcaaaagtgcattaactatcaagtcaaaaa

SEQ ID NO: 57229 - DNA, 968 bp, Glycine max
  Clone ID: PAT_MRT3847_22690C.1
taagtaccaggggtactaagaacacaaatttttgaagttcagcagacatatggtttcctaatacaagcttgaacagtcgaattagctaaccataagctgctcatattgtaagctataggctacccaggtcctatgtatgcttccctcccctgattacaaaatccagcccggagagcgctcaaccgaagaagagcaagcataccaaaacccacagccatattcggaaacgatggcccacccgggaagctcgcaccaagcatcactgtcatctagctttaaactatgttatagagtagacctttactactttagatgtgtcacacacaacaaggttgtctgtatcagctgaggtggtacacagccaattgacttttcgaggtacttcaatgttcaaatgtaggatattgttgttgttgtcgtcacttaacccagcatctggataacaggacaaattccataccttcaccaacttatcatttcctccagatatcaagaatttccctctttccccaaacaatgaaaatgccaggctggaaacagctgcagtgtgaccacccaaagtgtaatccaaatgcaacctcttttttccattttgatctgcatctgtattgctagatgaactaccatcttttgatcttgagtgtgatccttttcgtgaatttgaagagctttttgattttgtagcagccatttctgtttctatattaatcacatcaatagctccatctccccttgcaacagcacatattttgtctaatttatctagcatgtcgacttctggaatagctattgcatgaacaaaagcaggattgacacaccggccagcaatgccactactcacatcaaatgtagcaaaatccactactttgtaggggcgccctttggagaagtcccacaacatgagcattgaatcaagacctccactaatgacttcccaggatctccaaggaaggaattccacagtgcta

SEQ ID NO: 57230 - DNA, 627 bp, Glycine max
  unsure (1)..(627): unsure at all n locations
  Clone ID: PAT_MRT3847_22691C.1
ccacgcgtccggctgagacccacgcctccgcccacgcgtccggctttgcaaggcagcccttggccatgggaaaggatagagacaacatcaaggatggtagcagaggctgtgatatttttgaagagaagattcgaagattacccaggtggagaaacatgggatagaaaaatgaaaagaaaacgttccgtgggtaccgttgttgccagatccattgatggtgaaggagagctgaaaaaggttatgcatataaggctagctaatgagtcaggttcgcagggttctgatgcccaaggtttgagatcaggatattctggcagtaatagcaagcttgatggtgcttccctgcctgccacttcaatgcatgtacgactggcaataatgaacaagaaaaggtgtcaaggggttcagtggatggatctaataaggaacgggttgtgcttaaaggaaataagcttaatgtccgcaacaataactatacanggtggtatccatactttgaccaaaggaaaagtgtcaagaccacctcgaacaggtgctttgatggctggaaactcatcttctgttcctcgatcttctgaaatacttgatgctgangaacaaccttcaaatgtcaacaagcctcattca

SEQ ID NO: 57231 - DNA, 232 bp, Glycine max
  Clone ID: PAT_MRT3847_22692C.1
tatgtcgttcgaactgtccatgatgctgtcacccgtctgtgagcggagacgcactggtggagtgcagggctaccaaggtaagaagtcgccattaacgaggttccaagacaaaatgggttgatattcagactgctgcgtggaaccaagaaatcattgcagccgccgagtaattcaagatagtggctaagggccacagtgcacgtagatataggcgcatgcgatagccctagtt

SEQ ID NO: 57232 - DNA, 2720 bp, Glycine max
  unsure (1)..(2720): unsure at all n locations
  Clone ID: PAT_MRT3847_22693C.1
ggtactcattcacctagcggcttggggaatcagatggagatagagtccgcaaagttgtcatcttgtggttttgttttacttgattgcccccaatcaataatgattgagagcagcaatgcatctcttgttggttcagcaagtgattatttattatctttatctaatggttgggacctgactagttatctcaagtctctttcaaaggcacttagaggtttgaaaattggctcttgcttttctacaaaccccggcgtataaagtaacaattcatgcttggtaatctatgtggtgtgcccatttcgtgatcccactgcaattttgcaaactgtaatcgaatcttctgttgccattggatcggttgcccaacagtcagatagagagaggagatctagcttgcacaatagagttgtgaaggcattagatggcttgaccactgtcgatgaagctacagcgtctaatatccttgtgctttctgggtttagtattccaaaattggtcttgcagatagttacagtggatgccattttcagagtcacaagcccatctgttagtgagcttgtcattttaaaagagactgcctttactgtatacagcaaggctcgtcgcatttcacgtggaatctctagtgattttgctcaatctgcatttcctagatctcattctgttttgacacaaatgccttctcccatctctgggatgtggaaagactgtgttggtcctcgaatggcaggacattctcttccaagagagggtgacattgatgctagcttgaggcctggtacttgggataattcttggcaaccaacaaggactggggggttaagctgtgatccaagtagaactggggataattttcttcatgatgaaattcgttacatgtttgaacccctttttattctcgcagaaccaggttctcttgaaaatggtatttcagttattggtagtcccacttcagaatcttccaaggcattggcagatgacagtagtggtaactatgtacagagtacaagtacagcaggaagtgtggagtctgcttcaagcactgatgcatctgggtccgatccaaagactcctccaagcctacattgttgctatggatggactgaggactggcgttggctcgtgtgcatctggacagactcaaggggagaattgctggactgcaatattttcccctttggtggaataagcagcaggcacgatacaaagggtctgcagtgcctatttgttcaaattcttcaacaaggttgtctgatacttcaatcttgtgatcctggccttgcaaagcctcgagattttgtgatagcacgcattggaggtttttatgagctcgagtaccttgagtggcagaaagccatttattcagttggtgtatctgagatgaagagatggcctctgcaattgcggaaatctatgtctgatgggatgtctgcaactagtaatggttcttctttgcaacaatcagatatgagtttgatcccagaaagaactcttccttcctcacctagtcctttgtacagccctcatactaaatcccctggttttatgaaaggcagtttagggcaacctactgcaagaaagcaacttatcggtggacattctatggttgacaattctaggggtttgcttcattgggcgcaaagcattagttttgttgcagtttccatggaccatacgttacaactagttctgccagcagattcatcaactcctggttacatagaaggtttcactccagttaagtctcttggttctacgtcttctgcatatattctaattccttctcctagcatgcggttccttcctacaacagttcttcaactccccacatgcctcacagcagagtcgccaccactagctcatctgcttcacagcaagggttctgctcttcctctctctactggatttgtggtttcaaaagctgtaccttccatgaggaaggactatagnagccaaccaaaaagaagaatggccctctgtactttcagtgagcctcattgattattatggaggtactaacatcccccaagagaaggttgtccgaggaattaacaagcaaggtggtagaagtttaagctgggaagctaaagattttgaaattgagacccccttggttctggagtctcttgcagcagagcttcatgccttgtcatggatgacagtgagccccacatacttagagcggcgaacagcacttcctttccactgtgacatggttttaagactaagaagactttttcattttgctgataaagagctctccaagcagtcagagaaatcttgactatgatttatatatatacaatggttgcgacaaaactcttatcattgattagagaggaaagacagccaaactgagctgagtagactgtatcatactagatacactgtgattacatgtaaattaaaggtagaagctgatgtgttcctggatgaaatagatttagcaattgttgggaatgtacatgagcttttctagaacagctgattttaacccagattagcatgattgatagaaactgttgattttagcatagaataccatattttcgctctttgtagcatgtgggtctccgaaatttcatttcctttgtaattagatattgtaagacaataatgtgctagtaactaattttatgcttaatattggtttcctagctataaaaaaaaaataattattgtgttgnnnnnnnnnnnnnnnnnnnnnnnnnnnnnnnnnn

SEQ ID NO: 57233 - DNA, 870 bp, Glycine max
  Clone ID: PAT_MRT3847_22694C.1
attatttttatgccctttgaggaccattaaagtgattgtacagtttatcttaagttaattatttatttctctaatgtatataatttccagatcaactattgaagcttttgcatctgtagtagcccccctggcagaaaacttaatgcaaattctagctcagaaactgaacatcaaattcaactatttccaagagaattgttcagcaaacactagctttcttcggctgaacagatatccaccatgtccaatattctattcaagggtgtttggcctcttatctcacactgactctagtttcctcactatagtgaaccaagaccagattgggggtttgcaaataatgaaagatggaaattgggttggtgtcaaacctaacccccaagctctggttgttaatattggtgatttattccaggcactaagcaatgacatttacataagtgctaagcaccgggtggtggcagctgagaaggtagagaggttctctgtggcatatttctataacccttccaaagatgcattgatagagagccacatcatgcccccaatgtacaggaagtttacttttggagagtacagagggcagatagagaaagatgttaaggaaacaggtgataaagtggggctctctaggtttctcttgtagaaacatagcaactatgacacccccaaaaaaaaaatattgagcaaaagtattaattattataattcaaacgttgctgtgtgagtcagtcacatctccggaatcaggaccacatagcagcctagaaagttgtccactcccgatcacaattcgacagaataagttgatgtttcttcccaggtttaataatcacattttgagtttataattctgtactttttgttccc

SEQ ID NO: 57234 - DNA, 165 bp, Glycine max
  Clone ID: PAT_MRT3847_22695C.1
gaaagcaccaaaacccttatttaatttttcccttggggttcgggttccatattggcaataatgcacccttcaaataacccttttacacaaatgacaagctcatgccccatacaaaataatccacatcccgatgtctcaattacaatagtcccgctcccatcactg

SEQ ID NO: 57235 - DNA, 329 bp, Glycine max
  Clone ID: PAT_MRT3847_22696C.1
ccaaccaaaaatttaatggtaattttcaaaatctgggccttacataacaatgggttttcccatgtccatgtttggcctaactagaacctaacccccaattggcggggggggcatccgggaccataccaccagcagtggttggccctactggaccattctctgacaaaaacataagccattacatattttaacaagctatccttcttaacttccttttgggttcaaacccaaaagacctttcaaatttttctttccccttttcggaagtcccactccccggaaggccacctaaaaaatgtaaaccatcccccttttgaattgaacgaacc

SEQ ID NO: 57236 - DNA, 393 bp, Glycine max
  Clone ID: PAT_MRT3847_22697C.1
ggattgttatattagttatcaattttaagtaagtgggggctaggttatgaaagttttgcaacataaagtaagaaagcccgaaaaatgaatgttgctaacttaagcgtgtgaattatcgatgcataaatagctcgacgttatcttgaacatattatattgagtgtagaggctaccttcaagagcgatggcagatggagctatctctttaagcctaatattgaaggcttccttgtttatgacaccatcgaagatgactgtgtttctcttgttacctctctggttgaatatgatcgttgggaatccatatacattaacgggttcaactttcttggcatggagagtccattttggcgatgactatgaacttacgggtagtgtacttctaaccgagtt

SEQ ID NO: 57237 - DNA, 382 bp, Glycine max
  Clone ID: PAT_MRT3847_22698C.1
gaatcttcaagatgattttgaaatttaaaggagtagaggtgtatgggtggttgatcagcattgagtagcacttaactgctctgaaaacagtagaggttggttgagaagccatcgcattctgtgaagacactaagaggttgtattttcagatggtggcttaagtggaaatggcacaatctgaatacgacatggtggacctttgtgaaggttgtgatcaaacatttccaaccagagtactgcctagatcaagtggtctgggcattggaaagaaacaagaatggttgctgccacaagtcttggaaccagagacaaccaagaatggggaaacctagagggagtatccagtctcctatttagataagtaactagacctgaactaatc

SEQ ID NO: 57238 - DNA, 603 bp, Glycine max
  unsure (1)..(603): unsure at all n locations
  Clone ID: PAT_MRT3847_22699C.1
gagttggctggtaactttaaaagctgttacttttaattacatagcgtaacaaaatttaaacaattataaaatgatttaattaaataataaacatacaatttgtagacatataaaatgatttcaacaattataaaatcattcaatttatagataacactaatatgtaaccaatacttccagcagccgcaacaacacatctaatacaatgcagacttggaatttagatgacaatacttgaatgttgcaatatgattaattacgactatatatatatatatatgcaatgcaaagataagaacattaatcggatataataccatcattattgtttaataagagttccattaagaatatttaaatcattccccacctaaccccatttaattttgtattgatattgaattgattgattcaaattttgagacaaaaaattgtaactaagcttataagttacgaactatttttcacatatattagaaagtttatttaaacttaattaaattgaaaataaattataaccaaacgttaaactacctatttcaataagttctttcaaaaaccggcaaccctttggtggttttttcccagccgtcgnacgcgtgg

SEQ ID NO: 57239 - DNA, 642 bp, Glycine max
  unsure (1)..(642): unsure at all n locations
  Clone ID: PAT_MRT3847_2269C.1
aaacgcttccatttgaatttcagcaactgaagaagctcttactcactgcaatggcttaccgaaacggcgtcgctctggctcagaggggaagtgccgttaagttcgaacgcccaaaccacctcagaacaacggcgtcgcctaagccccgcctccctcactcgccgggatccgccgtccgccgctcccccgccaccgccagaagcggagacggaggttagttagttagttagaagcaagctaattagttatttaaacttccttcatttcacacagagaaagagagaggtcgagggagaagaagcaatgtagctataataaatagaacggtttcaactaagaagataagttgcagtggagaacgactgcgagttttgtttctgcttttgtcgtttttcgttggtgtttttatttttctgcggagaatgtatttcgtgcttccatttcgtatctctttctgacgatgattcgcttattcgtggttatgctgtgttagtaggtttggtatgaagtaacgcaattacgcgaatagtagtgatcaggtatagttattgatggataatgtggttggtgtgattaatnntgtaattcagtggatttgaatttgaaaagtgntgttgcttcaacattttgggatcgcattag

SEQ ID NO: 57240 - DNA, 364 bp, Glycine max
  Clone ID: PAT_MRT3847_226C.1
ggaactggggtagcctgacttttcctaagctttgtattggacttatggatctatcacatagatccctgaaagctgttccgaagactatcaaggcgaaaggctattgtaatatgttacaatgtgctaaagtttacataatccttgctgcataggtgctcacctagtgtgctgtaaatcgcaatgcttatctggtcctaacaaggcaaatcctgaatgtttcgtcttcatcgcatgcaccctaataaatattatttggctgaaccaaatagccgcgctaaaaaaactgtttgtgcaccagatgcagctggtgcagcacatccaccattcgtggcaggagctccgtatacatatatgttattgcctg

SEQ ID NO: 57241 - DNA, 487 bp, Glycine max
  Clone ID: PAT_MRT3847_22700C.1
aacgcccaaagcgctccggaatggccgccacggccccttcctccgtcccccccgacctccgcgcccccctccgcccgccggcgccgccgccggcgaagaagccgccgacggagaagctctgcatcgacgacatgctgcggaagcactgcggcgagttcggccggtggcagctcaagcacttcatcctcaccagcctcgacctgggcgctcgaggccttccacaccatggtcatgatcttcgccgaccgcgaaccggactggagatgcgtctccggctccgtctgcgacgacagcggaggcggcggtgtctgcggcctctcgccggagtcgtgggagtgggtcggcggccgcggtggctccaccgtgtccgattggagtttgatttgcggaaataagtttaaggtcggattggttcaggcagttttcttcgctggctgcatgattggtgctggaatatttggccacctctcagactcctcattaggaa

SEQ ID NO: 57242 - DNA, 328 bp, Glycine max
  Clone ID: PAT_MRT3847_22701C.1
tttttgattcgatagcatttgatttcaaatgtttgagaggaaggatcagagctatcaagaagctttaatttgcattagtcatgagaactggtgagcttctgttgttcttttcctttcttgtttctttggcgctatggttccaactctgtttcgctggagatactttgatcgctggccaggagataactcagaacaggactgggaaccttgtttcatctagccgcacatttgagctgggcttcttttctttaagtggagaaaaaaaatactacttggggatatggtatcgcgagttggagaaggaaacacaaaaagcggtttgggttgc

SEQ ID NO: 57243 - DNA, 190 bp, Glycine max
  unsure (1)..(190): unsure at all n locations
  Clone ID: PAT_MRT3847_22702C.1
cagaagggtacggcctacanaacgggatcaagacccagttcaatatcctactacatcgtattaaagaatttactatatactatcatcatatctcggttcccagggggtgttggtgggagttgtcttcctcacaccactgtcttctccatttcgcattccctattttgatctgcaccagtccactccccct

SEQ ID NO: 57244 - DNA, 294 bp, Glycine max
  Clone ID: PAT_MRT3847_22703C.1
ctctcaaccattctcacatattggagagatagcacttcatgctatgcgagagctatccacgacttcaatggccttcgttcaactccctgtaaatctattaaacacatccccttaatcgcctgattcctttgctagcttttacttttatccatacatacgacaatgcaacaatgcgaaacgtagccgtcccctgaatgaaacggctgcacccacctgaggcgctaccatgttgggattgaaacgctcattctgcgcacatgaatgacaatggtgcttttctccaccaacatttag

SEQ ID NO: 57245 - DNA, 157 bp, Glycine max
  Clone ID: PAT_MRT3847_22704C.1
atcgattacagcatctcaaaccaaagtcagagtcctatgttccgagcgcggatctctgtacctgttgggggaatgtgatctgagccacaacaaaacccgtcccaacattcattaggttttgaataaatcaaaactccaatgacagcaagagcgagcg

SEQ ID NO: 57246 - DNA, 1095 bp, Glycine max
  Clone ID: PAT_MRT3847_22705C.1
ggcgagggttgagtttggagaggaagacctgcttcaccgttaaccaccccaatattattcgccttcttcacttgttccaggatgatggatgtgtggacctggtcctggagttttgtgctggagggaatcttgcttcttatattcagaatcatgggagagttcagcaacaaatagccagaaaattcatgcagcagcttgggtctggtctaaaagtattacactcgcatgacattattcacagagacttgaaaccagagaacattttgctatcaagccacggggttgaagcagtgctaaagatagctgattttggtctctcaaggactgtatgtcctggtgaatatgctgagacagtttgcggttctccattatatatggctccagaagttcttcagttccagagatatgatgacaaggcagacatgtggagtgttggggccattctttttgagcttctaaatggctacccaccttttaatggcagaaataatgttcaggtgttgagaaacatcagatcctgcacctgtcttccattttctcaactgattctttcaggattggatcctgactgtcttgatatttgttcaaggctactacgcttaaatccagtggagcgcctctcctttgatgaattttattggcatagctttctacaaagaaaactgatgggaacatgataactataccaggatttgaagtgttcacgatctttccatggtagttatcttcaaaactatcaaattcatctgtaaaagttaatgccatttccgtttctttcccatctttgatttctctcctttctgaacattggataagtgcgttacttatggggatataatctatgagttctttcttgacactgcctgcaaattcagcagctttggaatttattatttttaattccagttccactagtaaccgtcttttcaaatgacttagtgatcttaaatgtgagagaagttgtgttcagacctcagatcccaccctctattttagggtgtgattgataactcatcacatccaacttgatccacggatgacggtatgagagaggctatcatttgttgcttccccatattttgatctgtctttaca

SEQ ID NO: 57247 - DNA, 434 bp, Glycine max
  Clone ID: PAT_MRT3847_22706C.1
agctagtagcattgccaaactcgtttttgcatggaaatggaatcttcgtcgactcctcctcctaagttccggttcagagaccactcagaaccggaatctcagaattcattggagccaagctccgatgttgtttctgcagcgtcaccgtctatcggtgatcctgatgcagaccttgaaattgaatccatgaccggaagaggcatcatgcatctgtgtgatgaacttcgggaactaaaggaagcagcaaatgaagatttacagaaaaacatatttagcaaatattccactttccttagaatactagaggaagtgataggagtggaaaatgagctcgtgcaactggaaaaccattttgtatctcataaaaggcaagtaaaggatcttatagatcgaatatatccaaagatattgtccatagacatagccttcgatga

SEQ ID NO: 57248 - DNA, 803 bp, Glycine max
  Clone ID: PAT_MRT3847_22707C.1
cttatacggcaagaacaaaaatcattcattgattaatcttccatcgctattgggattacgggagagaagcaacgaaagagaaaatgagtaggtgtgtatcttgtggtagcgggtctgcgctgattcacaataagaatttgttgatatcaccaattcataatgcattaaaggtgaggggcaacaatagaagttgtggcttgcgtgttcaggtttctatggtggactcttcctccgctgatttcaccagacgcatcgaacgagcttggtcaatttctaagcaaccaaggccaatcgtgtgttcgtcttgcgactcaaaagggcatattgaatgtaaatggtgtgcgggtactggtttttttattcttggtgataacatgctttgtgaagtcccatccagaaacactacctgcattatttgcactggaaagggatcgatgtgctgttctgattgtcaaggaacaggctttcgtgcaaagtggttgggagaacctccttcttcctagtaccaaagctactactcaaatggtagagcatcatggattggaagcggtgaaaaatgtagttatattattatacagtacctcgttttacatgtgtctgacagatgcaaacaacctctagcttgcagattaattttgcattgatcagtattgtcttgttattcagtttttaacattgacaatttggcatgttattagaagcagtatataatcatcaacttgtataaatgccattgttttactaaatgaaatatgtaggagttttgaaaccatcaagatacaggttattctgtttcaacacgt

SEQ ID NO: 57249 - DNA, 266 bp, Glycine max
  unsure (1)..(266): unsure at all n locations
  Clone ID: PAT_MRT3847_22708C.1
ctctcttctggattggngttggtgttgggctttctgcactgttttcagtggtagcttcaagattagcagaaatatgnaatgcaacaagcttncangannatgatgggncagatganttcanaanataancaatttggcaatgntgnnttttctccgggatctcctttnccctttcnaatgcctanagcagcagggcncacngcacctgctagttctgnaactactnaatctcgagcaccttcagcatntagtgcatctcantccat

SEQ ID NO: 57250 - DNA, 709 bp, Glycine max
  Clone ID: PAT_MRT3847_22709C.1
actctcctcattcacccaaaacccaaaaaaaactttcttttactttctctccaactgacacataaaaaatggagggtcttattccttttgtttacaaggctatcatgcaatacaagggtgacaaagacggtcatcctataggatcatggctttgtgagtcaccttcttactcatacatgagacttcctgctggtgactcaggtaggtttcaaattcaagcacctgcttcttcattctctgcagcttcaccctcttccaccaaccctaattcttcttctgctacacaaatcattgtttcctctggtgttcagtccccacatcagtgtcttacacatcgtcgaattgcagcatgaacatgaacaattcaagtttgtgtgcctgaagaaaaagttgaaggtgcttattgcttaactcaggagttcgagtttgtgatttcaagtagtgttgggaatcttggttctttgtttcatcttaatttggagttgttgtgagcgtgtggaaaacaaccaaaagggtctgtctcatacgcttaggtagtggtggtatttgtaattaagttgtacatatgggtttctcatgcttaagaaattgttcttgttttatgaccaaatggtcacttgaactatgagtttttaggcaaaataatgaacaaaatgtaatggtttattgtagaataaagcatttgattagtctgcaaaaaaaacaaaaa

SEQ ID NO: 57251 - DNA, 547 bp, Glycine max
  Clone ID: PAT_MRT3847_2270C.1
aaagaaacaaccttcttcttttctttgacatgtaaccataaagaatagaagaaggttgtttctttaattttataaaacatggaggtggtttgcagaaatttactgttgcatttgctcttatgacacaaatctcttatctgagaaaggaccaaataaccagagagtagacctcaacactggatagccattgcttgatatatatctttgaatgtcgtctcaaaccagacacatttttatcttatatttaggcaaaaaaatagtgttctgtaagatgatgaccttgtcaatgattaaacctgtgactgctatatcacaaatacattataggcttcattttgattatgaaaagataagcatgaaatgtctcttgatgcattggttccagtcatatgagaagtaataactgataattcaatgctgggtttgtaaatggaactgagtatgatattcaaaggttcaaaactagtcatgtaataccgggtataatttgatgccttttagccctgtttatttatctgtagtctgtacatgtttacataactgattc

SEQ ID NO: 57252 - DNA, 635 bp, Glycine max
  unsure (1)..(635): unsure at all n locations
  Clone ID: PAT_MRT3847_22710C.1
ccagcgtccggagaaggtggcgaatgacaattcaagaacaacatgtgaataatggagaccaacaacaacctcaacctcatcgtccctaatcctcaagattcactgtggatgatgaatttgaggactggggaaacaatggattctggatcttatccggagcgtccaggggagccagattgctcatattacatcagaacaggcctttgtagatttggtgcaacatgtcgatttaatcatcctcctaacaggaggctggtacaaattgcattgtattccatttgtataaattgagctatatgtgtaatgtgtttcaaattggatgttgatacataactctccttgttcttagcaagcgtttggtaacccgttggttgccttttggacgttgatctgccgaagcaatactaccttgcttctacgtctttttccagattttgacgtggaattgagtcttgaagtggatccgtgacacctaaacaaacatgcacttagatggatttattntgaatcattccaattaccatcatanaatattaaaatctccctaggtgatcgaagcgatgcacacttgaatctatttgatggtatcctcttacttntctgttaacacatgtttttgcttggttggtgactat

SEQ ID NO: 57253 - DNA, 477 bp, Glycine max
  Clone ID: PAT_MRT3847_22711C.1
tacggctgcgagaagacgacagaagggatatgatcgagtatgaagagaagtgttgtgaaagactttggaaaaaaaaaagaagtgcctgtgcggcttacatcagagctattcaagacatgtacgatggggcaaatacaggtgttagaactccagaaggcaagaccaaggactttcctgtaaggagagaattaaataaatgttcaactgtgtgtccttgtttaatctagtcttaaatgtgcttgccagggacatacaaaagattatccttaatagcatgatttttgcggatgatatagttttgattgagctttggggacaaacattggaaacaaaggattttcgctaaactaagagtaagacaaaatataagcattgcaattttagctagagacaaggaatatgaattgaaaataagaatgggaaaagatgtcataccacaaatttccatgtttaaatatatgatatcaataacaaaaa

SEQ ID NO: 57254 - DNA, 467 bp, Glycine max
  Clone ID: PAT_MRT3847_22712C.1
gttcgattttttttcacaaattgtttttgcttttgcctattttgcttctccatctccaacaatcccaagcttgcttttcacgtggcaacagtggcgaaccgtcggatggcaatcccgaggcccaggggctaaaatcggaaaacgatgttcggactgttcagttgaagaaggaaaaacaaacggatgaaacggaagaggagaaagacgaggaaagttcggcagaacaaaaattgccatctgaattggacccggaatttgtgaaaacttatctgcgagaatttggtcatttgaagcacaatgagaatggcctttcccatggcgttaagcattttcaacgctttttgggctaccggcagacgggcaatgtcgacttgggaaccctccaaaaaatgttctggaaacgctgtgccaactttgacgagggcttcacagcacaagacccattgcaactttgggaacgttcgaca

SEQ ID NO: 57255 - DNA, 896 bp, Glycine max
  Clone ID: PAT_MRT3847_22713C.1
gctgtctgtccaaacagatgagtctccttgtggttgatgatttagtgaccgaaatgggggattagggtaattagttcatgacattgacatctttgcaaaagttagacctttgcttgattttcatcaaaagctgccagatttcgattacttcgactgataaagaatcattgcaggcaaaaaaaactacgcaaaatgaatcatgcatcatctgagttttacaatcatcacttagaagagaaaaaaaagagtaggaggtcctcaaatgaaatacaaggatatgggaagggttatctagtttccgaggagctgacacttgacaggacagatgtgctgatgctgcacatttactccactagtttcagaaagcttcaattttggcctagaattcgaatgcaatgcaagaagataatcttgacaattgaaaattatgtactctgatttcgatgaattgatgaaattcatctactaaagcactgagataatagaggaacaccactcggtacaactgaaatctaaatttgcctcagagtccagttggattcacgcagcagctattaattctacaaagcttccaatcctcttctctggttttttctgagaagcatggtacattcctttatgaatcaaatccaagctaacttaatcattgattgcagaattatcttgacacgcacatcaattgagttttcaagcttccagatccaccgagcctcttaaaacatgagaacttattgtatggtttatgacattcacatattcatatgataactgataaagagagtgatagatgtgataactgataagtaatatgatggtaaagaaagaaagaaataggaaaaaatgggatagaagaggcagtgaacatacgaatataagtaacccatgacttggaaatt

SEQ ID NO: 57256 - DNA, 126 bp, Glycine max
  unsure (1)..(126): unsure at all n locations
  Clone ID: PAT_MRT3847_22714C.1
gggtgatccatttatcctaagntctgcattcaaacacttgcaaaaacacagaaaaaatggggccaaaggactttcattaaaaaatctttccacaaacgaaaagttacgctctaatgtcattggggg

SEQ ID NO: 57257 - DNA, 839 bp, Glycine max
  unsure (1)..(839): unsure at all n locations
  Clone ID: PAT_MRT3847_22715C.1
cgtggaggttgttgtcatcaattaagtgagtctttcttctgcaccaacaaggttgagcaaatccaaccttacgggatatggttctcggggtcaatcctatgagagatcacatgcccttaagttatcactttgacaacgaggtgcctgccaacagagcaaacagtcagcctgcaaatggtgctcgcactcaaaatgctagagctccttcaccaccagtcgataagcaaagtctaatcaccatctccatgaccagcacctgcatcaatcaccaattgataatcgaattccacatggaatttctggaattgttaaaaacaattaacatctggatgattggcaaaactcatcttgctcataattagatgcttagatccttcaagtgagaggcgacctgccatgagctatgtggaaatggaacttgatcggatcctatacaaggaaatgatcttgtcttcagtcatgggagaaggaactccacttgtgactcttggaagtcaattattcaaatcaacaaaataaaaaaaaaaggtattgttgtcttaaattgttacgtatcatatattatatattacatttgtgcattatatatttgctttatgatttttccctaagtgcataccagagaatagggccacctgcttcctaagtgtaaaaagagcagttgtatccccccccccctctatttttcttttcttctttgcaatgggccagtgaaaagctgtattcttttctttctgattttttccttcataagtgtatgtgatctcttgtaaaccattatttaatgttaatatcccagtgaagattgggttggtgtggtaaaaaaaaaaaaanaaaaa

SEQ ID NO: 57258 - DNA, 394 bp, Glycine max
  Clone ID: PAT_MRT3847_22716C.1
gcagccatacaatgctcgaggggggtcaggggaactacataaaagggttagcggcattgaccacatcagatcacatcattggagtccacatctctcacggtgctgcaagggtgtcatgtcaagagctatatcaaggagcacatgcagactaagagctctctttctcatacactacactggcatagggccaattaacaacatttccaaaggttcgtcagatagtctggtctaacattcttggactgggggaggacgcatgctcccaaacatgcaataccaagcaatggaaccaaagtcggtccctgaggaaccagcggggcctggaaggcgggggatagaactacaagcctgttcagcggtttggacaaacgaagccacaccgatccagacccct

SEQ ID NO: 57259 - DNA, 421 bp, Glycine max
  Clone ID: PAT_MRT3847_22717C.1
cgctaaggtagcataatcacttgtttcttaattagaaacttgaatgaaaggataaaaaaaaactttaataaaatattctattttaatatcaaaattttattattaatgaaaatattaatatatttttttagacggaaagaccctaagaatctttctttaacaaaaagttttttgggagaaaaattaattttaatgttttaacattttaatgtaaagaactttacttaaagattaagtaaaaagatactctagggttaacaggataaaaattaattaaagaacaaatttattaatatattattacctcgatgttggttttataaaactaaaaattgcaataaatttttttagttagtctgttcgactataaaaatataacttgaactgagttcaaatcggtgaaaaccagattggatcttat

SEQ ID NO: 57260 - DNA, 596 bp, Glycine max
  Clone ID: PAT_MRT3847_22718C.1
gcttgaaatacttgaaggagattcatgcatttaccccggttcaaatagtagcaatgctctttgctcacttgaagactatagctgaaaaggattttgggaccgcagtttctgactgcgttattggggttccgtcatactttaccaacttgcagagacaagcatatctcgatgcagcagcaattgttgggttgaattctttgttgttgatccatgattgcactgcaactggtcttagttatggagtttacaaaacagatattcccaatgcagctcatatttatgttgcatttgttgacataggtcattgtgatactcaggtctctattgcagcatttcaggctggtcaaatgaagatactttcacatgcttttgacagtagcttaggggggagagactttgatgaggttctgtttagtcattttgcagcaagatttaaggaacagtatagcattgacgtgtattctaatggcagggcatgtaggaggctgcgtgtagcatgtgagaagttgaagaaagctttgagtgcaaatgccgtggctgatctgagcattgagcgtttgatggatgaaaaagatgttaagggctttatcaagagg

SEQ ID NO: 57261 - DNA, 352 bp, Glycine max
  Clone ID: PAT_MRT3847_22719C.1
ggacaaataacccccaattgttaaaagggcgggagataattgggcccggatgtgcttttattggaccaaattattcccagaaaatttctttaaccttcccaataatgctggataaccttacagtccaaggaaaaacccgcaatatccctttaaaatatgaaaccagtggttgagataacatgggggcacccgcgaagccccaagggaaatttctccgcgaatgggcttttaagctacaatagggggcacccgcccaagattgggtaaaaccctcagggttttccctgaattggggaggttttgcccctcagtgacaccttacatttcgagcagctcagtctcccccaaatgg

SEQ ID NO: 57262 - DNA, 185 bp, Glycine max
  Clone ID: PAT_MRT3847_2271C.1
atcaagttcacgaagaccaacagcactcatgacgtgcaggctgcacaacatgattccgcagggactctttcagacaagcatgcggacaatgaatgggagcggtcatgctgtgagacacccacatggcatgacccagcctgcgcggctgctacctgggcgtcattgcccggcggagacacagtcca

SEQ ID NO: 57263 - DNA, 316 bp, Glycine max
  Clone ID: PAT_MRT3847_22720C.1
caaaaaccttgttttttttttggccttatttggggaaagcaaacccaagggggttcattgaaatcatcccaaactaacccaaggaaactaatttactgaacaaaacaatgggacaaggaaaaaatttttttttaactcattatcaagtttgaacccaaaatttacaatcccaggcgggaagaaaaaaaaaagaaaaaaatgggccctacaaaaatccctcaaatctaagggatggaatcattttcaagggggggtcttgggcgagcccctattgccaatggggctttggtgcccccaataaatgcaatctgcaaag

SEQ ID NO: 57264 - DNA, 557 bp, Glycine max
  unsure (1)..(557): unsure at all n locations
  Clone ID: PAT_MRT3847_22721C.1
gacaaggcgagagacatgaagagagaacgcggtgtgtcgtcggtaatcagctctgcgtgggncctcagtctgacaaacgcgcccaacccccaacgtggcctcgaccttacggacccgaagaacctctacatcttagggggaaaagggatcataaggccgtatgaaccgcatccccttgccttgcgtaggagacatggccatggccaccgtgaataatggaaacccgatctgacgaagaagggtacgccagctggcactggtcgccagcccaagccatggctaccgaaaggaccgcgtctacatgcattaccaagataatgctggtgttattgacaatcccaaaggagaaaagcaagggtctgctatcactgcgcccattgtacaatagcgtgctgagctgagccccatgcttgcaagcgcagacactgctatacgttgagtgggaatactcgataaatgagttttatgtctaagcttgtaggactgaaagtcgtctcacgtttttttcaagcttgaaactgaattacaagggatacagcgttttttaaaaggaaaaa

SEQ ID NO: 57265 - DNA, 277 bp, Glycine max
  Clone ID: PAT_MRT3847_22722C.1
atggggggttttttaattttatgctcaacacggtgccccaacccagcaatataaaaccaaaacagaacgagcaaaaatcatgccaaatggggaaaattgtgagaactgaaattaacccacaaaataccacaccgaagaaaaaataaaaatccgataaatactaaggaagaataaaaagccaattaactaacataaattactggccttcaaaaaaaaggaaaaaacgcaaaaaacatgggatcaatgaagcccacaaaactaaaaaaaaaacccaacg

SEQ ID NO: 57266 - DNA, 398 bp, Glycine max
  Clone ID: PAT_MRT3847_22723C.1
agggggatggagggttggggggggggggtgaaggaatttaggaaaaatgggcggccggccttgtttactaaccacattttttgggcccaaatggttccatttaaaccccataaaagccccagttgggttttttccaccaaaggcgggtggttttttgggggaccagcaccgggggcaccagcggcagcagaggaggttttgtgttaccatgggcggcaggggactaacagccgggggggatgggtctggttgcaaactcagggggggggaggggcaccttcatgggggggctgccaggggggtttgggggagcagcaaagcccccgagggggggcacccttgcctcaaccacactcttaagggccaccccccctgtcttatgctgggaggattcccac

SEQ ID NO: 57267 - DNA, 343 bp, Glycine max
  Clone ID: PAT_MRT3847_22724C.1
tttattttttttttttttttcttattttttgtttgttctgtctgttttctttggatgcactggttctttttattttcttattttggggagaggaaaatttgggactgttacttgaaaaaaaaaagacccctccgctaccaatgtggatttggtgctaaatgggtctcctaatgaagcgtgtgctgctgaacaccaggaagaaaagccctttacttacctggggagaagaagtcttctgtttgttgaaactgctaagcctccactcggggaaaaagtggcccgatgggcaagggtgcggaacttacagaaaaaggggtttgctgttccaaatagcgtttggggg

SEQ ID NO: 57268 - DNA, 426 bp, Glycine max
  Clone ID: PAT_MRT3847_22725C.1
attcatgaaaggaaaacctgaggagccgaagtgtggcttcagtcgcaaagtggttgagattctcaagcaagaggaagttcagttcgagagttttgacattctctccgacgacgaagtccgacagggcctcaaggttttctcaaactggtcgagctatccgcagctctacatcaaaggggagctgattggagggtccgatatcgtgttggagatgcagaagagtggagagctgaagagcgttttaaccgagaaagggattgttccgaaggaaaccctcgaggacaagttgaggaaactgatctcctcggaacctgtgatgctcttcatgaagggtataccggatgctcctcgttgcggttttagttcgaaggttgttgacgccctcaggaaagatgggattggctttgggtcttttgatattttgag

SEQ ID NO: 57269 - DNA, 755 bp, Glycine max
  Clone ID: PAT_MRT3847_22726C.1
gataaaagaagaaggtgtgggggagggaagaaatttgaagaaacatcacacaaagtttccaatttgacgcttaggctttaccatatggcaatgtgagtgcatgtcacttgcctaggccatcacctaccactgataattccatgccttgttattaacccaaccacaccatttgcggctcgagctcgagccgaatcggctcgaggttctgcaattccctccaacaacttcacagcacacaagggtcggtgaaagccttgcctttaccttctctttctgtttgtgaagtgtgtgtgaggaagagggggaatggtgctgctctgaaaaggtccatttttgagattggcaacacagacccattggcacagttaaggaatccctgaaaccaaaatcatattttgacaatggggtttagatgggcatgtgccaacgtgttcttatccaagaggattttgagttcataagagatctagtgtttaagttgattcagggtctgaaaagcggctgcagaaaaatctgtcaaggattttgattgtgaacagtgtttaaatctctgcgaagttgctggaaggtcacagatatatattggcagtggcaaatggcatcggatctaaattcggggttgtccaaggaaacatctgtttttgggttgaaagcatgggaattgatggggataatagttgggttgttcattataatcattctcgtggtgatatcaatatgtcttacttcaagaaagaaatctagaagagtcaatg

SEQ ID NO: 57270 - DNA, 1027 bp, Glycine max
  Clone ID: PAT_MRT3847_22727C.1
agaccaatactacaatctattttcacttagaagagcaattttcttttatgcaatgatagcaacaaagtttaaacctaagacctagtacaaactactcaaatctttcaccacttataataacaactacaacaataattatggttctgacttcttatatggtgcaaaattaccacttgggtatgttgatgtacagaactaatttatctcatgcaacatcatgaacccatttggcatttgcaaaattatcactattaagcaggaattactacatcctcggggaccatcataatctcaactaatcatcacataacacataattcaatgctattaattctttcatataaattgaaaaactcgtgtcatgtgtgccatgtagagattggtgggggccataaacacgtgatggtggtcggagactacctagctaataatttctccttgattaggctgcctagttttcatcctcttgtttctcctgccacatctctacccaatttttctgaagctgttccaccccaagaaaagaaccttccttttcagcatccaaacttgtggaaagtgctccatacgcaatcccaagagaggaagctccaaaagtcaagagtgttgtcaaaaagggtaaccacagtggtgcatcccacacatgcttttccttgagctctccaaaaaggcccaacaaggccaaacccaaccccattggcaccccaacagagaacaagatcctacctattagcctgtacataacttcctggggaagctcatcatcatcatcatcattgttttttcttctcatgggcttcttagtagtattggcattatcacttgcaacagttggaggccccgtggaagaaaagcctttggcactagcacgtggctttaatgtggtgaaggggtagttgagtttgtgtgtagggtgatgatgataagcttggaagtttggtttccatggagaaagttttgagagattgaaggctgcgtttggtgcacaaatcagagttttcatggcttctctgttgatgtgtccttt

SEQ ID NO: 57271 - DNA, 305 bp, Glycine max
  unsure (1)..(305): unsure at all n locations
  Clone ID: PAT_MRT3847_22728C.1
gtcgcatgcacgcgtacgtaagctcggaattcggctcgagntttggctggccaggtgtgttaagagacaggatcacagcatagcgatgagaagttantgtatggacaccattaccttcgattccctncctgtccgagggagttttggagtgggctgtttgncgggnagtgcagggagtcaaggcacacattccaagcagctcctcacactttgctccaccatggctggctcttggttctagaggagctgagatctggcatgaagatgctgtttcctggcccttttttctcatctcaaagaacana

SEQ ID NO: 57272 - DNA, 801 bp, Glycine max
  Clone ID: PAT_MRT3847_22729C.1
ggtgtgggggagggaagaaatttgaagaaacagcaaagcaagtttccattttgatgcttattttttaccatatggcaatgtgagtcatgtcacttgcctaggctatcacctaccactgataattccatgccttgttattaacccaaccacaccaattccctcttctcacaatttcatgtgcctcttgtgttctccaattccctcaaacaactgcacaactacacacaagggtcggtgaaagccttgcctttaccttctccttttctttttgtgaagtttgtgtgaggaggaggagggggaatggtgctgctctgaaaaaggtccatttttgagattggaaacacagacccattggcacagttgaggaatccctgaaaccagaatcatatttggacaatggggtttagatgggcatgtgccaatgtgttcttatccaagaggattttgagtgcataagagatctagtgtttaagttgattcagggtctgaaaataggctgcagaaaaatctgtcaaggattttggttgtgaacagtgtttttctctttaaatctctgcgaagttgctggaaggtcacagatatatattggcagtggcaaatggcatccgatctaaattcggggttgtcccaggaaacgtctgtttttgggttgaaagcatgggaattgatggggataatagttgggttggtcattataattattctcgtggtgatatcaatatggcttacttcaagaaagagatctagaagagtcaattgcatgctttcccttaaccatatgttttcggttccagatgagat

SEQ ID NO: 57273 - DNA, 695 bp, Glycine max
  unsure (1)..(695): unsure at all n locations
  Clone ID: PAT_MRT3847_2272C.1
cccgggtcgacccacgcgtccggggagagagtgtctattattaatgcttcaacttcaacccaccattccgcctctccctccttttctaattttgatattcaaatttcccattaatcaatatcaatattctttctttatttccgacccttcaattgatttgtgtctttttagggtttgtgtccctcatcacccgctcttaaaattcacctcttttttcccacttatttttttccttgccatgctgacgggtgattgcccaaattttctgcacttttccaaaccgtcagcgatgaatttgtaacagaaaaatgaattgaattttctttttatttttctggcagaatcaatattatttgtagatgcttctgtcagattttttgattaattttttctctgatcatgcttttgatcaatttggttctgggttttgcaaatccaactgttccttttttattattcttgttgtttgataatagataatcttctctgtctgcatgcactgcattgccctttcgaaagatctttctgggttgcgctgtgctgagaaaaagttgactttttttggctgaagattgtgttataattaaacaatgaagctcgtggttcgtgtgattgaggcaaaaaacttggcaacgacagattccaatgggctaagtgattngtacgtgcgggtacagttgggaaaacaaaagttc

SEQ ID NO: 57274 - DNA, 238 bp, Glycine max
  Clone ID: PAT_MRT3847_22730C.1
tggataaggatcaactttggtaagaaaaacctttttatttctttttccaaaagcttgccgaatctttttggtgatatcagaagggcgatacgaaacttcaaaactttttcactttgggtggggaaaccaacgcttactctatcacaggtgacgaatacgaccaccccttctttaggggatttaaattcaggagatttacaactggccataattgggcccctacagatggctgggaaaa

SEQ ID NO: 57275 - DNA, 995 bp, Glycine max
  Clone ID: PAT_MRT3847_22731C.1
ccggtccggaattccgtagcggtagaggtagtagaagtttgtgtaaagaaagaagaatggaggaggaaggtgacatatacgacggtgttcgagctcagttccctctctcattcgggaagcaatcgaagcctcaaacccctcttgaagccatccacaatgcgacacgtcgttccaattccaatcccaaaacagccaacgaccttccttctgtctcctcctcttccagggattggctcaattccctccgccctcccaaaacccctactcctcctcctccgctgccgccgccagatcacgacgacggcccaatggtgggaccgccgccgcctccgcccacagctgccgacgaagaagaagacgacgacgacgccgagatgattggcccgcccccgcctccgccgatcgcgtcggagtccgaagacgattcggatcaagatgaggtaggaacccgcttccggattcccctcagcaacgagattgtactcaagggccacaccaaggttgtgtcagctcttgctgtggaccacacgggatcaagagtgctttctggaagctatgactatatggtacgaatgtatgattttcaaggaatgaatgctcgtttggaatcgtttcgacagctggagccatttgaaggtcatcaagttcgcaatttaagctggagtccaactgcagatcgctttttgtgtgtgactggatcagctcaagcaaagatttatgatcgtgatgggcttactttgggagagtttgtgaaaggagacatgtatattcgtgatctaaagaataccaagggccacatatctggattgacatgtggagagtggcatccaaaacttaaagagaccattctaacatcattagatgatggctcactgcgcatatgggatgtcaatgacttcaaaagtcccaagcatgtccattaaccaaagcttgcgagacctgcaagagtttctgtcactacatgtgcatcggatcatgatggtcaatgcattggc

SEQ ID NO: 57276 - DNA, 513 bp, Glycine max
  Clone ID: PAT_MRT3847_22732C.1
ccattatcttgatgaacatgagataaaaatgaaataaaataaaatttatataatttaaaatgtatgctccaggaaagaaagctgaatacctgtctttgttcaaaatctgacaactgcagagccttggccccaaaaactaaaaccaaacagtatttaccatcttgcgtgacctaagatttaaccacatcaccagagagggttaatataggaatgaccagagtctaattaataaacataattctctaactaacatgctaggtagcctctcagatcaacagagattgttgcatgaagaataataataggttaccacttcaaaagtattatttcccttttatatacagaatattagactaggctagaaggttttcgtactagtgacaaaatcctgagaaaccaaaatcggttaggtgggccaattctatttaaatcgaaaaacaatgttgaggtgaaaatatcacacacttgattgaagctaaaaataaatacctgtagaatgtctttgggcttccg

SEQ ID NO: 57277 - DNA, 341 bp, Glycine max
  Clone ID: PAT_MRT3847_22733C.1
ggtgtttttttttttatgactaagcaaactcttaagtctttttcaattatgcagaacaagataatttattccatcgtgatttaccttcccctccccttatgcagttaatgatatttatacaaatagcactattaggcataaccattctatatctacggggtgtgggtcacacaatttgaatttctcaaaaaaagaaagtaacaaaaccttagctatgattttactaattgattacctcccaccatcattttcctagatcattttcccactatatatgtgagactactgaagatggacaaagcgcacattaactcctttgtcaacgatgacatataaactag

SEQ ID NO: 57278 - DNA, 438 bp, Glycine max
  unsure (1)..(438): unsure at all n locations
  Clone ID: PAT_MRT3847_22734C.1
ggtggtcccagaattgataaacggggcacccttagagggagacaatagggggcagatgggttagcttttcactcacctttagatagagggcactgaggagtgctaattttggtgaaaagctcctgtgttgatgggtcttaattgttgggagtgaagatggatgtgatgatattaatgcatattggtgtacccaaccgtatgtatcatattaaggtgggtggtggttgggttggagtanggcaattaancctttgccacaaacctacttctgcctatttgtaagttgtggttcactgctctgactagtcccatgcattaacactacgagacttggtctttgttaagttgttgctgcatttgtaagattgcttgtataatactaatactagcaatgctataatgtttataaagcgtggattttaattaaaaaaaaaaaag

SEQ ID NO: 57279 - DNA, 399 bp, Glycine max
  Clone ID: PAT_MRT3847_22735C.1
ggttggaacttggctgattagtgctgcatggtcgtgagagatgataggagggggaccgtcaaataaaaagaagtacgctcaactactagtatgcagcctagattctgttattgaaatcacctggccctttatcaatagagtaggaggaaccgaacctagacgtagaaagaaaacatgaggccggagaggatagaaaacctagacgttatcatcgtaaatgagcacctggaaatctctaggttccagggggttattaaaatgtttataagaaagagtgctagagggtgaggtgcccttaaacttatatctacagatgtcttaccgcagtattactcctcgtcctcgcctctaatctatacgtaacaacaagactagcattcctagccataggcatcatgt

SEQ ID NO: 57280 - DNA, 1286 bp, Glycine max
  Clone ID: PAT_MRT3847_22736C.1
aaatagagtcctaccctccggttctccgccacctagaccagcagcaacccccaccaaaccctgacccggattataaagacccgacccaagaagatccggatactatacccatcatagatctctcatgcttagaccatgacaccaacaagttggaggaagcttgcaaggattggggtttgtttcgtttggtcaaccatggggttccattgacccttttgaatgagcttcaagagatggccaaagaactcttctctttgtcctttgaggtgaaagaaggtgcatgcagtggctgcccagtgacatacttttggggcacccctgccctaacgccatctgggaggacactaacaacgagaagcccccaaaacatcaattgggttgaaggctttgatgtagcgttgagtcaactcccacacttcagcgtccctcagcttcccacacttgagtccatcagacttctgctaaaggactatgaaaatcatctgtcaagaattgccacaactttgtttgaagctatggcgaataaccttgacctgaatctaaaaccctcaaagccatacttagcagaaaacactggaatggtgcgtgtctatcgctatccaaattgctctgatgcaaatgttggttggggcatggaggctcatactgatagctcagtgttgtccatattgaaccaagatgatgaagtcagtggacttcaggtgctcaaagatgatcaatggctaacagtaaaacccattcccaacacactgattgtcaaccttggagacatgatgcaggcaattagcgacgacagatacaagagtgtgtacacacagagtgagtataaacaaacacaaagagaggatttcaatatgctactttgttttcccgggtgaagacgttgcaattgagagctacaagtacaagccctttacttacaatgagttcagagcacaagtgcaacaagatatcaaggccctaggctataaagttgggctttcaagatttcagcaccacgaggagtgctaagctttattggtttgactcataaatttgtgttcacgtttgtttgtcatattaattatcttcattcttcagcaattttagaaatggataattgcttagataatttgtagaaaatcaagacaagtgaaagtggaacttcgatcaccatgtggttagcgattcctgattagtgtgacaaaattaaaagggtctcatgccgctaaataatttttaaaaaactaaaatatgttttttctatttgaaatatatatattttttcctgatttttacttatttaa

SEQ ID NO: 57281 - DNA, 278 bp, Glycine max
  unsure (1)..(278): unsure at all n locations
  Clone ID: PAT_MRT3847_22737C.1
tatcgagccgaatcggctcgagtacggctgcgagaagacgacagacgnggatacctatatacaacttgagaaaaccatagttattaacattatatcatcgtagttttgatggagagtattcattaattttattaataactaatttctaataaaaaatttaattatatttagtgatatttttttaattatattttttttcatccaaaaactgaaatcaacaacttactagatcaccacatttgttaaaagttaagaataaagagacaaagatatgatta

SEQ ID NO: 57282 - DNA, 460 bp, Glycine max
  Clone ID: PAT_MRT3847_22738C.1
agctggtaactcggctcgagcatacctcttgaaatagagaaagcctttttagtttattttttttttatatttgttttgggttagggaaacttgtgaggggttgaaccataattgaagcccttttgggggtacagatccttaaaatttgtcccccctaatattcataaaagtgttaaccccaccactgccttttcaaaatattcttttcatgtgccaacattccaccacagccccaagttttaaaaaatttcaaaaatttgggtcataaaaattgtgaaattttcacatactatcacaattttgtgcaacccctggtgtttcaggaaaaccttcttcaagggggggagaggccacaaattcccttttatgccccgggcaagttagtcccaacaccttcaatttatccggataactaaatttttctttaaaaaacagttttaccgctttttcttttggtccc

SEQ ID NO: 57283 - DNA, 244 bp, Glycine max
  unsure (1)..(244): unsure at all n locations
  Clone ID: PAT_MRT3847_22739C.1
agaaaatccaacagtaagctctgcaagncctgtatcctgcancanctcatgatnctctcagtccaagtccaaacatgccattgaatgaccaggataattcaagcaatattatgtcttttaaaattgcaccatcttatcntgatgactttattatcagcactggtcaaatggtgaatcagattatccctgaacactctgcctctggaatgtcaaaagttgaagataanatttcagaacaatcaag

SEQ ID NO: 57284 - DNA, 228 bp, Glycine max
  Clone ID: PAT_MRT3847_2273C.1
cttctcagacaatcatttactctccgaggaaccaccaaaagcgccagctttaccatcaccatcagcgtgtgaaccttattactacacctcaccacagttttatttcttcaaacagcaacactatcaacaccatcatctactacaattgactttatcactctaaattacattcacctattactcctaccaccttgtctgttttctccatcttctacattaccctaccct

SEQ ID NO: 57285 - DNA, 1305 bp, Glycine max
  unsure (1)..(1305): unsure at all n locations
  Clone ID: PAT_MRT3847_22740C.1
gctccggccggttcgggccgtgccccgcgttaggttggtggcggtgagttggagctttgaccagtttgagcacacgagaattcagtgggcatgtcaatggcaaaaaaacctgtgaaatactctctggttgacgcgtttactgagtcagtgttcaaaggaaaccctgcagcagtgtgtttcttagaagagaagagggacaaaaagtggttgcaaggagtagctgcagagttcaatctatctgtgacatgttacttaactcgcatcaccgagtcccatggaacaacctcttatcctcgttttgatctcagatggttcactcctgttagtgagattaacctttgtggacatgcgaccttagctgctgcgcacacaatattttcatctggtttggtggacaccgatgttgtcgaatttgtggctatatctggaatattaactgccaaaaagatcccagcgatcaatatcactagtgcctcagacttgcaaaagggtgaagctcaggatgggttttatgttgaattgaatttccctgctgatcctgttgtagaattcaattttgatgagacttcacaaatttctggggcattgaacggtgcttccataattgatataaagaggacacaagatggaggcgacttagttgttgtggtcacttccggaagagttgtcgaggaactacaaccacaacttgatgcaatagttaaatgtcctggaagggggttaattgttacggggattgctcctccaggctcagaatttgacttctgtagtcgattcttctgcccaaaacttggagtcaatgaggatcctgtttgtgggggtgcacattgtgcattggcaccctactggagcaagaagctagggaagtgtgatttcaaagcttatcaggcatcagccagagggggagttctcaatgttcatcttgatgagcagaaccaaagggtgcttttgcgtgggaaggctgttaaagtgatggaagggtgtgttctggtctagtcctgttcttagcattgcagattatattattgcatcaaagtatgtttcagatgactagaattgtaactgaaattctgaagtgttacgacactttattttatcacataaaataggcaacctccgagcattatgtgtttcagtgtttgatgtccacaaacatggtataataataatacttgttgatttgaataagatggtcaggtcagtgctttagtttgcaggccctgcgtctggtctcatcagttcaaatcaatgccaaattgggggaaaaaaaaaaataaaaaaaaaaaaaaaanccgagactagttc

SEQ ID NO: 57286 - DNA, 485 bp, Glycine max
  Clone ID: PAT_MRT3847_22741C.1
ttgcacatttttctcacccactcgtcgcgataatgcttgcaagatctttggcagtattctctgcttggtagataaggaccacacgcatcatgagaaagagccagggaccttgaccttaaatcatcaacggcacggttgatcttcactgtagcaactttcaagctgcgagcctgagagataaagccctccatcttgttaaacaaaaacgaggcttcttcatcgccttcctcggctttcggaagtttcgactgcagtaatgagagcaatcgcgacattgaggacactgaattctcaatgtatgactgggtcaatgtcgtgctcatacagagttcatcagcaaatgtctccaaggaagttgggagaaagtgtctctgccagatgcgaaagtagagcaatggatctctgtaattccaccgcacactttttcatgtttatctcgttcttctttaggccttcgagccagaaattcaacgtacgttcaaccg

SEQ ID NO: 57287 - DNA, 784 bp, Glycine max
  Clone ID: PAT_MRT3847_22742C.1
cccacgctttcccgaatcttttccaatctcccttcgccgatccttcgcgcgttccgccaccacctccgccgttctcagctccccgcttccggaaaattatgtatagtgttttcttggctgcttcatagtcctccctcccttgccaccggtgaatatttgattggcaatcctgtccttattagtcaagttttagaatacaaagaagcttcaatggccaagaaaccaggaccaagatccagtaaattgtcagtgtacctttacattcctaatataattggatacatccgggttcttttaaactgttttgccttctcccaatgtttatcaaacaaaatcttattctctattctgtattttttaagctttgtatgtgatgctgttgatggctggtgtgcccgcaaatttaatcaagtgtcaacctttggagctgtgctggacatggtaacagacagaattagcactgcttgtctacttgtagtcctttcccaactgtacaagcctggccttagcttcttgtcattgctcgctttagatattgccagccactggctgcaaatgtacagcacattcttgacgggaaagactagtcataaagatgtaaaagacagcagcagctggcttttcagggcatactatggaaataggatgtttatggcttactgctgtgtctcatgtgaggttctttacttaatcctgttttatcttgccgagaatcaaacagagaaactggttgacgttatatcaagtaatttacaaaagatatcattcctttctcttctaatgg

SEQ ID NO: 57288 - DNA, 424 bp, Glycine max
  Clone ID: PAT_MRT3847_22743C.1
gggatatctaatataatttgaaaaaaaaaacatgacggtgcgaccatttaaaaaaataaaagtaatgtaaaaaagggaggaatatctagtataatcacacgtgtatattaatagacagaaaaaaaaaaagacaaaaaaaacaaaaaaatagaacaaaagctaaaaaaacattaaaaaatgcaaaaaaaagctataactgaacttaaattttttttaaatataaatagagggggggcacttttaaaaaaacccaagtttacgtccccgggaatagcaagaaatagttcttttttgggggaactaaattgaacttgccggcccggggattaaaacggaagcattggaaaaaccctggggataccaaactaaatcgcctagaaaaaaatccccttttctcaaattgtttaaaaatgaaaaaggcccc

SEQ ID NO: 57289 - DNA, 1284 bp, Glycine max
  Clone ID: PAT_MRT3847_22744C.1
ctctttgtttgttgtctctgaacgtatactacgctaacttctcttccccgaatctcttccaatctcccttcgccggtgcatcccttccccgatctgtcgcgcattccgccaccgcttctgcaaaagtatgtacagtgcttcataatcctccctcgccaccggtgaatgtttgattggcaatcctgtacttattagtcaagtttttagaataaaaagaagcttcaatggccaagaaaccaggacaaagatccagtaaattgtctgtgtacctttacattcctaatataattggatacatgcgggttcttttaaactgttttgccttctcccaatgtttatcaaacaaaatcttattctctattctctattttttaagctttgtatgtgatgctgttgatggctggtgtgcccgcaaattcaatcaagtgtcaacctttggagctgtgctggacatggtaacagacagaattagcactgcttgtctacttgtagtcctttcccaactgtacaagcctagccttatcttcttgtcattgcttgctttagatattgccagccactggctgcaaatgtacagcactttcttgacgggaaagactagtcataaagatgtaaaagacagcagcagctggcttttcagggcatactatggaaataggatgtttatggcttactgctgtgtctcatgtgaggttctttacttaatcctgttttatcttgtggagaatcaaacacagaaactggtggacgttatatcaagtaatttacaaaagatatcattactttctctcctaatgggttctagtttatttggatgggcagccaagcaaattataaatgttatccagatgaagacagcatcagatgcatgtgtgctttatgacatcgaaaaaaaacataagaactgatatttcttccacgacccgaatcccttatctttgtttttcagtaccaagttgtgcgctcaaagattaatatgaattatcccagatggcaattgggattgaattgttcggttttctataatttgtaatgaaagaaaaagaacatactgaactaaagaatctacctttccatatagctgaaagattctgtagcgcaatgttcagtgcttttttgtttagccgctgttaatcacactgcgacgctaagaaagatttgttcagttttgaatttgcaaatccttttataggattggctgatcgtgtacttactgcttgtacttgcatgcgtttgatgaattgacacgatgtcatgccatatgttctaattctaaaaaaaaaa

SEQ ID NO: 57290 - DNA, 608 bp, Glycine max
  Clone ID: PAT_MRT3847_22745C.1
atgacatctgtgaagtatgaggttggaaaattcacaggccaaaatgatttcggcttatggcgatcgaagataagagcattgcttgttcatcagggtcttgaagaagctttacaaggtgaaatcactcttgatgcaaagttggatgaaagggataagaagatcttgatggataaggctcacaatgcaatcatcttgagtcttaaagacaaggtactacgacaagtctcgaaggagaagacaacaactgaaatttggttgaaactagaaggtttatacatgaccaaatctctgaaagacaaccattttgagaaaaagaaatcaaagccgcagtctggaaatagtgaaaatgtacctaatataagatgttaccactgcaaaaaggaaggtcacactcgaagattctgtcctgtaaggcagaatggttgtaattctcatacatcaaatgaaagaggaaatgcaacgatagtccaagatggttatgaatctacagaagctttagtggtaggctctgggaaatctgatggagaatggattatggattctaggtgttttttccatatgacaccaaataagccttggtttgagaagttcactcagctacacggaag

SEQ ID NO: 57291 - DNA, 159 bp, Glycine max
  Clone ID: PAT_MRT3847_22746C.1
gacatctttcactcgttctcagatatttcaagtcaattttctcccctcataaagctcacccatcactggctctcgttcaggcacacatcaatcccgcggctatcaatcccgtagaaaaggtcccatcggacactcaacctcttgcagacaaaaagctat

SEQ ID NO: 57292 - DNA, 391 bp, Glycine max
  Clone ID: PAT_MRT3847_22747C.1
gctcgcgaacggtcagggcgagcccccagactggcagaactggatcggtatcgtcctcctgctcattgtcaactccaccatcggtttcgtcgaggagcgcaacgctggtaacgccgtcaaggcgctcatggactcgctcgcccccaaggcccgcgtcaagcgcaacggcgcgtggcgcgaggttgaggcgtccgagctcgtccccggtgacctcgttgcattcaagcacggtgacatctgcccggccgactgccgtctcgttgaggcgattgacgtgtcgatggaccaggccgcccttacgggcgagtcgctcccccagggcaagaagctcggtgacgagtgtttctcgggctcgacctgtaagcagggcgagtgtgagggtatcgtcatc

SEQ ID NO: 57293 - DNA, 1438 bp, Glycine max
  Clone ID: PAT_MRT3847_22748C.1
tcgcgtccaggctgaatggatcgaacactctgcctctctctacttttcttcacggcggcggtagcggcggagaccggcggcgcagaacccaacctcacttccggcgggctgttatggtctactgctgcggaggaatccgatctggccccgccgccggatgacggcggcttttcttcactcgatggcatgttgcagtgggctataagtcattctgatcctggaaagttaaaggaatcagcagaagctcagcaacggcttccaccaagcgagctatataaacgtcaatttgaaatcaaggaaataatggagaaaatgaagatgccttctgatgctgaattgatgagaatcgcaataagtgacttgaataacgtgtctacatccttggaagataggcaccgtgctttacaggagcttcttgagcttgttgagtcgattgataatgcaaatgatttaagcaaacttggaggacttctcgcggttagagaagaactttattgctctgatcctggtataaggacaattgctgcatgggttcttggaaaagctagtcaaaataatgcaattgttcagcagcagatcttggaacttggagtgctctcaaggctgatgaaaatggtaaactctaattcgatggaagaagccaataaagcattatatgctgtttcagctttgattaggaatgatttggctagtcaggggttgttctatgctgaagctggaggttggatgcttcaggatattttgagtaatacaagtcttgatgtcagactacggaggaaagctgtacgtctattggctgatctagcagcgtatcaattagaaaatgtagatagggaagaacaaccatttttcaatgaccaagatctgttgaaggctgtggttgatttaactacatcaaccgaccttgatctccaggaaaaggcccttgttgcgattaagagtctcttgcaattaagaaccactgaagctcgggttttcaaggacttttgtgctttaggtgatgcactgaacagaatgagacaattgttgcatgatttgatggcggatgagtatcagagagactatgtgatggatgtggaaaatcttcgtgttgaagtggaacacactttccaaagaaagctgaagcaatcatgagttgacgtgtccataaatcttgtatcagtatctagtttctagagatttctcacaattttgaagctgctgtaggtgtttgatgaattcatgttaattttataggtgtacaggttaatccccgtcaatatactagtacctggtgatttgtattctgccattagtccttttttacgtatagaatttgtgttaacaggcgtcttttattttattgagtaaaacggcttaaacttaaacaaaatagttataatcaaatgtttttatatacttagatatatggattatttattgaatagattgttggcat

SEQ ID NO: 57294 - DNA, 579 bp, Glycine max
  unsure (1)..(579): unsure at all n locations
  Clone ID: PAT_MRT3847_22749C.1
acgagggccaccggggagaatgcggagtgtgttatgcctgagattgaagggttgagtgagttcaaaggtgatgtgatccatgcttgtgattacaagtcaggggagagattcaggggaaagaaggttcttgttgttggatgtggcaattccggcatggaactctcacttgacctttgcaaccaccattcttctccgtccatggttgttcgtagctcggttcacgtgttgcctagagaagtgtttggaatatcaatttttgaattggcggttatgttgctgcaatggctgcccctttggcttgttgacaagattctcttgatcttggcatggtttgttttggggaacattgagaagttggggctcaaaaggccttcaaagggtcctttggagatgaagaacaganaggggaagaccccagttttggatattggtgccttggagaggattagatccggtgacatagaagtggtgccaggaatcaagaggttcaataatggtgaaggtgagtctattaatggtgaaaagcttgatattgatgcaatagtgcttgcaaccggttaccgcagcaatggcccttct

SEQ ID NO: 57295 - DNA, 455 bp, Glycine max
  Clone ID: PAT_MRT3847_2274C.1
gccccccttccttagcctggattcttttaaaccggccgcctttttttttttttttttccttggaccaggtatgggaaaataaaccaattattaaaaaaccctggccttgctggattaatcccttctaaaggagggttcaaaaattataactggtcctcctggcactcttcttgggaatacgttcttggccgttttcttattcgacgtatgtaacaccaaaccaagtctcgtaaccttccgcccattcaaaattgtccatcaggctccaggccatataagcacggacattaaccccatcaagggtgtttgcttaacccatagcgttaatgtaatctcggaagtcctgcacacggaactaataatccaaaagctgttccaaaggcatattattctcgcctagcacactggttccgttctccgtcacataaatctggggatatccatagcgctcactg

SEQ ID NO: 57296 - DNA, 245 bp, Glycine max
  Clone ID: PAT_MRT3847_22750C.1
ttcacaagtactactagtccagctatgtaaaaaatgtttaattacaaccgaaagccgaagaacaagaaaaagacttttacgatataactacatggaccaggcccaagaaagacagtgctgagtcttcaagcttcttcttaagaggaggataacaaggtgtcaatgatgcgtgcgtggagtgggacactcaagagagtggcccagttgttgatcgggcccttgccacgggcggctaattggactgc

SEQ ID NO: 57297 - DNA, 397 bp, Glycine max
  Clone ID: PAT_MRT3847_22751C.1
tattgttggctaattaacaaattacttgctcaatggatcaatcactccgtgtggtgctcttgaagcgcagggaggctccaactccctttaaccaaccatctccctcctcttcaaaaaacacacctcatactcactcctacactcaaactccgacacccctatccttttattcaccatcgcctacgtcctcttcttcgtctacttcacgcacccctcttcttactcaaactactctgtctcttccttcctcaccctcttcacaaaacacatctagtccctgtaagcccctcttcactacacccactggcgctccctttacatcctttcctaccccttcttcaccactgtcttctacaagctcaagccccacatagccctctccaacctctccctcccc

SEQ ID NO: 57298 - DNA, 2277 bp, Glycine max
  Clone ID: PAT_MRT3847_22752C.1
gcaactacatgactacatttacaatttatagtcttatttacaatgtattagtcttatttgtctgcaattttctaagatatcaaacattgcaaaacctcaaccacgatcacattttacaactttgcctattatttgagacattacaagccatctgtagttccttcctgatggtgttacttgaaattgaagcagatgcagaaatacaaaaccaaaatgtctttctactacaggggagaataactaaatcaaaaccatactagattcaattttttcttgaagtggggttcaccaagaattgacatgaaacctcttctgttcacttgatattggatgaactatgctattctcgacattaaagaaacgatacgggatacaaccacggaataatccagcttaaagccatatataaaatgagcaaagtatcaggtaaatataatgcataatacataaatatctcttttccttaaaaaatatataaagccccaatgtaaatggctgcaataagtaggggggaaagaaagccatataaaagctgaatccaaccagataaaattgtgtagatcatcaaaatgtgtccatcttaatcttcccacgttttaaagtctggtaggcaatgctcctgtcctgatagataaggaacagtgcagtattgtgcagttcaagtttgtggtcagtgatgagaattaggagaagcagatgatggcctgtcgttaccaactccatggccctcatcctctccttggattctagcaggaatgcagaaccctggcaatgcatcagacaaaaacctgctgccaaagatggaagcttgttgtgacttgtgatgatgttctgatgaagccattggaatgtcactccaaggacgaagtgatggtgagaaactggactgaagggtccccctttgggaatacgcagcagaaccaccttggcctagaagtgctgatggtgaattaaccatgaacccggttctgttcatatctatgcttgcatcactgttccaagtcacaatcctggggtaattggcttcaaaccccacttgagttgagccagagaagagggtttggtcattggaaggtgtttgatttgcacctgcttgggactggccatgatgaatcaaaccagggtcttggaaggagtgaagggaaaggccaagatcctcagtggagttgttggttcttgagattatgtcaggagggtaggtttggaaattgatggaggaggttgcagtggttgtgggaaagaaggctattgcatcagtgtcaataggtgaaggaatgaaagctgaatggtggtggttatcatggtcctcacctaattgcctttgcagctgaaaattgtaaccagaagactctgattgttctgcaatggccatgtcacttgaccctgcattgttgttgttgttgttctcggcatctgcagcagtagtgttaggattagggtgccatggaggaagctcagcaagcttgtcaatagcattcttggccttcttgatgagccagtccacggctttgcttggtctatcagggcgtgaacgttctcgagcatcatagaactcaatagcagtgtgtgctgagagcctaacccttcgatcacggaggaccctttgcagtgtaaaccttgctgtgcctatcttttctacctgtggaccgaacaatgtgccctccttggacttgaaaaatcgctcccccagtgctcttcatgcccattcctcagcttcttctattgtgctttctgcatagtttaagtttgctcccctttgcagtttgcacaacttgttgatgagtgatgacaattgacaccctcctcactttatatgctcataaattgttcttccttttttgattcttgtgtctatagggtgagattcagattcccttttttcttttacttgtctaaagggtttcttgtaggtcttgttgaggttggtattttggtatggtagtatggtagtatagtactctttgattttgcttagttcctgacactattaactgtggttacttgttgaggcttcatctgccagctactgagggttctgcttctgtcactgctgctgatcccaaaaaaccaaaacctgtggcctatgagagcttgttgatgcttctgcaaagagaggcagagtgtgctcggagaagagattaaagatcttttggtccgttttttagccccacaaaactcaaatatataaatacaataaggctggtccaacccactttctcttgagttaccacccctcactttctcctcactaaatagataaccctcactccaaacttc

SEQ ID NO: 57299 - DNA, 788 bp, Glycine max
  Clone ID: PAT_MRT3847_22753C.1
ggctcgaggaaatctctgtggcttccaactcattattccaccatatatatcacttggaggaggctgatgagtttgcagatgaaaatgttaccagggctccaaaaaatgggtgtggcattccttggaattggcgcagaattcatcatagaggtaaaacattccttgacctggctggaagaagtttgtcttgtggtttatctgactcaaggttgaagaaagggacatttactgccaatggaagaaatatttctgagatgcctgtggcatctgagcgctcaagctcatgtacgaagtctgatgcagaggcactgcctttactagttgaggcttctggatctcatgcaagcactgaaaatgcttgttgggatcatgactactctggggaactaggtctttttggtgataatttattcaagcatgatgttgattctgacctcgcttcagaagctagatctggtgatcagcgtaagttgagagggaatcgtcacagtagacaccaaagtttaacacaaaagtatatgcctcaaaccttcagagatatgattgggcagaatttagtggcacaagctctttccaatgcagttatgaaaaggaaagttgggttgttgtatgtgttttatggcccccatggcactggaaaaacttcctgtgctcgcatatttgccagagctctgaactgtaattcttcagaacacccaaaaccttgtggtttttgcaattattgcgtagcacatgatatgggcaagagtagaaatataagggaagttggtccagttagtaattttgac

SEQ ID NO: 57300 - DNA, 301 bp, Glycine max
  Clone ID: PAT_MRT3847_22754C.1
tccacgtttcatgtaagagctagttacgtttttcgttatcatgcctatgcatatgaactgggttcatgaatgtagtatcactgccacatggttggctgcgctgttagtgaagatgcagatgatcagacatatatctaacttcagaggctcatgctcaaaaaccatgtacacacttagtgcgagtgacctaatataatcaggtaacataaagcaatctattcctgcaagttcgagagtctaagacttgactagatacttcacaagagatcaacaataatcaataactatattatattgaagc

SEQ ID NO: 57301 - DNA, 237 bp, Glycine max
  Clone ID: PAT_MRT3847_22755C.1
ccagtttcgagcactgaagcacagtgatgcatttctgatgtgcactaccctcatgacaactgtgtttggggcaatggtggtacacctgctactaagggctggatgtttttctcctggccaagttgatgccattcctggaatcatttttttgttctttgtaggtcttctcatttgcccatttgacattttttatcgccctactcgtttttgcttcatccgggttattcgtaacatagt

SEQ ID NO: 57302 - DNA, 396 bp, Glycine max
  unsure (1)..(396): unsure at all n locations
  Clone ID: PAT_MRT3847_22756C.1
gaaaagaggaaattttgggtaaaaagagtaagntctacccctttatggggcctttgagggcccaataagactttccctttttttttccttttggggggttccctgaaaagatatgaccccccctccggggggggtttggaaccaaccgcgttggggcatgacctttttccggaaaaagtccaaaagaaaaaaggtggaaaaattttgaaaaagccttttttgtttccaaaaaggaaaagttttggccaaaggtttttttagggccccttcccaatggaaaaaaagaaaccctcccctttgggggttttaaaaccccttggggaaaatcttttaagattgaaccggttaacattcttccccccaaatttgggaacatggggaaaaaaaattggggga

SEQ ID NO: 57303 - DNA, 401 bp, Glycine max
  Clone ID: PAT_MRT3847_22757C.1
tttttacaaaaaaagaaacccaaccttttgttctataattgggtgggtacaggaaaagctcatgttactacattttactttcagcataaaaataacaatatgatttctgtagagtaacatccctcctccaaggacacaaacacagagggctttgtttagatgattgacaacctcaacctcatcctatgcaatgatacaacaggggttattcaccgaaaattttcaacctcaaaagcacaagctgttccatcaactgaggccgagacaaggtaatcgtgattagcagacacagaaagagactgaatggcatcagagtgccccttcaatgtttttacacatttgccagaccggctgtcccacaatctcaccttaccatccacacaaccaggagccacataaga

SEQ ID NO: 57304 - DNA, 2002 bp, Glycine max
  unsure (1)..(2002): unsure at all n locations
  Clone ID: PAT_MRT3847_22758C.1
cctgacgtctggattcggtgtaagagctctcctcatttcctctcgaaacagtaaccctctctcgtcgccgccactgctctcactcttctctccctttagcgccgtcagatcccttcattctccgccgcctttctccgcagccgaagccatgcccgaaactgagactcacgatgtggagtggccggcgaagcgcgttagggacactttcatcagcttcttccaggacaaaaatcacgtcaactggaagtctagccctgtcgtccccttcaatgaccccactctcctcttcgccaacgctggtatgaaccagttcaagcccatctttttgggaactgcggatcctaacactgccttgagcaagctctctcgtgcttgcaacacacagaagtgcattcgagctggcggtaaacacaatgatcttgatgatgtagggaaggatacttaccatcacaccttctttgagatgttgggcaattggtcctttggggattactttaaagtagaagccatcagctgggcgtgggagcttctaaccaaagtttataaattaccatcagatcgcatttatgccacatattttggtggtgatgataagtctggtcttgcccctgaccttgaggctagggatatatggcttaagtttttacctccggggcgtgtgcttccttttgactgtaaagacaatttctgggagatgggtgatactggtccttgcggaccttgcactgaaatacattttgacagaattggtaaccgtgatgctgcatcattggttaataacgatgatcctacctgcattgagacctggaaccttgtctttattcagttcaatagggaggctgatggctctcttaaacctcttccagcaaagcatgttgacacgggaatgggttttgaacgtttgacctctatacttcaagacaaaatgagcaattatgatacggatgtcttcttgccaatctttgatgttattcagcgggcaactggtgccagaccatattctgggaaagttggaccagatgatgcagacaaagttgacatggcatacagggttgttgcagatcacatcagaactctttcatttgccattgctgatgggtctcgtcctggtaatgatggtcgtgagtatgttctgagacgtatactccgtcgagctgttcggtatggacgtgaagtgctaaaagctaaagagggtttttttaatgggcttgtaagtgttgtggtgaatgtgatgggtgatgttttcccggagctaaaacaacaggaaacacacattcggaatataattgaagaggaggaggaaagttttgggagaaccttaattaagggaattgagaaatttgaggcagctgttcgacaagttcagggaaacatactgagtggggaggaagcatttgtcttgtgggatacatatgggtttccattagatctcactcagcttatggctgaagaaaagggattagtcgttgatgtcaaaggttttgatagtgctatggaagctgcaagagagagatccagaagtgctcaaacaaagcaagctggtggtgccattgtcatggatgccgatgctacctcagctttgcacaaaaggggcattgtcccaacaaatgatagcttcaaatatgcttggttcaaggaccatgagagtgtggtaaaagcaatatatactggttctgagtttgttgatactgttaacaccggtgatgatattggtgtagttctggagtctacaagcttctatgctgagcaaggtggtcagatttttgatactggatcacttgagggcccacatgctttatttgaagtgcgtaatgttcaagtttatggaggctttgttcttcacattggtaatgggactggtgtctcagttggcgacaaagtagtgtgcaaggttgattatggaagacgcgcccttatagcccctaaccatacctgcacacacatgttaaattttgcccttagggaagtacttggtgatcatgttgaccagnaaggatccatt

SEQ ID NO: 57305 - DNA, 576 bp, Glycine max
  Clone ID: PAT_MRT3847_22759C.1
cagtcagaataaatcactctttttactcactatggaccgaccggggagtccgcttttgcaaaacctgagagctttgagatgcaaacccccacactcccagggtcattatttaccgctgcctctaaagcccaataccgacagaaagcttaaattttttttttgcctgttgagggaaccactataagatccttggaccattttggctttttattcgaacagtaagagctacattcggcctttccataatagacacacactggggctgccatttgctttgatgaaagccctgcttattatatctgaacttggggcgacccatgctcagggtatttatgacgaagcatcgttgctctctcctttacaggcccacttaggatacctggtgggctcaggaattgtgattcatgtgaaccaaaaccaccgctagaaccctcttccactgggatgagtatttcatgctgctttagctagcaaccttatgagaccaggatctaacgggttgcacactctaacgacgagaactgggccatcaatgcctacttacttgaacattactgaggctggtgcgcattgggg

SEQ ID NO: 57306 - DNA, 378 bp, Glycine max
  Clone ID: PAT_MRT3847_2275C.1
gcggacaaagggagatgtacaatacacacagcaaccaccgatcaaagaagagggagccgggcagatctccctttctcgccaaacaaacacaatatggatttctttatcggcgactaaaccgcacctttctttggcttcctcagaaccgccagatgcctcgttttttcctgtatgggagccgcatacaaaacccggaagagcacgcgaccgggttgcgtcgatgggcgtatacgatgcctgacctgcgtatgaaatcaatcgtgcccgatgtgatggatggcgcgatgggtattcaccgcttgatcatcgaagatatgatcaagtcttgcattgaccctaaaggcaaatcgtactttccttttgactggtacgcccacc

SEQ ID NO: 57307 - DNA, 401 bp, Glycine max
  Clone ID: PAT_MRT3847_22760C.1
taactccggagtcgtaaattctcggcgacttttccctttttatacctccttaccattcccatgcccttcttttctaatctcaatttccttcttcatttcaaacactctctgtaaataggtgttgctgggttcttaattgctgtgttgtgttgcattttttattttttctggtgattggaaacattttttttttttttgaggaagataataatgggagcggtttgttcggctggtatggtggagaaaaatggtgaacttggagggaagagtttggggttttctgggaagcttaagaaggaaaatagctttgtgaatcggagagaagctttttcagattcaaggtctaatagtggtcatgatagaaagaaaaagaagcatgatactgggttttcccgtgaact

SEQ ID NO: 57308 - DNA, 423 bp, Glycine max
  Clone ID: PAT_MRT3847_22761C.1
aagggtgaagggaaaaattatcctttaacatttgaatttcgaaataccggttggctcttggatcctaaatatttagaccttttgccataagagatttgaaagtggggggaaattgaaaataccatacccgttattgtttattatggcacatgggacttgttattgttatttgtaattccaaaaaacaaaaattttatgttaaatgggctaagggttttttaaattttcaaattccaaaaaaaaaagagggtggtttttgaattcccacgcccaactcccgaaaaaggggatttttttttttttttttttagccttttcccaaaccccatcccttcacgtggcaggagaaaaaatattaaatttttaccccatcttccatattcaaaaagaaatggggattgttaaaaattaataaaaataacc

SEQ ID NO: 57309 - DNA, 461 bp, Glycine max
  unsure (1)..(461): unsure at all n locations
  Clone ID: PAT_MRT3847_22762C.1
gacgcactcgtccgagtggattttgctttgtttcttcgaaactaagcataaaacagcgtaacagtatccatccatggcttcacctgcaagccaacccaccaaacccttgtcattcactcccacctatctgcaactctaaacccaatatacccacgggccacggtcggtgacgctataatccaaattacggtgtcgttttcagttcgtttaagcatcacccttcccaattgtattcactactaccagtatcttaatctaatccccaaccacacctaaaccaaaccatcagcataatggggaactgtttggggaagtcggagaaattaacggcggagattgttccacgcgacggggccaaagtgtatcccaccgtccgcttgcacggctcgcccaagagcattctcgccgnctacatccgtttcgcgcttcttcacaagtcccgttcgttggacttcgtggaa

SEQ ID NO: 57310 - DNA, 261 bp, Glycine max
  Clone ID: PAT_MRT3847_22763C.1
cacggcacctgatgagtgtaaggcgttttatgcacatcctgttcattgtagtgcctttcgttgtgcatcgccgccgccacgacccccttcacctccacctccccctccgcctcggcgctggagcaccgcgagcgccagcaggaggatcttagcaggactatccctgaggagccatgagacacataagtttgtaatagttaatggagtttttgctgatgagtttgtttctttattttttggggatgtgaagattagcttggt

SEQ ID NO: 57311 - DNA, 614 bp, Glycine max
  unsure (1)..(614): unsure at all n locations
  Clone ID: PAT_MRT3847_22764C.1
ccacgcgtccgctggtttatcggaccagaaaaattcggcccctcacttgtgtgttgtggtaataacacataacagaccgcatacatcattatcggaaaattccacaatcccattcctcttaattttctctcactttttcctttgattctttccttttggtaagagtcctctctcgctggcttccctttgttccaccattccttcgagagttatttttatctattattgttgagccccccacaactcacacaacacaattcccttctggtacctcaagaaacaattctttttcgtttttgtttcagtcccattagttgaactaccttgtttgttcttacttgttttatggatttctaacatttgttcctgtgatataccaattcaagtaaagcagcaaatatgtaaggtgaggaattttcgaaccaaaaacaaacaaaaatttttaaaaagaaaggaaaaaaaaaaagtgattggatttgaaagatgtcaattgctttgagttcagtttgcaaagaaaaggtacattgggaagggcaaccaggacattgttctggcgagccaatcttgatttacctcacagaggatggtgcggtgaccccactgcgngtgtggga

SEQ ID NO: 57312 - DNA, 445 bp, Glycine max
  Clone ID: PAT_MRT3847_22765C.1
gttgttgcataagggggtctatgcctatatatatctctttcctcatctctagaaaacacaagcacaacaacaatctgagcaacaatctgatttctttctccctaaaattttctcttccttctatcataaaaaacttatttatgagagcaagaacattagtgttcgaaaggttcgcgaatccatttgttgcacacgatcggaaccaacgggttgtcgtatcttgggaaaggagcgcaattagattttcctaccagtgtagtgggggtattttctctctaaggataacatttgcacgctttaacccaggctaattatttcttcccctaatttattgtctccttgagtttattgtatgatatagtgcattgttgattcatgtgttgccaattaaagctatcttgctaatggtattctgctatttaattcaaggcatcgcatgttcttc

SEQ ID NO: 57313 - DNA, 456 bp, Glycine max
  Clone ID: PAT_MRT3847_22766C.1
ggccaatcttttgctttatttataagtgaaaatattatttcaaacacagtttaattaattgaagtttttgtgaaattctgtataagttttaaccattaattcaattaagatctggaatgtattatgagagctttcactaatttgtacgagcagataatcaactattttatgggctacagtaaaacatttcataaaattaatataactagtaattaataattacgatacagtgaacaataaaagattttcaaaagcatctcttgttatactttaactattttagaacacgtagggtctttataatattatttcgggttttatctcaaattaataattacttttcaagttacatttattcttcaaaatttcattttgttttatttaaatccaactctggaaactgaataaaaaaatatcactaagaatatatatgaaagactgaacaggagaagtagt

SEQ ID NO: 57314 - DNA, 1579 bp, Glycine max
  Clone ID: PAT_MRT3847_22767C.1
aactactgaagcccaatgaggtaaatcaaagctttgcgaggagcccaaggtctcccatgtgtacaacacccaaatcaaatttctcttgagaaattcttaagcaaatttttattttaaaaatcacttaagaaaaaacgcacactttgccaactaaaacagtaaaacctccccaacaacacgcataaattgacagaaaactacggcaccagaaggttctgattctgaattctgagctttctagttttcctatcatccaatctctttagttagctcctgctccttttctgccagaagcttcaaggaaaaacaaagaaatgagacttggatttgcttcttggagattcatcctatgcaccctagttgtctttttgattctacaagacagtgtagctagaaagatagctacaacatctgggaatgaagttcaactgaaggaagtatcctatgatttgcaaaagcttgcaacagagggtcttgtacttgacagtattattcagcttgaaggcgctgatataaaaaggaagaataagcatgtccataaagacgaggctagagtgaagaaaggaataggatttgacatagaagaagaggaggataaaaatgatcacaaaaagatagttggaaaggatgtgcatggttataagccatctcatgaggatcacaaacacatggaccttgaactgaatgtgtttttcaccccaaatgatttgaaggttgggaaaataatgcccatctatttttccaagaaaaactcctcaacatctccaaaatttctgaccagagaagaagctgatcagattcctttctcatcaaaacacctaccatcgcttctcaaattcttctccatcccacaacactctccccaagccaaggcaatgaaatataccctcaaacaatgtgaatttgaacccatggaaggagagaccaagttctgtgccacttcgttggagtccttgtttgattttgcgcactatctgtttgggtccaatgcacaattcaaagttctgaccactgtccatctcacaaattcaacagccctgctacagaactacacaatctcagaagtgaaagtgatttcagttccaaatgttatagggtgtcaccccatgccttacccttatgcagttttttactgccacagtcagcatagtgacaccaatctctatgaggtgatggtagaaggtgagaatggagggagagttcaagctgcagctatttgccacatggacacctctaagtgggaccgagaccacgtgtcctttcgtgtgctcaaagttgagccgggaacctcacctgtgtgtcatttcttccctcctgataatctagtctgggtgcctttgcctctggctccataactatagtctatagtttcatgttcttcttcatcaaagtttgttatatatatatatatgtgccaggtataacataagttctagttacctggtgtactagctaggaaaggccttgatgaaaaactatgtatgtatctatgttaataaagatgttattctctggtgtgccttagaatagaacgtttatgtaatctaatcgttatcttctgccaaaaaaaaaattaaaa

SEQ ID NO: 57315 - DNA, 158 bp, Glycine max
  Clone ID: PAT_MRT3847_22768C.1
aatctgcagtaacaatcatacctggttactaaccttatacttaatttttagaatcattaagaagactgatattatttatatctttgatacgaagtgggctagtagtttcttaattgtttttagtgttgttcttcaatcaatattgaaattttatttta

SEQ ID NO: 57316 - DNA, 309 bp, Glycine max
  Clone ID: PAT_MRT3847_22769C.1
ggaggttatgaccatgttctttggtgattctgagaaacttctaaatagaattgcactagctctgtgaatatatattctctctgtcttgcagtttctggatgatcagttcaatcagcttcagaaactgcaagatgagagtagtccatattttgtgatggaggttatgaccatgtactctggtgattctgagacacttctaaatagaattgctctagctctgtgaatatatattctctctgatcaagggagaacaaaaacctgtggatttcaaaagtgtagattctaatgtccatcagttcgaaggaagca

SEQ ID NO: 57317 - DNA, 385 bp, Glycine max
  Clone ID: PAT_MRT3847_2276C.1
agggggcaaaattaattttgttgatcaaaatagcttcaaacatttgaatgaaaatcacggtcgttgttttcttcgttgctaaaattttggtaccatggcaatgccatgcgtacgatatgttcccccacgtaatgaacaatggcaatggtgcccgtactccggatgtgaaatgcgcaagttggacgcctgctgtggaagcacacaagatcattggctttgagaccattcctgaagagtgcgttgaagcatcaaacgaatacatccatggcgaacaatatagatcagactccagtacagttaaccaataagcttacttatatgccagagacctcgatgtccatcccaaggacacatgtgtgttcagtatacatggcatcgtactcac

SEQ ID NO: 57318 - DNA, 485 bp, Glycine max
  Clone ID: PAT_MRT3847_22770C.1
ctctgatctacactggcagtcacactttttgcccatgggtcacgacgagtgccgcactcatgcgactcatgaaccgtcacggggagcccatcgacaacagcctcgacggctatatgaggaccgacgagataagctcctgggatctatcctacgctgtactgacagtgatgggtcgtcacttatgcgagacgagcacgctcatgaatcatctgttggacacatgtttgagcgagatggaagctaacatggggcgatctggaaccaccaagggcattgggatagccactgctgtagatattggaccggcacaattgctatggatttacatggcactgatgggatgcagaggggccaggatgacactgctgttcgagaaacagagcgctctttttgctgtggcacatatcagacatggttctgatctacatgaagcgtcctgagatagttggagaacatgcagcaagtcaaccttttttagaaacagt

SEQ ID NO: 57319 - DNA, 387 bp, Glycine max
  Clone ID: PAT_MRT3847_22771C.1
gcgcccacgcgtttggtttttagatattctaaacttgtactgaaaaaatatggggggaaaaaaaaaggacttagaagttggagccaccaggtccgggaaaaggcagccattagggaccgttgttcaggctaaagactacagagagccaccgtgggggcttctcttcgaaccggaagagtggactatcgggcctttctatagggctggcaataacaagttttgggccacttttttgttcctatacatcacagcgctgactgagaggggtgtgttcaaatctaagagcatgttctccactgggggtatccagggttttgttggctcttgggggggagagatctgggctctggtatatcccagcggggaaatctcagggggtcatattac

SEQ ID NO: 57320 - DNA, 283 bp, Glycine max
  Clone ID: PAT_MRT3847_22772C.1
atttttctcacgctaggcacaagatatacgaccataatatagatgtgcggaactgttccaatacacggagcatactccacatgagggtcaagtccaatttccttttttgtgtcaaacaaacaaactcgcgataagcgaacacaatttttcagatcactgccaatgattccccctttgaaaaaaatgtggcacaactcggtggcacaaaaaaagctggcgtacgagtcttaccagctaagtcaaaatcttgcgaaatgcctaagagcatctgggactctgtgct

SEQ ID NO: 57321 - DNA, 1845 bp, Glycine max
  unsure (1)..(1845): unsure at all n locations
  Clone ID: PAT_MRT3847_22773C.1
agggattggtgtggatgaaggacaatgtgatggttgcataaaatctggtgggagatgtggacacaacgtatctaaggatgcatttacgtgcctctgtgctaatcagcaatcttatgatgaggtttgtagcaaaagccaaacaagttctcccttagcagcaccaacgcctaaaccaacaccagaacaggaactgtcacccccttttggtccaaaatttcaagaaaagtcgttgactgttgcagatccgcggaagttgagactcattataggtgttgtttctggtgtggtgggagcacttggtatgggcattatcggctttctctgttatcgtagaaagaagaatcgttatgcaatctcatatatacaatctcgtagcctctcttctgatccatcttcaaaagacactgagaagggagttcaaagctttactcaaagctttgtaccaggagtgcccctcttcttgtatgatgaacttgaagaggccacaaattactttgactcatctaaagaactaggagaagggggatttggaacttgtattttgtctaggcaaactgcgggacgggcgttctgttgcagtgaagaggttgtatgagaacaacttcaagagagttgcacagttcatgaatgaaattaaaatcctagcaaagttagttcatccaaatcttgtgaagttatatggatgcacctctcgccacagccgcgaacttctgcttgtatacgagtacattcctaatggaaccgttgctgatcatcttcatggtcaacgatccaaacctggaaaactcccttggcatattagaatgaaaattgctgtggagactgcaagtgcattgaattttcttcatcacaaagacgtcatccaccgagatgtgaaaaccaacaatattcttcttgacagtgacttttgtgtcaaagtggcagattttggactctcgcgtcttttcccagaccatgtcacccatgtttcaacagctccacaagggactccaggttatgtggatcccgagtaccaccagtgctaccagcttactaaacaaagcgacgtatatagctttggagtggttctggttgagctgatatcatccttgcctgctgtagatatcacaaggcatagacatgaaatcaatttgtccaacatggccatcaacaagattcataatcaggcactgcatgagcttgtcgaccctaccctcgggtttgaatccgatttcaaagtcaggaaaatgataaatgctgtggctgagttagcatttcagtgcttgcagagttctaaagagatgagaccttctatggaagaagtggtggagactctcaaggatatacagagtgatggcaaacataaaagccagcctgaggtaatggacatcacaagcacagctgatgatgttgtgttgctcaaggatgaccctcctccaccatcacctgattctaatgcggtgagcaagtcgacaacgccaaatgctagcggataagtggaccttctttctcacttccatcaaggcatcaagttaaccttatccaaatttatgtaaaagcagagttagcatcacacttgtagcagcatccacccagttacagcatgcattttgtcatcttatgatgaggataacttttatgattgagatgtatatatagatggtaaagctgctttggttatgaaatttcatcttttcaataattatagttacatattattaccagtatccacccagttactgcccgcatattgtcatcttcttatgaggataaattttaagattgagatgtatatattgatgataaagctgctttggttatgaaatttcatctttaacaattatagnnnnntattcttttattttt

SEQ ID NO: 57322 - DNA, 2739 bp, Glycine max
  Clone ID: PAT_MRT3847_22774C.1
agaaaataacacaacctttttttcttgttcttgttgttgtaattgcaatcaagtcttttttactgttttcaacttaatgtttctgttgctgaggacaaatccccagtttgaagcaatggtggacggcctaaattcttccatataaacatgccattgaggcctatggtgccgtcatagcgggcctcccttctcaaattgccttttgttaagctttttgatgattcaaaagattttcccttgagtttggttagaatatttcaagttctgaactgtgataattataagcaaagttgttccagttttccatttaagtattcaacttccgttgttgcttattatttctttcttctctattttagcttccctttctctctctctctttctcctctcccttccaaatcaatttctattagggttagctgatccccttcttccccccaccgcatcgtccttcctcttcactggatcaatattcctcccgctgtgcttgaattggataatcaaccttaaagctatatgttctgaggttgatgtgttacgtattgttactattttgagcgtatggaggggtgatacttgattgatctgggatgttgcgtagtaatctattctgattgattatgcacatctggaatgagttcaattgtcatattcttttattaatactgtgaactctgtgctttatactttagtactgggaagaaggtacaaccacctgaggatttcctgtatccatgctgtcagagagcatgcgtggaatctgtacatcgggtaatgcccctgtcgagatttgctgccgaggcattcggtgtggtgacgatatgtttagtagccatcttgattcttcttgggttgatgtgcattgcttactcattttacttccgctctcgtattcatagtcaaggtttggttcagctcaagtattttagtggtccttggatcatcagaatcacattcatcctattttcaatctggtggggcattggtgaaattattcgattaaccttgttaatcagtacctttcacttaaaatggcctgacactgtctgcaaatgctatattgtatcaaatatgggatttgcagaaccgtgcctctgcctcacacttgtatttctccttcgtgcacctttacagaatttggagactggaattatgagcagaaaatggaatgtgaaaacttcgggatatattcttctttactgccttccaatgtttgttcttcagctttttgttattttggttggacctcagttagacaagaataagggttttggaaaaatgttgcctcattatttttcaagtgcagtggttgcctctggggagaatgataccaccctctgtacttaccctttactcagcactattctccacggcctttttgccattatcctgacttcctaccttttttggcttggtagtcggattttgaaattagttattaacaagggtttgcagaagagggtttacacattgctattctcagtttcatgtttccttccattaagggttctttttcttggtttatctgttttgtctggacctgaacatgttatgtttgaagccttagttttcttggcttttcttgcactagtatgttgtgttggcttgtgcatgtgcacacttgtttaccctccagctgcagattgcttagcgctgggaaatctataagacttagaagccaggaggcttaatgacgatcataatgatactgtgtatcttaatgctaatcagagttatctggaagataatgttgaagataatgctcggtatagtcattgaacctcttctgatgcatcgacaaagcgttgatcaattccaagcccgaccctgctcgaccgcgttacctccccgggaactctggttggccttagccgcctctctctttttttttttttttttttttttttttttttttttcttttagggttgtcccagcgctccccaacaaaattaaaaacaggaaaaacgtggtcaagttggtacaaaaatgtaaaaaggtactcacaataattgcccagggcaaaaactttttacctagaattagcaaacataacaaaatttaaaaaaaaaaaaaaaatacgccttattgaagctaaatcctttacaatcagtttttttcccttttttccacaaaattgatattcacccaacatattcagtttcccgcctgcctttatggtccaataacttgtgttggggatcgcataggccaacctaaaaaaggaggcgatcctggaggggttgcactgcggctgggagagaagaggcttagttctacaaatgttccagttgatgaaacccccttctccaatgtccgaaatgaaattgatccacgctttgtcgatgcatcaaaatatctaccaggactagaccgagcattttcttcattcagaagactctgattagcaatgagagacacagtatcattatgatcatcattaagcctccaggcttccaagtcttgtagatttcccagcgctaagcaatctgcaactggacggtaaacaagtgtgcacatgcacaagccagcacaacatactagtgcaagaaaagccaagaaaacaaaggcttcaaacataaaatgcccaggtcctgataaaacagataaaccaagaaaaagaacccttaatggaaggaaacatgaaattagttattaacaagggtttgcagaagagggtttacacattgctattctcagtttcatgttacgacttcctaccttttttggcttggtagtcg

SEQ ID NO: 57323 - DNA, 627 bp, Glycine max
  Clone ID: PAT_MRT3847_22775C.1
ggctcgaggctgactgttgcaggaaaaattaattggaaggtgaaactcattataggtgttgtttctggagtggtgggggcacttgctgtgggcattatcggctatctctgttatcgtaaaaagaagaatcgttatacaatgtcatatacacaatctcggagcctctcttctgatccatcttcaaaagacactgagaagggaattcaacgctttactcaaagctttgtacctggagtgcacctcttcacatatgatgaacttgaagaggccacaaattactttgactcatctaaaaactaggagaagggggctttggaacagtgtattttggtaaaagcaaaaaccctttgttgtatctctgtcgtttttgtgctttcgatgaccattaacaaaggttcctgtcttgtgatgtttcttgtctaggcaaactgcgggatgggcgttctgttgcagtgaagaggttgtatgagaacaactttaagagagttgcacagttcatgaatgaaattaaaatcctagcaaatttggatcatccaaatcttgtgacattatttggatgcacctctcgccacacccgtgaacttctgttgtatacgagtacattcctaatggaaccattgccgatca

SEQ ID NO: 57324 - DNA, 545 bp, Glycine max
  Clone ID: PAT_MRT3847_22776C.1
agtcgtaactcaatgacttcaagtaagagtattccaacatttcaagtacaaaattagaaacaggtaaaacgttatcaagttggtacagaaatgtaaaaaggtactcacaataattccagggcaaaaacattatacctagaattagcaaacataacaaaaattaagaaaaaaatacgccttattgaagctaaatcctttacaatcagtttttttcccttttttccacaaaattgatattcacccaacatattcagtttcctgccttcctctatggcccaataactggggttggggatcgcataggccaacctagaagaggaggcgatcctggaggggttgcactgcggctgggagagaagaggcttagttctacaaatgttccagttgatgaaacccccttctccaatgtccgaaatgaaattgatccacgctttgtcgatgcatcagaatatctaccaggactagaccgagcattttcttccagaagactctgattagcaatgagagacacaggatcattatgatcatcattaagccctcaggct

SEQ ID NO: 57325 - DNA, 246 bp, Glycine max
  Clone ID: PAT_MRT3847_22777C.1
gcgcaggctgcggagatcatcgcgggaaaatggttgaaaatatggattgattttggcgcggttttatctgcaattgggcttttcgaggcccaattgagcagcagcgcgtatcagatcctcggcatggcggagatcgggatattaccgaagcttttcggtgttcggtctaagtggttccacacgcgtggttggggattttggtttctaccataataccgattggtgtgtcgtacatggacttcaccg

SEQ ID NO: 57326 - DNA, 424 bp, Glycine max
  Clone ID: PAT_MRT3847_22778C.1
gatccccttcttccccccaccgcatcgtccttcctcttcactggatcggtattcctcccgctgtagaagcggtgctatctatgacggacggccaaaattcttccatataaacatgccattgtggcctatggtgccgtcatagcgggccatccttcacaaattgcccatgacatttgttaagctttttgatgattcaaaagatttttccttgagtttggttagagtatctcaagtgcttgaattggataatcaaccttaaagctatatgttctgtggttgatgtgttacgttttgttactattttgagcgtatggaggggtgatacttgattgatctgcgatgttgcggagtaatctatcctgagtgattatgcacatctggaatgagttcaattatcatattcttttattaatactgtgaactc

SEQ ID NO: 57327 - DNA, 583 bp, Glycine max
  Clone ID: PAT_MRT3847_22779C.1
caatcaaaaaaattcttatctttttagttggtggcctaaaaaaactcatgtatctaattttacattcttacccgcatccaacacaaacaacattcaacttgtcaattatcatcaatacattgctccttcaggttaaaagttctttgaataatattaactcttacaattgtttcataggggtccaagtaggagacatccccagggaagatatctttgtcgatgctaacttaaatctcagggacgaaataaggcgcctagacatgacgagaattcacagttgaagcttggctctaggtgataggctagctgtaagcttggctacacatcaaagttcttatggtccaaataaaaaatgaatgcttaaggaaaaaaacaatacttttttaatttttgttttaaaataatattattaataaaatatttaaataaaaaaattattatcctactttttaggatgataagttattagaaataaaattcaaatattataaatattaaatatgtcatttcactcatttgacatttgtcagctagtcttatccaatattttcaattaaatcattagcttttcagtttttgaggc

SEQ ID NO: 57328 - DNA, 1306 bp, Glycine max
  unsure (1)..(1306): unsure at all n locations
  Clone ID: PAT_MRT3847_2277C.1
tttactcattagctgttagatggagacaaatttctgagccttgtgaccctgttgtatgggtgaacaagctaagtgatgagtttaatgctggatttggttctcacacacctatgattcttgggcaggccaaagttgttcgttactttcctaattatgaaagaacattagaaattgccaagactgtaatgaaagagagatcatttgtccgcagcaaaacagacaagatcattcatctttcccaagctgggatattcgaagagactatgcatgcaaaatcatgttctgatctttataaagttattggtgaggatttttggttggctacctggtgcaacagtactgcatttgaagggaagcagcttgaaggaactaggataaaccttgtaaaaatgggagagcatggttttgactttgcaatcaaaacaccttgtacccctgctagatgggaagattttgacgaagaaatgacagtggcatgggaaactctctgcaatgcttactgtggtgaaaactatgggtctactgacttcgacacgcttgaaaacgtgcgagatgcaattttaaggatgacatattactggtataactttatgccactgtctaggggatcggcaggggttggatttatagttatgctgggtttgttacttgctgccaacatggagttcacaggaagcatcccacagggtttgcaggttgattgggaagccattttgaacttggatccaaactcgtttgtggattcggttaaaacgtggctgtatccatctctgaaggtcacaacctcatggaaagactaccctgatattgcttcaacatttgcaacaacagggtcggccattgctgctttgaacttttcttttgatgattgaactcctgtctgtaattatgaccgtgagttagttgcatattaactgtgacaagtttgttacattgtaaccatatgttaacgattatacaataaagtttttatggcattggatgacaaattaccatttctattatcatcattttttttccaactgttaaaaatctgaaacatgtaatgactcaagtgatccctcagaatcaagcgatatactatctacctgtagtggtgactcagcctaatgtccctaatatttttagatacccacttagtaagtgtatattttcttttgatgattaagttttcggctgctcggatgtccgtgacttagtcgcttagtgactgtgacaagtttgttacattgtacccatatgttaacgattatacaataaagtttttatggcattggatggcaaattaccatatcnnnnnnnnacc

SEQ ID NO: 57329 - DNA, 295 bp, Glycine max
  Clone ID: PAT_MRT3847_22780C.1
aaacaaacaaaatattttttaagaacaaaataaaaaaaacgggggccaaacaaaacttctgcgagaaacccaaaaaactaaccaaaccacgtaaactacttgatcccattctctgcctagccccctatcttcctcactgacacaatttccgggccactacttcttgaacactgctccacttttaaacatcccataaaccttctccagaaacctccatctccaattgatccactccagaacacccatgctcgaacccttctgcttcgtcttcccttgacaaattttcctccaccgg

SEQ ID NO: 57330 - DNA, 420 bp, Glycine max
  Clone ID: PAT_MRT3847_22781C.1
cttcgccctttttttttttttttttattttaaagtttctttttttaaaatttcatttgggtaatgattgctaatttctgggacccaaccacttgtcttgtggttcctctatattaaccgaacgcttataaacattggacagtgttaccaacctgacgcaacccgagagtgtgaccttacggggtaaatagctataaagaaaaatcactctcacaaacactggacctacactctcgggggccacaatccattacgagatagtacttcttcgcgacatggttctaaaaaaatgtcatcattaagggggggaatgatctatcccgcgagggctaagatgggagtataggagaaaagggctccgactgagcaaactctaggaggatgatgacacctagttctctggcctccaacaaggttctat

SEQ ID NO: 57331 - DNA, 316 bp, Glycine max
  Clone ID: PAT_MRT3847_22782C.1
gagaacagaaacacttaataggtatgagtttcaagaagaacatggtggtgctaaaagtgtgtatgttgcttcatttccttgtgggggttacagctgcacgcatgtaactcagcttcgtcaaaattgatcagtctgcacgttacgatgatgaagagtattcaagtccatgcagtgatctcagcatgcgcacacgcacaatgcctcctcaatgcagctgtgaatatcataggctgaattcatggcactcagattgtcatacccgtatgtccacaggctcacatccaggagagtgtcattgtcttgataccggtgactt

SEQ ID NO: 57332 - DNA, 312 bp, Glycine max
  Clone ID: PAT_MRT3847_22783C.1
tttctttcttcttgttcacatttccttggaacaatggttttatcaaaagtggttaagaaggttaccggaaggcttgaacagatgcagcctgaggcgcccaaaaacactatgcaagttgtgttcatgttagcagaagccatgaggtacggttacaccgagacactgggtacatggaacctcttcgacttgcccacagccatcattcacgctgtcacggacaaggataagaaaacagttgcaagtgaatgcgatgaaagaagtgattgtgtgcagctgaaagccccaggagtcttggatgagttatatgaggtg

SEQ ID NO: 57333 - DNA, 550 bp, Glycine max
  Clone ID: PAT_MRT3847_22784C.1
cttccactctttctttttttttggtttttttttttttccagcaaagctgctaaggtttctacccgccgctcgatgggaattgcccttcaaggcgtctcgtagggctaatcccccttacgagggtcccctacggcaccttcctttggggggccgaggccccctacttctgttggagctacggacagcgggcgcacacttcctttattgcccagattctgactcataggccttgaatcataatccaacccctggtcgtttttcgccactggctttttaaccaagcccgatgacccattgtggaaaacaacggctcctctggagctaggttgaagcactactgcggcactgtgataacgcgggtatacctaacctgtctcaccacggtctaaaccctgctgacgttccctatgggtgggggtacaatgcaactcttggtgaattctgcttcacaccgatagggagagccctattgatacgatactaattcaacatttgtatctacacttgtctgacacaagccacatatccctgctggctcttttctgacacc

SEQ ID NO: 57334 - DNA, 120 bp, Glycine max
  Clone ID: PAT_MRT3847_22785C.1
taacggtactgctcctagaggactacattatggtacagttgcgacattccgacatattggtcctgttgacacactacgacaccacggtattgctgccataacatgacaccctggtacggc

SEQ ID NO: 57335 - DNA, 318 bp, Glycine max
  Clone ID: PAT_MRT3847_22787C.1
ctaaagagatagggacactcaattatctgggaggccaattaatcatttttttgctttaacaaaactcccttctctattcaagaggacgatttcccatatataatattacaaagaaaatggagtttacctaataaacccgagaacaatgataatgacactgctggctctcgaataaactaacctacgcgaaaagtgtgtcttctcaacccatgttgcttgctctattgaaagagccgctctctgatatatccatcgaatctaatcaaccacactactgcgttccttaacccctgcttcctttttaatcaactactacca

SEQ ID NO: 57336 - DNA, 244 bp, Glycine max
  Clone ID: PAT_MRT3847_22788C.1
tacggctgcgagaagacgacagaagggaaaatacgaggtggagtcaatcatgtcttcaactaacttgatggcaaggccaagatataacagttatagaaaaaaaaaggctattatgcttaaaaaaaaaaaaaagaagaatattacgaaactgtaaaataaagctcaaacaaagcaagttcaaccacaaaccagacttttaataaataacgtatattttctcccgaaaaaaaaaaaaaaaaagaac

SEQ ID NO: 57337 - DNA, 322 bp, Glycine max
  Clone ID: PAT_MRT3847_22789C.1
aacctattcattcttttttttttttgcttatttttttcttttgtggtcgtggggaaaaaaaaaacttaccattggccttttttttattaaccctctttttcccctagggaaggtgaattttttttaacatacatggattttggactcttctccactcattttgcccaaataattcaaaattgtaaaaaacctttccactcaataaaaaaacttgtcccaattaattccccgaaattcgaatcactccctcttttattttgcccgggttttaaacactcttaaaatgttgttttccactaaatctttccggctcaatatccca

SEQ ID NO: 57338 - DNA, 1653 bp, Glycine max
  Clone ID: PAT_MRT3847_2278C.1
ccacgcgtccgcactttcccaagttttctctctcacacccttcatttacatacaacggaatcattctcctttctgctaacacttttactttttcttcatggctttctttctctttgctattttaatcttgatggtcccttctagtaatgcctattggccaccttcacctggctactggccaagttccaaattcaggtccatgagtttttacaaagggtttagaaacctctggggccctcagcaccaaagcctagaccaaaatgcattaacaatctggcttgatagaacctcaggaagtggattcaagtcagtaaggccatttcgatccgggtactttggtgcttccattaaggttcaacctggatacactgcaggtgttataacagctttctatctctcaaacaatgaagcacatcccggtttccatgatgaagtggacattgagtttctagggacaacatttggaaagccttacactttgcagaccaatgtttacataagagggagtggagatgggagaattataggcagagagatgaagttccatctctggtttgatcctaccaaagattttcatcactatgctatactgtggagtcctaaggaaataatattcctagtggatgatgtgccaattaggaggtacccgaggaagagtggtgcaacatttcctctgaggccaatgtggctatatggttcaatatgggatgcatcatcatgggcaactgaggatggaaagtacaaagctgattataaataccaaccttttgtggcaaagtataccaatttcaaagctagtggttgctcagcctatgcccctcgttggtgccatccagtttcagcctcaccatataggtctggtgggttgagtaggcaacaacatagtgccatgagatgggtgcaaagataccacatggtttataactattgtcaagaccccaagagagatcacagcctaacacctgagtgttggggttgaattgaagaattgaagtattcaacatttggaaattggaacacttaggccaattgggtatattatgatgctgatttttggtccccaaaaccaaaacactgttctcttgtgatttgttttgtcttttttctttcagaaagtttcatttactttatgggggtcacttgagatggggggccccagcttggcagatacattatgcaagtgtacggggttgtgcatccaaggctctcaagacacgagaatatttggaagattgtgtgtgtgtgtgtgtgtgagttttctttttagacaaaggaaaaaaagaaaacaaagggaagagcgagggaaaaggaataatgatatctatgtccaatggaaaagcaaagtggccaaggtgtatgggttggtgaatgtggcaccattgagtgcgaatactaaaaagcacactcttcatttaataatgttattgtcattttaatgatgaaagcgagaacctgtgtgtgtgtgtgctagggggaggggggtaatgtgttttgtttaagactttgtgtcatgtgaaacttgtttattaccaccatggaaaagtttgttgcgtcaaaaaagatcgcatgattatgtaagaggttgtggaccattggtttgattggaaagcaactgacaaaataattgaaaataaatacaagattgagcatgtg

SEQ ID NO: 57339 - DNA, 255 bp, Glycine max
  Clone ID: PAT_MRT3847_22790C.1
gaggaaaagcgcgacgcagactgtgtgaagtagatgtgtgcggaaaatccacgaatcattcttagggtttcaacataggatccaaaaaaggacaaggctccaacaacttcctgcaagcccacaagatctggccgtggctagcactacaaacaacaatctgtagcactggaaaacagtcagctaaagtgaacacaatggcgctcttttttcaaggcacctattgcaaaatcccttctgaaactccccaatacaagc

SEQ ID NO: 57340 - DNA, 264 bp, Glycine max
  Clone ID: PAT_MRT3847_22791C.1
gcactgtgaagccgcaactccccgtcgaatctccctaaaccaactacgccattctgttcctcaaagctgcgtttggcgcttaggaattttgctgtacgctcacccctaactccagaactcatcacgagctcccactcatactctccgcacaatccacaatcgctcgctcaatcattctcgtcgccgacctcgttaatgacaattcttcgctagcgacaacagcgggaaacggtgtcatattgtgcgtggtcacggaggacgtag

SEQ ID NO: 57341 - DNA, 264 bp, Glycine max
  Clone ID: PAT_MRT3847_22792C.1
cccactcgtccgaggatgcccctcgatgactacagaatctcttttggtgcacacgccctgggtgatgaaagggttgataccatggatcaggaggcttcctgtcaggaagtctctttatgagcaaaacttaaggacgtagcaggatggaactatacccaaagaaggcctcttgcaacatgatgaggttttcctcatgcccttacacgcagaaatggtgaaaaaggcacaaagagacatgcttctggggatggtgaatagatgaca

SEQ ID NO: 57342 - DNA, 418 bp, Glycine max
  Clone ID: PAT_MRT3847_22793C.1
gcacctttctttttcgctttcccccatggctgacccctactgccaatttcttctcttcctgcttcacccttgttccgtgttcaaccacaaccaatagtttcccttcttcaaacccttctccacaacaccacaaccacaactttatcaaccacacaaaaaccaacgacaccaccaccaccaccgtgttgttccactacgggggggaccaaactactactgcttgttcttgttttccaccctcaccttcttggagagaagaactacccctcctgaggctgcgtccagcaaagcaggatgaggaggaagtggaggacttggtgtctaattgccctgggggagccttggtcgtggacgaggggctcgcccttatcgcggggggcgcggggggggagggcgggggcgcggggggggtgggggg

SEQ ID NO: 57343 - DNA, 267 bp, Glycine max
  Clone ID: PAT_MRT3847_22794C.1
attgcaggatatcagtcaacctaaaacagaatatgacttacctgctggtgtactgtctgtctctcttctgagacatcagaaaattgcattggcttggatgcttcagaaggaaaccaagagtttgcattgcttgggggggattttggctgatgatcagggccttggaaagacaatttcgatgatttccctcatcctggcacagaggacattacagtcaaaatcgaaaatagatgatacatgcagtcataaaactgaagctttgaattt

SEQ ID NO: 57344 - DNA, 317 bp, Glycine max
  Clone ID: PAT_MRT3847_22795C.1
ctacgatggaaaatcgggcacccaacaactgggactggggagtttacacccaaccttcaagacaaaaaggaggcaccttctattccggggacccaaaatgctgttatggggggccaccaccaaaaaccctttttttgttttcccagcctcaccttttcctctcacacaaggggggcgaaaccattttcccccctttggttagaagggcccttggagaaaaaaaccgcagggggggcctctcaaaaagggctttggaccccccccctcgcttgggttggggagggtccccgaaaaccaattttccggggacacttacg

SEQ ID NO: 57345 - DNA, 1523 bp, Glycine max
  Clone ID: PAT_MRT3847_22796C.1
aattcggctcgcggaaattaccagttactatactctctctttctgaaataaaatgcccaattgtttacgagaatttctccaagtcaagattctaataagttatcttgggaaaaggtctgaaacgtgagaagggagcaaagattttggggaaaagtgtggcctagatgacagaaggtcttggtccacgacaaatgtgtaggatgttcgaggaaagagaagcgtagatacgcaagaaaagagtggcgtgtaagagaagtgagggtgcatcgaatagatgagagacgtggatttgaagagaagcggtggagatcggaagacctgaggtttgaactataagggagctaggggggttttcaatgattactcgaagaacatgattagaaatgctatgaactgtgcagagtaagctttaaggattaaggtgacagccatgtacgtgatttgagactgctacatgctgcctttgaagagtttatattcttgatgtgactgatgttttgaacgtgtccaaaggtgggactccaaagcatatttacgatgttgagtatcatcttcaaccatgcagcgtgtgctatatattttagtgttgttatatatacaatcttactattcaagactggtgtggatatgtcatctatggttattttaattcagcatgaaataacaattccatcaacgctacacggagggaatttctgtagttgaaattaccagttactatactctctctttctgaaacaatttgcccaattgtttgagatgttcaatatgagatttgtatctcaagattgggtggtttcatgtgcactaatacttctggtgtcatgcacaacatactcatcagcttctttggggaaacctgagaacaacataaaaacatctgtttttaaatcacccaagattgagctaggtccagggttagtttcaaacaaattttattttgatgttgactttccaagaggccatattgcactcaagagtttcaatgctgaattggttgatgagtcagagaaatcagtgcctctccaagaaacctatctccatcactggcttataataaaataccaccagccaaaaaatgtgacacacaataaccaaacagatattgtttttgtgagaaacagtggcttttgccaggatggtactcttatccagtattttggtcttggatcagaaacaagaggaaccgccactgatattccagacccttttggaatagaagttggaaacccttcagaaattccatatggatatgatgagaaatggttgatcaacgtgcatgccattgacacaaggggcgtggaagataggttggggtgcattgagtgtaggtgtgacctttataatatcacaaaggatgcagatggtaaccctttgagtccagattataagggaggtttggattgttgccctgataataccacgtgcaggctaaacaaaggcttcaagggtccaaagagaaccttataccttaaatacacagtgaagtggttcagttgggacaactacgtggtgccccttaa

SEQ ID NO: 57346 - DNA, 681 bp, Glycine max
  Clone ID: PAT_MRT3847_22797C.1
agtattgaaataaaaaaagttggaacttagaaccatatccataaaaacattcaaagactacaatacatttgaaggattgatcacacctctgtaaacatctggtaagaaaggcaaaacattctgaaaattgacgacaaatttctccaaaaacttttcctcggttatgcaaataatggaactaatgtacatgttagcacaccttttgatttcaagattttgattactgagaatctagggataattctcttctccaagctgtacgctacaacttgaggatattcagcaatagcttctgatggccaacccatatccttcaccaggaaactcattttcttggtaaaagtctcccctgaaaatatcataaaaccaggaaactttctaaatgctcgaagagacatttcatggttccagccccacctgtggtaaacctgaaaccttgaatcccagactgatttcctcatagttacaagcacagaaatagccacgacaaaattatttttcaaaggactaaacccaatttccttaactgttttgactgcttgcacaaatctggaatgcttcacatacgctgcagacagagcaatgggtattagtaatgatatggatgcctgagccacaccacattgcttcaaaattttaatgtttggaaccaaggcattcactaagtcaccatatataaaa

SEQ ID NO: 57347 - DNA, 227 bp, Glycine max
  unsure (1)..(227): unsure at all n locations
  Clone ID: PAT_MRT3847_22798C.1
nncctaacaactctcaccttcttctttgaattgaaccactctttctttctgntttgnnccataactcngaaaatggcccttggtggggtgaaaagttcagccagagcaagggnccnacaancgccagaagaccaccaccacccccctcatggcggangangangcgccgncccagtgtccttaacttcaattttaacaagcttaacaagcccaggcccgacagggcc

SEQ ID NO: 57348 - DNA, 472 bp, Glycine max
  Clone ID: PAT_MRT3847_22799C.1
aattcggctcgagccattggctgttctggaaacctttcaattgcaatttttgcaatggattccttgcgtcagttgtcaatgaaatttctggagcgggaggagttggctaattataattttcaaaatgaatttatgaagcctttcgtcattgttatgcgcaagagtagtgctgttgaaattagagaacttatcattagatgtgtctctcagatggttttatctcgtgtcaacaatgtaaaatcaggatggaagagcatgttcatggtattcacaacagcggcatatgatgaccacaaaaacattgtactcctggcttttgaaattatggagaagattattcgagattactttccatgcatcactgagactgaaaccactacctttacagattgtgtgaactgtctaattgcattcaccaatagtagatttaacaaagaaattagcttaaatgccattgctttccttcgattct

SEQ ID NO: 57349 - DNA, 517 bp, Glycine max
  unsure (1)..(517): unsure at all n locations
  Clone ID: PAT_MRT3847_2279C.1
tatcnntctttgactgtctgtacagttatttcacccccacccccagtcaaatatgaatccctccatattatccatatacccatttttccattccctataccccccttctctccacccacaaccacaaccacaacaaaagtcatcaaaagagaatatctcatcacatgccttatgatgcattacatgaacaaacactatggtcacaatctctcacctcaatgaaaaaacaaaaaatcatatcccctgccgttttccatcccccttccagttttcatcgttcattccattttccaatggttttcatatagctatgagaaaaatttagccataactaccaaggcctcctttccaatacttgtttttaattttaacaccaacatctctgttgaaactttaaatcgccaacgtttgcagcattcactgacatatatatccctgatgctannnngtcaccanncccaagttggtcccgtttcaatnnnaactnnctctcnnnnngaatatctatctatcattt

SEQ ID NO: 57350 - DNA, 252 bp, Glycine max
  Clone ID: PAT_MRT3847_227C.1
gaaaacacacacacttgactcctcattgcaacaattaaaagagggggggaaattgtgtaatagacggggctttctctgcagggggggtctgagaaagtggcttctttggacgaagcaaacggaccaacgaaagaaaacacaattggcatatcatgcagaggaatgctcttttgtaaaaaaactggtgctaagcctgttaaacaaaaaaagctggcgtaagagttttgccatgtgtttgagaatcttggaaaa

SEQ ID NO: 57351 - DNA, 1085 bp, Glycine max
  Clone ID: PAT_MRT3847_22800C.1
aataccaaaaatctttcagagaaaatgaagccaaataagcttaaatgtataactacattttttatcctatatttgttcaatcaaaatgctcattctgagctgcaggttgggtattacagctattcatgtagcatggctgagttcattgtgaaggatgaagtcagaaaaggtgttactaataatcctggaattgcagctgggctagtaagaatgcattttcatgattgctttattagagggtgtgatgcatcagtgcttcttgattccactcccttaaacactgcagagaaagactctcccgcaaataaaccaagtctccgaggatatgaagtcattgataatgccaaggctaaactagaagcagtatgcccaggaattgtttcatgcgctgacattgttgcatttgcagcaagggacagtgtggagtttgctcgagggcttggttatgatgttccagcaggaagaagagatggcagaatctcacaacttcagtaccacttcaagccaggatccaagtttagatccctcatatgcagcacttctgaagcggcaatgtccacaaggcagcacaaaccaaaacttggtggttccaatggacccttcaagtcctggaattgctgatgtggggtactatgttgactagattcacaaaccgaggcctcttcacatctgaccaaactctcttaactaatgctgaaacagccagccaggtgaaacaaaatgccagggatccctatttatgggcaagtcaatttgcagatgcaatggtgaagatgggtcaaatcattgtcttaaaaggtaatgctggagagattagaacaaattgcagggtggtcaatagttagcaatagtggtgaaggactcaagtgcctgcagcaaagaagatttacaaattctaagtcatgtttcttctgagtttttggtcgctctcattgctcggctttcagcagcagattatacaacttcagtaccacttcaagccaggatccaagtttagatccctcatatgcaccacttcctgaacggcaatgtccacaaggcagcacaaaccaaaacattggtggcttccaatggaccccttcaag

SEQ ID NO: 57352 - DNA, 1318 bp, Glycine max
  Clone ID: PAT_MRT3847_22801C.1
cgccataggaacacaattgggcctaacttggtagtatggtgtcaacaaaacatacaccctttaatcagtttaatttacccttaattttcatttcatacgtaaatgacacttaggcaacaacaatgtccggggaaaaaaactcaattaaatatagcaatactatctaaaaaggactgggagcaacataaacattgagcatgtccgatacataaaagacagtctaaaatcaaaactttagcataatctgttatcatcacatctctctaaccagaaaccaaaaacctcaatatgcttatggcgttttcaaatcaaggtgcaaccacaatgcgtccagccacttgatcaagatcccgccggccactggaagtgattttcctgccacccttggtgtccagttcaatgatgctcatgttctgcaactgttgaagaatgtgacgagcaacagcaccactgctcttgcagaaatgaggagggcggctaccattcctcttgctcccaccataaatcctctgaaaggcaccaacaccaagtcctcctctcaagtagatctttcttgccatggaagcagctctgacatagtaccagtcaggatcataaggagccaactccttaaatcttgcagttttcacaatatcagtccactctggcagctccatcttgccagatcgcttgaggtgagaagagtaagctttgacgaactcatgaggagaaacgtccttcacagttcttgcagtggccatggctgcttctggttgcgtttgatgcgcacacacacagagagaagaagggtaagtttaggtaagccagcgggcaacaagggatactacattgagcctaccatttttgtcaatgttaaggaggacatgctaattgcacaagaggaaatatttggacctgtgatgacactttccaagttcaagaccattgaggatgcaattaagaaagccaacaattccaaatatggcctagcagcagggattgtgaccaagaacttggatattgcaaacactgtatcaaggtccatccgtgcaggcatcatttggatcaattgcttctttgcctttgatattgactgcccttttggagggtataagatgagtggatttggaagagattatggactggaagcacttcataagtttctcaaagttaagtctgttgcaactcctatttacgattctccttggctttgaaacttcattttccgagggtgtttgtaaacactaaacatatacatcatttggatcaactacttaatacaatgtttttatctctttttttggaaaaaaaaaaaaaaaaaacttaacccaaaagcgaa

SEQ ID NO: 57353 - DNA, 421 bp, Glycine max
  Clone ID: PAT_MRT3847_22802C.1
cgtacgtgagctcggctcgaggtgacaaaggaggctaaactgcatgaggcagagaggagacagtgcttccttttttggggggaaatctaggtttttgtctactggtagcacttgaaacgaaggcttgagtgctatcacctaagaattaaaatggtcctttgaccatgttcatgtttctaaggagtgagttatagtctagcttgcttcctttttctcaactctcttgtatttcttcaatgtatttccctattggttcttctcacaccaccctgtcttttttatttcttattattttttttgttaaatgaagaatgtttcagtgttctagtgttttgcaggctgtggaagctaataatgtatatcgatccgtgtagcttcaaccttcaatgatttaattaattagtacgtgaaacaaataaaa

SEQ ID NO: 57354 - DNA, 212 bp, Glycine max
  Clone ID: PAT_MRT3847_22803C.1
cttatgcgtttgtgcttggaccagcaggggccaaggaggagtcaccactgccaaaaatggtcaagaagagaccgatagatggggccgtgaacccaacgctatagacgaacgtagcaaggcccagacagtgaatgttttggatgtgaacaccaacaacacacacagattcaactgaaaatgcggcgaaccagccctgggcccacgataacgac

SEQ ID NO: 57355 - DNA, 1108 bp, Glycine max
  Clone ID: PAT_MRT3847_22804C.1
ccctggaaaacgggcaggtgggcccccccaattaaagggaggtagggccccccttaggcccccccgggttttccctttatggttccgggttgtatttttgggggaaatggtaacggaaaacaattttccccagggaacaactttggcccttttttcccccagggggccattaaccccccctaaaagggacaaaaagtgggggttgagggcccccttttttttttttttttaaaataaaattttttttttttttttttttttttttttttttttttttttttttttttttttttttttttttttttttccaaagaaaaactcaaattaaatgtagcaatattatctaaaatgactgaaagcaacataaacattgagcatgtctaatacacaaaagacgtctaatacacaaaagacactcagtctaaaatcaaaatttgagcataatctgttatcacatctctctaacaagaacccaaaaacctcaatatgcttatggcattttcaaatcatgaatcatggtgcaaccacaatgcgtccagccacttggtcaagatcccgtcggccactggaagtgattttcctgccacccttggtgtccagttcaatgatgttcatgttctgcaactgttgaagaatgtgacgagcaatggcaccactgctcttgcaaaaatgaggagggcgactaccattcctcttgctcccaccataaatcctctgaaaggcaccaacaccaagtcctcctctcaagtagatctttcttgccatggaagcagctctgacatagtaccagtcaggatcataaggagccaactccttaaatcttgcagttttcacaatatcagtccactctggcagctccatcttgccggatcgcttgaggtgagaggagtacgccttaacgaactcatgaggtgaaacatccttcacagtccttgcagtggccatggctgcttctggttgccgttgatgcgcacacacagagagagaagaaagataggtttaggttatgccgcgctctctatctatcggtgtctcactcacagcccccttctgtcgtcttctcgcagccgtacggacgcgtgggcggacgcgtgggcggacgcgtggg

SEQ ID NO: 57356 - DNA, 269 bp, Glycine max
  Clone ID: PAT_MRT3847_22805C.1
ctgctcgccttatattctatcgttcacttgttcagaccaaggtacctatatcatcgttggaagcaccgcaccatcttcacatcttcatcttggtcctcgctgtcgtatacgactccttttccatactcaccgatgacttcggatccgctacaatacgtcagtggatacactagacaaattcaattgtctaaagcaggcgctacgatcactgtgccgatttctcaaaccaaaggtcactcagggacaccagaatggttttatcaggggtc

SEQ ID NO: 57357 - DNA, 419 bp, Glycine max
  Clone ID: PAT_MRT3847_22806C.1
tgctaatgttactctcttatctctgctcccaaaccctaactcccgaccttgctcccctctcggaggcgtcatcgggggcggaaacggcgtggcgcgacttaagaaagacccaccactaaatcttcactgattcaacgaacaccgcgaccttgcttatgaacgcggcacctggtgaagctcaattaaagacccttataatgcaaatacgccttcaaaacctttgttcgaaatcatggaccaaactgctactgcatccaacacactacctagtgaagacatagcagagcatgctttaagcaaagatagtgctgcattatggatgacgatgtacgatgcttgaaaagcaccttacgttacgaatactgagaaaaagaaagtggagcacgtgaagaacatgggagtctataaccagaacaggc

SEQ ID NO: 57358 - DNA, 1424 bp, Glycine max
  Clone ID: PAT_MRT3847_22807C.1
ccttctcttatcttatcacaacagttccattgtaattaagtactaagtataaactctctcccaatagatgaatattcttttttcttgttgccgccaccactcttctaatgtctagttctgagagcacaaacgcgagaactagaacagcgtcatggttttctaccccattctttgttatcgttctcccggtggccgtggctgcgcttctctaccggctcgaaccattcaagccggttcttttgccggtccagctgggccggtccaccgtggcggttccggctcgtaacggccacatgcaagatggatcggaacgtgtgggtgagggacacttggagggcccggaagacttggcctacgacgctgcggcacgtgtcgtttataccgggtgtgaggatgggtggatcaagcgagtcacggtgaatgactcggtggttgactcggcggttgaagattgggtcaacacaggaggaaggccacttggactagttttgaagccgaatggagaactcatagttgctgatgcggaaaagggactgctgagagtgtcaagtgagaaggagattgagttgctggtagatgagtttgaggggttaaaattcaaactcacagatggtgttgatatagcagatgatggtacaatttatttcacagatgcatcacacaaataccccgtgaaggatgctgtgtttgacgtcttagaagggaagccaaatggaagattcttcagctataatccagcaacaaagaagacaaccctgcttgcccaagacctctactttgccaatggggttgcagtttcagcagatcaacaatttgtggtcttctgtgaatctgtcttgatgagatgcaataaatatttcgtcctgggccctaaaacaggaaccatagagaagttctgtgacctgcctggcatgcctgataacattcattatgatggacaagggcactatttgattgcaatgttcacggccctttctcccgaattggaattggcatatagataccctttcattaggaaggcttttgcaatgtttacaaagtatgtagggagtctatctatctcgaagaatggaggagttctagtcgtggatttagaaggaaaaccaactgcacattattatgatcccaaattagcattgactagtgcgattaaaattgggaatcatatatatgctggttccattttctacccctttgtaacacgttttgatgttgagaaatatcctgctctccccacagtttgagcaacagtgaacatcttgtaaggttaatgatgtacaagaaaatgtttagtttctggagtgtcatgatgtgaaaatgtttagtttctggagtgtcatgatgtgaaaattccattcatgaatctgttatatatatttttatataataaaaatggaatttctttttcaaaaaaaaaaaaaaaa

SEQ ID NO: 57359 - DNA, 488 bp, Glycine max
  Clone ID: PAT_MRT3847_22808C.1
gatgcttaatttcatcatattttttattgttgccctagtgtttgcaaaatggtttgcagtcatgtaggttgatttggttggggcttttaggtttgtgtgctttggttcgttgaagcctcgtattatgtaaaagagaatgctaatatgtacacaagttgcattgatctaatgtacaccatttgcaaggtcttaagcctctttgaattatatatacattgcttcacatgttcgaatctacaatatagccattttttaatttagtttagattcatctcctttgcgcatactttgttttatactttcaggcgaaaatgagatataaatatcgttaaaaaaacctttatatgtaaataatacttacaaatgccctcctttaaaaatgcttgaattgaggagttgacatatttgattattaattacttctagatttggtacactccagtttgctttatatttcttcaattagagtatgtaaatagaaagacatt

SEQ ID NO: 57360 - DNA, 880 bp, Glycine max
  unsure (1)..(880): unsure at all n locations
  Clone ID: PAT_MRT3847_22809C.1
gttttgcgtttctctgcctaaaaggtgcacttcttctctgcttcttgttttaggatgctgggaaagcgaactactttttgtttctctgcctaaattattgaaagatgggtcaagcactaggttgctatcaagttgatcagtcaaatgtggctatcaaggagcattttggaaaatttgatgatgtcctagaacctggatgtcattgcctgccttggtgtcttgggtaccagattgctggtagtttgtcactgcgtgtgcagcaacttgatgttcgatgtgagacgaaaaccaaggtatcatactggtttcttttttctacctactttgtttcatggaatcatggtgctattatttagtttgtctttctctcacctgaaatcatattgttttgttaataatttcatatgatttctagttactttgtttactatcatgaacgttctgttcggtgcttaacattaggcattgacacaaataacaattttccaacaagatttatctgtgtttttcactatttctaatttgacattttttttacttaacagagatttttattgtaatatatcattactggttatcattggtctatgtaatggttaaagttttctgtaaattgagattgaattttgaatgctcttcttatttcagtcgttcctatttcccctggtcaatttatttctttggatttatggttcaggaattcctctttgcttcgaatatttcatttttactaagatttagaaaagatattctaaaatcctttcattctacttatggatgatatttcatatgtaatttattatgatctgttattagagtttgactctgtcattaacttgnntaggacatgtctttgtcactgtggttgcatctgtgcata

SEQ ID NO: 57361 - DNA, 267 bp, Glycine max
  Clone ID: PAT_MRT3847_2280C.1
tttaaccccaggcccaatcccgatcccagtgccgagccacacccaaacaacccttacgcttctgcacggttccttcaccaccaattgcgctccctgcggttacaccccttaccattgctaccttgaaaatcccgatccttctccacccactgctccttgctttcctgcctctatgtggaaccctaatttaccccgttcttataatcctcccttagaatctaacccttcctacgaacaacaacaaccctattggtcaccatatgatca

SEQ ID NO: 57362 - DNA, 166 bp, Glycine max
  Clone ID: PAT_MRT3847_22810C.1
accactcgtcctctttgacggaagcaaggacttgatgacagtgaagggtacaatggatgcgattgaaattatatggtgaattagctagaaagtgaaacaattatgccaagcagtgccacccatgaagaaagacgactgtacttaaagagaccaatgtgacggcggc

SEQ ID NO: 57363 - DNA, 231 bp, Glycine max
  Clone ID: PAT_MRT3847_22811C.1
acccacacgtcaaataggtgccagacaaatagagaagggtggcctgttatcggctaaggtcgaattcgacaaccttgactcggtccaattatggacatattggaaggtgtatacagcattagtgccagtgcctggtaatatcgtggctctgacggttactcgtctcgactatgatgatctccgtcttcctcccagcatctctccgtgacgtttccaccccgccaatgctct

SEQ ID NO: 57364 - DNA, 507 bp, Glycine max
  Clone ID: PAT_MRT3847_22812C.1
ccttctaacttttttttttgggtttttctaaaaccagaaacgggttataaaactttccttttattgaagggcctcttaaaacacccccaggaaacccggggaaaagggccttaaaccccttaggggtgttcgggaatataagaaattttctccaaccctttttaccctcaaaacaaaaaacagtgcttatgaaaaccaagcaatgttgaaatttggcccccggggaccacaaacctatttttgaggggcccgggtacagggaatcggaaaaaacctaaaaaaaaacctttaaccaaacccctaagactttggaggggttaaacccccctcagggggtgcccccggagatgatcacctttgctcgcaaaattgcccaacgggaattccttttttttggaaccggccttggggcccttggcttcgggggggactttttttttaacactttgggtgaccccccccgccaacatttgccgcctgtcccctcgcggaaccccccccgggggg

SEQ ID NO: 57365 - DNA, 360 bp, Glycine max
  Clone ID: PAT_MRT3847_22813C.1
ggaactcatatacaataaatataaagctttcttgcctgaatgaagactacatacataggggggtacatgcaataagaccgggatatattggcaaccgataattcattgacacaaccaagacacctttgcataaaacggaacttaaggccgtcactaatatactgactacatggacaaacttcgtatatatttactgagggtcgctttattttaaaatataaatgattacatgctttgatgataaagagaggccgtgatacatgcacgaataaacacatatactattgtagaatgaatgctataataactgtcgcataccaccatcgttgtttgtttcattaattaacattctttatgcgt

SEQ ID NO: 57366 - DNA, 271 bp, Glycine max
  Clone ID: PAT_MRT3847_22814C.1
tgaggagctcacctacgactacaagttccccatcgaggatgccagcaacaagctgccctgcaactgtggcgccaagcgctgccgtcggttccttaactgtggccgtggctgcccaccacgacccctacacacctcctgctgccgtcgctgccatcttgcccctagcctgggggctccctagcccctacccagagcatctcacccccaccctcatgttacagggtggatgtgggcatgcaggtgacaagggccctgcctccaccctccagcc

SEQ ID NO: 57367 - DNA, 310 bp, Glycine max
  Clone ID: PAT_MRT3847_22815C.1
ccacccttaaaaaaaaacttaatcattgttggcaatggggggaccccaccacaaaaagaaaggcgggggaacccctattaccaaacaaagcctttttatttggggataaaaaaatttttttttccaataatgggcttcctccaaacccatttaaggtttaaaaaaagggcccggcaaggtaaaaaacctttttaaaccggcaaaatttatttaattaaaaaggagggggggcattttcccctcaagggggggtgggaaaacccctgccccaacggttttgcccccttccttaataaaaaacctaattcct

SEQ ID NO: 57368 - DNA, 507 bp, Glycine max
  Clone ID: PAT_MRT3847_22816C.1
ggatgcatgtggggcatgcttcaaattcttgattaccatcgttggcgcgtaaaaaaggtgtttcctcacaaaaggagaaaacatgccacatataagagaaaacccattttgtatgaccaacatgaagaccaacaacatggagttacagaagcagaatccctccttgtcgggcaacatagcgaaaaattgcatgctgcaggcagaagttctcccaagaatcgcaaaaaggaaccatgcactgagaaaaaggttaacaacgaaaactccaaaggcggtagaaccatggactactcaaggaaaaaccaagccagtaatgagtatgcacttcatctggagaaagaacaaacgacaacagattatgaccctgtccaaaagcaggtcgggccacacagggaaaactggcacactgcaggcagaagttctcccaagaatcgcaaaaaggaaccatgcactgagaaaaaggttaacaacgaaaactccaaaggcggtagaaccatggactactca

SEQ ID NO: 57369 - DNA, 595 bp, Glycine max
  Clone ID: PAT_MRT3847_22817C.1
gtaataagacgcggaccttcacagttcacatacttttttagaaccagaaaacatcaatcgagaaacaataaaaatacttaactacctccgagagacataaactgcaatagctacaacttagatcctaaagaacaggcctcaaaatttacgtggctacggcctcccaaaaatacaacaaatggactgcaacagagagcgcaactttaactccgcacccagtctgcatcttggaacagataacgcatctggaaaatgaagattgaagaataccaaaaacaaaaacaacgaggctaaataacatcttaagggtgccccttgaattgaacaggaggcaaaaagggtttccaccatccaaattcatattacacgataaggagccaaccatttttcacgctaaacaaacttcagattattaagatagaaagctaaaacttcttctaggctctaaactcaaaaactgtgaaaaaaaactgagggccagcctgaacttaatgaatgtgacccaaggacccttggttgacacaagatcacagcaggtctgtctaatctgtaggaaatgatagaaaacttatgcaacaacttagggtcaatgaca

SEQ ID NO: 57370 - DNA, 233 bp, Glycine max
  Clone ID: PAT_MRT3847_22818C.1
ggagcaaatatatatatatatatatatatatatatatatatatggggaaaggtacaggtacatgtatatggaaaaaactaaaaatcttacaaaatacacacgtctctggggctatgacgaccgatctgctgatacatctaggcgtgtgtctaattacattttccttctctcttaaatgggcactccccaaccaaaaggcaacattgcaggtgctcactttatgaaacatccat

SEQ ID NO: 57371 - DNA, 261 bp, Glycine max
  Clone ID: PAT_MRT3847_22819C.1
tcccgacccacgcgacccctcgggcctcacctgctacaacacgaccataacaacaaatgggtacactaaaaacatcacgtacgattttctcactaatatcttacaacgaaaccctcctaaccacatctatttatcaacaacattacgtgcccaataacaaatttattctatgattaacacctgctttcctccacggactatcggcaattgccctaccaaaaacccttttttcttctaaaacccacaacacttgtaaccttt

SEQ ID NO: 57372 - DNA, 319 bp, Glycine max
  Clone ID: PAT_MRT3847_2281C.1
ggcagtggcaaatctggcttattctccatcaatctgtttgggttcttgatacccaggttccttccaagagcttttgagaggtatttccaagacaagggagagatctatgctaagtctgcagaggataaaagacctgtggttgtcaacaaaactcaattatcagaaaagaaagattaattacagagctgtaaccaatgtgacttcacttacaatttgaaacactttcagcattctttttttcttttcttagaaaatggtaatgaatgtgtatgatgatggctctccgttacattatgaaactacatatggtttttggatt

SEQ ID NO: 57373 - DNA, 280 bp, Glycine max
  Clone ID: PAT_MRT3847_22820C.1
acctaaactgcaactcgggaatttgtgtttatatggactaaacataaacagaaccttttttatttcaaaaaagggggtaaattttaaattaatacacctaagagtaagtctttaactttttttccatgcaacatgcaaaagttttttttgataacttcttaatacaagttttcgagttcgttgttttacattcattggacccccccaaaaaaaaatattttttaagaatcttccaaacaacctaaaaaacttggtttagtgagttacctacgctgccctt

SEQ ID NO: 57374 - DNA, 196 bp, Glycine max
  Clone ID: PAT_MRT3847_22821C.1
gtcagtggtcattcatgattgtgtatctaaacactgggttcactgtggagttctctcactcccttatccctgacccggataacgcctcgtaagctactctaacaccaaagccagcttgacaaaagacagacatcgcgctcgatgaatgcgacgaaacaacattctatcaattcaacatgactgactagactaaaca

SEQ ID NO: 57375 - DNA, 174 bp, Glycine max
  Clone ID: PAT_MRT3847_22822C.1
aacttgacgacaaaatttcccaaataaacatggaggcctgcttagatatagaaggaaaatatgcttcctacctatatcgattctattattgtaggacaaacctcaagatggcctcgatatacatccaccttcatgtggcggatgcctcataatgcacatctataacgccatccc

SEQ ID NO: 57376 - DNA, 2811 bp, Glycine max
  Clone ID: PAT_MRT3847_22823C.1
tcgtcacgcgtccgcccacgcgtccgctctttcctaatattctctatctggttgcctgtatgattgagaacatggatcgcagagttgtatcgttgaattgagtcttaggttttgcagtttccgggtacgttttccttgatttctgttattggattgcgtgtgtttctgaattcccagatcttgttctctgttttggttattgcaccttgtactcgagatttagctttcaggggaagccgtaacatcgaggcttttcgttttggatctcgaggtttcgctctgaggttgaggttaggaattgcgagaggtgaaatctgaggttaattgcgtgttttggtgggatcgaggggaatcggtgaaaggttaggatttttggtcgatggctttgaattcttcattgcacatggaggatcagacggatgactcccgcatgattgaagagatgggtggaggaaggtgctgaagttccagaagattctgctctgccaccgcctacaactgctgctttccagaatggttcaactgaatacaactcgagatttgcggttccacactcattgcaggacggccaagcactactgaatccttgaacactggccgtgctcccgaattgaagactgaaagttcacctcctattgagggctctaacataagaactgctagccctgaacttagtccagggatgccaccaataccacccagcgcaaatcaattcttggcccggggtcggttgggtgttaggtcaaggtatgttgacaccttcaaccaaggtggtggaacctctgcaaacttgtttcagtccccttctgttccttctgtgaaaccggctcttgctgccaatgcgaagttttttcgttcctactcctgcaccatcgtcaaatgagcaggcaatggatgctatagcagaaggcaagcaagaagacagtgcaacaaatgaatatccttcaacatctaccacaaatgactggtcataccgatccccaaaacatgtattatcaacagcactacaaagaattttaacaagtatgggtaacatctcaaagcagggagcagcagatggaaataactctcatttacctcattcacgccgaacagcttcatggagtgggagttttaatgattcatttacccctcaaaaaatgggcaatattaagcctttaggggaagctttgggcatgcccccgtcaagattttcgcctgatgaatctttaatgcataaacctgtgaaaagtagcagttatggagaagatcttcacgaggttgaattttgagcagatgctcaagctgtaaatatcaaattttgtttttgatcatcataattgttagacggtccctgcttctgcagcatttctctggatgtacggaacagtggtacacatcagatggggttctcagaaactgatcagacaataacaacagatatctattacccctcctcccttcccttcacatcctcttttcagttttttttaaagtccccaactccaaacctggtgatgcatgattaaatgtggttggctcacttgataatgatagcaggttttgttttgttttgttttgttttaaatgccaagggagttgacagtggacaccgtctcaggattatggaactggtgtgatacaacaaaggacaagaccacctgcttagctgagtagtacaactcatttgttcaattgaataaaattagatctgcattgaaactgaaagttctcctcctattgagggctctaacataagaactgctagccctgaactcagtccagggatgccaccgataccacccagctcaaatcaattctcggcccggggtcgtttgggtgttaggtcaaggtatgttgacaccttcaaccaaggtggtggaacctctgcaaacttgtttcagtccccttctgttccatccgtgaaaccagttctggctgccaatgcgaagtttttcgttcctactcctgcaccatcatcaaatgagcggacaattgaggctatagtagaaagcaagcaagaagacaatgcaacaaatgaatatccttcaatctctaccacaaatgagtggtcataccaatccccaaaacatgtatcatcaacgaccatacaaaggtttccaagtatgggtaacatctcaaaccaggtagcagcagatggaaataactctcatttacctcattcacgccgaacagcttcatggagtgggagttttaatgattcatttacccctcgaaaaatgggcaatattaagcctttaggggaagctttgggcatgcccccgtcaagattttcgcctgatgaatctttaatgcatacacctgtgaaaagtagcagttatggagaagatcttcaagaggttgaactttgagcagatgctcaagctgtaaatatcaaattttgtttttgatcttcagaatagttgggacgtccctgcttctgcagcatttctttggatgtacggaacagtggtacacatcagatggagttctcacaaacagatcagagaataacaacagacatctatccccctcctcccttcccttcccatcctcttttcagtattttttaaagtccccaactcccacccaacctattgatgtattttttttctcctttaatgccaagggagttgacagtggacaccatctccggattatggaactggtgtggtacaacaaaggacaagaccacctgcttagctgagtagtacaactcatttgttcattttattaaacacgaatacgccccacgaggatagatgacctcaacggatcaaggacaaaagcatagtgtatgcaattgtgaaaaaaatttaaataaaaaaaaaa

SEQ ID NO: 57377 - DNA, 1407 bp, Glycine max
  unsure (1)..(1407): unsure at all n locations
  Clone ID: PAT_MRT3847_22824C.1
gcattgatgactgaaagttcacctcctattgagggctctaacataagaactgctagccctgaacttagtccagggatgccaccaataccacccagcgcaaatcaattcttggcccggggtcggttgggtgttaggtcaaggtaacagtgatttttttatgtctagattatttatattttataatctcaagtaggggtcaatcnctcntttaggtatacatgttatctgttaagcattgcaaagtggacttctcagttcccattggttttccccgatatattataaagtttgacattgaagacctttaaagaactctaagaattgttgcaccgagaaaatggcagagctatcataatagttaaagcttaaaatgtaatttatcttctcttttattaggcggagcagggatctggaggattattttgtaggcccaaataaatttatcttaaaaataggcatganaagaaaggaaatgaggaagaacctatgggttctagcagtactgtgcagtcagctcagtttccaaaaaggggcaatatgaagtatttatgttatgctttgggcatgcccctgtcaagattttcacctgatgaatctttaatgcataaacctgtcaaaagtagcagttatggagaagatcttcacgaggttgaattttgagcaggtgctcaagctgtaaatatcaaattttgtttttgatcatcataattgtttagacggtccctgcttctgcagcatttctttggatgtacggaacagtggtacacatcagatggggttctcagaaactgatcagacaataacaacagatatctattacccctcctcccttcccttcacatcctcttttcagttttttttaaagtccccaactcccaacctggtgatgcatgattaaatgtggttggctcacttgataatgatagcaggttttgttttgttttgttttgttttaaatgccaagggagttgacagtggacaccgtctcaggattatggaactggtgtgatacaacaaagggacaagaccacctgcttagctgagtagtacaactcatttgttcattgtattaaattaaacaaggaaacgccccacgaggaaagatgacctcaacagatcaaagataaaaaaaatagtgtatggaattgtgaaatataattttgttccttttgtatttgtttcagttatcatttattaaatgatattaaatttcctgaatcattgtcttcactcttcagtctcaaatggaagcgtttacgttagttcacatttatgataagatgatggggccaaagggataaggttaggtgaatttggtccccggcgattattttgcaatgtattttgagtagtattaagcctacaccggtacataatcgataaaatttagatacagtttcttatttt

SEQ ID NO: 57378 - DNA, 992 bp, Glycine max
  Clone ID: PAT_MRT3847_22825C.1
gtggccgtcgtcactatcttgccgccagtcgacaccaaaaaaaaaaaaaaaaaaaaaaacgaaaatccgcatggctagagagaagagcgcaaagaggctcttgggaccgacgccggtggggactaggggtagggaaaagtcaaatcaacgtgctgagagtgggcgcatagaggatctcggagacgacgttgtttggggttagggttccggcgaggctgtaccacgagagggttgtggatcactccgagaacccccggaacgttggatcgtttaacaagaacgacccgagcgtggggacgggtttggtgggggcgccggcgtgcggcgatgtgatgaagctccagattaaggtcgacgacaaaaccggaaaaatcgtcgatgctcgattcaaaactttcggctgtggctccgccattgcttcttcctccgtcgctactgagtgggtgaagggaaggcaaatggaggaagttctgactataaaaaatactgaaattgcaaagcatctttcacttccaccagttaagctccactgcagcatgcttgctgaagatgctatcaaagcggccgttaaagactatgaagctaagcgtgctaaggcaactgctagcggagaggcagcaacagaagagaagcctgccactgcatgatttctttcatatatagaaagaatgatgacgaaaacaaccgtttgtttgtttgtttattcttaatcagtttcttattgaagagcaccttcacttgagactttgggttggacttagctggagagttattcacattctgcgaactaaatatttgaaatgccagctatggtttgttatctgctaggtttgtatttagtagtagtccattattaaatgtatacgcatataataaagcagattggaatgtttgaaagttctccattacaattaagtgaatagcatgatattttcacactttaattattggattagtttaataaaaaaacacaaaaggttaaaaaaaaaaaa

SEQ ID NO: 57379 - DNA, 277 bp, Glycine max
  Clone ID: PAT_MRT3847_22826C.1
aaaacattaaaatttttgtctgtggactaaattgaaatttgcaaaagtttataagaccaaaaaaataattgaccgtaactataatgaacttaatgcatgcaaaaatggcaatgcccttgcaacaaaatattgcataatgagggcttcgacagttcatgagctacatacctgcccatgaacaatggaaattttctagctgctggctctgctattttttcttttcttttttttttaaaaaaatatataactattttctttttgcttttttttttttttt

SEQ ID NO: 57380 - DNA, 103 bp, Glycine max
  Clone ID: PAT_MRT3847_22827C.1
tgcgaagcggccggatttaaatcctggggtcgggaatgcgaagaagcaggcgcttggcgatgataaatctagatttgtgggagggaataccacagatacgagt

SEQ ID NO: 57381 - DNA, 406 bp, Glycine max
  Clone ID: PAT_MRT3847_22828C.1
cgaaagtcaaatgcataaggtcatgtttgatgataaagagaacatctcatttattgatggcctcctagataaacaaccagtgttcaggtttccttgtcttcagaatgttgatgaaaatttaaagaagaataaggctgtaaaaatcgccaaaccacagaagcctacaaatgcaagtgtccgagctggtgattggatctgcctggtctgcaacaacttgaacttctcttttaggaatgaatgtaatcgctgtagagctcaaacaaggaagcaaaactacattcagagtctcctcttgatttcggatagtcccaaaactgaagctagttctcctaaaagactggccctcaaggatctgaccaatcagatggctcctccaaacaattctaaccctttgggaatgctagtc

SEQ ID NO: 57382 - DNA, 305 bp, Glycine max
  unsure (1)..(305): unsure at all n locations
  Clone ID: PAT_MRT3847_22829C.1
acctgttggtgggcgtgtaaggtgtgagtgagtggggntgtggaatnttgttttgtgcataagagtgtgtgttgttgtgaagatgttggggtaagtgttttgtgaaggaggagaggtggagacgtttggttttgatggcaagtatgggttgtaatttattttattataatatgtttgtattgtgggagggggagagaantntgggagaagatttttaaagtggttgatggagggtataggatatccttttagtgagtgacttgttttgtgaatttgtggaggggctggatgttgatgcattgctt

SEQ ID NO: 57383 - DNA, 396 bp, Glycine max
  unsure (1)..(396): unsure at all n locations
  Clone ID: PAT_MRT3847_2282C.1
agggaaagccggaacgccagcacggaccgggaccggaagcgccggggattcccacgcgnccgnagtatagcacaaacgcacggcgcaaacacaacaccggcacaccgcgaacacacccccaaaggcaagggaggaatgccttcaaagagaaccgcgaaagccccccgcgataccaacgccacaacacgactcacgcaccaccagcagaccagagcaatcacgaacacaaccggaaccacaacaagcccagaccccaccagccgccgaaacacgcgccgaaacacggaatacagagacacgaaaagccggagcactgcgcacccaatagagaagggagaaggggactgaccctgcgggacaaggaaaacgaagctccgagcgcacggagaggggcgg

SEQ ID NO: 57384 - DNA, 667 bp, Glycine max
  unsure (1)..(667): unsure at all n locations
  Clone ID: PAT_MRT3847_22830C.1
attttcgtggcattcgtcactctcgtgtcgggtgaaggcgaaaaccaaatcaagatgctgagagtgggcgcaaagaggcttttgggaacgacatctttgggcgttagggttccggcgaggctgtaccacgagagggttgtggatcactacgacaactccctgaacgttggatcgttagacaagaacgacccgagcgtggggacgggtttggtgggggcgccggcgtgcggcgacctaattcggctcgagttaaggttgcgagaagacgacagaaggggagtgggtgaagggaaggcaaatggagggagttctgactataaaaaatactgaaattgcaaagcatctttcactttcaccagttaagctccactgcagcatgcttgctgaagatgctatcaaagcggccgttaaagactatgaagctaagcgtgctaaggcaactgctagcggagaggcagcaacagaagagaagcctgccactgcatgatttctttcatatatagaaagaatgatgacgaaaacaaccgnttgtttgtttgtttattcttaatcagcttcttatcgaagagcaccttcacttgagactttgggttggacttagctggagagtattcacattctgtgaactaaatatttgaaatgccagctatggcttgttatcttctcg

SEQ ID NO: 57385 - DNA, 420 bp, Glycine max
  Clone ID: PAT_MRT3847_22831C.1
cccacgcgtccgacggctgcgagaagaacgacagaaggggggcatgttactattctttcttcttccactactctactcattgatcgaaattcgaatgatcgctttctctgatctaaactaactgtgactgaaccggaaaatcaaccacccccaccatcattttcattctcattctcctctctctgttttttctatttcctttctttcttatcgctccccatttacttgttttttcatttttgcagggtttcttttgctcatcaccaccttcttcatattccctctccaaccatggacgtgggatcgtggagttcttctccctccaagatcaagtcccgattctccttccaagatcgcctcttccgcagaaagaattctcaggaaaatttggacaggtttattcctaatcgctctgcgatg

SEQ ID NO: 57386 - DNA, 207 bp, Glycine max
  Clone ID: PAT_MRT3847_22832C.1
gtagctcgaattcggctcgagcttttgagttcatgtgactctttgcttctttcacgctcactactctctttctttaatttttggcaacttccataggagacagggaataaaaatgtcaacttgcttgatattttcttcccttctatccttttggcaatttccacgtaaaaggtctcagtcttacttatgggatcatttagcatcata

SEQ ID NO: 57387 - DNA, 344 bp, Glycine max
  Clone ID: PAT_MRT3847_22833C.1
aacaaatcaatattaagcttgtattgacacataaaatataatgaatgttttacagagaaactccacaagaaggttgattgcttgaatgacaagaaaggagaggaaacactagaatcttaatgctttgggcaaggattacaaattaaacaatctcaaatggcataccagttaaactaaatcccctagtgtctcgtgaatctattggaattgaacccttgatgtcacacttgccaacaattacacaaagtccccatattatagtcagaaacagtgttgttgacccagctagcagtcccattccaacagatacctgactttgagcaacttttttactacctgaaagc

SEQ ID NO: 57388 - DNA, 1288 bp, Glycine max
  Clone ID: PAT_MRT3847_22834C.1
aattcggctcgagtttctaaatcgaacccaaatacctatgggaacctttgttgtcacacttcaagcgttggaagacaaaattcgaagttgttatgcagtgcgtattaaatataacagcgatgatttcttaaagatgattctcattgatggttgcttcataattgagctttttttgagactctatagatacaactattggcggggaaaggaccctgtgttgctaaaagactggatgcgaatgcaaattaagagcgacttgatactactagaaaatcagcttcctttctttgttcttaaacaactttacaacctcgctggtatgaatcaggaatttccctcctttcttcatatttctttcaactgcttgaagcgtgtgggatgtggaacatggtgcccaacagagtccccaaagcacttcaccgatcttatgagaactagcataatatcatcatcaaaatttgttcttagaaaagaagaagaatgcaaagtaataaaacatgtatacagtgcaggccaactgcgggaggcaggtcttaaattcaaggtcagtccaaatgaaaatgaatgcttacttgacttgacctattctagtgacggtgtgttgacaatgccaatcttgaatatagctgacgattcagaagtgttcttcaggaatatattgacatttgaggaatgtcacctgtcatatgatacaaacatcattactcaataccgaatgattctagactttcttatcaacactgaaaaagatgtgaatgtactagttgataagaaaattattgtcaattggatgggtgatgctaatgcagtggctacaatggttaacagtctgggctcaaatattgggatgccacgtttcaatccagtgtatttctctctctgcaatagcttaaatgatttctatgaaagtccttgcaacaagtacaaggctatcttcatacacgattacttcaacactccttggaaaatagcatctacagttgctgcaattgtgcttcttttgctcacattgattcagactatatgttcaataaactcactgttttaattaaggtagctgaggatttgggccgttaacagggaagtggaagtcaattgggggaaggaaacttctgtaatgtgatttagtaccttgttgcttttctttcatcaaataattaaaattctactatccttcttaacattaattatttgttgcaatataacttttatttactctctatattgatctgtattaattttgtatacgctttatatatatagctacttattattattgttattgtgt

SEQ ID NO: 57389 - DNA, 3112 bp, Glycine max
  Clone ID: PAT_MRT3847_22835C.1
ccacgcgtccggaagacggagtctctaaaatttcccaattcattgagcaccttgccctaatcacgcgtcctattcttccggcgaatcgccaccgtcgccggcaataaaaccagccgctccactccctcgccggcggtggtactagcaactctccctcgccggcaactaaccaagactaaggaagtagagtgagaacccgcgaagactcttagcttcactttcttcagctcacagtttctatcacttgccgaatccaatccaacagagtcctggaaacagtggcatcagctttcgccccatgggtgttatggagatatcattgttaaaaatgatcgtaaatggaatgtcctcatttttgcatttatctttttctggaaacatgaactctgaacctgtctcaaagtattaccagaaggcagaggagatacataagttgttgaagccaatcattgatgcaattgttaatcctgagttagcttctgatgaagtgcttaataagatattggaagaaattggttttgctgttaatgagttaaaggagcatgttgagaactggcacctattatctagcaaagtatactttgttatgcaagttgaacccctgatatcaagaattcgcacttcagggctcaatattttccagcagctgaaggattctcagcattgtctccctgatgaattaagttctgaatatttacagctctgttcacaaaaacttaagcttttgggacatgaagaaatctccccagtcattaaggaagctattacagaacacttggaaaatgtaggacccagttcagagctcctgacaaaaatagctgatagcctgggcctaaggtctaatcaggaggttcttattgaggcagtggccctcgaaaggttgaaggagaatgctgaacaaactgaaaagactgcagaagctgaattcattgatcaaatgattgctgttgtaacgcgaatgcatgagcgtcttgttatgcttaaacaagcccagagtagcagcccagtttcaatacctgctgatttttgttgtcctctttctttggagttgatgactgatcccgtgattgtggcatcagggcaaacatatgagcgagctttcatcaagaactggattgatcttgggcttactgtttgtccaaagacacgtcagactctggttcatacccacttaatacctaattatactgtaaaagcactaattgcaaattggtgtgaatcaaacaatgtgcaactggttgatcccacaaaatccacaaatttaaatcaagcatctgtccttcatggttatatggaatctggtacaaccagggaatcacctgtttttgctcattccaggagcaaccagccatcctcacctgagtcagcacgttcttgttcttttagttcaccagctaataacttaacttctggtggaactcagcgagagggaacatcacctttgcatccccgttcaacttcagaaggctccttcagaggtatggttaatgggcaatatatggatcttgctagaatatctcctgaaggtttggatgacaggtctgctagctcagatgaaagcagtgtggattcagctagccatccatcaatgtcaccatctagaagggaatcttccagtgccttcagctctgaacaatctcaaacccatattagagctgtttctgattccagtgcactttctaatgcaaattttccccaagaaacacaagatgatgacaacaatgctcctcagctgtcaacaagtgcagggcacagtagagaagcttctggtgaattaaatccagggacagaaactggtggtactactgccgtgccatcagtgcatagagaacctgagttcccactccgattggagacaaggtctcgaagtcaagccatttggaggcggccatcagagaggcatgttcctaggatagtatcttctcctgttgttgaaacaagagctgatctttctgctattgaaacccaggttcggaatttggttgaggggttgaggagctctgatgttgatactcagagagaggcaacagcagaactccgccttcttgctaagcacaatatggataatagaattgcgattgcaaactgtggagccattaacttattagttgatttacttcaatcaactgatacaacaatccaagaaaatgctgttactgcacttctaaacttgtcaatcaatgataacaacaaaactgcaattgcaaatgctggtgcaattgaacctctgattcatgtgcttgagactgggagcccagaagccaaggagaattcagctgccactcttttcagcttatcagtgattgaggaaaacaagattttcatagggaggtctggggctattggaccactggtagaattattgggaagtggaacccctcggggaaagagagatgctgccactgctttatttaatttgtcaatatttcatgaaaacaagaacggctcgaggcaagctggtgctgtgaggcaccttgtggacttaatggacccagcagctggaatggttgacaaggcggttgccgtcttagcaaatcttgccacaattccagaaggaagaaatgcaattggtgatgaaggtggtattcctgttctggttgaggttgtggagttgggttctgcgagaggaaaggagaatgcagctgcagctcttctacatctttgcttacatagtcccaaattttcaagcaaggtgcttcaacaaggagctgtcccgccattagtagctttatcacagtcaggcaccccaagggccaaagaaaaggctctcctcaatcaatttaaaagtcaaagacatgggagttctgggaggggctgatcttgaattcccaactcgtgtggtatccaaaggttttgaattaactcctgtataatgtccaatttatatattacatggtgcaaataatgtgtgtaaaggtgttttgtatcgttttctcttgcttggaaagggaaaaaaatatttgtggaggattgattgtgtcctccttgtgaaaaacctttctgtattgcaaaaaaattatacatgtaagtctagcttttgtattaacaaaaagggtccggtttttgttgttgtggtaatggttgtggacaaataaaacatttggtttattta

SEQ ID NO: 57390 - DNA, 4878 bp, Glycine max
  Clone ID: PAT_MRT3847_22836C.1
atggagtcagaacccctacttgaagtagagtggtctcctcttctaaaattggtatttagaggtggctgttcctccatgtcaaatggaaatttggaaccacaggctgtcgcctggagtgtcgtgttgcggcaccctgctgctccgctaagggctgtcacgtcatgcctaaccattgaggccaaaatcatggaacattgctgcaatttgcaggcttcgtggtggctcctccatttgtgccattgccggacaggctttgcgacctgcactgtcattggacagcctctgttctgtgttttttctgcaacttcgggtgaggcaaaatgggtgatggctgatgaaactagaaagaggcttgggtttcttttgggtgagaagggtgttggtcctgcacccaaattggcccactcctatgagcaccagcaaaatcatagaactggagaaaagaagagaagcaacaggccgaaaaactacaacgaagctatgagagagaagatgggtgggcgacttgtggaggaagaaaaatgttggatcatacaatccaacaagttggctcgaggttctgatcacaagtctcttcactcaaaggaggaaggaggcatatgtctcaccttccccacctcatactatagtggaagctggtacccttgtgcactaggctttccattagacaaaactcacattcatgagcctttccttttatcattcacagatgtgatgtataaaaagagtaagttactctgttccggagctgtccacttggtgaagtttcccgagacaatgcgcggcttgcgctaatcccggttccgattcttccggcgaaacgccacctttcacggcagttaaaccaccaggtccccttcctaccagaaataggttctagacactaagccacttcgagggcccaacaacagaaacagaatcccagtatgggctccaaaagtcaagtggatacaagttctggcttttccactacttaaaccctgggggggagtctagtacagggttggaataattatgatgtcactacatggagcgagggtgatacggagttatgactttttgatatgatctatattggaaattcgttattttttgcaaattctttatgtataaatgtgtagtattgttttcactcaccttgttagcaaaaagaatatttgataagtatttattgtatgctaatcttggaaacaatttttgattctgagttagtttctcatgtaagtctaaataagatgttggaagaaattggtctctgctgttaatgaattaaaggagcatgttgagaactggcacctattatctagcaaagtatactttgttatgcaagttgaacccctgatatcaagaattcgcacttcagggctcaatatttttcagcagctgaaggattctcagcattgtctccctgatgaattaagttctgaacatttacagctctgttcacaaaaacttaagcttttgggacatgaagaaatctccccagtcattaaggaagctattacagaacatttggaaaatgtaggacccagttcagagctcctgacaaaaatagctgatagcctgggcctaaggtctaatcaggaggttcttattgaggcagtggccctcgaaaggttgaaggagaatgctgaacaaactgaaaagactgcagaagctgaattcattgatcaaatgattgctgttgtaacgcatatgcatgagcgtcttgttatgcttaaacaagcccagagtatcagcccagtttcaatacctgctgatttttgttgtcctctttctttggagttgatgactgatcccgtgattgtggcatcagggcaaacatatgagcgagctttcatcaagaactggattgatcttgggcttactgtttgtccaaagacacgtcagactctggttcatacccacttaatacctaattatactgtaaaagcactaattgcaaattggtgtgaatcaaacaatgtgcaactggttgatcccacaaaatccacaaatttaaatcaagcatctgtccttcatggttatatggaatctggtacaaccagggaatcacctgtttttgctcattccaggagcaaccagccatcctcacctgagtcagcacgttcttgttcttttagttcaccagctaataacttaacttctggtggaactcagcgagagggaacatcacctttgcatccccgttcaacttcagaaggctccttcagaggtatggttaatgggcaatatatggatcttgctagaatatctcctgaaggtttggatgacaggtctgctagctcagatgaaagcagtgtggattcagctagccatccatcaatgtcaccatctagaagggaatcttccagtgccttcagctctgaacaatctcaaacccatattagagctgtttctgattccagtgcactttctaatgcaaattttccccaagaaacacaagatgatgacaacaatgctcctcagctgtcaacaagtgcagggcacagtagagaagcttctggtgaattaaatccagggacagaaactggtggtactacttctgtggcatcagtgcatagagaacctgagttcccactccgattggagacaaggtctcgaagtcaagccatttggaggcggccatcagagaggcatgttcctaggatagtatcttctcctgttgttgaaacaagagctgatctttctgctattgaaacccaggttcggaatttggttgagggcttgaagagctctgatgttgatactcagagagaggcaacagcagaactccgccttcttgctaagcacaatatggataatcgaattgcgattgcaaactgtggagccattaatgtattagttgatttacttcaatcaactgatacaacaatccaagaaaatgctgttactgcacttctaaacttatcaatcaatgataacaacaaaactgcaattgcaaatgctggtgcaattgaacctctgattcatgtgcttaagactgggagcccagaagccaaggagaattcagctgccactcttttcagcttatcagtgattgaggaaaacaagattttcatagggaggtctggggctattggaccactggtagaattattgggaagtggaacccctcggggaaagagagatgctgccactgctttatttaatttgtcaatatttcatgaaaacaagaatcggattgtgcaagctggtgctgtgaggcaccttgtggacttaatggacccagcagctggaatggttgacaaggcggttgccgtcttagcaaatcttgccacaattccagaaggaagaaatgcaattggtgatgaaggtggtattcctgttctggttgaggttgtggagttgggttctgcgagaggaaaggagaatgcagctgcagctcttctacatctttgcttacatagtcccaaattttcaagcaaggtgcttcaacaaggagctgtcccgccattagtagctttatcacagtcaggcactccaagggccaaagaaaaggcccaggctctcctcaatcaatttaaaagtcaaaggcatgggagtgctgggaggggctgatcttgaattcccaacttgagtggtatccaaaggttttgaattgactcctatagaatgtctccaatttatacgttacacggtgcaaataaagtgtgtaaaggtgtttcgtattgttttcacttgcttgggaagggaaaagaatatttgtggaggattgattgtgtcctctttgtgaaaaacctttctgtgttgtaaaaaattacacatgtaagtctagcttttttgtattaacagaaaaaggtctggtttttgttgttgtggtagggcatgatggttgtccacatataaaacatttggtttatttagtgacactgtaactgcccctttcattgagatagggatgtaggtgtaaactgttatgttcatgcgtggatgattgagagtttttacaggcctggttcgggagactataggatacggctttttatccgaactgaactcttggggaagggaattccacccactcatcaatggcatctactctcttcgcttgcccgtcgttgtgttcctcctcttcttctatattttctacttccgtcaaattctccttaaacccgaataaaatttctcttccgttcgccggaaacaaaaaacctctttcggctccaattcgaaggcggttcaatgtcattgctatggctccccctaaacccggtgggaaggccaagaaagtggttggaattataaagctggctcttgaagctgggaaggctacacctgctcctcccgttggccctgctcttggttccaagggtgtcaatattatggctttctgtaaggattacaacgctagaaccgccgacaagcccggttatgtcattcctgtggaaattacagtctacgacgataaaagctttactttcatattgaagaccccacctgcttcggttctacttcttaaagccgctggggtggaaaagggttcaaaagaccccaaggcggaaatggtaggaaaggtcacgattgatcaattgcgtacaattgctgctgaaaagctaccggacttgaattgctcgagtatcgaatcagctatgagaattatagcgggcactgcggcaaacatggggattgtggttgatcctcctgttcttgaacccaaacagaaggaatttgtgtagagaaatttcagtttggccgagtgtaaaatcgcgcaggacatatttactgacttgttttgtcttctaaacagcaagggaaacagttctttttagttatttgttatttgcatgaatgatatttaattacatagcatatcatcataaaaagatgtggcaactagtgttgttcactgggtcattaacatggaaattcaactcc

SEQ ID NO: 57391 - DNA, 321 bp, Glycine max
  Clone ID: PAT_MRT3847_22837C.1
aaaaaaaaaaaataaaaaaaaaaaaaaaaaaaaaaaaaaaaaaaaaaaaaaaaaaaaaaaaaaaaaaaaaaaaaaaaaaaaaaaaaaaaaaaaataaataaaaaaaaaaaatagattaaaaaaaaaaattaataaaaaaactctaataagaaaaattatataatagttaagccaaaaaaaaaagcttggcggtaccaactatattggcttcttgccctccatatttttttgctatggctcatgaggggtaagtgtctttaactttagaggacactgttaaagacgacagggttacaaggctaaacattttctttggataaa

SEQ ID NO: 57392 - DNA, 1306 bp, Glycine max
  Clone ID: PAT_MRT3847_22838C.1
atttcttcaaccagtactcaaacttcttcaactgtctattgaagtgtataaaattactcatgtcagatccaagtgaccagcttctaccatataacagtgaacttgttattgtattcctgaagtttctctatgaacaagatccagttaaacaattgctggaagtatcagaatcagaatatgaagttgaaattgatttggaaacaatgcagagagttagagaattagttcagtttgggggatttgctgacactgaatatctaaggagaacattggctaaagaatttcagctgatggaattaagctttaaagaggcttttgaaatgccttttaccacaatatcaagaaagatactttgtgaggatatactacctctgtttcctcttccatctttgccaaaatcatcttcttccatgtggattcccacttcagtatcatattatgaggatccctctagagcttcagtgccaccttactcttgtcaaaaccagtttattgattacatatctttccaagtacctgatgagtgtttctcagatattgtaaattgtatatgcatagtcagaggattcatgcatgactcagactgtctaaagaaggggtatagttctttggaagctgtactgttatgtgttcctgttgattatcaatgtgtggatctgtctttgtacaaggatagtcaaatcgtcctgttactaaacaaagctactaatacatctgaaagtgctggagatggttgtatgatgattctgcaagtaagtgatctaccatatgtctctatgtcaagatctgcttgtatagatgtttggaggttaccagaactaaaggattctgtcgcttacctgaatattggggatgagaaatctcgcaccattcgtcattctgtaattgctcccttggcagttagtgcatcaagaggcgtggcttgtgtatttgctgcaacaaagcgtgctctagtctacattttggaggaagatgaagatgaggtctcggatgtagaatagtttgctatttaatttatttttcattttttgcttttgttttggctgtggttgaggggttgtaatcatttgccattttcataatggtccttgaaacacattgttgtagaatgtccatatcccttattagtgttcacttgaacacgtaattaatttaattatttttcctaagatagaagtaatcagttaagcccaaaaaagtaaaaaagatcaaacagagtaaaagaccgaaagtactggagtttagtacccattaataataatttgctaattgtttgaggtaaaaaaaaaaaaaaaaaaagggcggt

SEQ ID NO: 57393 - DNA, 474 bp, Glycine max
  Clone ID: PAT_MRT3847_22839C.1
gctttaaaaactaacatctgcaccatacatggaatcatactaattaagtgcaataagaatgaagcaaaaatgaaataccgagtaacacattactgacggtcaatggaaactaacttctacaccatacacacaagtatcccagtatctaaagattaaacgcccctcaaccccaaaaaaagaagaaaatgagcccttttggtacaaaattgaaccagatattaacccatatctcagccccttttaaactggaaaaatatagaactacttaaattcaagtacaatgacaacgccttggaactgacgcaccaggtggttttcttctctctcgaattatggcttcttttatcattgacagtttttggtgaactttcttccatatatgattcactgcaccatccacaggtattggtccaataccacctggatggccattatcatagacaaagatggatgtactgagccatattttgggct

SEQ ID NO: 57394 - DNA, 245 bp, Glycine max
  unsure (1)..(245): unsure at all n locations
  Clone ID: PAT_MRT3847_2283C.1
gcatgatgaggctaactcttccaatgaagattttgttttcgtatacaagactcaaccagagaccctacttagagaaaatcaagcatgtactacttaaatcaatcaccggttggtcagtgcaattttnagtgcaaagttgactgatcacgatcatgttttggactctggtaatagagcatactgctgtatcgaatactggttttgggcatagcctcacttgtagtcacagtaagagggtgtaaaaa

SEQ ID NO: 57395 - DNA, 663 bp, Glycine max
  Clone ID: PAT_MRT3847_22840C.1
ggagaaagaaagggaatagaagcgaaaagaaaggaccaaagaatgaagaaaattcaatcggatcgaatacaaacttgacgtccgcaatgaccctctctctcaatactttctctctctaaaacgcacggcatgaagcagcagcagcagcagcagcagcaacagcaacagtacgttgtttcactgagattaaagacgatgctgcttctgcactgagaaaaccctagacacttatagtggacgcgaattcagaaaccccaagtggaaagtccgagccttttcgttccttctcagttccttgatcagttcccagattctgttactgttcaatttcacaattttcaactctcggtgagtcatgacaagttttaacgttataacgttacacttccaaacgtttgaccctttcgcctatatttctgtctctgtttccctcaattgctgcgccccatttgtctcatttgtagccctggatcgttgattcgcttcagctacgcttcgatcggctgctatttttgtcgccacttttatgaagtttatgttttacactttttttccccttttttaattgagcttgaacttttgtgaaatggtaattctgaacttgtagctcggggttttattgattttggtgtgaaaaaaaaaaaaaaaaaaaaaaaagggcgg

SEQ ID NO: 57396 - DNA, 591 bp, Glycine max
  Clone ID: PAT_MRT3847_22841C.1
ggccccaaaaaaatttccgggttccagccgtaaaaggattctaaaaaccccaatgggctacaaagaacaaaaaaactgccctttcgttaaaaatgttgggaaaacaaacctgggtgaaaaaaaccggggccgtttttcaattgcataaaaaaaaatttgaaacagagcaaaatagataatacaaactcaacttacaagccaaaaattggaaaggggaaaaataatagttaaatcaaaacccctaaggggggcacatgcttggcaactatcgaaaaaaaaaggctgccccaaaaaaaaagggcgaccttgccctgaatttctgattaaggccaactatcagcatcggataagttcattactgaaagcaaagggtaaaaattatgttgggattgaaccacccgcccattaatttaaacattcagttttacccccccaactaaaattgattttttgcctcggaccctgaccagaaagaattcaaatccggaaaacaagttaaactttacccacccagataccggcaaactacatcagagttgcttattcgcattattttctaaggtacttactttcccaagcgttttgatttgc

SEQ ID NO: 57397 - DNA, 202 bp, Glycine max
  Clone ID: PAT_MRT3847_22842C.1
gggaccattgtgggtaaactgcctgagcatttgtcgcgattggcctggatctattgtacatggtcttcgcgatgcttgtttttatgctgggtattatacttgtaccatatgccgcaccaattgcggacaaccttcttacacatggtatcacgttcctcgctcctggctgagctcaggtggcaactccttcgctgtgcttgac

SEQ ID NO: 57398 - DNA, 355 bp, Glycine max
  Clone ID: PAT_MRT3847_22843C.1
cccacgcgtccggtttcagatagcacataaaccaagcatatatgtcctagataccgcaggggttctggttccaagtatctcagacatagagacagggttaaaactggctctggcaggtactatatctattaaaattatccatcttaaatacttttttggttattaataaaatttgaaatttgatattatcaattcatggctttttttttaaatttttttttatctaaaagtaattactgaaattacatttggttcatctccatatctttgattcctggggattcagtctaaacctcttctggggattgggaaatatgatttgggaagtgagtctttgctttaatttgaatttttc

SEQ ID NO: 57399 - DNA, 255 bp, Glycine max
  Clone ID: PAT_MRT3847_22844C.1
atggtggacaactttagagtagaatatatttgaaggaacaattgtacaatgaaagcccggagggatacacactagctccggccatctcattgagggataaagcataagccttgaacatggaagactaattaatacccctggtggattggtatacgggagaaatacgggcagaggatgataaccaaatggccaactaatctactatgaagcatgcccttatagtaccaataccctcaagacagagggcaagatgac

SEQ ID NO: 57400 - DNA, 114 bp, Glycine max
  Clone ID: PAT_MRT3847_22845C.1
tttcaatgcatgttgaatcgttgcagtgctataatgctttctctttatcagctgttgactgttgtatcgatcatcaagcttatataataataaagcttaatttgttgtgttgct

SEQ ID NO: 57401 - DNA, 472 bp, Glycine max
  Clone ID: PAT_MRT3847_22846C.1
ggaaggacaagaaccacgtctgacacattttcataaattagaaattaaaagaaggcaaattgtttaggaagaatataaacatatttagccctttcttattttatattcttcctagtgtaaggtacagctagtgatatcgtataagagtgtctgggtgttaagaatctcctatcctaaccctagaaaagcataatgaacttgttaagtggcaaaaatttgggctgttaccagctattatattttcccttttctactgacactattcttgagcatcgggtaaagggtaacaatgaaatgaacagattattgaggaaaaatataaccaaatttaacaagcaaattcatgaactcagtgattgataacctaatggtccttgcaggtcatcctgtctcctctcactttttcccatcaatgatggcatccatgggaatagcttgcttagctccttgcttattttacttgacctcaatt

SEQ ID NO: 57402 - DNA, 481 bp, Glycine max
  Clone ID: PAT_MRT3847_22847C.1
aaacaaagtatacttgttttgatcattaaggaataataacaatgagtggcaaaagcagcttccctgtttgcttttctttggggacatttttcctccttctactcaaccacgtcagtgctgaaaatagaactgaaccgaggaaaaatgcaaatctaagcccattcgagagttggaggagcgcttacttctgcatgaacaatacacccataccaccttcttgcttgggaaaacatggatacataatgaaactggatggtgtgctagacgtgagtgcctctgatatcagcgacttttgtaacaatggttgcaaaagtcacaccttagatgtcttaagttgcatccaagatgtgaagagagacttctacttcgggaccaaacaaaacgtctcctttgtcaaggatgccattatcaatgcatgtgctgcttctcagcgttacgctttaaatacaaatgttacgaaggaccctaacagtgccactag

SEQ ID NO: 57403 - DNA, 529 bp, Glycine max
  Clone ID: PAT_MRT3847_22848C.1
ctgatacttgacataatttgaggtgttctgtcactctaatgcagataaaattgttgggcttcctgaccaacccatacataggcttttggtagttatcaaaatatgtcacagtggatggcaagaaacatgagtttcttttttacaattttgttgagtcagaaacaaatccaacttcaaatcctctagttttgtggctcaatggaggtctgcaatctttggatccaaaagttgaattttttttaagacttgggattaaataagaatagcaacaatagtattcacatcatgttttattttgactaattcctgctttattcaggacctagttgttcttttctaggagtgggtgcattctaagaaaatggacctttcagaccaaataggaagtgtttgattaaaaaagattatagttggaacaaaggtattctttagctacattccattaaatctgccagaatggcctgcattccactcttctactgatagttactttttttctgcaaaggcatacatacatgttgtatttgaa

SEQ ID NO: 57404 - DNA, 451 bp, Glycine max
  unsure (1)..(451): unsure at all n locations
  Clone ID: PAT_MRT3847_22849C.1
cttgcccgggaagcatgccatctattcatcccaggttcgaccattggagccagtggatgaaaagaaaatcctttgattgtgttggatgtcaccccggaagttgagccctggaagtcgacaagtaacctatttttattcctaaaatttaatggtttctgtaattccaacaattgggtattgattaataccctggacttttgatcttggtaagctccaagccctntgactaaagattttagcctgcatgttcgggtataacacgggcatattggcccttggtgcttttctttgatcccaaatcaccaataattttctgttatttttctgcgtataatcgttgattgtcacctcacacagttggtgtatatgtcatgtaaattatgtccttgagtcatgactatcagaatgttgaacaaatctcctttccgatgtgtacataattgacatatcc

SEQ ID NO: 57405 - DNA, 1583 bp, Glycine max
  unsure (1)..(1583): unsure at all n locations
  Clone ID: PAT_MRT3847_2284C.1
ccacgcgtccggatgagtggtctagtcacaggcaggcttggaaattagaatctgctgccataatagaaccccccattaatttcattgtgtcatctcattctaaagcaaagaaaagacctaggtgggctcttatcgacaaggcatttatggctcgagcatggaggtcttcgcaagcatcctatcatctttaccgtacaagtgggaatttctgcccatctgatcatgtgactatgttgatggatgatttgttgagtctctctttgcatagctatgaaactgtccgcctgcttgcagggaaatctctagtgaagctgatcaagagatggccatctatgatttcaaaatgtgttatcactcttacccataacttgcaggatctcaatgccaaggaatatgcagtgttgggttcctgttcagtccttgcctcacaaacagttctcaagcatttgacaacggatccaaagtcattctcttcatttatcttggcaattctttcaagttcgcatcatgaatcgttgaaagctcagaaagcaattaatgagctttttgtgaagtacaacattcaattttctggagtatctagaagctttttcaggatctcagacaaagaaaatcatactggtggactggggttttcggatttggtttctcagattggctccatgagttttgattctactggcttgcattggaggtataacttgatggctaatagagtgctgctcctgctggctttggcatctcagaaccatccaaattcatcatctaaaattctgagtgaaactgctggacacttcctgaagaatttgaaaagtcaacttcctcagacaaggatacttgcaatttcagctttgaatacactattaaaagaatcaccatataagctgtctcatggtgagaaatctgctgtacttgaggatttgcaaggccatgtcaaatcatcacttgaaggaactttaactccaacttttcaggaagagggtttcttcaatgagacattgactagtctttctcatgttcatataataactgatagtgaaactgcttcaagaggaggtcagggagattcaagtttccaaagcttagcagacaaatccattactcgtttttattttgaattttcggcttcatggcctcgaacgccaagttggatctcctttttaggaagtgatacattttactcaaattttgctcgtatttttaaacgactagtacaagaatgtggcatgcctgttgtattggctcttaaaggtgcagtagatgagtttacaattgctaaggagaggtctaaacaatgtgtagctgctgaagcattagcgggtgtgcttcattctgatattgatggtctatcaggaacatgggaaagttggctgatgcctcagttgaagaacatcattttagcccaatctgttgaatcagtttcagagtgggcatcttgcatacgatatgcagttaccggtaaaggaaagtatggaacaagagttcctcttttgagacagaaaattctggattctttgatgacacctttaccntccacagtagctaccacaataacagccaagcgatatacttttctggctgct

SEQ ID NO: 57406 - DNA, 506 bp, Glycine max
  Clone ID: PAT_MRT3847_22850C.1
cggggcgaagccgccaataatcaagactttttatgtgattcacattgttctcattgtatataaatagtcaaactcagcacatagatgagcaagctcaaaagttcaccactaactcactatatcctatcaagaagaaaaaactatcattcagagttgaagatgatgcttagttcttttgttgggaaaatagaaaagggtgtttcacacttcgttcacaaaaatcccccactgaggtacttgaatgaagccacaaccacgagtgtggtgccagatgatgttagggaaggatattttgctgttcttacaacaaatggtggagaatccaaaagattcattgttggcttacattacttgaatgatcctgctttcttgggactgcttgatcaagctggaagaagagtttggtctcaggcaaaagggagctcttgcaatcccctgtcagtctcaagaattacagaagattctagaatgttgcagagtgtaaagcagagaagcatcaaaggtgc

SEQ ID NO: 57407 - DNA, 704 bp, Glycine max
  Clone ID: PAT_MRT3847_22851C.1
cttaaccaagtgtctatgaatggcaaatagtagatcttggactcagatatggccatgttttgtcaagctatgtgttctgaattttgtcttggttttcaaaatcacggcattgggggatggcagtggaagtggtcctactgttacagcagaaaacacttgcaagaacacaaattatcaaagcttcctccctccaccgtaccagaatatatctcaaatgatatgcacacctgtatggcacacctatgaattgaggtacttccagaatggtgataccacaactatcatattatctgctccctacacaatagggtgggtaggaattgggttttctagggatggtatgatggttggttccagtgcaatggtgggatggattagtaaacatggtcatgcaaaaatcaagcaattttacctaaggggtaggaagcaatcagaagtcataatagacaaaggtgaactcctcctcaataatatccctgcggctgtggcgactaatggagctgaaattcatatagcatttcaagtgcagatgacaaccccactttcaaaacaaccaattctgttggcttttggagcaaatatccacagaaccaccacctctccaagcatgaagacaaaacagctattgtgtttgacttctcttgaggttctacgggtcctgtatcccgtgaattgattcagatgaggacgaaccatggaatttt

SEQ ID NO: 57408 - DNA, 1050 bp, Glycine max
  Clone ID: PAT_MRT3847_22852C.1
tctcttttcaaagatttcattctatattacagataaatatccaagtacatctcaatatggtaacaaattattttaaattttcattctagatgagcaataaaagaatacagcccttgcacggtgcaaaagttgcccatcagaagcttgtagataacaagacatctatctaaagctaccattgccattaccagaggacacatgaataaaactgcagagttgaagacttagggaacatacctaacccaattgtaatactagccacactctacacagtaactgaaaggagctaatagtgaaataatgagtcagtgatctatatagcctgaacacataacagccttgtctaaataacataaagctgcttatgttttcttgtttggctcaaagacatatttgatgagtgattccttgatggaaagcaattctgggaattccgtcttcaatttggatgcatccatctcgttgttgcttcgaggagcaacgatcaccttcgcttgctcttcaagggtgaagttagcccacttgaagttggggtcaatgtaatccctgtacatctcaaggatctcattgtggctcacaacccctggatttgtgaagttccagattcccctcaagttcctctttgccatctcaattgagataggcagaagttcatccaaaatagtcatactgtttggaatgttgactactttgttataacgagaaatcttcgttatgaagttgcgtgggttgctcaggtcagatgaaattggcatgcgaaccctgagtgtgcatacattgtcatattctctcaagagctcctcaaccatagctttagttttggaatagaaagagccaatgaaattgggcttgtcttcctccttaaaaccaatgccagagccttcaggatgtgttgcattatactcaaatatgcacccagtagcataattaaccatcaagatcccatgctctctgcagacatcagccattgttaaggtgccaacaacattggtgcggatggtttctgttttatgggattcacaccaatcaacattgggtctgccagctcgt

SEQ ID NO: 57409 - DNA, 1439 bp, Glycine max
  Clone ID: PAT_MRT3847_22853C.1
tcctctagagtggccgctttttttttttttttttttttttttttttggacacaaagtttgaaagacacaagaaacaagaacaagaacgtgacaagaacaagaacaagaacaagaacgcaaataacagaacagggacaaaaacacaaacctagacaaattacgaagaaaaaaaataggataggataggataggatagaacctgtatcaagagccgaagctctgataccagatgatgtgaacctgagtaggagtggatcgtttgatacaggctacggaggtttggatgacgccacttccggtgaaggaagataagtcagggtagacgccacaaggattaccttgataagtctgagattggttcaacaaggaactcagagagaaactctcaccaaattttatcaaatgcccaaaagttcttttattgaaaacaaaaacaaatacttatagtgtatctgaagaaaaagataaaaatagacatgggccttctaaatagtttgggcctaaattacaataaaaataaattataactaaaaaatatatttaacttgggccttcagcaacaattaatagtcttgatagtgtctctgcctctgggccttcatccttctccacttgggccttcatccttctccactcgggggctttgtccttctccacttgggccttcgttcttctccacttgggcctttagcctgtatttggccagtttcatgattctcatcattccctccttcttggaaaacatttgtcctcaaatgtccaggatcatcaccgggttcaagtaccacttccttccttttcttgttggcttgcttggcatagttttcattcttttttgcaatttgcaccttcacttggtcatacaatcttttcacatactcaacttttggtctgtgcatccttacgttgagtctcttggggattgcttttgtaagttggtctgttaggcaatgaagcttcggggaggagatcaacttgatgttctatgcttcttgaaggtggcagtccatgaggaatctccttgggaaagacatctttaaattcctgcaataagggttgaacactaggagaaacataaatagttaactgattagaattatcactctctctctcttgtgtatcactcttttcctcgggtgtatcactcttctttttcatattcctttgtggtgcctcactattttctttctcttgttctctcttttctctcattctgatttggtcatcacacacttttctaggggatagaggtttaagagtaaacgaggaagatttggctattcgtctgtagggctcttctttgttacggttcaacaaacgttgcatttgtgtagtccacgcgtccagaaataagcgctgagattcgtccaattgatgatatacaccaccattgtcaccagctcttgccatgattaaggaacaaagaattttgcagtaaa

SEQ ID NO: 57410 - DNA, 316 bp, Glycine max
  Clone ID: PAT_MRT3847_22854C.1
aaaaaaaacttttggaagggggaggggcatcaccttttgatcatttgattggaattcttttttttacataaggaaacaagggatcttttgggggaggaaaaagaattcctccttttctacaaaggaaggattttcaaatggccacattttttacttattaagggaaaaatttccttaatttgggaatcattttcaattttcattaaagggattacccaattggggtcatggagggggttttctacatggagggttgaaattcttgatagatttttaagggttaagggatttggggattgcctttgcatgggagttt

SEQ ID NO: 57411 - DNA, 645 bp, Glycine max
  Clone ID: PAT_MRT3847_22855C.1
ttccacccttatattgcaatcctgcatttcttctgtgctcctcttctcttgcaccccttcttcttcatttgctctattgcgctctgagcatcatgagctgaagaacatggatatggtggattatgggcgtggttcccttttagggtctgtgcatcgttgcgaccatgcaatatatactcgcttttatagctgtgaaaggattcgctgtctaactgagcacgcctctgtctgtctctagggtctaataccccttctaccacctacttcgctgctgctgaaattatccatgtcctgcaacacccttcactttgagtgtgaagcgtactctcagaagaactatctccgactcacctgacatacccatctactgtgctttagatgcactcatcgtatctgcggagtctgggttgaaatcagacctccaccctcatatgacatgtatacacccctatacgcgtactatatcgtcatgactctcacccgctatcacgatgttgcctccgacgatacgttcgccattgccatgtacttcatgtctcaagggggtgcttctgactgtgctgagatcctcaggccctaccagcaggtccactactgagaactaattactcccccaatctccggatattattatatctacttcct

SEQ ID NO: 57412 - DNA, 291 bp, Glycine max
  Clone ID: PAT_MRT3847_22856C.1
ggagttgtacttgatcacagagctcacgaggttgacatctccaatatgtcccggctgattaagcaactcagtttacttttccgattaattctgagtcactgctgctatggcgctacgcctagttcctgtgttggggatgttgctgatattgtgccgtgttaaggtttcatcggatcctgagatattagaagaacaattggaatcaacattggagctgcacctttctccataaggagccacatatcatgggagactcgaacataaagctattacagtatatggattgtggtg

SEQ ID NO: 57413 - DNA, 356 bp, Glycine max
  Clone ID: PAT_MRT3847_22857C.1
actactcaatcttgacttaacatacttcattagcgcataacgcgctacacgctttgacaatgttttctcgacactcggtcagcaacgatgcctcccagaagagacagttggcgaggtcgttggcggcgaggatcggtgaggaccgcatgaaaacagtcggcactctagacgacctcaaaagggaatacggccgccttaagttgagcgacgacatgtccgttgcggactccaaatacgactgtgtgacgcaggtctcgatgccggagccgctacgccaccatgagcaccaccagaaagatgaaccggccccccaagaggtctggatggggccctggggtgaaattccccgatggaaa

SEQ ID NO: 57414 - DNA, 277 bp, Glycine max
  Clone ID: PAT_MRT3847_22858C.1
catagggagtgagttgcgagaatgaggtgtcacgggttaccggaaggttgcatagctaggatactcgatcgcactacgccgacagacgtgtgtaagttctccgtcgtataatacaatgtccgttcggccgctgaatcggacgctgcatataaacgtactctgccttcctagtaccattccatcatttctgagtctacatcaacactcaactatccttacaagaaggagctgtatatcgctgtctcaaatcgacatatcatcatcgatcagggtaaaa

SEQ ID NO: 57415 - DNA, 121 bp, Glycine max
  Clone ID: PAT_MRT3847_22859C.1
gagcgtttaatattctatattgatagctgctcatatacgccaaactactgtcatttttggatatgttacacgtacatgaatgacctatcaccttgacaaccccacatcattgctgctattc

SEQ ID NO: 57416 - DNA, 391 bp, Glycine max
  Clone ID: PAT_MRT3847_2285C.1
cgtcctttttttttttttttgacttacaaaaatagaattggaacgatatgattgcattgacttgtgaggacgtgatcataatactgtaccctaattgcgattgggcgcttatctaaccgtagtaagggaggacaaaataaaaatgaatgaacttactatcattaaaggttgtgggtggcgaaccattctatgaaattctaaacccaacatcttctatgcaaaacaatttttgttttccacattctcctacgcgtgattttgcattaccatgttcactcggggagattataattctgcttctggtacagaataatacagccaacaacacatttattatgcagtgagtgctccaaaggaacaaacttgtttaacaaggcacatttcattataa

SEQ ID NO: 57417 - DNA, 813 bp, Glycine max
  unsure (1)..(813): unsure at all n locations
  Clone ID: PAT_MRT3847_22860C.1
accagtggaggctactttggaaggcctcaacgtaccgggttcgcggtttgcttgggcacacgaggtgagctcccgcttacctctgggtggggggaacggaacgctgcttcagatccagcttcagtaacgtacactgaaagcaattgttgatatctccgtgttgcaaacgcgctttctgaatgcggcaatggcttctcacagcgacgccaattccttgagggacttttggatcccgggccacgttctcgtgccggattccgtggttgaaggaagcaacatcgatatcgaaggacctaagtgtccggtgctcgttttcgttaactcaaggagtggtggccagctaggaggagaactcttgaaaacgtaccgtgcgcttcttaacgaaaaccaggttttcgacttgggggaagaggctcctgataaggttctgagcaggatctatgcgaatttggaaaacctcaggcttcaaggcgatcatattgctatacagattatggagaagttgagattaattgttgcaatgggtgatggaacagcaggctggctacttggagttgtttgtgatctcaaattatctcatccgccacccaattgccacggttccgttgggcacagggaataatctacncatttgcatttggttgggggaaagaagaacccagggacggatgaacaggcggtcaagtcatttctagatcaagtaatgaaagctaaggaaatgaaaatagacaactggcacattcttatgcggatganggctccaaacaagtccctgtgatccatccctctcttgagttacacattctttgcatg

SEQ ID NO: 57418 - DNA, 469 bp, Glycine max
  Clone ID: PAT_MRT3847_22861C.1
ggctcgagctcgagccgatttggctcgaggtccacgccttaaatgcaaagctttgatgtgcactgtggacaagagaggcagtatattcatgctaacactcaccggggagggcgagcaccgtgttaacccaaccacttgtcgagtccatcctatcctccctacgccgcgttcgtcaggaagacaccgtcttctccgtcctcggtaccaccgagcacgggaaatttttcttgaacgggtacgacatcgcctggggccgttcctccgatgaggacaaagagcgcatgatccttatggactccctcctgcgttccgtcgtcttcgagctcctgaccctgccgatgccgaccatgagggtcgtcaccggtcacgccttcaccggcggatacacccttgcccttgtccacgaccacgtttctatgcgcagtgacaggggatttctatacatgagcgagcttgacatcaacctttg

SEQ ID NO: 57419 - DNA, 1347 bp, Glycine max
  Clone ID: PAT_MRT3847_22862C.1
accggatgtcggctcgtcgtgcttctggatgactattgtgaggctgttgttggagattttggccttgcaaagctccttgaccatgctgattcccatgtcacaactgctgtccgtggcactgttggacacattgcaccagagtacctctccaccggccaatcatctgagaaaacagatgtctttggatttggcattctcttgttagagctcataactggaatgacagcactcgagtttgggaaaacagtgaatcaaaaaggtgctatgctagagtgggttaggaaaatactacacgaaaagagggttgcagtgttggtggacaaagagctaggagacaattatgatagaatagaggtgggggagatgctgcaagttgctttactgtgtactcaatatttgacagcccaccgccctaaaatgtctgaagtggttcgaatgcttgaaggtgatgggcttgctgagaagtgggcatcttcacataattacggtaatcaagacatgaaccccagccacggcaacaatagcaatacttcatcccgccctacctctgcttcaaaacatgatgatgacgttcatgaccgttccagtatgtttggcatgacaatggatgatgatgatgaacagtctttggaatcctatgcaatggaactctctggtcctagataaacagtaaatgtggaaaagaaaacagcaagatagaaaaggagaaagaaagaaaggagttttctttgccataaatcttaattagcttttcttttcctcttcttaattagctttgcttattctaggataattaatatatatatatatatatatatatatatatatatatatatatatatatatatatatattatatatatatatataaatcaaatcaaatgtatatatattctaaaatttttgtcatttgggtttgtaatattgtaaataaacaatttagtattattagtgcatttgtactcatgttgtgctgcatttgggtggaaaatatgtataatggtagaaaatggggtaggtgggtgcgcaatacgcacggtagactttgtatagggtggacagggaacatcatcagattctttcctatcgattgtgaagctgaagcagcagcagaggcaagagggtgtgtttccacagaatgatattaagatgggcatgcatatcttgcagtgtcctctcagtttgtcttgttcaatatgtatgttcaaacttgaaagcatcagtttcaatatgtatgttcaaacttgaaagcatcagtgtgtgatggtcacggtctgagagcttttgagctgttagaggtcattgtcgatctgatagctttgcagggtcacgcttgctctttttctc

SEQ ID NO: 57420 - DNA, 388 bp, Glycine max
  unsure (1)..(388): unsure at all n locations
  Clone ID: PAT_MRT3847_22863C.1
atatccatngtttttttacattttttatccattaaaaaactatgcattattagaactattaaaagctatactagttcaaatatatcttttacaaatatacatatttaacttatattattataacttattccttccctcaaaaaaaaaatattaccatataataataacctattatcctccttcatttaatatattacatctataattaataaattctaccctttcacataatataaaaataatcaaaatcaaatacatcaatctcacatctctaattattataacaaaattcaaacaccaaattttatccaaaatatcaatatatctcacaatatctaccttatatttacaaaaattcccaccttattcaattccataatccttttta

SEQ ID NO: 57421 - DNA, 337 bp, Glycine max
  unsure (1)..(337): unsure at all n locations
  Clone ID: PAT_MRT3847_22864C.1
tggactgacaactgaagtcaagtctgtggagatgcaccatgaatctcttacagangcacatcttggggacaatatgggggatccaatgttagnaatgtnngctgtaagggattgaagcntgtnttatgtttgctcnaactcaaaaggtggaccctgcaaagaanggctgtttacttcaaagcccaaagtatcaatatggacccnnctggtncaatngggaatggttatgcnccctggctttcactgccacacctctccttttgtgnnccagtttgttgaactcttgaccaaattaagggnccgacccgcaaggacttgagaaagagcccaagttttt

SEQ ID NO: 57422 - DNA, 804 bp, Glycine max
  unsure (1)..(804): unsure at all n locations
  Clone ID: PAT_MRT3847_22865C.1
ccacgcgtccgtgtacgcgtgggaaaaaaaggggggggaatttcaatggcgtcaagggtttctctgaaggcgaaggggaagagttcaaagggatcgaaggctgcggaagatcgatccgcgagcgagtgcctgaaggagtggacgacatgggcgatgcgaaaagcgaaggtcatcactcactacggtttcatccctttggtcatcgtcatcggtatgaactctgaccccaagcccccactttcccagcttctcagccccgtctgatccacctcttcaattcttccaccatcaacgcgacgtcgttctttttttcctcttattttgccccctttctacatttgtaagtttctttatggatcaattttcacttgcacatctcatgtggcatggtgtgttcaaagtggattagcttgtctgtttttggataattttggaagacgcagtagtaaataatccgttttttttataattattacaatgttcaaatatcgtatactgcgcccgagttttggtttgtttatcttgatggattgtgatttttatgattttgatggatggtaatgggttgatgaatgggtgaatgaaatgtgattttgggtttgtgctgggaaaactggtttacacatgaaccttgggcgtacgcgtcgccatgtgtatgcaagagcggaccgtcccatcgacttgcacgtatgtgaatataattgatgcccctaccgctcccaccgctctacaccccctgttcccccatccttgnaaaaaaaaaaaaaaaaaaaaaaaaaanaagcggccgctctagaggatcca

SEQ ID NO: 57423 - DNA, 292 bp, Glycine max
  Clone ID: PAT_MRT3847_22866C.1
gggggggaccgaagcgtacgcccactcgtccattccctaaccccttccccctaccacctccactccttcaaattccggcccgattaacaatccatcgtgtcacactaaattacactcctctacattacctacattataacctactcctacaccaacatcttaatcgtcaataccacttctgccttgctctacttctcgtacgatctcatcaagaaccctcccgtaatcatgaccataatcaaacattcatttatccccaacaacaaaacataactcggccggcagctcttct

SEQ ID NO: 57424 - DNA, 467 bp, Glycine max
  Clone ID: PAT_MRT3847_22867C.1
catgagggtgtgtgttagagatatgatataaaaccatttatctatgttcacctaataacttaagcttttgagatagttagttcattacattattaaatattttggagtttcaacataattgctatgtaggaaattcataagaggaaaccttaggggatgcatgtgtagttactcttataaatttgagtcctgtatacattcggtttcacatacttatcatgtaagattgaatggatataaaatagttcctctctctttcacttgatgacattacactatatgtattttggatacataaatctgtttcttatcttttacttctgctcaatgtaatgtggaactgctctagttcattggatcaattctagcttttgaaaaaaaataaatctgcaggggcttctcaagcatagaacatcttgaacctaatgctctctttgtttttatatgtttactgactgcatattttg

SEQ ID NO: 57425 - DNA, 364 bp, Glycine max
  Clone ID: PAT_MRT3847_22868C.1
gcagaaaagggttcattaaatgtcacaaattttctatttgactatgtcggcaaagaccctgttttaggaggcacattggatgacaagaccatagacgtttaacagctggtctacaaacatataaggcgtgagaaatctttataactggggaattctacacattggtcacgtcagaaatcatctccatgaatatggaagctaaggaaacctcccttacacttgaaaccatggctatgactgcgactttataacgtgcagcgctattcgatatattgccacagaacctgaattttcagtggaaccgacaccatggttctttatgcaattcaagaggtacttaaaggcctcaattctacatggaatg

SEQ ID NO: 57426 - DNA, 570 bp, Glycine max
  Clone ID: PAT_MRT3847_22869C.1
tacggctgcgaagacgacagaagggggttgatcaaattaatttaactcatcattaatcaacttcgcattgattatttaaatagcgatggcaatgacaagggtgatgcagggtcttgttctctgcacacttttgttgtcggcggttttggtccaagaagttgaggcaagagtaatcagcaaagaagcaatgcagcgtaacaccattcctggatgcagcaaagtacaccccaatgtcgccgcttgtcatctgccattagttaacatcaactatagaagaggttgcgagccaggagaaagatgtcgccaataagatccagatcgaggatgatataagccagggactcggcctttgatcaatttcttttaaaaaccatgtgtactggctacaatatgtaaaaggacattaccttgtacaccaagtaaaataatgaagtttcatctttgtctttccgtaaagttaatatggattggcgaatctgtatgcccaatacggattggcgaatcctatattgtaatctgtacacatgatttttagtggatcaatgctaaataaatttatttgtttaggat

SEQ ID NO: 57427 - DNA, 403 bp, Glycine max
  Clone ID: PAT_MRT3847_2286C.1
cacttccaatccaaatttttttcccccccggagtcccaagaccgggccggcttcttatcatcgtgggaggcccaattcaccaaaaaggccgccaagaaggaggccgtcaagctggagaagctccgccgacgccaggaaatcgccgccgctttctccgtcactgccaacctcttcgtcgactaggaggaccccttcggcgggaactacggcgacgttccttttttggagctgcagtccaagacgccgtctgaccgttggctagtggacgctcgttgaggcgctcggcgtcactctggagaacaattcgttgttgatcctatgtagggctgcatgctattctccccgttagaaagaatattgctttttttttcatcagagagaatggttttaccgttcaatgctt

SEQ ID NO: 57428 - DNA, 1770 bp, Glycine max
  Clone ID: PAT_MRT3847_22870C.1
gccgccatgtcccccccgccgcccactgccgcacccccccaccaccgcccaaacacacctaggccacccaattcggctcgagctcttctctttcacgctattccccgaaaccttgtttccacactgacacacactccttcacccaacaccaacagaacaataaaacatagtacactacacagtgaaaaagagagagaactctctcttctttctttctttctttctttctcagtcacataacacaaaaaacattactaaacttcaggtttccgtttgtggccggaaatgcttgaaatacactccatcggcggcggaaggttcttcggcggcggcggcgaccggaggctgaggccgcaccaccagaaccaccaccagcagccgccgataaaatgcccccgctgcgactcactcaacaccaagttctgctactacaacaactacaacctctcccagccgcgccatttctgcaagaactgccgtcgctactggaccaaaggcggcgtcctccgcaacgtccccgttggcggcggttgccggaaatcaaaacgctccaacaagcccaaaaccaccacctcagccgccgccaccaccagcagcaacaataacaataacaacccttcctcttcctcggaaaccgctgcggcaaccgcaccaacgccaccacaacaaccgcctccgccacttgagctagagcataattctcactctcactccagcagcgaaagctccacttataccgtcgctgccacggaggccatgtcagcgccgacaacgaatgcggtgtcgaacaacaatttattacttgacaacaaccgtgagtcgaagatgttcgctaaccctaacccctatttagagcagagtcgtagtggtggccttttctctgacatagagagcttcagcagcctcgtcaatttaaacaaccaagcattggggtttgggtttgggaacaataatagcaacatcagcatcctcgatgcgacgtcgtttcggtttggtgttagtgttactaatccgcacgggaatgatcaggtgcttgcggcaccaggtggaggccatggtcagtggcaacaacaacagcagaatcatcatgagttcggtacggcgtcgtttcttgatcacaccgtgccgcttgagttttcttcgctgcagcataaagctgggcatcagggagggtttggaccgttggattggcaacccggtggggatcaaggtttgtttgatcttcctaacactgttgatcaaccttactggacacaccacactcattggtctgatcaagataatccttcttctctctttcatcttccctgaaagtactcaagaaatttctctttttttttgttttttatgacctgagaggaaaagcgtaaaagaatatttgtttggagtctaaagcaacgtagaaaaacaaattggaagagaacctggaaggaacttctaattaaaatatgtaaatttctggtttttttacttttctttttttggggaggtgattgggcttgatcataagtagtgatgttctaatgttcatgtgaaactaacatccatgttagtttttttttgcttatgttttattttatgtacttattatttggaatttatttactaggggggaaaacataggagcgttttactttttaatatatactggggattggtgctgtaacaattgttgtttggttgcgtgtttgggattgtaatcttattctggcgtgtttgagatgctattttcatccgcactattgatggctatgaatttgaaaatgactc

SEQ ID NO: 57429 - DNA, 483 bp, Glycine max
  Clone ID: PAT_MRT3847_22871C.1
gcaccagaatttatggatttcaggttatcaatctccgctaacaacatagaattattctttggtttgtcaccaaagtcaacttgactaaatggttcataagttgtttttgttgtcccacttgttacatttaaataagtattgtaatgatggacccaggctatgcttcaacgacagtgcaaatacacagctccattcttaccatatgctgaaatttatctttttaatagaagaatagtggcagtaatgatcaaaatcttgaccttttggttattgaagctataaaacaatcctaatgacctattttccctaaatcttaggcggtttggtgaagagtcatgaagattgtgtatcatagtgttttaaattgcattcgtcaactgcaattgcagttgcaacattgcggttttcgatgtttctgcaactgatatgttaattgcaattgtggccactttttgttaccaactaatttcaataccatttaag

SEQ ID NO: 57430 - DNA, 269 bp, Glycine max
  Clone ID: PAT_MRT3847_22872C.1
ggccaccagaggggggagagcgagagagcggagcgtattgcagaccagagagcggcacgattacacgtccgattcaaagcctctatcacgctcctaatctgcgcataatatcttactcgccttacattgctaacgtctttcattatactgttgttgatcctatttgaggttacagtacaagtgtttgaggatcggacgacccaactgcacaagctgtcactcacacgctggattctgacgatgagactgagtaccatgactatgaacag

SEQ ID NO: 57431 - DNA, 262 bp, Glycine max
  Clone ID: PAT_MRT3847_22873C.1
attcctcactcaaggggtagggatgcgtagcgaacagcgcctgcatactacagtcctacgtggagaggatacggcggcggtggccgaagaggatgaggaggaggaggaggaagacggtcccgcacgaggctggttggtggaggaggcgcaggacaggaacggagcatttggctcaagcattcaatggatgagaccgaagagcttccgaccttcgaaggaaagcacctgtccatgacgttacatagcgaagatatactctgga

SEQ ID NO: 57432 - DNA, 810 bp, Glycine max
  Clone ID: PAT_MRT3847_22874C.1
gctcgaggcacggcgggccggccgctcgtaaatgaagtttctattggcatgcgtagttgaaaagaagatgatgtgatgttgtattgagggagtgataattggcgatgcagagtctgcaacagaaggcctctgaatggagtggagtttccatagctgatgcttttgccatagacgaggccaatttgtttcacaagcttggccttcaaaccttggttaatctctctaccaatttctacaacagggtgtatgacgacgaccaagagtggtttcgttcaatatttgccaattctgacaaacagaacgcaattcagaaccagatcgagttcctcgtccagagaatgggtggccccactctctattctcaaagaagagggcaccctgcactaatcgctagacatcgaccatttcctctcacgcatgaagctgcaaacaggtggttacatcatatgggacaagcattggacagtacctcagccatagatgatgactcaaagatcaaactcatcaactttttcaggcacactgcatatttccttgtggctggagttgagcaaaaggatcaaaactttcacgtaccgtgtaaggatgcagccctgaagcagcacccatgtaaaaacttttagcatttttctctttgtgcaacgttgacaagaataaggtatcatcatatcagatgtcaaatacaatgttcgatgatcagtttgtatttgaggatattctaaactcaagcattattatgtttcataaacgaatctcgttaattagtttgttacgataaattgttacaaatcaggaacagttaggattagc

SEQ ID NO: 57433 - DNA, 1909 bp, Glycine max
  Clone ID: PAT_MRT3847_22875C.1
gttcgaggaaaaaccaaatatctcatcaaaatagttcctagatccgatcccatattcattttcagaccatttccacattttggggaaggaagaaataaagaaagaaaccctctgtcttggttttactttcaccctagggtttctctcgcgcgatcgacacctagggtttgttaggtgtcccaatttcggtgctgcatttgtttcaagcatcgtcgttccgattctttgcgcggggaaggcgatttcggaaacggcgatttcaataatgagcagcagttgtgtcgtttgacgaaatggacagggtttcgccgaaccggcgtcgttccgacggagagagtagttctgcttccgctggggacactcgccagaagcgcgccagagtttacttcgatttcgatggcactcattgtattgtgaagtgttcaaatgctgggaattccagtgcatctgttgaagaatttgtggattatgataattttcaaggatggctcgagcttcgatccaacgatgatgatgctggcgactcgagccgcttcgacgaaggagatggtaatgacatctcaaaagtggatgatctagaggtcaagatggatcttacggatgacttgttgcatatggttttctcgtttttggatcatcccaatctctgcagagctgctagagtttgtaagcagtggcggactgctagtgctcatgaagacttctggaagagtttgaattttgaagaccggaacatatctgtagagcaatttgaggacatctgtaggcgttatcctaatataacagcaatccgtatgtctggtcctgcctctaaccagcttgtcatgaaggccatctcttcgttaagaaatcttgaggctttaacattgggaaaaactcatataatggataattttttccatgctttggccgattgttctatgttgagaagactaagcatcaatgatgctatacttggcagtggtctgcaggagatatcaattaaccatgacagattgtgtcatcttcaattgacaaaatgccgtgtgatgcgaatagcagtcaggtgcccacaacttgaaactatgtcgttgaagcgcagtaacatggcacaggttgtgcttaattgtccacttttgcatgagcttgatattggctcttgccacaaacttcctgatgctgcgatacgagctgctgcaacttcatgccctcatctggtctcactggacatgtcaaattgttcatgtgtcagtgatgaaactctgcgtgaaatagcattgagttgtgctaaccttagttttcttgatgcatcatactgctcaaacatatctttggagtctgttagactgccaatgttaacagttttaaagctccatagctgcgaaggcattacttctgcctcaatggctgcaatagctcatagttatatgttggaggttttggagcttgacaattgcagcctgttgacttcagtgtctttggatcttcctcgtttgcagactatttgattggtcctctgttgcaaatgtgctgatttgaacatgagaactataatgctttcttttatactagtctcaatctgcccagctctccatcgtatcaacatcacttcaatttcacttcaaaaatgcgtattgcaaaagctcaatatgttttcgatgttagatttgcaatgccattgttaatcaattgtgggcaaattgttttctttatctttgacgaaatctatatgtgatgggctaattggaaagaggttgttgttatttctctcaacctatgctttcttaactttagcaattgagctaccaggatttgtaagcagtgccgtgctgccagtgctcatgaagatttcttgttaggttttaacttttcgctagcgcacatgcccttcgaacaattaggggacatgtgatggcgttaacctaatgcc

SEQ ID NO: 57434 - DNA, 547 bp, Glycine max
  Clone ID: PAT_MRT3847_22876C.1
gaatcctccttcccacctatttccaatttctcaatacccgtctgacaattaactttcccttttatactatttatagaattgattcccacttttaactacctataattaactttgttactcttgtaactaaggtggctttattccccacactcttttttcttttctctctcagaaaccttcttaataggatggtgtgccctatcaaattcataaaggaaattttgttgagcctcttttctttttggatgttaatagtagctatgtaagcttgccttctatagggcatgtatattggtgaggttgaacattatctaaactcttttctgaaacgataaacaagaatcgaacatgtttgctgcatattcttctaccatattgtgtcatagtgtttttttttttttttgagaaatgagttcattgtgagtgaatttggatccctaattgagggctagatatgagctgggagatgaacctagctgctggctttcaagttgcacagctggctctgaagcagtcggaaaataaaaaccaacagcaggagattatt

SEQ ID NO: 57435 - DNA, 1206 bp, Glycine max
  Clone ID: PAT_MRT3847_22877C.1
ccagcgtccggaaatccggtggtcttgtttctgctaggactttggctgtgtttataactgtgacactgtcaacatccgtggcagctcagcagggccctatacctatggcaggccatcaaatttgcatgcaagtctggttgtcggtttctttgctcaatgatgctttggcgcttgctggtcaggcacttcttgcccgtaattactccctgggaaactatgagcaagcacgccttgttatatatagagtgatacagattggtttaggagcaggaatcactttgtcaataatcttattctttgggtttggagcgttttctagtttatttagcacagattctgaagttctggatgttgcttggtcaggtatatggtttgttgctggatctcaaccagtgaatgctttggcatttgttattgatgggatttattatggggtatcagactttggatatgctgcttactcgatggttctagttggactagtttcttcaactttccttctggtggcggctccagtagggcttcctggagtctggactggattgtttattttcatggctttgcgtgttctagctggagtttggaggttgagcagtaaaagtgggccttgggatacaatctggtatagagatggagcagaagattgaccaacatgcattcagtactcagaagttccaacattcactcctcaggttaaaaaaccattttcagaatgatcagaaaatgattctctcaagagctctcttatatgagggcactaaattcctgcaaagagaatccagtatcactgcaggactatagtaaattattgaaatgtagcagccaattactgctaaccgattgccaaaatcttgctgattcaagtattgattgaatggccaatagaacagggagggagaaaattattgaatgaccagcctacagcttagagggtagtctttttgaccctctgttttttgttggaaatttgtatttattaggaaattgcacaattttgtatattttcattgctaaaggtagctgcaatgcatgtaagaataagtactctgacttgtccattgcagctattcaagttagttaggtgtgtactgtgtagtaattacaattttttaatagttttttacgttaatggttagcattaatcttaacgcaattaacattatttattcagtaatttatagtctggtatttgttgttaacgatttc

SEQ ID NO: 57436 - DNA, 2419 bp, Glycine max
  Clone ID: PAT_MRT3847_22878C.1
cttctcacctgtgtcaatgctgggattggttaccggtgtcctgcctacgcatgtcccccgcactctactgtatcgcgtggacgtgtcgcttcctctgccgccccggcctgctgagcagtttcttacattgagggcctttggcactccagcaattgtgctcgcattagctgcgcaaggcacctttcgtggatttttagatacgaagacacctctatatgctgttgatatttaatagctttcattctgctatggaaattgagtgacaaagtgctgctaatcccttccgaattttatgggagaaaatttttcagctatctgaaatctggactttggctgtgtttataactgtgatgctgtcaacatctgtggcagctcagcagggccctataccacctatggcaggtcatcaaatttgcatgcaagtttggttgtctgtttctttgctcaatgatgcttacaccaagaattgaagcaggcgatgtgggaccttgcaacacccctcccttcacaaatgcctgtcagaacaaacaagcctaccagaacaggcgattgaccaagatgggatataggctttgatatcatgttaaatcttatcttaaaaccaattgacattaagtgaagttgaccaacaaatatataagttacaccccaggaattgaggcagacgatgtgggaccgtccagcagggggcattccattttacatgataagcttgatacttttccatttcccaagatactgaaatggtattagtaagaaataagaattcaaatattgtaccatatcctccaatgtggcccaaaaagaaacatttggcaaagattggaagaattgactctgtatcatgcagtttcaaatggtacagatgatatgatctattatttgaagatatgaaacaaactaactatttcaaaattattaggtctttgaaattatgttagaactcacggtcacggtgttatgaaaaacagaaattcaatataacagtgttatttaatatgaaagatagcagaaagctagtacaggaattgagaatgacaaccagagtctgtgactccttctccagagaaatattcccctaaacaaccaccattcccccttcccttttttctctctcctcacctccttacatactccatcccctaacagaatttgttagaatctactatgccacgtcatgtaactaactcgcactccctaatcctattttctttctcctagaataaactttccatatagtgggcctatgtgactcctcaccaatatgaatatcagtattattcaccggtgtcctatcaaattaatttggctgaaacttactgtatcgtgttaaaatgacatttcttttacaggcacttcttgcctgtaattactccctgggaaattatgagcaagcaagccttgtcatatttagagtgatgcagattggtttaggagcaggaatcactttgtcaatgatcttattctttgggtttggagcattttctagtttatttagcacagattctgaagttctggatgttgctcggtcaggtatatggtttgttgctggatctcaaccagtgaatgctttggcatttgttattgatgggatttattacggggtatcagactttggttatgctgcttactcgatgttggactagtttcttcaactttccttctggtggtggctccagtagggcttcctggagtctggactggattgtttatcttcatggctttgcgtgttctagctggactttggatgtgaagtatttaattcatttggaaggttgagcagcaaaagtgggccttgggatacattctggtataaagatggagcagaagattgaccaacatgcattcaaggtcatgtgttcagtagtactcagaagttccaacattcactcctcaggttaaaaagccattttcataatgattagatcagaacatgattctcaagatctctaatatgagtgcactaaatccatgcaaagagaatccagtatcactgcaggactacagtaaattattgaaatgccgcagccaattactgctaaccgattgtcaaaatcttgctgattcaagtagagattgaatgaccaatagaacagagagggagaaaattattgaatgaccagcctacagcctagaggctagtctttttggccctttggttttttgttggaaatttgtatttattaggaaattgcacaattttgtattttttcattgctaaaggtagctacaatgcaagtaagagtaggtactctgatttgtccattgttgctattcaagttatggtgtgtactgtgtggtatttacaatttttttttaatagttattgcttaatatattaaagattagcattaatcttaacgcaattaacattatttattcagtaatttatagtctggtatttgttgttaacgatttc

SEQ ID NO: 57437 - DNA, 574 bp, Glycine max
  Clone ID: PAT_MRT3847_22879C.1
gacaattagtaaatttgggtagggtattatagtattaacaatggatagagtctcaatatgttactattatacttgttttcacacacgcatttgaaaaaaacataaagatccctacctatatatagcaacatagttatcaactttaacctggctcctcctacttgacggtatctctatactggtggtacctgtacctgctactgcacttgacttaaatgactcattacagagtcagtgattaacatgatccgcagaaaaacttgttcactgggcagcttggggcatatgaacacttgaagtaagccctaggagaagggttatctctggtgacttttttaccatattttctccactgatatctgtccctcacatacagcaaaaatatccttgctcagattgatgccacaagatgccttgctaattcctcctcgagttatgtgcaaaattttatcaaatacatctggatgaccatagtggaatcgcaccctgtattgcccaagaaggcaagaaccataactgatatataaaaatgggtagcgccaaactggctttggaagatcagagagcaacgtga

SEQ ID NO: 57438 - DNA, 209 bp, Glycine max
  Clone ID: PAT_MRT3847_2287C.1
agtaggagcagcagcacattcctcgggactcgtgaagttcggtactagcgtgtggggattttaaatcaagggcgacgcggtgtaaaaagtggccgtggtgtcgccgtggccgaagtgagaatgactctggaccgagcaacgtcggcggcgacttaccggaggaagccgtcttgggaggagagggagaacaaccggaggagagagagaag

SEQ ID NO: 57439 - DNA, 291 bp, Glycine max
  Clone ID: PAT_MRT3847_22880C.1
tccttaaaatgggggggggtgttttatctcttctcattttcttttgtttttttttcccaaaccgggggccgtcaaagatttcaaaatattttcctttttatccgacaaaaccttttctggccctaaattataaacgtgttcaactcctcgcggcttttatgatacctgggagggcccttcccttgcgaagggcgttgaggacacccccaaccgataattccatgtcatgcttcccccccacgggggatctaccgctagaccccccttaactgaccttcctctgctcctatt

SEQ ID NO: 57440 - DNA, 1110 bp, Glycine max
  unsure (1)..(1110): unsure at all n locations
  Clone ID: PAT_MRT3847_22881C.1
ggctcgaggaagttctggatgttgcttggtcaggtatatgttttgttgctggatctcaaccagtgaatgctttggcatttgttattgatgggatttattatggggtatcagactttggatatgctgcttactcgatggttctagttggactagtttcttcaactttccttctggtggcggctccagtagggcttcctggagtctggactggattgtttattttcatggctttgcgtgttctagctggagtttggaggtgaagtatttaattaatatggaaggtgataattgtgaaacttcatgtttgtgtattattacccattgtcgtactcattcaaatcctagctcaaagaacaatggcaaaatgatacaggacatgttggatgaatgtaacatgacatcaagtcgcatgttatttgttctcttttatgtcggtattttattgggtaggggcaggatactctatggataacatgatcaaaattttcttcataagatttatattgagttaatatttttgttttcttaaggttgagcagtaaaagtgggccttgggatacaatctggtatagagatggagcagaagattgaccaacatgcattcagtactcagaagttccaacattcactcctcaggttaaaaaaccattttcagaatgatcagaaaatgattctctcaagagctctcttatatgagggcactaaattcctgcaaagagaatccagtatcactgcaggactatagtaaattattgaaatgtagcagccaattactgctaaccgattgccaaaatcttgctgattcaagtattgattgaatggccaatagaacagggagggagaaaattattgaatgaccagcctacagcttagagggtagtctttttgaccctctgttttttgttggaaatttgtatttattaggaaattgcacaattttgtatattttcattgctaaaggtagctgcaatgcatgtaagaataagtactctgacttgtccattgcagcntattcaagttagttaggtgtgtactngtgtagtaattacaattttttaatagttttttacgttaatggttagcattaatcttaacgcaattaacattatt

SEQ ID NO: 57441 - DNA, 1446 bp, Glycine max
  Clone ID: PAT_MRT3847_22882C.1
atccaaatagtatttaataaaatttcgcgcctaactcaaggaggaattaacaaggcttcttttgacatcaatttaagcaagaaaatttttcctgtattcgttttggcctcaaccaacaataattctagtttctctcattccttctgtcccttaattgcgaagcaaatctttcttcttcccatggaaatggaaccgacgtgcgtcgacacttccctcaaccttaacgttattccttccccacacatcgaccacctcgcgggagaagttttgtttgaagagttgcggcgtctaagcagtgagaacaagaggctaactgagacgctgaaccacttgtgcgagagctatgttgccttgcagaaacatttgagtgaattcagccaacttaggaacgcaaattttgataaagaaggaacttgtgcagttccgtcgctaaagagaaagcccgagagtgagaattgtgtgaatctgtttggtactgagtgcaacaccatcacagaggaagaaacattcaaaaggcccaagcatagcaccgagccaaaggtttccaaagttcttacacggacagatgcatctgatactggcttatatgtgagggacggatatcagtggagaaaatacggtcagaaagtcactagagataacccttctcctagggcttacttcaagtgttcatatgcccctagctgtccagtaaaaaagaaggtgcaaagaagtgtagaagatccaagtgtgttggtaacaacttacgaaggggagcacaaccatgggcaacaacatcaaactgcagaaatatcaattaattcatcaagcaaaagtgaaacacctaggcctgcagtttcaccctcagccatgaatattcggagtagtgcagcagcaggtccaattgtaacacttgacttggtcaagtcaaaagttgttgacattaatgcgcaaaagtcatctctccagcagtttttagttcaccaaatggctacttctttgacaagagatcctaatttcacagccgcacttgcttctgccatctctggaagaattctagatgatacttctgtgggaaaacgttgaattattaagagatatatatgtattaatttcactgatgaacatatatgaattttgtcacttttcttcgttttaatatttaataacagctagtcacgaggagtagtgttctatgcaagtttttctgcggatcatgttaatcactgactctgtaatgagtcatttaagtcaagtgcagtagcaggtacaggtaccaccagtatagagataccgtcaagtaggaggagccaggttaaagttgataactatgttgctatatataggtagggatctttatgtttttttcaaatgcgtgtgtgaaaacaagtataatagtaacatattgagactctatccattgttaatactataataccctacccaaatttactcattgtcattcct

SEQ ID NO: 57442 - DNA, 1102 bp, Glycine max
  Clone ID: PAT_MRT3847_22883C.1
acgacagaaggggggactagttcatacaataccaattacctggaagattcaaaatgtcgctacgttaatggcgtggagtgaccactagcttgctctttttattatataaagcaccctacactttacttttacaacaagcaaccaaacacttgctctataagagaaaccaaaagcaaccatggcaatgcgttccctttgcttcttagtgtttctagctgcagcaatgcaaggaacacttgcagttgattacactgtcaccaacaacgccctctcaacctctggtggcgtgcgtttccgtgatgcaataggggacgattatgcaaaacaaacgctcgactcagccacccaattcatatggggggtgctccagcaaaacgctcctgctgatagaaaagatgtgcaaaaagtaaacctgttcgtggatgacatggatggcgttgcatataccagcaacgatgagattcatttgagtgcaagatatgtcaatgactatagtggggacctgaaaacagagatcacaggggtgttgtaccatgaaatggtccacgtttggcaatggaatgggaatggccaaactcctagtggattaattgaaggtattgcagactatgttaggctgaaggcaaattatgcacctagtcactgggtgaaagcagggcaaggagagaaatgggaccagggttatgatgttactgctcattttcttgactattgtgattctctcaaaagtgggtttgtggcacaattgaaccagcagatgagggatggttacagtgatcaactctttgttcagctactggggaagacagttgatcagctttggcaagactacaaggctaagtatggcactagttaagaggctatgagagctttgtacgatatttttaaaaataagcgagaatgtcgcaatctatttgtagattaatttgtattaagtctatgtgtattcagcagaatggatgttgtacctaactctgatctgtaagccgtgtgtgtgtgccaataattgaaaatgatgattattctactgatggacaagttaaataaagagacgtttagaggatatgccaaaaaataacaacgatgaccctaacaaagtgaa

SEQ ID NO: 57443 - DNA, 351 bp, Glycine max
  Clone ID: PAT_MRT3847_22884C.1
ctcagacgctgattggctatcgctatgaccgattactgcgccaggctaaagctgcaagcatgattctacaatcctccaactactttgttgcgttgggtgtgtatggggatgataactcactcagtgtgcatgactctgacaagccttactatagtggttctcaatcgaaaagctttctatgtgcacattattataccataactgacggcatggacaaaactaagcgcgacttgtgcacatttatgaagagtctcgcgagataagtgacaagtctcaagagaaactaatagcggatgtctactgccactctgctatctgctgaggacatggcgggttagtggtcacaacttc

SEQ ID NO: 57444 - DNA, 483 bp, Glycine max
  unsure (1)..(483): unsure at all n locations
  Clone ID: PAT_MRT3847_22885C.1
ggctggggaaggctttttgttaaaaatttatacaacattattaattgactttttactacaaagaagggggttccccctgcaatcaaaggcaaaaacattctactctggcgaatggaggctaaagcgataccgcaaaaaacaatttaaaaaaccctccccaaggggggggggngacccccacaagaccgagaggagaaaaaagacccccagcggggggggggacgagggcaaaaaggcagcagcaagaacaagggccaaggcgacaccaaacggcggggagagccncccagcgggagcacgggccccaaaacgaccaaggcccacggccaaaccgagagccccaacaggccagcgccagccaaagggggagccagggcgaacggcaacgggagcggggacagaagcagggagaacaccgaacaggaagggaggagaccagccagaaaaaagagggcagcgaacaaaagaaacaacgggaacaag

SEQ ID NO: 57445 - DNA, 267 bp, Glycine max
  Clone ID: PAT_MRT3847_22886C.1
agggctgtgagaagacaacaaaaggggccttccttttatgattgaaaccaaaccaaaccaaaccacaccaaacctctctttatagaatttatatatattatggtttgatcctcccacattgacccaccatccatcatataggacatcccgcccaattcccatggattctatatcaaatcttataccagcccgacatgatgtataaatcatatcaaactcatcataaacctcgctttccacatcaaccagcagcaactagtactaccc

SEQ ID NO: 57446 - DNA, 561 bp, Glycine max
  Clone ID: PAT_MRT3847_22887C.1
gaatagatataggtgttgtgactcctaagatcaaaatcgccctttcccgaagcagagaacgccgcaagagacattctcaaaatcatgctgaaccacaaatgtctatacattctgttggcttactattggaagctgtattcctaaaagcaaaatctttgcaggttcttgaaaggtttaaagaggctgcccaatcttgcaaagttattctggatatagtggagtcttcattgcctgaaggcatgcctgataactttggtgctgaatgtaaattgcaggagaccctcaacaaggcagttgagctgcttccagaattatggaaacttgctgattgtccacgtgaagctattttgtcttaccgacgagcactccttcatcattggaatcttgatgcagagactatagcaaagattcagaaagaattcgttgtttttcttctttatagtggaggagaagcaacaccccctaatctccgttcccaaatggatggctcatttgtgcctagaaacaacatagaagaggctatacttcttttaatgattttattaagaaaggtctctctgg

SEQ ID NO: 57447 - DNA, 874 bp, Glycine max
  unsure (1)..(874): unsure at all n locations
  Clone ID: PAT_MRT3847_22888C.1
gcgacagggcttgtctctttctatacgtgttgagttgagacctttaaactcaactcaacactttcatctctttctctctccttccttcgttgttttctgctaatttctagggttttgcctttccccaatcccacaaaatgggggtctctttcaaggtgtccaaaaccggcactaggtttcgccccaagtcgattccccaacttcaagatggctcatccgacaattccaagtcccagagtgatcttgttgaggctggtgaaaacattgctcagattccccagtcatctgtttcatctgaaactctttcattagcagatagggaagcttctttcacattgaacctgtttccagatggttattctattggaaaaccctccgagaatgaagcagctagtcagtcaaaataccaagattttcccaagtcgttacatccatatgacaggtcgtctgagagtctattcttggccattgagtcaggtcacttgcctggggatattcttgatgatatacctgccaagtatgttgatggagcacttatatgtgtggtgcatgattatcgaagatgctcttctgataaagggagtagtgtgtctgcagaaagttctactgttagcaaagtatgcctcaagatgtcgttggaaaatattgtaaaggacatcccatcgattactgacaagtcttggacatatggtgatttgatggaagttgagtcgaagatactgaaagcattacaaccaaaacttcatctagaccctactccaaagttagatcggctgtgtgaaagtccacttccaacanagctcaatttgccaagaaagcgattaaaaatatgccagagtttgctgntacttctaccaataaaattcatgggaag

SEQ ID NO: 57448 - DNA, 749 bp, Glycine max
  Clone ID: PAT_MRT3847_22889C.1
gatttttgtctcagcgggtttgtgttttccctgatatccatgtaacaacatagaagacacgtcgttttgtatcttcattttggttcctgcaataatggatttgatgttccctctgaaaccccactgtgttattctcaaggcaccactctcttcttctctcttgttcccgtttcctctcaggtttcgggctgtcaccgctttcaagcatgccaatattcaatgcgagcttgaaggcagacccaatggtgctctctctggtgacttcgaccctcgcttcattgacaggcaaaaagcactggaagcagcgatgaatgatataaacaacaactttggaaagggcagtgttacaagactgggcagtgctggtggagctttggttgaaacttttcccagtggttgtttgacattagactgtgctttaggtggtggtctccctaaaggaagaattatagagatatatggaccagaaagcagtgggaaaaccaccctagcacttcatgctattgcagaagtgcagaagttaggaggcaatgcaatgcttgttgatgcggagcatgcttttgatcctgcatattctaaagcattaggagtggatgtagaaaatttaattgtgtgccaacctgatcatggagagatggctcttgagattgcagaccgaatgtgtagatctggtgccatagatctcatttgtgtggattctgtgtcagctctcactccacgggctgaaatttgaggggagattggaatgc

SEQ ID NO: 57449 - DNA, 565 bp, Glycine max
  Clone ID: PAT_MRT3847_2288C.1
ctgtccttagagcacgttgtcctgttatgttttttgagagcacaggctgcgcgatcctaataccaggaattactaggcagagcaaggtgctagttttttattatacacagaccggcacaaatagtagggggtacacccacaaaatgaacaatgggcttcaataccattaatggggagtttcaaaagaatttaccattaaatagatgctgtttgtcgggtaactaggcaatatcttacggaggagaaaggtgagcttaccgagcgtactccaaaaggacctttttattcaccttgatatgcagactaactgaagcctggatccatggccccccacacgaacatgggaaggaagggggataccctgcgaaggggggaggtaaccctcgtgctccaaggacctatgcatagcagatcggaactcacaggggtagcttaaccaaactgctgatacgtccgagccaccgcacagacagaactgtcgtctctggctgacaaagtttgatccaattctaacaggggacccctcaccccccgtgctggtgcctgtgggagaaactgtaggtct

SEQ ID NO: 57450 - DNA, 444 bp, Glycine max
  Clone ID: PAT_MRT3847_22890C.1
gcggcagtttcccaatggaacccgtccgattgaagaccgactaccgctgcgtccccgctctgcagcagttctacaccggcggccccttcgtcgtctcatcggactcctccttcatcgcctgcgcctgcggcgagtccatcaagatcgtcgattccgccaccgccgccatccgctccaccctcgatgccgactccgaatccttcaccgccttggctctcagccccgacgaccgcctcctcttctcctccggccactcccgccaaatcagagtctgggacttgtccacgcttaagtgcgtccgctcctggaagggtcacgagggtccggttatgtgcatgacgtgtcacccttctggagggttgcttgctactggtggagcagataggaaggttctagtgtgggatgtggatggtggttactgcactcactactttaaaggtcacg

SEQ ID NO: 57451 - DNA, 239 bp, Glycine max
  Clone ID: PAT_MRT3847_22891C.1
atcaaccccaattacttcatgtctggacaagaggcacgtgagccttgtaacaacccacctgtggagcagcataatataaccagtgactacttttacaatactgggagtggcacttttgcttcttcttcccctttgaacaaccgttctcctaattccaccagctcttatgctgctgtcattgggaactccaggtacctcaaaccggttcagtcccttcttgaagatcttgttgatgttgg

SEQ ID NO: 57452 - DNA, 1340 bp, Glycine max
  Clone ID: PAT_MRT3847_22892C.1
cccacgcgtccgggtgaagcacaaggcgagaagacgattctacgggggagtggaagtagtagcaagtacgtcgtatatgtggttgatcttttgctggttgtttgttttgttccttccaattgtcagatctgaatcaccggactcactcttcacactcactcacactgaatggcttctgaaggcgaccatcaccaccaccaccaccaccatcaagatcacgatcatcatcatcatgatcatgatcaccatcatcatcacgatggagagggagagaccaactcatgggtaggtaaggatgggaaggtgtaccatagccacgatggtctggcgccgcattctcacgaacccatttactcccccggctacttcaccagaagagctccaccgcttctcaacagaaacttcaacgaaagagccttcaccgtcggaatcggtggacccgtcggtactggcaaaacagctctcatgttggccctttgtgaactcttgcgcgaaaactacagtctcgcagctgtgacaaatgatatattcactaaagaggatggtgagttcttggtgaagcacaaagcacttcctgaggaaaggatacgcgctgtagaaactgggggttgcccacatgctgctattcgggaggacatcagtattaatcttggaccgctggaggagctttctaacctcttcaaagcagatatacttctttgtgaatctgggggagataacctggctgccaatttcagcagggaattggctgactatattatttacataatagacgtgtctggcggtgataaaattcctcggaaaggtggtcctggaatcacgcaagctgatctccttgtgataaacaagactgaccttgctcctgcaattggggctgatttggcagtcatgcagcgggatgctctgcggatgagagatggagggccatttgtctttgcacaggtgaagcataagattggagtagaagaaattgggaatcttgtcttgcaggcatgggaagcagccacagggaataagcgtcattaacatttctttgaaaaacggtttcctttgtgttgtatattttcttagcatgtttagtaataactccagaaacatgatgttcacgacgtggattcgagttcttatgttgtgtctgttcctgcatgttacagtatcaagttcataaacatgttactacttggacctaatctgtatgtgcgactcatctttttctctgtttttttgttaaactccctgatggtgcacttgtttagaaaggaaaaaatgtactatgaaaatgaaacttattccatgcttgctaagagttagttcaataaaatggtgacacagttggaacc

SEQ ID NO: 57453 - DNA, 586 bp, Glycine max
  Clone ID: PAT_MRT3847_22893C.1
ccacgcgtccgcaagtacgtcgtatatgtggttgatcttttgctggttgtttgttttgttccttccaattgtcagatctgaatcaccggactcactcttcacactcactcacactgaatggcttctgaaggcgaccatcaccaccaccaccaccaccatcaagatcacgatcatcatcatcatgatcatgatcaccatcatcatcacgatggagagggagagaccaactcatgggtaggtaaggatgggaaggtgtaccatagccacgatggtctggcgccgcattctcacgaacccatttactcccccggctacttcaccagaagagctccaccgcttctcaacagaaacttcaacgaaagagccttcaccgtcggaatcggtggacccgtcggtactgggtgggtcccacacccctcttctcttctcccttctcctctccatgaaactaaactaaccctcttcttctttttttttttttttcattttcatcgcaatgcagcaaaacagctctcatgttggccctttgtgaactcttgcgcgaaaactacagtctcgcagctgtgacaaatgatatattcactaa

SEQ ID NO: 57454 - DNA, 555 bp, Glycine max
  Clone ID: PAT_MRT3847_22894C.1
aggtccaagtagtaacatgtttatgaacttgatactgtaacatgcaggaacagacacaacataagaactcgaatccacgtcgtgaacatcatgtttctggagttattactaaacatgctaagaaaatatacaacacaaaggaaaccgtttttcaaagaaatgttaatgacgcttattccctgtggctgcttcccatgcctgcaagacaagattcccaatttcttctactccaatcttatgcttcacctgcacatacatatgcaaataaagttaagagagaacaagattcccaatttcttctactccaatcttatgcttcacctgtgcaaagacaaatggccctccatctctcatccgcagagcatcccgctgcatgactgccaaatcagccccaattgcaggagcaaggtcagtcttgtttatcacaaggagatcagcttgcgtgattccaggaccacctttccgaggaattttatcaccgccagacacgtctattatgtaaataatatagtcagccaattccctgctgaaattggcagccaggttatctccccc

SEQ ID NO: 57455 - DNA, 335 bp, Glycine max
  Clone ID: PAT_MRT3847_22895C.1
gggatttcatcgaagacaacagtgatggattgctcttaggcgcgggctgttttggattctaagatgaaccacaaggatgcaggaatgtgcgacaacttaaagcttgatgttgctgcacttatccttggttatcatgacgattgctcctacgcagatcaacatcgttctcacatttgtgttcacgacattaatagggcgcgctttctttgcaagccaaaacctcgctaagtcacacaaagccagcctgtagttacagcagtttggaacagtgcacagaagctctgatcacgtaactatgctggagtgcatgaagcaatccgggcatttaattggac

SEQ ID NO: 57456 - DNA, 387 bp, Glycine max
  Clone ID: PAT_MRT3847_22896C.1
aaaataccccccacctccacacatcattacgaccttttgatgaggtgtggttgttttcaaaatagggagatctttctctgctgagatggtcatgcgcaccttcctcttattagatattgcactctatcaccccaaaggaatcacaaccttctgagcgtgcataggataccgcatttccccaagatcccgcccttacctttgtgacagaaaaagctggcatccgagccttacctgccatttctaccttttcagagatttccatgagaagatctaaaccctttgaccgtatgctactggctataccgctactagatggcattaaggtagtttgggcactgacaactctccttttcaaaaaccttgttatgaccacattccttttttggg

SEQ ID NO: 57457 - DNA, 2126 bp, Glycine max
  Clone ID: PAT_MRT3847_22897C.1
ttttcggttaaaacgagtggaatcatcatcatacatgtcacaccattggctccaaggcaccatgttttacacaagtaacaaaccgcatgcataattggcgtacccaatccttcgtgactcgcacagcaccaagtggaaaggaacccatctaaagtggaaccaaataattatcacaaagaagccaagtccatattgtaggaggaatattacactatttggaaacacagatcgaatataggcaaacacttagacaactactcatttcctaagtttaaagaaccgtctttcatcaactttaagctcaagctattgaatcttccacgcgagtaatgccttgatgcttttctccaatctgttccagttttcatcatagcaacaaattcatcgtagctgatacgtccatccttgtccgtgtctacttctaggaaaatgtcattcgctacatctgtacagtcatctgctccatcttccatcaaagcattccgtagctcatctggttcaatatatccattcccatctttgtcaaaataggagaaggccttgtgaagatgatcgtcattagccatccttcttaaatgaagggaaacagcaacgaattccccgtagtctagtgttcccttaccattactatctacagcttcaataagcaactgaacttcagactcagccagttgagacccaaagtttcgaaatccagcttttagttcttcaatggaaacaatgccatcattatcattatccatcttcttgaacatatctttgatgtcttcaacttcttcattggataagaaatcagcaatgaccctaagggcttttcttttgaatctgttcatcattgaaaattgcttaagccttgacttgacaacatctccaagtggaacattaggagccttcttagcattttgaatccagggatgctcaagcacttgtttggcagttaatcgaagcttggggtctggttctaacatttgcctaacaaggcttttagcactttcagaaatactgggccatggttcccttttaaaatctataagtcctcgaagaatggcctgtgcaactccttgctcagattcagcccaaaatgggggaacaccacacaataagatgtagagaattactcctgcactccatatatctatttctggtccataattccgcttgagcacttctggagccatataatatggacttccaacaatttctgagaacctctcacctggcttgaagaatatggagaggccaaagtcaatagccttgagcggcgaattctccttcttgttcgcgaacaagaagttctccggcttgaggtctcggtggatgaccccgtgcttgtggcagagctgcacgacctcgacgatcgtccgcgtgacggcggcggcggcgcgctcggtgtagtgcccgcgggcgacgatccgctcgaagagttcgccgccctcgcagagctccatgacgaggtggacggcattgtcgtcctcacaggcctcgcggagcgacacgatgctcgggctctccggcaggtggcgcatgatggcgacctcgcggcgcacgtcctcgacgtccacggctgtccggagcttcctcttcgagatgctcttacacgcgagcagctcgcgcgtgtcgcggtcgatgcagaggtacgtcacgccgaactcgccgcgcccgagctcgcggtccacgaggtaccggtcctcgatgttctctttcggcacgccggcaagcaccgtgatcggggccttctgcttggcggcggcggaggcggagccacctccgccgcgcttgccgtggtcggcgttggagaagctcgatttgacgtcctcgcgggccacagcggccggggatctgcagcagttgcccatgggagcagagatcgcggcggaggagaggttttatagtaagaggctggaggcgtgctagggtttcacatcataatgcggaaaccctaaccctagaaaaaggaggtgatgaaagagtgtcgtggttttgagagaaaaaagagtgaggttgaagctggtgactggtgatggagaaggagaagtggaaatgcagctgtgagcgaatgaggccaagtgggtgtacggtaacggctggggatgcgcggacgcgtgggtcgaagaaggagtccggtg

SEQ ID NO: 57458 - DNA, 287 bp, Glycine max
  Clone ID: PAT_MRT3847_22898C.1
gcttacactaatatgatgattcttattgaacaacaggtgaatagttcgctgatcaaagcaacaaatgcccttagatatacgggaacacacataatattacggatggaaactggtttcataacagagtcttgcttcccctttgcagggggatgtattattctattacaaaattcccaagcgtgtaaaaacaacatgggaacggggtttgaaaataatattccaaacagagaggtgcttgcaacagattttatagccctgtttttttgatacccctttttattagttaa

SEQ ID NO: 57459 - DNA, 232 bp, Glycine max
  Clone ID: PAT_MRT3847_22899C.1
cgtcaggcttattccccaatcaatgaatggccttgcatatttagatgaagaaaaggccatgttctaggtgtccatccctctgctactgtgtagagtattattcctacctaccgtcatctcccttactacacaccttcaactatcctattcatattaacaatctctctgccaaggagcttaaacaactctctgatgaactgcgttcttactttatttttagtgtttctagaac

SEQ ID NO: 57460 - DNA, 350 bp, Glycine max
  Clone ID: PAT_MRT3847_2289C.1
aaaaaaaaaaaaaaaaaaaaaaaaaaattaaaaaaaaaaaaaaaaaaaaaaaaagaaaaggaaaaaaaaaaaaaaaaaaataaaaaaaaaaaaaaaaaaaaaaaaaaaaaaaaaaaagaaaaaaaataaaaaaaatggggctgccgttttaggggttcaaagttttctttcccgtgattgcaaggtcaaagctttttttttggggcccttaaattaattaaattggccgtgtttttaaaacgtttagattggaaaacccttgggtttcccaaatttaaatgcttaggataaaatccccttttgtccgcttggggaattgccaaaaaggcccgcaccaatcgcctttccaa

SEQ ID NO: 57461 - DNA, 737 bp, Glycine max
  unsure (1)..(737): unsure at all n locations
  Clone ID: PAT_MRT3847_228C.1
gactgatatcttcatacgtncgcgtaattgcagggtgttgttcccttcatccgtgaaaaaaaaaacaacaaagtcgccacaccactgccggcaactttgtcaatggcctatgctggtgccctatttgctgatgcttgccttaagggcctcaatggagtcccagatgttgtggagtgctcattcgtgcaatccactgttactgaacttccctactttgcttccaaggtgaggcttgggaagaatggagtggaggaagttctgggcttaggacctctctcagattttgagcaacaaggcctcgaaagccttaagcctgaactcaaatcatcaattgagaagggaatcaaatttgccaaccagtaattgaacatgttatcacatacgtgtctggtaggctaatgttaatgttattccttcaagaaccaaatcaaattttgcaatctcagaaccattgttgtattgttgccggcagtggtgtggcgactttgttgttttatttagagtaggtatacgccatgatttaataatttaagtctgagagctttttgttgctaaagagattcaacgatcttataaccgggtttaggttttggccattccattaataatggtcccttttaactgtgtatggtttcacgtaatgtaattgcagggtgttgtacccttcatccgtgtttgtttctctttctttcttatgaaaggttttaacttttaactagcttattttcttacagtgc

SEQ ID NO: 57462 - DNA, 277 bp, Glycine max
  unsure (1)..(277): unsure at all n locations
  Clone ID: PAT_MRT3847_22900C.1
aaaacggaaacgcgaagcaccggaaccccaccgaggagcggcgaaccgaaaccaaacggaaggcaacgccacggccaacagagccaacccgaaacagaaggaccaccagcnaaaaaaggcacagcgaggcccgacgcgagcgggagcgcacagcaacgaaggcaggggacaagcagcccggaagcactacgacaccggccgcggcaacaccgagacgcgggccgcgaagcccgggcaagaagcggcgggcaaaacaaccaaacggcacaagcgccac

SEQ ID NO: 57463 - DNA, 270 bp, Glycine max
  Clone ID: PAT_MRT3847_22901C.1
tactcgaggttttctttttgtttttatatgacgacaaaaggatacattatgcttagaaataaagacaactcacgtgttattctcctgcggagtagtaggactagcaggaaaaaaaacttctttggaggtaacattacataaaaaaaaacaggatggtatggcagggggttgtataatattttttgtacaacagaaaatggaagataactcttcttgacattttttggcgtgtccacatgaaagataataaaaataaacctcaagggtaga

SEQ ID NO: 57464 - DNA, 689 bp, Glycine max
  Clone ID: PAT_MRT3847_22902C.1
gaattcggctcgagcaaatacgaaattccaccgagtgcttctagttctaccaagttagacaatcagcattgcacctaaaccctggctttctccgctttaatttctcgttctctcgccatcaagtccatatacatcgttccagcatggagaagataaaaataaaactactcatgaaggatgaaacatttctccaacacccttttgttcttgctgttgttctggttttaggccttgttatgatggacccttttcatctgggtccagtgtctgagcatgaattcagacccgtgaagcatagcattgcaccataccaccaagtcatgaaaaattggcctagggacaacatgagcagattagcacttcatgggaaatcagaattcaagaatcaagtctttggaccagagtcactcgagttcgatcacatgggtcgtggcccctacactggtttagccgatggacgcgttgttcgatggatgggggagcaacttggttgggaaacatttgcagttgtcacatctaattggacggagaagctttgctttaggggcaatgattcgaccactgcgaagcaatggaagcatgagaaaacatgtgggcgtcccctaggcctaagatttgacaaagtgaatggagatctatacatagcagacgcatactatggacttcttgtggttggacctaatggggga

SEQ ID NO: 57465 - DNA, 389 bp, Glycine max
  Clone ID: PAT_MRT3847_22903C.1
ggcttattatatgatacattgcattcaagattcatgttctatcaactgaaattattttgctactgttgttttgttgttttgtttaagactttgtattttcttctcatttattttattttattttaattttttctaactgtcttagagagaaaaattcactttcttcttgcatagtcttttctgcagtagtattttgtttatctaaatgtccgccatggatatgattgagtcattttctagtaagcctgaaaaatttacgggtgaaaacgcaatgcattatactccattaaatttttttattacattatttcatttccttaaattttaaattagtgagagattgttggaaaatatatttaaaatttaaatattttctttatcaattatgt

SEQ ID NO: 57466 - DNA, 460 bp, Glycine max
  Clone ID: PAT_MRT3847_22904C.1
agaagggctatgccctttctttactcagaagggccttatgccaagtgccaccgaacaaggtgttattcatttgaaacatcttttttcccgaatacaagataatattcatgtcaatttcgatcatttctataggagaaaatcggcatagagagattttatcttatagaaatgattgaaaaatacattcaattatgtcctcgcgtatcaaatattttacttttgatatcgatgcgtgcgatttctttgcagcatttaatgtatgagagacagaagactatcacttacagttttatctgttgaatatgtggtttcactttttttgatgattcatgaagtactagtatttgtggatacaacaatcaaatgattatcagttaaaggaccgaagggtgaagcacatagaaatgtataaaatgtatgagcctagaggcggtacctagacaaaatagatgtaagttca

SEQ ID NO: 57467 - DNA, 880 bp, Glycine max
  unsure (1)..(880): unsure at all n locations
  Clone ID: PAT_MRT3847_22905C.1
ctcgagccgaatcggctcgagacggctgcgagaagacgacagaagggggccaaaaaaaagaagaaaaactcaacccccaaattgaaggggaaaaaaaagaagaaaaaagcactttaggaaacgcaggttttggttcgattgttttgtgcagagtgcaaaatcagtgaaaccaccatgcttcgtagcttgacgaaacttcgttgtttcgccgccgttcaatcacgccaagttctatcacctccctcttctcgccgtctcctccaccactcgccgccgccgcaaccgcttcactccgcttccaatttccgcatttctcgtccttccttcatttcctcctcatggcctctccacgcatctcatccttccccttccttggttcaagtgcgacatgcttcgtccaaggagagaaagcgaaagccggtgcctccaaccgtttccaaggttaagaaaaccaaaatgaaatcttattcgtctttcaagtccaagtggcttacaccaaagtaatgaaaaagctcaatttttatgcttagacattgtaagttgctcatcgctacagcatgaaatgaggacctatcaggatatgcattttaactctgatcatttgttcactttcacattatagaatctgtagaacgagcaaattaccgagcaatttcttatttgtttgtttgaaacagttagaattgataatatttggaggtcatgcctattcaaagtggcatgttttagtggacaacgtgtgcaatattgttaacatcccgtggctgattcatcctttcttgtgatacattggatttcttcagttttgataaaatgtcggagtaataagggattaattaacaaaatcataaaannnnnnnnnnnnnnaaagctggcccgc

SEQ ID NO: 57468 - DNA, 768 bp, Glycine max
  Clone ID: PAT_MRT3847_22906C.1
tctttccggcaaacagaactcaatcaagattgtgtgtgcttctattctggtaaatctaggtgaatcaatgatgttattttcaatttaattaatcataaatagccccacaaattgtaggttatagaaagcaaataaggagatttggggggtgtattttatttttgaacattaattatcaagatgagggccaatgaagttagttgtaggccatagcacttacacgcttcaaagatataaagctgaacatggaatgtattttggatgaacatagattgatattattcatacatgatcatgatcgtgatcttgagttcataattgataagggattgtaattttgggttatgaggacaacaatcttctagaatttgtaaacactactttggctttcttccttgctatctagagattgcgtttatagaacgtatttgatgattttcaatgaagtttgtgctgataggattgaatttcaataaatgtaatacactggctggtttgtaggaataagagttaaatgcagttagatattttgaagagaaagtttttctgttaacagttgaagcaaccaaaatatagtttattcaaatcatctggatgtagaatgatctgttttgaaattagcaaatagattgataccatatgtctattagcatcaaccagacagagttcattgaatggtcgagtcaataattattagaaaatataagacttaatcaaatttctgtgaagattctatttttcagttcgagctaatacttaggttgtttt

SEQ ID NO: 57469 - DNA, 382 bp, Glycine max
  Clone ID: PAT_MRT3847_22907C.1
cctcgagccgctcgagccgattcggctcgaggagatatgatactcaggaacatcctctattttcaactttggacacagtgcataaagatgatttccatcagccaaatttccctggtgcttccatcaagaaaggtggtccaagagagccatggcatgacattcattgcaagttagaagggtctgttgcttgggatgttttgtacaattttcaacaaaggtgggagaagcaggttggaaatcagctcctattctcttcaagcaagcttgaataagtaccttggtccttcaatccacgggggggccaccaaaggaaaatgaaacatggaaggttcagttgtccaaatccattgaggggggggctgtttttggttttccccctgcc

SEQ ID NO: 57470 - DNA, 271 bp, Glycine max
  Clone ID: PAT_MRT3847_22908C.1
aaaaaacatacgagagaacaatgacacaatgaaacaatatcactaacacaaaaacagtaactacggaccggaatactagacaaagcagggcatggtacaccccttcaacattcacaactaagaattccttgctctaaagtgcctgaacttgacggatctcataacaccatatgatgtttgttaaaactcacttaaatcaaagaccttgctcgtggcaatcatgcagcttgtcctgaaactcctgctgaataccctggttatgctgctactc

SEQ ID NO: 57471 - DNA, 476 bp, Glycine max
  Clone ID: PAT_MRT3847_22909C.1
tgcaacagtctgtgatgagctgaaggtagtttgcagccaaaaaagatattgaagcaagcactgtagaaggaagataaaggtaggaaattcacaagagtccagctttttgaattctgaagcaaaatcactattgaagttttacacacctcagtgtgttttttgctttaagtggtattgaactctgttctgcttcctggtattttctgcctctgctggctctacttcaggactggaccatagtccaacatatctgctccaatagtttagtatatcatcaaagttaatattaaggtactcatcataggagtaatatagatccataattcccattaacgaacctccatagttgattcaaataagactagatgactgtggatgaagtcggtagtagctctgagtggagcaaagaacaggataaagcatttgaaaatgccttggcaatatatcctgaggatgctttaaaccgatgggagaag

SEQ ID NO: 57472 - DNA, 451 bp, Glycine max
  Clone ID: PAT_MRT3847_2290C.1
gattaccaagattggattagattaacaaaatcagattaagtcgttgtagacttgtggttataattcatgagtataggacaaaaattgttgactacctgcacttcaagaagctggcttttgaactctgaaaaggaaatagtattaattgtttctgctggatattggacctggatgactcaacagcaatcataagttagtaagccatgtcttatctgtaacaaccgtgatcacatgaatcagacagcccattgcagaggatataaatgatagaacaatacagatacagatgttcctggaccaagtggaaaaatataatccattttttatttcattattgaagcacttttccccatttctgcaattaccctgtgtttggatggcggatttaaaaattactcggagatttacatacacagcattttgattgccttgatttaaatttcttttattt

SEQ ID NO: 57473 - DNA, 2366 bp, Glycine max
  Clone ID: PAT_MRT3847_22910C.1
ggcaacagtctctgatgagctgaaggtagtttgcagccaaaaaagatattgaagcaagcactgcataaggggagataaaggtaggaaattcacaagagtccagctttttgaattctgaagcaaaatcactattgaagttttacacacctcagtgtgttttgagctttaattggtattgaactctgttctgcttcctggtattttctgtctctgttggctctacttcaggactggaccatagtccaacatatctgctccaatagtttagtatatcatcaaagttaatattaaggtactcatcatataagtaatctagatccataatttccatgaaacaaaccagagtttgacctacattgttgaactgtcttataggccactctaattgttgtgctgcggattgttccccacctcaaaccagaccactgctgcctgcttggactgaagccgcaggtcggtcattaactgcagctctaattaaagattgaagcattgcacgacacagataatttacggacggcacggtgacgtggaatcttcctccaatagcaagccatgccatattttattttattccttcctcctaggtgttctgagatagcaggggtaccgaactttgttcttgttccagttcttttgtgcacatcatctgctcatttatagagctccgcatccggtccctatgtacatagagtagagagcgcttgaaagaaggctaatcaaagtatgcaccatgggacataaggaaacctttcctctagatgctgtaacaaacctacatagttgattcttataagaagagatgactgtggatgaaattggtagtcgctaccagtggagaaaagaacaggataaagcatttgaaaatgccttggcaattcaccctgaggatgcttcagaccggtgggagaagattgcagctgatgtaccagggaaaaccttggaagagattaaacaccactatgagctcttggttgaagatgttagccagatcgaatccggttatgtgcctttaccatcttataattcttctccagagggctcaacaagccatgctagtgaagaaggagctggcaagaagggaggccactcttggaatagtaataacgaatctaatcatggaactaaggcttcaagatcagatcaggaacgacgaaagggtattgcatggacagaggatgaacacaggttattcctccttggcttggaaaagtatgggaaaggtgactggcgaagtatatcaaggaactttgtggtgacaagaacgcctacacaagtagcaagccatgcccaaaaatacttcattcgtctgaactcgatgaataaagacagaaggcgatccagcatacacgatatcaccagtgtcaacaatggagatgtttcagcacctcaaggaccaattactggtcaaacaaacggttctgcggataattctgctggaaaatcaaccaaaccagccccaccagccccaactgctgccttgggtgtaggaatatatgctggtcctaccattggacaacctataggaggacccctcgtatctgcagttggcaccccagtgatgaaccttcctcccccagcacacatggcatatggtctcggagcaccggttcctggggcagttgttcctggagcaccaatgaacttaggtcctgtgccataccctatgccacatacatctgctcgtagatgaagttatgttcagaggcctaatgtacaaaaagaaaacagcagattagaaggcttatgaatttaatgtaattctttacctattcctatagctgcttatgtgcaacagttttatgctccatcaattatttcaaataagggatactaagaagcattagaatgtatctacattggctgccatggatggaatatctgacagccttgacataccacagcgtgaaagtaatgttgtcgttagtcatataaagtggcccattctgtagatgaaggttctgtggcaggcttatgaatttaatgtaattctttacctattcctatagttgcttatgtgcaagagttttatgctccatcaatttcaaataagggatactaagaagcattagaatgtaattgcatcggcttccatggatggaatatttgacacccttgacataccccagcgtgaaagaaatgttgtagttagtcatataaagtggcccattctgtaaaggaaagttctggggctttggtaggttattgttgtattttgatcccttggtttctgattttccgtagggttttttaaatttcccatctagcttcccttattatcagattagttgctatgattgccatgatatattatagcagatatttgtccattttggcaacattcccatcaaaatgtttcccttaag

SEQ ID NO: 57474 - DNA, 153 bp, Glycine max
  Clone ID: PAT_MRT3847_22911C.1
gagctattatttcgcgtgcacgcgcgcggctgctagtattgctggtggtgcatgtgttcatggtggctattttgcatgggctggttgttgtgcaatgtcaagcgggtccgatgcatggtatctgccaccatttcctaaaaaaagaaatagatg

SEQ ID NO: 57475 - DNA, 463 bp, Glycine max
  unsure (1)..(463): unsure at all n locations
  Clone ID: PAT_MRT3847_22912C.1
acaaaactaaaaattaatattttattaaaaaaattacatacacaatctccttgcaagacctatacaaaaataaaacaactaaaacatactttaaatctaaaaagaataattattactggattttattaaaaaaatcacatatatagataaaaaaaagtcatatatattaaaaaaaaagactgcatataattctcttttaaaagtaaataattcactttaggtcctctgttgggccggttgtctccttgataattagatagattttaagagaccaaaattatgttcagactccggtgttcaatataccaaaattaatttttcaagtaccataggcagaaattgtttgtagccagaagcattcccttactanaatataaaaaaatataacgaagcaatttcctttgcatcttgttatcccaagtccttctttataatctttcttctggaattcccttcatctaaa

SEQ ID NO: 57476 - DNA, 764 bp, Glycine max
  Clone ID: PAT_MRT3847_22913C.1
ccacgcgtccgagcaaatatagtaccctcctctgttgccatctgttcttaattttgaagtctcatgaacctgcttctttcgttggtgtccttcttaaatatatttttagtaaatcccagacacaccccttttaaattgtgattttcacacccccttttttcaccgatcgtcttttgtttacccgttataaaaagttatagtgatctgattgtgttattgatatttcatacagaaaacaataaacttttttgtgtgattttaattgatttccatttgggtttattcaattatgattgtcttttaggtggtatgattttttttcttcagtgttgttcattgtttctgtgatccccggaagaacttagtgatcgaaaatggcttcaagggtgtctcccaatctcaaatgttggcagttcagaaccccttattattgtgattcatggaagacacctcgtgcagttccttcttctatactcaggcatgtgactgagaggaacaatgttatgccaccatgtgggttggtccataggtcaaggaatttgagggtgcaaagaggaaaacgtgtttactcatcactttttgatgactttcaccaagaggaaaggatgaatctggttcaggatggttgttgggatgaaaatggccatgaaatagcttgtgctgtctctgataataccccaaacaaagaactcaaaaatgacttctcaggcggaggttgttcctctgaggaatttgggacaatgaagcctgaagttttggagcct

SEQ ID NO: 57477 - DNA, 602 bp, Glycine max
  unsure (1)..(602): unsure at all n locations
  Clone ID: PAT_MRT3847_22914C.1
cggacgcgtgggttgccatctgttctcagttaccttacgtccgacgaacacttttgaagtctcatgaatgttgtccttcttaaatatttttcactaaattcctggcactcacaccccttttaaattgtgattttcacacccttccttcaccgatcgttttttcttttcccgttaccaaaagttatattatatagtgatctgattgtattattgatacagaaagcaatatacttttttgtgtgattttgattgatttctatttgggtttattcaattatgattgtcttttaggtgatatgatttttttccttcagtgttattcattgtttctgtgatccctggaagaacttgttattgaaaatggcttcaagggtctctcccagtctcaaatgttggcagttcagaaccccttattattgtgattcatggaagacacctcgtgcagttccttcttcaatacttaggcatgtgactgagaggaacaatgttatgccaccatgtgggttgttggtccatagatcaaggaagaatttgagggtgcaaagaggaaaacgtgnttactcttngttttttgatgactttnnnncanaggaaaggatgaa

SEQ ID NO: 57478 - DNA, 1592 bp, Glycine max
  unsure (1)..(1592): unsure at all n locations
  Clone ID: PAT_MRT3847_22915C.1
ttcggcacgagctttttaatactgttgaaattataacattttaggtattgactattgagggaggaaaatgtgaagagattttgaataatatactcttgttattgtcttgtgttgtatatgagatgcaaaacataaagcaacaacctttatttatactaatactaaactcttaatcctaatcaaataaggaaagaaattgtgaaatataaggagatatggaaaccaaagaaaatagggaaactaatcctaagagataatataagatgctctaaaatactctaaataattnnttatcctactggatatttttcgtatgttcccacttggcactcctttggatattctgcagcgactggtctccacattggaccgttgtgcatcacgcacatgctcattacctgttgagactgtagagcttatgcctcctcactgcagcagattttccttgacttgtttacagaagttattttctttgtgcagttattctaatgaagtcaattggaatatgacaagatctgaagtcagcaaaatctcaattacagtgctcatgaccagatgtgaatacatcttgagcaggtttctgacagatgaaaatggcttaggtgactgtccattaccaaaagcaagacttgaagaaattatttatgttctccaagaactggcgcatcttgtaattcatccagatgcagcatccagtctccctttacacccattgttgagaactgaactagcaagggaaaaggagaagcatgacaaccgtccccatctgtttgcgctattaccttccttttgtgagcttgttacatcaagagaattaagaatacgggagctggtgcaagtactgcttcgattagtcaccaaggaattgtctctggaaaagctcagcttggcgagtgaaaagaatacttccagataagcccatttaataagttgtttgcttcgaaatttttaagctgatgaaatacctagcttttcttcttttacccttgtctaggattgtatatttttttttttctgtagactagactagaaccacctgtaggaggttttcccagtcttttctctgttgcctgtcataaattatggtcatccatactttctcagctccatcagctacatgcccatgattggcctacctcaagttacgacagatcaaagttttccagtagtccattgttaaaccgtttgaggttctccaacccaatacaatttatttggggcaaaacttggagagccataaatctgggaaaaacaatggagcacctgacagaattgtgtggtttaccagatattctaaagacaggaaccgctaaggaagaggaagaaatctgttaaaatggtcctagtaagaggatcaatatgccccttgcattgccaattttgttgtaccaaatcacactgaaatgagtctgactttgagcccaatttttttaaactcgggcccaggccttatttttgtttgtttgttagtgctaaccttcttggtcctttaaatgctcaatgtatgtattaatatcttattgattggagactgagaaacaaaaaaaaattatatttggatctagagaatcaaagcttaggtaggcgtgcat

SEQ ID NO: 57479 - DNA, 179 bp, Glycine max
  Clone ID: PAT_MRT3847_22916C.1
aaagccatgcctacaaaataaaaccccatggggactggtacacatctggacattaaaccccaccaaaaacagaccaccagaaccagaatttggaggaaagtcctggaagatttaatctttttctggcccttaccaatctttttaaccagttgttcattattctttttaagggctggaag

SEQ ID NO: 57480 - DNA, 392 bp, Glycine max
  Clone ID: PAT_MRT3847_22917C.1
ggctaactgctcactagacgcccttcgctcttttttttttttttcttgcaatatttttattttcaaccacgaaagtttaggtcttgatgatggctattggctataaacaacatgaactcttctgctatacaaataatgacaaaaaaagatattcagtccactactatacatctatcggaagacacttctctccctcagacacaggaggttcctttggcaccccactgagtgaatttacccaacggctatcccaaataatgattgactcgaccaattgacatgtacgtgatatatgaggaacttgtctccacccagtaaacacaaactttttatttgttctgagtgaatggtactgtatttacttttccaaagccaagtttcttttgaagatg

SEQ ID NO: 57481 - DNA, 343 bp, Glycine max
  Clone ID: PAT_MRT3847_22918C.1
cgacatatgtcatcgaaagggtctcgatgacccacgatggcacgaaagccgggatctttcacaaaatggattcctattccaagggtgcataacctcatggataaactgacacttaccccacgatttgggatccaattacgtgccttaggatgtatctctaacgaactttggaatgcaataatatctattgatacagatacagaagaatgggttctctattgattcaaacgctctacctacgtgatcgggatagaataagaggcagaaaccgatgatttcacatagatctttaggtcaaacaatcgatctgaggatgatcgaactattagctcaatgatcaaat

SEQ ID NO: 57482 - DNA, 335 bp, Glycine max
  Clone ID: PAT_MRT3847_22919C.1
ggaaaaagataaaacaaataacttaaaatacttggaactgggtttaaaaatttttttaaatttcaagaaactacaaaattttgggcgggggtttgacaacaatctttgcccacaagaaaaactaggccctccgcttctatgaattacttctccaggggttaaattttcaaggaacaggggcctcaatttttttagcagccaaaactggggggggggggggggattcttcttccccccttggagaaaggattgggacaaaatcaggggggggggttttaggaccctgtttccccttaggatcccaaacaaacttggtctttaccttaatggcaaaa

SEQ ID NO: 57483 - DNA, 531 bp, Glycine max
  Clone ID: PAT_MRT3847_2291C.1
ttttggagttggtcttgctgtgaaaccagtggttttgaatcaaattcaatctagtcttgtagatgtaatgacaaaggtgatgacaaagattggacttagtccaaatttaccctttagtcagggtgcatttccaccatccttgcaaagtgctgcaagcacagtcaatacaaaccaaagttctgctggaagcatgatgcagttggcaactaaatcagttgatcaagtatctcaaggcctgccagggtctcgacctgtgcaaattggttcagattttgaaaataatccattgagagtcactgcggttgactctgcatttggcagccggactgagaaggtcattagcaactttctgcaaaatccactattgaagggagaaggaggaggacttgatgaagcagaaagttcaagacatagtatggagatggggcaggcaggctaaaatggaggtgaagcagccttggtggaatctagtagcttccgagctacttgagttatggctcttgggtggaatgtgattcttgaatatattgc

SEQ ID NO: 57484 - DNA, 263 bp, Glycine max
  Clone ID: PAT_MRT3847_22920C.1
ctcgagacgttgctgtcaaagcagcctatgaaataaataatcccaactctgcctcaagtaaaccggctgactccatgtcatggcttggattaggtgctcaagcaagacaagtctaagtgcatttgcagtgctcagtagttttggactctctgtcatctacatttgactgtgtagcgcgttgggactaaataactacgagtctactatgactctgatagctctaagcattagtagtaggtgcaggcttcaagtatgatgattgc

SEQ ID NO: 57485 - DNA, 482 bp, Glycine max
  Clone ID: PAT_MRT3847_22921C.1
ctttcactttcatttttctggttctgatttagggcacccgaactcggtctttgacttagaactagctctgatttgctccttaaactctaggtgagtgttgctcctatggttcttgtgcaactaataggtgtgttgaatgtgggaagagttctattgcgggtgtgctttctacaattaaagggccttgggctatcatctactagcaggtaacaccaagtggatagttcgaggactctttggtttggctgagatgcatttggtaggcgaagcctccttgttcactagccgacagtagataactcaacctttctgctttcttttgtgtcacctatttcaccagttcaacaggcctctggctcaattcaacctgaaattccaatgccagctcatattttttctaaatgctttaaaggaatctgtgttatagcgcacttcaatgtatactatttatcagactgtgaatacaagtggtagagctccat

SEQ ID NO: 57486 - DNA, 1748 bp, Glycine max
  Clone ID: PAT_MRT3847_22922C.1
tttttaaataacaatgtccaattaaattcaaggatccgatcctatccaacataatttgcgtccatacaaataaacaatatttgcctgtataacactagcaacagaaaatatattgccataaataaatccggggctagattcattaattttgaatttaaaaaactaaatcaaagaaggaacatgaaactaatcatctgatgtaattgtttcatgatcagattccaccttggaccacttattaatacgattacgagctttagttacctgttcgtcccaatcagttttgtaagtgattacagtcagcactacggtttgaataaatgttccaaacaacattccaatccaaatacccttgacttgcaaattcaaaacgttaccaagcacaactcctacaggaatacctatgatgtaataacaccctatgttcacatatgctacaatactttgccaccctgctccaatagcaacccctgagagtacaggttgaacattgtttagtagaatagagattgccaacaaaggtgacaagtccccaacggcatcggccacgtctttatttgaggtaaatatgtaagcaagttttccccttaaaaataagaaaaataagaagagaacaaatccaatggccaaggatgtaagcactgtcacaactatagagaactttgcagctttggagcttccttttccaagctcgtttgccactcgaacacttgcagcagccatgaaaccaagtgatatcatcatttcccatccattgatgttgaggcatatagatagagcatcaatttggacctcagcattttccatgttgcccgttaaaagaaccaatattgtgttgtaccagagctcaagacataacatgataccagatgaaagggaaagcttgacaacaggccaaagatctttgaatgccaaaaatgagaaacctttccatgtatcggagcaccaaccacatgttataaatattagttgaccaatattaggaatccaaaatgccaaatttgttgaagtcattgcaccaggaatctcgagcttgaattgaattgtcaatagccaagagaggaacaaatgaataactattgagaatgctgccaagaaagaaatgatggtatttttgctttgagattgcaggaaattctggcaagtgaaagaggcaataaaagcaaatatcataggaattgaccaaagagaaatatttcctgccacttctgctatattctcatcttggcctaagagcatcaaaatcggcctcgtgaagatgaacaccggaagaagaaagagtgaagttatggacataactatccatgatctttgaagatgcactcccatcatgacatattcttttgcaccgtatgcttgtccgcaaagtgttgacaacgcactcgccattcctaacagaattccattggcaaagcgtatgagaacagtgaacacaagagcataagcagcaagttcccttgaaccaatatgaccaataaatgcttggcttataacattgataccaaaggtggagaaccttgtaaaaatgcctggtgctgccactacccacatcaccttgctctcattccacaccctcttcaccaatgataattcctcttcttcttgttctgatgtttttttctctttgatcaacaacttctccttcacacccccctgcatttctctattttttttatttttttttgctttgctagtagaaggaagaacaaactaagcaagtgatgagggagtgtaggcctgaatttttt

SEQ ID NO: 57487 - DNA, 267 bp, Glycine max
  Clone ID: PAT_MRT3847_22923C.1
ctaactaacggcatattctctttctctctccatgccgcagcggatgtgttgatcgaccaagtcacctctctcgcattcttcgtagttccaagatccgaactccgagattccgactctgagaaaacgagtaatggtggtgaagatgatgaggtggcggccatggccgcctctcctctcgaagaagttccaagtgaggctgctcgtgcggaggctccagggctgcgatctgctgcggaacgctgcacgtgacggttccaaattggttct

SEQ ID NO: 57488 - DNA, 396 bp, Glycine max
  Clone ID: PAT_MRT3847_22924C.1
aaactaacggcatattctctctctctctatatgccgcagcgcatgctttgatcggccaagtcatctctctcgctcccattctccgtatttccaagatcccaacgcactgtcttatcctcccagattccgagtaatggtggtgaagatgatgaggtggcggccctggccgcctctcctctcgaagaagttccaagtgaggctgcacgtgcggaggctccagggctgcgatctgctgcagaacgctgcactccaaggttcaagattggtccttgagattcgctggaagggtcctaagttgatccttggctctctgcgatggaactccgtcgccagaaattttactaaagaggcggactttgaactcgacggcggtggcgccgccgtcgttcactggga

SEQ ID NO: 57489 - DNA, 411 bp, Glycine max
  Clone ID: PAT_MRT3847_22925C.1
aaacactgtgtgaatgcaaacataattcggctcgagctttagagtccaacaagttggttcttaatggttttgatgttgaagagaaaaatgatggttgccacagggcaaagcctactaagaaaaggaagtcatttaataaaagggaatgctctgatccagaaagaatcaatatcaagatgctggacgatttccaaaagagggaacagagaaatacaagagcacacaactttgataactgttacatttctcagcaggacattcaaactgtggacttggattctagagcttcgactcttgatgtctattatggggctcaacggaatgtgcttggagatgggcaattgcattccatgccaagccgtggttcacattatgaaatgcagcacagcattgcaagaccgcttaaggact

SEQ ID NO: 57490 - DNA, 1241 bp, Glycine max
  Clone ID: PAT_MRT3847_22926C.1
gcgagttacttcatttcattttggaactcaattaaggtcaacgttatgtgattcgttttgatgctctttcctgttggctggtgagaaaagataggctgcagaattgtgttttgcattttgggagaacaaaaagttcttactgttggaagatatgaaccttcgtgttgtcctagaaatagaatggctgttttgtgttttatcatatacctgttaaatttctcttggaaattaattcaaagtgttttcaagtggggaaactgggaatgctataggcttttttttttttttttgagttttgattgactttctgtaaattacaggtgacagcatggggcggcgccgtctccgccctcagcccgacgcactcgcccgcacgaagcggccactatcaagaagtcgccaaaatgaacatgccccctaaagtgagtgctccatcgccgttcacgatcgtgaagggagctctggactcgcacggtccggttctgaagcgcagctacggcaacgaagaggtgagcatctatgtgatgcggttgttgacccccgaggacgaggattccgccatcgaccagctcttcatccacgtcgatgtctccaaacctcagcagaacgaatccttgattttcctctgcggtttgtacgaggatgctcttgggattcactctgtttccatgaggcccaaggtccaggactccggctaccttctcatcccctcccaatacaccggccctgtttttgcagaactagatgaaaagatgagagatgcgtttcacagttacattgaggagaactagatgaaaagatgagagattcgttttctagtaacattgaggaatgtggagtgaacgagagcctctttaaatttcttcaagcatggctatatgtgaaggaacatcgaaatctgatgcggtggttcaaaaccatgggcttattcattgatggaaagaagccagctacaggtgcttaaccctccgagagatcaagttatggattcaaaacttccaagtttttcaatttaaaattccctaaagtttcatagttgactattagtatatttattttggaggatcaatgcacccacataagtacacaactttaaagcgagtggtaaattttatcaatttaactatttgtgatatgtaatgtgattatgacaaatatatacataatatttaagatgatttttttttaagtagcaaaaaaaaaaaaaaaaaaaaaaaaaaaaaagcggccgctctagagga

SEQ ID NO: 57491 - DNA, 740 bp, Glycine max
  Clone ID: PAT_MRT3847_22927C.1
cggctcgagctctaactaacggcatattctctttctctctccatgccgcagcgcatgctttgatcgaccaagtcacctctctcgcattcttcgtagttccaagatccgaactccgagattccggtgaaccctcctttctctttatccttaaatatatcaacaaccacgacaacaaccttgaccttttttgtttccaccaaacaccattttttttacaacagactctgagaaaacgagtaatggtggtgaagatgatgaggtggcggccatggccgcctctcctctcgaagaagttccaagtgaggctgctcgtgcggaggctccagggctgcgatctgctgcggaacgctgcacgtgaaggttccaaattggttcttgagattcgctggaagggtcctaagttgacccttggctctctgcgacggagctccgtcgcgagaaactttactaaagaggcggaatttgacgtcgacggcggtggcgccgccgtggttcactgggacgaggagtttccgacgttgtgcaatttgaacggttacaaagacaatgtttttcacccttgggagatcgctttcactctctttaatggattgaatcagaggccgaaaaacaaggttcctgcaattggaaccgcattattgaatattgctgaatttgcatcttcaactgatcaaaatgattttgatttaaacattccactcacactaactggaggttctggggagcttttctcctttact

SEQ ID NO: 57492 - DNA, 242 bp, Glycine max
  Clone ID: PAT_MRT3847_22928C.1
aacaagaaaccaaggggttcattgaaactgatggaccggtcaatgccccagacaacaaacatacccggaaacttaggcaatgggattcccacaaccacaccaatagctgtggcaggtgatctgatgccaaaacccacaaagaatgctgcaagccgaatccccaaagcattgccaccaaaggacaaccccaaatctgagaacggcatcttgaatctaggggaactgcaacccggaactaaaaa

SEQ ID NO: 57493 - DNA, 465 bp, Glycine max
  Clone ID: PAT_MRT3847_22929C.1
gaaagaagaaaagacaaaggaataacatagatgttgatgatgcttcacgcttgcgaaggagaacaaggtacctcttaatcaaaatgaagctagagcagaaccttattgatgcttactctggagaaggttggaaaggtcaaagtcgggaaaagattaggccagaaaaggagctactacgagcaaaaaagcagattttaaaatgtaaacttagtattcgcgatgccatacaccagctggattctcttagttctgtgggtagcatgaagattctgccattgctccagatggatctgtttatcatgaaaatatattctgtgccaattgcaaactacatgaagctttcccagataatgatattatactctgtgatggcacttgcaatcgtgctttttaccaaagatgtctcaatcctcctttggatactgaaaatattcctcctggagatcaaggcttgttttgcaagtt

SEQ ID NO: 57494 - DNA, 231 bp, Glycine max
  Clone ID: PAT_MRT3847_2292C.1
tatccacatacactcaacggggtgtttctttcaaacagtgcgcacaccccaaatttcatccaatcattttacttactctacttatcaactatctctaatcaagaaatctcctacaacacatttctaattacaccttatcccaccgaccaaaactccatttcctataccaatatactcactaccttctcactcctttttttatcaaacactttccccccattttttaattaa

SEQ ID NO: 57495 - DNA, 1216 bp, Glycine max
  Clone ID: PAT_MRT3847_22930C.1
acgagcccacccacgctatctctctgttttgataacaagtctcaaactaacggcatgttctctctgtctgtatatgccgcagcgcatgctttgatcggccaagtcatctctctcgctcccattctccgtatttccaagatcccaacgcactgtcttatcctcccagattccggtgaatccccccttcccttttaatcttaaatatatcaacaaccacaaccaacaaccttaacctttttgtttgtttctaccaaacaccattttttttttctataacagagtaatggtggtgaagatgatgaggtggcggccctggccgcctctcctctcgaagaagttccaagtgaggctgcacgtgcggaggctccagggctgcgatctgctgcagaacgctgcactccaaggttcaagattggtccttgagattcgctggaagggtcctaagttgatccttggctctctgcgatggaactccgtcgccagaaattttactaaagaggcggactttgaactcgacggcggtggcgccgccgtcgttcactgggacgaggagtttcagactatgtgcaatttgaacggttacagagacaatgtctttcacccttgggagatcgctttcactctctttaatggattgaaccagaggccaaaaaacaaggttcctgcaattggaaccgcattattaaatattgctgaatttgcatcttcaactgatcaaaaggattttgatttaaacattccactcacactaaccggaggttctggggagccttctcctttactctgtgtgagtctctttgctgatttcttttatctcatgccatataggaattcctgtatataggctggtccaatttacagtcacaatcattaaaattctagctttcaggttttgtcttggattttgattgtatgcagatatcaataagtttgatggagctaagcgtagctcaagaaagcttggagccagttcagagatctatagtgcctgtgccatcgccctctgccaagtcgggagaaacagccttggcagaaaaagatgagctttctgcaattaaagctggtcttaggaaagtaatgattttgacggagtttgtatctcccaagaaagcaaaaaagggttgtcgtgaggaagaaggcagtgaaggaaggtgctctaggagtgaggatggtgaatacaattatcctttggattctgagtcacttgatgattctg

SEQ ID NO: 57496 - DNA, 471 bp, Glycine max
  Clone ID: PAT_MRT3847_22931C.1
gccacacctacaccaacccatgataaaaataaaagactgctcaattcctgttccctcaccgtttctgaacacaccttgtcccacactccccatcatgtcccaacaagggctgctcttaaaagccccacccttcaaccacagtttcaatcttgagcctttgcaaaccatgtagtgagggaatccccatctggatctggcttcaatgcccccataagaaaaggggtgttggctgtgcggtctaagtcaacgctggcagtgtacgtagtcttggcataaggaggaggagtgaaggttaaggcattagatcaaccctctccggtggtgttatggcttaccgtgaggggattgtatgggcgaccacagccaggattcaacgggccaagaactttgggtcgctgacccaagcatcagctattagagtgggtgtttccaggggaggaattgtatgcctcattaagagcctgcttccat

SEQ ID NO: 57497 - DNA, 473 bp, Glycine max
  Clone ID: PAT_MRT3847_22932C.1
caaaaaaaaaccaacatattgatattgacgagctcatcggttaacaaacacgctgactatctatctttcaagcaaaaactcttttcaactctctccaagttccgattaatgaattatatcattgaccaagctgcactcgaacacattcgtgctgcgtcgagtgttcagctgcatcaagttcctagatcaacctggtgagtccgcaggggttatcacaaactcacgaggcgtctggttcgaactcagcagtgttcccaaccaccaacaccaccacggccgaagtttgagttcatgccggagcggttgccagagtcgctagagccataagccttacgcgagttggattgctggccgtagccatgagggttaccagaggtaccgcagttgtcacgcgcggagtggtaagcatcgccggcgtaagacgagacgtcagggccagcgcgaccagaattgtaacggtcatcacgacggcc

SEQ ID NO: 57498 - DNA, 373 bp, Glycine max
  unsure (1)..(373): unsure at all n locations
  Clone ID: PAT_MRT3847_22933C.1
taatttctcaacttctctgtcccttgttttttttccccctcatcttaattaattctgattcgtaagaggaactgaaactccttcaatctcttttttttcttttttctcggacaccatgattttcgatcaagggtcaatgcaatctaagtccaaccttgactgcttcctccggcgtacgacacctgttgtgccgtctcagtttcttcccaagcacgagattcgaaaccttaaccgtttgtggcacccgtgggagagagaagcggttgagtacttcactttgggtgatctatgggatcggntcccatgatctatgactgattcatacttgcaatggaacatgtagacttttctacctttcattaatttacacaca

SEQ ID NO: 57499 - DNA, 158 bp, Glycine max
  Clone ID: PAT_MRT3847_22934C.1
cccactacaacccattttcctaagtctaaccttctcttccttcacaactccattgactgccccttccactctactctgccccgtgagtcctctatcgcgaccaacgcgccaacagatctgcaatcccatccgaacagccaaccacacacccccccccc

SEQ ID NO: 57500 - DNA, 257 bp, Glycine max
  Clone ID: PAT_MRT3847_22935C.1
acgtttgaaggccactgtcagctatgtcacaatgtaattccagcttagcactgtcttttgacagttccttgtgtacaagagcacggtatgacggtctgacaatgctttatggtggagcaaggtatcaagcaactggccacgcgtttgctgaccgccatactaaatattcagagaactacatactctactctagtagtcattatcgttaaggggtgtaggatgcacttgctgtgacagtatatcttgcttatggctat

SEQ ID NO: 57501 - DNA, 1448 bp, Glycine max
  unsure (1)..(1448): unsure at all n locations
  Clone ID: PAT_MRT3847_22936C.1
ttagcacacatcattttctacgactggaatgctctaaacattcttaatattcccacactatacggaccatgttctcttcctcaacttccttctttctttgccttctcctcttctctgtaaccttttgtcatgttttgggggataaagtatttacaggaacatatggagtaaactacggtaggatagcagacaatctaccttctcctgagagtgtggttactcttctgaaagctgcaaagattaggaacatcagaatatatgatgctgatcgtcaagtcctgaatgccttcaaagggtcagggatttcaattagtgtttgtgtaccaaatgagctacttaaagagataagtgtgggagaggatcgtgccatgaattggatcaaacaaaacgttgaaccatatcttccagggacaaaaatccgtggcatttccattgggaatgagatattgggaggaggagatatggagctttgggaagctttggtgcctgcatctaaaaatgtgtattctgcccttgctaggcttaatttggcacatcaaattcaggtctcaactccacattcagaggctgtgtttgcaaattcataccctccatctgcatgcacttttagggaggatattctccctgtcatgaagcccctcttgcaattcttctcacaaattggcactcctttctacataaatgcataccctttcttggcctataagaatgatccccaacacattgacataaactatgctcttttcaagaaaaaccctgggatttatgatgccaagacaaagctacactatgataacatgtttttggcccaagttgatgcagcatatgctgccttggacaaacttgggtttgacaagatggaggtcattgtttccgagactggttgggcctctaaaggggatgataatgaagctggggcaacagtgaaaaatgcaaggacttacaataaaaatctgcgtaagttactgctcaagaaaaagggtaccccttataggcccaagatggtagtcagggcttatatatttgctttatttaatgagaatttgaagcctggcccaacatctgagaaaactttggattgttcaagccagatggaagcatttcatatgatataggctttactggccttgtaccttcctcagcaacctccccttttctttccttcaagggtattggatctttatatgcagtggtttctacaagttgtgcggcttttcttattcttgtagcattataagcggtcataagaatgaatgcatacaagtgatttcaattattctttggatgtaacaattttcagaactcacatgcaattccaattgtggaaattccaaagtacagatgccacgtgtcgatatgtctanntaattaatcttttttttattcatctttattaatactcagcaatttaccataggcttaagtatccactcgaggccnagttanga

SEQ ID NO: 57502 - DNA, 782 bp, Glycine max
  unsure (1)..(782): unsure at all n locations
  Clone ID: PAT_MRT3847_22937C.1
ggctcgagcttccttcccccgttctacccaacaagcaccatttataccattgaggagtttacacaagtgaacataggcagcaatgattacatgggcaattacttccttcccccgttctacccaacaagcaccatttataccattgaggagtttacacaagttctgattgaagagttatctctgaagacgacagaagggcatgacctaggagcgagaaagtatgtgttggctaggttgggacgtataggatgcactccatctgtgatgcattctcatgggacaaatggatcttgtgttgaagagcaaaatgctgctacatctgattataataacaagcttaaagctctagtggatcaattcaatgacaggttctctgctaattccaaattcatccttatacccaatgaatcaaacgccattgacattgcacatgggtttttggtttcggatgctgcttgctgcccatcagggtgtaatcctgatcaaaagccgtgcaataataggagtgactatttgttttgggatgaagttcatcccaccgaggcatggaacctagtaaatgcaatatcagtttataattctacaattggtccggccttcaattatccaatggatatcaagcaacttgtagaaagtgaaattaagagggaattggagttcacaaatgggtccncttcacagccaagtgccactgaataagttctggtcatcatgtggttttcatatggagcagaattaattgagttgaatatgtatgaagtaatggcctgccactgaattga

SEQ ID NO: 57503 - DNA, 428 bp, Glycine max
  Clone ID: PAT_MRT3847_22938C.1
gggggggaaggtaaggcattggggctatgaacaacatcccaactatgttggcaccttgctcacatcccatcctatgccccaaccccacctaaatttatatatccaaaagagatgaaacaaaaaacaacatggggggactataccaatacccatgctactgtaaggcaacccaatactgaggaagccctttaaaattacaggcaaaatgagaggagcaaaatacgggagcatcatcccacaaaaagagttcctgttagatacagcaaagttagctaaagaatctgcacattgatataggctgagattatgttagattattcgttgatttcagttaatacttccttttattatttggataatattgggaattaggctagaatatttctatgattttgtatgattccttttatattttttgggatctttct

SEQ ID NO: 57504 - DNA, 370 bp, Glycine max
  unsure (1)..(370): unsure at all n locations
  Clone ID: PAT_MRT3847_22939C.1
aacaaacacagacaggcaanaaaaaannccaaaggaaagggggcacacaaaagggaaaccacgaaacggacagaaagcaccaaagaaaggaggggcngnngnncaaanggggggggggaaaganttttttttttacatagaggccatcgagaaagtgcctgatatcctggcttttaacatggccccgcccgtgaatgaggagcacaggacctagaaacaaggggaaggtggggcccgtccaaaaaaaattcatctttaactttttcagatcgagcaacgggaagcactggtgagaaggtgnagtgttggcaccttcttttgggcgggggagtcgccggggcgtggtagaagtgggggaggtggcgggtgc

SEQ ID NO: 57505 - DNA, 415 bp, Glycine max
  Clone ID: PAT_MRT3847_2293C.1
cttcgccttgttttgtactataatgcaatgtgccaatgcctcaatcctatagtttaatgaagtagttatttgtttgtccctagtacatctgtcagcaactaagattaggcctagacataatctggcttcccatatttagttggatgaacttttctgttagatttgagagttacacacgcaatctagataatgttatttataattttttctgaattaaaccaaaaaaggtttcaacagataccagatagaaagtgtaaaacacaggataagggcccctaacagagagtaacttctctcaatacacaatacacaggcttctcaatcacacccaaaatacaatactgaatgcagaaactgacacaccatatgcattagagagagacatgcataactgtagaaaaagtactaaacacag

SEQ ID NO: 57506 - DNA, 326 bp, Glycine max
  Clone ID: PAT_MRT3847_22940C.1
cttcaagcttgatcagtccatggctttgtctttctttcgctgttgctgtttctctgagtcctcagaatccaaagagtttatatgccatggtgatgtttgcatgctcagagataggaagaagtacaaagccaaaaaatccaagagcaacaagcattagaaaagatggtgttatgcaagttagaactatatgtcctatgtatgctgtttgattgtgtgcaagttacttttggttttatggtaaaatctttaaggttgtgtttggtatgaaagagagaaataatacattaaggaaattttgtatttttaaaaaaaaaaaaaatataaaa

SEQ ID NO: 57507 - DNA, 297 bp, Glycine max
  unsure (1)..(297): unsure at all n locations
  Clone ID: PAT_MRT3847_22941C.1
actcanncacgcgtacgtaagntcncgnnantcgcgcncnnctnnangcantgngncactcncctagacccnngnntnnatnccaagngannancgagaatnngtcnntgtnaagactntnganatcagntncctcnngtanatgtcgnaacgntgtacagngcncncnnggnattnnngnnnngangnaantctgtgacngctgtgtgccatnagcnggtcaccactgatntgnagtgcaggtgccctggctntcancngcttcntnagttntgtcaaccggcnatgtgtattgca

SEQ ID NO: 57508 - DNA, 455 bp, Glycine max
  Clone ID: PAT_MRT3847_22942C.1
caccaattctgatggacgattccttcatgagcagggctcaaaccttacatgatgaacgatctgactcacagatggaacactgccttaagtctggttgcagatctatctgctgccaacatgcttgaatgtgataccaaatctgctctacatgacaagaacctcgagccaagcgacctctatgcagttctaaaacctgattatggatcgcactatcctagaggcctcacggacaatggactatgaaatctactgttcacttctcggatactaaaagaagatcctccattgatgattctcctgaagctgtgaatgacatgcttcctgagtggcctgcgaaaaccacaatttccggaacaagaaggtctgaaaaagatggcaaatcagaaacgctgcgatgttcctctgtaaagggcaagcttgaaatcatgtctagggccacaaagccagctctccct

SEQ ID NO: 57509 - DNA, 489 bp, Glycine max
  Clone ID: PAT_MRT3847_22943C.1
ggctcgagcgcaagcaaaaagaaagaatcccaggctaggtttaagatggaggggaatgatcaggatgtgtcgggggaagctaacaagttccccgagagacagccaattgtgacagtggtgcatagccaagacaacggcaaggactaccaggagccggctccggcgccgctggttgacccgacggactttacatcatggtacctttacagagcagggatagcagagtttgaggccacttttctgtttctctacatcactgtcttaaccgttattggagtcgccggtgctaagtctaagcggacggccgatgggattcaaggaatcgcttgcgccttcggtggcatgatcttcgccctcatttactgcaccgctggcatctcatgaggacacataaacccggcggcgacatttgagctgtttttggcgacgaagttgtcggtgcccagtgcgattttctacatcttgatgcaatggtcgggtgctattttt

SEQ ID NO: 57510 - DNA, 395 bp, Glycine max
  Clone ID: PAT_MRT3847_22944C.1
ccggatattcccgggttcgttcccacgcgatccgttttatgcgttttgggaaaaagttctaattcagtttgaagactttgcaaaccacaatgcttttgatctgcttgagaaatatagatctacacatttggtctttaatgatgatattcagggaacaggatgcgtggttcttgctggacttgtagcagctttgatgttggatgggggtaaatcacttgagtcacagattcttattccttggcgctggagaggctggcactggcatagcatatcttagttcacttgaaacatcataacagacaaatgctccactggcggaagcgcgcaagaatattcggttggaggactcaacgggcttgaatgccagatgccgcatagaatcggttcaacatttt

SEQ ID NO: 57511 - DNA, 358 bp, Glycine max
  unsure (1)..(358): unsure at all n locations
  Clone ID: PAT_MRT3847_22945C.1
ccacgccgtccgaaacaaagtcagctcaatactcactctatatncacacttctcctctataaacttcttgtccaaatcaattttcaccgtgttttacccctttcacgtctcaaaaaccctatcggaatctaattcagcatctctacgctatttttgcaataaataactgtaaaaacaaaagtcacgagtcgttgatggcacgaatntaacataaccctnaagntgnnagntatnaaagataaagctaaatatttaaaggattaggattcggttatcgagattggcattgacaagagatcagatcgtaagagaaaaggagaaatcgcgaaccgtcggaagcgttggaaattcttggaga

SEQ ID NO: 57512 - DNA, 524 bp, Glycine max
  Clone ID: PAT_MRT3847_22946C.1
ggccggcctctttatttttttttttcggtagaaagggcacgggtatctattgcccggggtccgaacatgacaaatgaatgtaactacgtaaggggttgtggtgctcggccacgctaggcttatggtgcttgaacggcgttattaggtgagcccttacctagggatacctcaagatccaacactccctatctgaatatgtcccttctctcaaggggggctcctcttaagctcttccttaactctttaaccgaccacactgtggttggttaatgcagactggaaaggctgtttaggagccttactggggagaagggacttaactatttagcgcgtgctgaacttgaggtatccatagatatgggttgaaccaataacgccttctatcggacctgagcgctgtcggtccgagcacgactatctctggcctaagtcatatcgtcttgatggctgaccctggatttggacccttgcttttttgctgtaacagaaaaaagaagctggcggccaactcctagcttacttac

SEQ ID NO: 57513 - DNA, 288 bp, Glycine max
  unsure (1)..(288): unsure at all n locations
  Clone ID: PAT_MRT3847_22947C.1
atgaaccattgaattcatttgntgantgttctttataatatataaatnaatttatttcatgttttattntcattaaaaactnttgaacagcagaataaaatgtttatttgctatgaattggggcctcctgaaaatgcatttgacaggtacaattttgggtttactgttaaaacagaaagtatatataananaatacttganaacnacatcggttattaacaaanaccgatgttnattatcataaccaacatcggttatnatngaaaaccgatgnaacgtttgtatana

SEQ ID NO: 57514 - DNA, 1579 bp, Glycine max
  Clone ID: PAT_MRT3847_22948C.1
gcttatctctcaagattctgtagaaaaggtaagaataagaagcaatctgaagaagaaaataacaaagcactttcccgatggttgcttatggttatatcgcttcacgcactatctccaaatcgcaactgcatctatgtctaatgccaaaatttcagtgtttaagggctctggggaggattccgccaccgtcatcaccggctacccccacctcctcccatccccaccccccaccccctcccgatgattcctgctgacaaactatgctccagtaagcctggacacacaagtccccccgttcccccctccagtgaggtctactcggccgataatgtttatgatggcgccgacccggttccggttacagacaaccacagcccatctgcaaatgccgatgccaacgcctgctatgccaataagctacgctcatcactatgtatttttgtattatttttaatgtgcttcatccttccctccttctacccccagtgctttgtccacgttacttcgctctctgtcctcctcaattccgccattaatgatcctcgccctccaccccttcggcgagcgggccctcactgtcggccgcgacgagtgcctcgccgtggtgaacctcgtccgggggcgccggaactgctgcctgcgcctaggcaaggaggcgagtctggtcaagtttgatgcctctggggatcagttcttcatggcggtgaaggagaaggtctccgtccaccagaccgaggatgcgaggattctgttcgaattggaatgcccaaagcctgttctctgtgctacacctgctaagaatggacttctttatactggtggggaggaccgaaatatcacagcatgggacattaagactggaaaaattgcatattgcttggaagaagcacatactgcccgtgtgaaaggtattgttgcactcacagagagtgatggtgctacaggggatgatgacccttacctagtggcatctgcatcatctgatggcattatacgagtctgggatgttcgaatggctgctagagagaagccactaactgaacataacacgcggtcaagactgacgtgccttgctggatcatctttgaaattcaaacgacaacgaccccaggatggaaaaagtaaatcgaaggtggtcaaacaacagcgtgccctgtctggaaagagtaaatcaaaggtagaggatcaaacaattgaagtttaatagctttctagatggcattcttgagaaaaccattttgcttattgacaaaagtggttttgacaccctttggaggccttgactaacttcccattgtgttgagaaatcaattcgattgctggtttgaccaagttgattctatccatcagttgcaggattatgatactgataaccctccctatcctttgctcccctcattacacccaactactatatgttgctgtgagtctttatcgtgttgttaccctcgcaaattttgtccatacttcagtttggcatgtggcctatttttgaacaagtattataaaagtttgaaacaggaaaagttcatgcacttataatttttcatctatacaatatcttattctcgtttaatcc

SEQ ID NO: 57515 - DNA, 320 bp, Glycine max
  Clone ID: PAT_MRT3847_22949C.1
tacggatgctacaagacgacattatggtacggatgcgggaaacacgacataacgtgtctgttgcaacaagaccactgtacggcttgatgaacttgttgcaccctttcttttctttggatgattgggtatacaacaagctttagcttgtgggttgaacgcttatactctttctattatctctgcagatgattgtcccgttaaatgtcacatacagagcgccttttatcactgtcccacatgtggaggacttgtgaatgctacatgtgggaatgttactctgctcataatagcaatatttggccttagcaataacaaaattg

SEQ ID NO: 57516 - DNA, 1003 bp, Glycine max
  unsure (1)..(1003): unsure at all n locations
  Clone ID: PAT_MRT3847_2294C.1
acgagtggctcgagctacttctagcaatagaaaaatctcaagtcaattaattaaagggagaagagagatcacctgcaatggaaagcaatactgctgaagctactcgtaatcgcatgtatgaggattttgagccttattgcaaatggcttacaaaggatggacaagcgactcttgagattaatttgaagggtttcaaaaaggagcaacttaagattcaaacctacgactgggggatcctaacaattcatggagaaaggcttgtggatgcatccaatgataaatggagccgtttccgtaaagaaattaaaatttcaaaaggatgtaatatgaattcaatccgtgcaaagttttcccatggggttcttttcattgcaatgcctaaagaagcagtcatggagaaacatttaatttggggggtagaaacaagaaagagaatatcacccactaaagttgcaattggagtggtcttcgtggtggcacttgggacttatatagctcgaatagtaagtagtgatgcaataagaaagttgattaagtactagaccacaaaaactacaatgaggtggggttaaaatcaggatatggtctatgctaataataatgcataggattgcatgctttcagaatgttttatgtggcaatgagaaaaagtgagtaaggtgttcatattttatgtttacttgtaacattaccttcgaagaataataatagtggtttggatcccctgtagaaacaagaaagagaatatcacccactaaagttgcaattggagtggtcttcgtggtggcacttgggacttatatagctcgaatagtaagtagtgatgcaataagaaagttgattaagtactagaccacaaaaactacaatgaggtggggttaaaatcaggatatggtctatgctaataataatgcataggattgcatgctttcagaatgttttatgtggcaatgagaaaaagtgagtaaggtgttcatattttatgtttacttgagcatnncct

SEQ ID NO: 57517 - DNA, 847 bp, Glycine max
  unsure (1)..(847): unsure at all n locations
  Clone ID: PAT_MRT3847_22950C.1
tcaactcaattatgtgtgccactggttaaatctgcacaataacgtgctagttactatgaaaatatggatgctgatagagaatttaagttatatctcagaactctgctaaatattgtgcagttctttcctctttttgttcaaattacacagactaaaggaatcactctaccaaatagctaagtaggatgcagataaatttaagagcaaccttttgattgcaagattaatattttgtaattaaatttagcacttgacctttgatggacaggttcttggtcttttaggtggaaaccaactaaacagtgctattaactcagagaaagctgtgaagacggatagtgctgctgttgctgagttacctgacttgatagacactggtgatttgaatgactatcatggaacaggtgataatacaaagagtaagaatggtcaaaatatagcaaatttgacaccatccacacctccagctctggcggatgatttatttgaaaattttatgaactctggagtagctagtgatgaactaaaaaatgatgatccctttgctgatgtgtcatttcattctaatgacaacaaagagcatgctgatatcttttcaagcatgactgttggtgatgataaattggatcatcatgtgagtcatggtctggggaatagaaatgaacctgacagtgatgatttattggctggcttgtcaattgacgaaaatacctctagtacaaaacagaaagcaacatctcctgccatgcaatctgaatctttattttctggtttaaacaatcatgttagccatctgggacctgacaatggcttangtagcatgttgggcactcaagcagttggcttc

SEQ ID NO: 57518 - DNA, 380 bp, Glycine max
  Clone ID: PAT_MRT3847_22951C.1
aacgtcccaccgattgaacatctcactcgacaaccactaaataacccggcaatacaacaaccatggtccggatcccccaattcctcaccgcggcactcgccatcaccggcgcctccgccgcgtccgcagtcaaagacctcctcccctccaacttcgacgacatcgtcctcaactccggcaagcccgcgctcgtcgagttcttcgcgccctggtgcggccactgcaagaccctcgcgcccatctacgaggagctcgcccacgctttcgagcactcggacaaagtcaccatcgccaaagtcgacgctgacgcgcacaaggacctcggccgcaagcatggcgtgcagggcttccccacgctgaagtggtttgagaacggcaag

SEQ ID NO: 57519 - DNA, 957 bp, Glycine max
  Clone ID: PAT_MRT3847_22952C.1
aattcggctcgagctaaagatggcgtcatcaagtgttagggaggacaaataccgcccctttatgcgcgaagacagtgagaagaacatcaaatggagatatggtgctcctccaaattatgacgttgtcaacaaattatttgatgaaggcagaaccaaggtatggcctccgggttcacttgaagaaaaggtgcagactttagtgaagaattgggagatggaaatgttccacaaggaggatttcaaggataacagatcagtggacccagagaaatacactttcagcctaaacggaaggaagcctattagtttggaagagaaaaggaagcttggaggagggtatattccactgctgcaaacctctataccagagaaactgaggccttacaacccatatgaagaaacagcagattcatcccataaggccttcacgacaacattcccacgtgggtttgctttggaaattctgcacgtgtactctggaccacccgtgattgtgtacaagttcaggcactggggctacatggagggtcccttcaaaggccacgcccccactggagacaaaattgaagtctatgggatggccattttcacgttggatgagaattcaaaaatcgtgaaggtggagttcttttatgatcctgccgaattgcttggaggtctcctgaaaggtcccaagtttgatggcagtgctgaagatgctgttgcaagctgtcctgtactcaggaacaccggctagagcagcacaagttcaaaaagtttaacctttgaagtaaaggtttaattgcagttgttgcatcaatggcttgtttaacttttagtttttacagttatatctgtaggtaatatttactgcagactctccaaatccaagcaaattaatgttgtaatcaataacacccccacccccctttcccccatgtaataataagcttggtcaattataaaatatttcctgat

SEQ ID NO: 57520 - DNA, 399 bp, Glycine max
  Clone ID: PAT_MRT3847_22953C.1
tacatactcctgattgaacctctaccttctatcaccaagatcttttctatggtgattcaatgtgaacgtcaaaattgtgttcctaatcttgatgattcaaaggctcttgttaatgcttcaactagtaagtctcaaggttctgctaatggaagataaaattctggttccaagcgctactgtacctattgtcataagacgaatcactttgttgagaattgctttcaaaagcatggtgttcctcctcacatgatgaaaaatcactctggttctgctcatcattctgcagttgatgggggagaacgtgttgaatcttcaactgcatctcagaacaccacaagtgtcaccatgactccttcacttactcaggaaccaaatagataagcttctgcagttaattca

SEQ ID NO: 57521 - DNA, 395 bp, Glycine max
  Clone ID: PAT_MRT3847_22954C.1
aaaaaaggcggttaacaaaagggggacccccccaagaccccgccccgaaaagatgggggtccccccccaaaggggagaaggggccgaaaaaaacccaccgggaactctggggggtcaaaaggggggggggccccccaccccctagagaaaaggggccggggggttgaccggtccaaaagcgggaatactgggccggggagggggcccaaggggggagcccagggggcatggggggggagctcggttatccgaccgggtaaggcccccccacctttgtggaggaagccaagaccgaacaaattttgggtgttatttggggggagacaacaccttttgaggaacacaaacaggccgaggtgattttggcttatactaaagagggggcttggtttttc

SEQ ID NO: 57522 - DNA, 1476 bp, Glycine max
  unsure (1)..(1476): unsure at all n locations
  Clone ID: PAT_MRT3847_22955C.1
aattcggctcgaggatggcgtcatcaagtgttagggaggacaaataccgcccctttatgcgcgaagacagtgagaagaacatcaaatggagatatggtgctcctccaaattatgacgttgtcaacaaattatttgatgaaggcagaaccaaggtctcctcttcttgatttctttgtgtgtcaattaagagtgtacatataaatgatttatccagtgaagaaagaaaaagttgttcatgccaaatcgaacaatttgattatgtttttcttgacaggtatggcctccgggttcacttgaagaaaaggtgcagactttagtgaagaattgggagatggaaatgttccacaaggaggatttcaaggataacagatcagtggacccagagaaatacactttcagcctaaacggaaggaagcctattagtttggaagagaaaaggaagcttggaggagggtatattccactgctgcaaacctctataccagagaaactgaggccttacaacccatatgaagaaacagcagattcatcccataaggccttcacgacaacattcccacgtgggtttgctttggaaattctgcacgtgtactctggaccacccgtgattgtgtacaagttcaggcactggggctacatggagggtcccttcaaaggccacgcccccactggagacaaaattgaagtctatgggatggccattttcacggtaacatacctttccactaatatatatatatatattaaccatgttattgatgcaaaagatttattgatgattaatctctattaaaaaatttgattgaatattttattgagatcttctttcttaatcacgttnntttctttcacatgattttaagttgaaaatttgtttaagaggaccgagctgaagctgagttacacttgaacaatgactatataacaccaatactggttaatgttgncgaacatatatacaaaagagattttttttatgaagatttccaaagaggctgatgtagatgtaattgttactgctcttttcattcagcaattttaatgtattttagttttgattgttttgggtgacatgcagttggatgagaattcaaaaatcgtgaaggtggagttcttttatgatcctgccgaattgcttggaggtctcctgaaaggtcccaagtttgatggcagtgctgaagatgctgttgcaagctgtcctgtactcaggaacaccggctagagcagcacaagttcaaaaagtttaacctttgaagtaaaggtttaattgcagttgttgcatcaatggcttgtttaacttttagtttttacagttatatctgtaggtaatatttactgcagactctccaaatccaagcaaattaatgttgtaatcaataacacccccacccccctttcccccatgtaataataagcttggtcaattataaaatatttcctgataatccaaaaaaaaaaaaaaaaaaaaaaaaaaaa

SEQ ID NO: 57523 - DNA, 722 bp, Glycine max
  Clone ID: PAT_MRT3847_22956C.1
gaacggccaaagataatattatattataatgaaaagcatagtaccagaggtactacagaaattacaaggagaaacatcccttaaaacacagaaaaataaccaacatccaccaaacaacaacaaaacccatccctacaaaagacacattaaatgaaaggcaaagacatacaagaggaccattggtgaaaaggaacagtaaagtccttttcccatcccctcaaccaagaccaagtgagataaatagttctgtccatcaatttagatatgtcaaaggactggttgttaaaaaccatgtcatttctaaggctccaaatggatctggtagctgcaatccaccaaatcttcctccttctgttagaattccgcgatccagccaaagaacaatgctgaagaaagttgtccataggcttgctgtgcaaaactctatcttccttcacccatgagttgaattcccaccataatggcataactttataacaagtgaagaaaaggtgggaagcagattccacttggctttgacaaaaagggcaaaggacgttttggaggacaatttgcctactaattaaattatccttagaaggaagcctatcccagagtaatctccatgcaaaggataaagctgccggggggattttgatttcccatggctgtctaaagccactgtgtggctgatggagaggctgttcagatctgagacagccgtaagcagagctccccacacc

SEQ ID NO: 57524 - DNA, 391 bp, Glycine max
  Clone ID: PAT_MRT3847_22957C.1
gaacgctcggcacgcccgcgggtcccggttccgagttccagccacgccccacgcatgcgtattaataaaagtgcggagcatctgtgatagcaaagacctttgggatcttcatctgggggcacaagatctaggggacagaggtgctgatgtcaaacaatgtttcggacttcaacgccatatcgtccatatgaaaaggcggcgttattgtcaccaacaccggcttattatgccaccgacttatcttatcttgagcgttaataagccactgccatcatcttcttaggccgtaatatcttcatgccatttatcagcgctactgatactgaacgcaagggaaatgggacagttggatcaaaagtttttgaggaaaacttcttccgatcttgccaac

SEQ ID NO: 57525 - DNA, 278 bp, Glycine max
  Clone ID: PAT_MRT3847_22958C.1
gcaatgcaaaggaagatcctcgcttctaccgctgctgctgaagcattagaggaggccaatgctactgaatgtattataagaaatttaagcatgttttcagacctctgctcagtttgccaggccaggaatcctttgccaaccatagacagattcttcactatctatgatgatgttctgaaatcaactgcaatggttgaatctgttgccagcagacataattctgagacacctgatgaaggcattccaacaaaacactcaaaatcactttctttttgggt

SEQ ID NO: 57526 - DNA, 241 bp, Glycine max
  unsure (1)..(241): unsure at all n locations
  Clone ID: PAT_MRT3847_22959C.1
atatactataccctgctttttgatcgcacctcacttcattcttgtccacaaaaaaatcttactagggcggtcttcagagntcagcacttgtgaagttcatctttgaaactagtgcctatccaaaagagcatgaacaattaaagctactcatagagaccactggtcataagtgcgcaggaaaactctgtattatattatgaatgtgccagcggatgtanctcccttcgtatctattctgctt

SEQ ID NO: 57527 - DNA, 773 bp, Glycine max
  unsure (1)..(773): unsure at all n locations
  Clone ID: PAT_MRT3847_2295C.1
ggcaaatggggtgtgcttcctcgaagcgtgttgatgcggcagcagtcccctaccgtcccgcacccacaagcttggcggtgttcgacatcaacaccatcgaggagccatggctgaagcacctcaacaacaccacccctctcccccaagacaataataaaccctccctccccgcccctattctccacaaactcaacttgctcgacgccaccgatgccccccaatcctgggatgagattagcaaaacactccaagacctcaaatccccctccacctcaccccaacaacaacctcaacctccacaaaagaccaagtccttccacacggtagtcgagctactcgacgccaccgaccccccccaatcctgggatgagattagcaaaacactccaagacctcaaacgatacttcacaaaagcccaagtcctgagacacggtggaagagctagacgccaagctcaaccccaagcccgagcccaagcccaagcccaatccagaattgaaaaagcccgctgatcagataattaacagtagcatagttaccgagccagtccgagggaacaagttgaaggaaaacatgttcatagttcgggacaggctggagagacagaaggaagagaaggagctcaccttcgagcgtcttcgtcgggacccgctgagcgcgttcccggagaagtgtccgccgggagggagcgagaaggtggtgttgtacacgacgtanttggngggcgtgaggaagacgttcgaggactgcaaccgcgcgcgagacgtgctgga

SEQ ID NO: 57528 - DNA, 375 bp, Glycine max
  Clone ID: PAT_MRT3847_22960C.1
cggattcgtgttttgaaaactgcgacttcccacccttccatgggctagagcccaaacacgggcgacccggcatgcgcgccctcctcggcaagctggaaagagaataggaggagctcgaacggaacggggaaccggccggaccaaaggtggaggaaccggcggagaagatcgtggaccgggtatctgtagttgggggcatgatcaagcatctaaaggctgttagagatagccgggagctacgcgctcgtatagaagatgcgcaggcagagaaagtcagagttcagctcacacagggtcaaagcgcacctattcataatgcatgcagagccattcaggaggctcctgatgggcagacactcagtgcggctggaaaac

SEQ ID NO: 57529 - DNA, 421 bp, Glycine max
  Clone ID: PAT_MRT3847_22961C.1
caattggccttgatcaactactatagatgtattcatttgttctgttgcgatttttatggtgcaatccatgttttgtgatgcaggcatgagatagataaagtcactgctgggcagcgattagatttgaaccttgaaagggggagaataagggaggaattgtctaatcagaatgctgaaactaacaacctgacaaacaaacttgatagagtaagcaattatggatctgtctgggtaagctcatccaaaagcggagaagaaaacaagaaaaaaaaaataaaatgagtttcttcgtaagctcataagctaatttgtagaattctcgatgttttagagatactatatgtgagaacttctacaaattagcttatgcataattgaattttagctcatgtacaaacttatttcattttttacttattat

SEQ ID NO: 57530 - DNA, 336 bp, Glycine max
  Clone ID: PAT_MRT3847_22962C.1
ggaacacttaatatttttgtgggagagccgaattgagaaaatactttcttctttttcaccttcacagagattggttcagaatccctataaaggtttcggtttggtcatgagcctggctatctattgggggaacaccccggttaaaggtaaaatcgggggggatttattggtggttattaacaccctggattttatccggttgaaggggaaaaaaaaaaaggccttcttttggagaaatctttctctttttaattggagccctggtggggcacccttccggggggaaccggtatttggggaaggggagaggttccaaaatcccgcttcctttaaggg

SEQ ID NO: 57531 - DNA, 114 bp, Glycine max
  Clone ID: PAT_MRT3847_22963C.1
tttggttcgagctaatcaggcccggtgcagacaactactctgaaggagcaaactctatcgaggccaagcgttacactcccaagctggaaaaagtgtaccccaaactcttcctag

SEQ ID NO: 57532 - DNA, 467 bp, Glycine max
  Clone ID: PAT_MRT3847_22964C.1
gggaggcgcggctgcgagaagacgacagaagggccgcccaataatatctggcattaaattcagtggacaaattcaacttggttttatatggactgaccttcattgaatccgaaaaataacaatcttctttaaagaagaaaacgacctcggtagaacagcttcttttaatttttaacttactccatatactaaggacatgttaatttccaaaaggaaaaacaaaaaattaaaagagagagacaatgtacagtgtatgctaaaataattgaaactaaacgacacaacgcccttaactcaacattttcgcaaattatcataaataaaaaattcagaatagctattatcttatcattcaatgttaattaaataattggtgtctttatgacgttaatgtgtccaacaactacatcttgcaagatttagctacttgaggttttttagcaacatataacaatactttaaggtgt

SEQ ID NO: 57533 - DNA, 442 bp, Glycine max
  Clone ID: PAT_MRT3847_22965C.1
gttaccaaaccaggggttgctatttgggttttattaggaaacaacgggtatacctggtattaaactttcaccaatacactgaaatcataaatataaggtaactgataacacccccagccttgacaaaataaaagggttaaaaaaaagaataaaacaaaattaatcaccccaattttggaaaagggtttttttccaacacccttgggggcaaagacaccggggaatccacacttacgtttcctattgattcaagggactgaaatttaactgggattctttgaaccttgtttgagaaccctttagaccacttgaaagacccaattttttgggacaaagggaaagaaagttctctttttgaatcaggcctgggtggaggtccaccaagcctttctcttggattactacttacacgtactttggccctgggggaaagggttggagc

SEQ ID NO: 57534 - DNA, 258 bp, Glycine max
  Clone ID: PAT_MRT3847_22966C.1
catagtcatgacagttctctctacggcgtcccaaagttctcacgtggcggtagtcacgatagtgctgggaatacatgctaagcacattatgctacatgtccaaggttaggaaccaagaaggggtcgcaaattgagatgagatccttgcgaatgcagatgcagtcatcgcggcacgtggtgacctgagactggccatgccagtagtgtcgatatcactcgcacaggacgtgatgattcgcaaggtcgacatcgatggga

SEQ ID NO: 57535 - DNA, 486 bp, Glycine max
  unsure (1)..(486): unsure at all n locations
  Clone ID: PAT_MRT3847_22967C.1
cccacgcgtccgacgacgagtgctcttcgtcgacttcgatactaaagagtagagagttatgcatcatagctatttctaggccttttgtttgttgtattttaataatgcaccctcttttcgtttgttgatttatcctcaaattctgatttgtttgtatttatcccaaatggtttctcttttatgggtgcaatgtttaaacagatagttctttttgtgagagaaataaatctgtaagttagtgaatctgttttgaaattattgttatttaatgataatttatcgaaacaaacttgaaaaaaaaaaaaaaaaaaaaaaaaaaaaaaaaaaaaaaaaaaataaaaaaaaaaaaaaaaaaaaaaaaaaaaaaaaaaaaaaaacaaaaaaaaaaaaaaaaaaaaacaacaaaaaaaaaaaaaaaaaaaaaaaanagggggggggccctttaaaggaaccaaattttactacccggggttgggaagttttttt

SEQ ID NO: 57536 - DNA, 421 bp, Glycine max
  unsure (1)..(421): unsure at all n locations
  Clone ID: PAT_MRT3847_22968C.1
naggggccaagattctcttaaccaaagcaatcttcagttttttttttttctctctcactcccttctctcctccttataaaccaatcaaccttagcctcagccacatccaaaattcagagtgtggttgtaaagttgcaatggaagtgttgagagttcaggtttttgttgtgtccattgtggctcttgctttggcttatgtggcaccttccatcaatgctcaggtccttcctcctgcccctgcccctgcacccacaagtgatgggatatcagttgaccaaggaattgcctatgtgctaatgctgctggctctggtccttacttacatcattcactaacctctctatcaccccattcatctattcactatgtttttcttcaactctattctttcaatgaaattcttttttattatgtgtatgtg

SEQ ID NO: 57537 - DNA, 266 bp, Glycine max
  Clone ID: PAT_MRT3847_22969C.1
gaaggtcacggcgagacgagccgtttctaattaatgataggtgtcaagtggaagtgcagtgatgtatgcagctgaggcatcctaacagaccgatagactcattctagtatcagtaatctagtgtttgcttgcatgcttgtttagtctgtagattacttctgatattcctattgtggtgttttcttgtttttccacatgtatactaacgtacaatcttaagctaataacgaactttgattttatgtaaaaaaaataaaataaaataa

SEQ ID NO: 57538 - DNA, 282 bp, Glycine max
  Clone ID: PAT_MRT3847_2296C.1
tcaaaaaggaaaaatactgatgtgagtgggtttaatttctgtggtccaaaaaaattttccttccctctcgtgagttagattggggaggagggaatgcagccagtcttgtcttatctattcaaagttctgtgggtcctgttttgctatttttatgctttggaagctttaggaaattctctttcaactctaatgtcatttgtcatatactagcttttatcaccagtgacaggtcttgcatatgataggaagtggaataattccaaaaggctggacatctaatta

SEQ ID NO: 57539 - DNA, 295 bp, Glycine max
  Clone ID: PAT_MRT3847_22970C.1
ggctcgagttatatagaagtaattcttgtgcatgtctactgcgaaccttgttagcagacatgatcttacaggcagttgcgtcagtgacaaaatcttaaaaatctaatataaacacacgactgtgacattcaaactctgaggaaagatacatggggaacacactggactcttacacacaaatcatgtataatcttctccaattaactaaagagcctaactggaagagagatatctcgaaacccaagaattaattccagaccggaacctgcaagcgtaccaagataaacatataggg

SEQ ID NO: 57540 - DNA, 363 bp, Glycine max
  Clone ID: PAT_MRT3847_22971C.1
ctggggggaaaaaaaattttaaaaaaaaaaaatggggggttttattaaaaaagccttcttgaataaaagggttggggggcccaaaaaattggacgcccttttccaaaggggggtttttaaaaaaatttttgtttacttttttagcagggcataaaaactctgggggttgccaccgccctcttttgtaaaagtgttgaaaagctcctagccctttttttttgcttgttatcctgagagagggaccccacccgggctttaaaattttctcttattcccccccaatgtttgggtgtatctgtacccacaatgttcttcccaaaaaaggataattcctggggccccttggaaggggaaacccctaaa

SEQ ID NO: 57541 - DNA, 455 bp, Glycine max
  Clone ID: PAT_MRT3847_22972C.1
ggctcgagctcgagccgaatcggctcgagcaacacttttgggttatcgcgaggagcagttcacccacctgcacttcttcttacatgatgtctagacaggcccaaagtccagcatggcgtttatcgacgtgcccaacgggaaagctacggatgcgcttgcgactggaaccgacgagggacaggacgatgctttaaccgtggcgtccgaacaggactcgtaacttgagggcaaggccctaggagtggacacttcgatatagcacgatgagatgggactgatgaaggggactacgatggcctgcaccgatggagatagcaacggtagtgccatcaacgagaatctgaggaacatgatcactaatgaacctgttagggaaacggctatcgatggccgtactggggctcctcgtcttgcacgtggctactctcaagccagattttactatgcagatttca

SEQ ID NO: 57542 - DNA, 457 bp, Glycine max
  Clone ID: PAT_MRT3847_22973C.1
ggccaaattcggggggggggttttttatcaaaaaaccccatggggtaattgggggccccaacccttaacagggaaaactttacagttttttcccaatttttggcccatagaagtaaaaaaaaaacaaggttccaaagttttcccccccccaaggggaaaaaaaacctaactttccttaaccctttcagaaaaatggaaaattaatctttttgtaccatttgaaaaattaagtggctaagggggcaactgtttaaaaaaggccaaaaattcggctcttgaaaaattttcacccccccggaaaaaagggctttaaaattgggccaattttttaaaatttaaaagtgggggccttgattgcccaatccaaatgcttggccatgcttaataaaaagaaaaattggggaattgatttttggggaccggattctcaggaacttttttttttctttgggggaaa

SEQ ID NO: 57543 - DNA, 171 bp, Glycine max
  Clone ID: PAT_MRT3847_22974C.1
aaaaaaccagtgcttctctgcggggccactgcgacactcgctggccccaaaagaccatgattaacatgaaccccccggaaataacaaaggggggcctgactcgaagccacaaatacctagcaccaccctcactccgtggggcccaaccttcaaaccgaaccgggggggggg

SEQ ID NO: 57544 - DNA, 340 bp, Glycine max
  unsure (1)..(340): unsure at all n locations
  Clone ID: PAT_MRT3847_22975C.1
tgtctagnttttcttttctctctctctaattctccgagattttttctctcactctagctctctggttttagggcgtcttatgaagaagcaggggagtanaannaanacatttctctacttctacagaaactcttcccttcacttccttccctttcttttctcaatttccgtgatcatcacatttttcttcactcctcaatttcaataattcctccatgaaccccctcttacccctcctctccttccttttcttcaacaagaaactgactgaatatggtaaaacattctgggaattcttcatcagctcatacctcttcaaatccatcttaaaattccccac

SEQ ID NO: 57545 - DNA, 814 bp, Glycine max
  unsure (1)..(814): unsure at all n locations
  Clone ID: PAT_MRT3847_22976C.1
cggnaattcccgcggtcgacccacgcccgtccggttttgggtttgcagngaggctctggtggtcaacaagggcaaaggagcaaaatacaacttctttctgcactagatgaggatgacttgcagactgtggtagttgaaaataaacttggctgtgatatttttgtcaaaaaagtagagcatgatgtagatacagttgacaagctacagaatggcgattgtgtttctgtctggattccacctccaaggttttcaaataggttaaatgttgcaaatgaatccagggaagcacgttattatgttgctgtgcagatactcgaagccaagggcttacctattattaatgatggtaacagccataacttcttctgtgctttgcgtcttgttgttgatagccaagcatcagaacagcaaaagctttttccccagagtgcaagaacaaagtgtgtgaagcctgttgtatcaagaaccaaagatcaggttgaaggcacagtaaagtggaatgaacttttcatatttgaagttccccgaaaggcccctgctaagttggaaatagaggttacaaatctcgccgcaaaagctggaaaaggggaagttgtggctgcactttctttttctgtcggacatggtgcaaacattctaaagaaggttgcttccgtgagaatgtttcatcaaccaaatgatgttccaaatattagatcatatccacttaatagattggtcagttggtatattataatcattttaatgggatttgtctgtttaatgaattatttaatgtctaggatttttttacgttttaccctttttactttta

SEQ ID NO: 57546 - DNA, 705 bp, Glycine max
  Clone ID: PAT_MRT3847_22977C.1
gcgcgcgtacgttcgcgtgggaatgcggattacggttccagaggcccgtcttcggagtgcccgtgggtattgaagcccgacgtcgtggcccctggctcgtccattttggccgcttggattccggatgtgcccgcggcccgaattggcccaaatgtggttttaaatactgaatacaatttgatgtcgggaacgtcgatggcctgccctcatgcttccggggtggtggctctgttgaagaatgcacatcctgaatggagtgcttctgctattaggtctgcgttgactaccacggctaacccactggataacaccggaaagcccattgaggaaagcggagactggcctcaacgggcttctcctctagccatgggggctggccttattgaccctaaccgggcccttgacccgggcttggtttatgatgccagccctcaagactatgttaacctcctctgtgcgatgaatttgacccaggcccaaatcatggccattactagatcaaaggcctactctaattgctccagagcatcctatgacctcaattatccttctttcgtggctttctatgctgacaagagtgtgaaagtggagacaaaattccggaggattgtgacttacgttggagatggtccggctgtttacactgctcgagtgagctcctacaatggcactgcaatctccgtatcttcccataggctggtcttc

SEQ ID NO: 57547 - DNA, 457 bp, Glycine max
  Clone ID: PAT_MRT3847_22978C.1
ttttgtgtttttttttttttttttttttttttttttttttttttttttttaaggggcaagggaaaatcatgatattattgtcccttccttaaggggaaaacaaaaagccccgcttgggtgctttatataaaaaaaaaacgttgtttccccccggggtccttccgtgaaacttttggccgtatataatcttatggggttcattccaaatcttcttttccaaaattcgggaaagggatctttttttgatcaacaaaaccagaccccggtgcatactctggtgcccctcccacagcaaaaccaaacattgcccatctcccattggtaatctcatttttgcccatgaacccaaaaaaaggaccccgatttgcatcttcaagcttcttctggtggaaacaccccggaagctccttacccttccgcctttgaaactctaatgggaggactttatttccccccc

SEQ ID NO: 57548 - DNA, 312 bp, Glycine max
  unsure (1)..(312): unsure at all n locations
  Clone ID: PAT_MRT3847_22979C.1
bgtngangnagngtangtaagnnnggaattaggntngagganattttgataaanagngatganaggntgnagnannttaaaannggaaanaaaagnaatngttanttggttnnaagaatttntgaatttnntnatatttntntgngtanganttnttaagggaaagaaaatcantntctgtgnnggnaanaganttngngaatnattttnttttaaagannnagtannnaggaggaanannnannattgganataggatgngngnaagatntaaannntnnggaannnnggnagnnnangnnaaaaaaangg

SEQ ID NO: 57549 - DNA, 589 bp, Glycine max
  Clone ID: PAT_MRT3847_2297C.1
ccacgcgtccggggtgtgcttcctcgaagcgtgttgatgcggcagcagtcccctaccgtcccgcacccacaagcttggcggtgttcgacatcaacaccatcgaggagccatggctgaagcacctcaacaacaccatcgaggagccatggctgaagcacctcaacaacaccacccctctcccccaagacaataataaaccctccctccccgcccctattctccacaaactcaacttgctcgacgccaccgatgccccccaatcctgggatgagattagcaaaacactccaagacctcaaatccccctccacctcaccccaacaacaacctcaacctccacaaaagaccaagtccttccacacggtggaagagctagacgccaagctcaaccccaagcccgagcccaagcccaatccagaattgaaaaagcccgctgatcagataattaacagtagcatagttaccgagccagtccgagggaacaagttgaaggaaaacatgttcatagttcgggacaagctggagagacagaaagaagagaaggagctcaccttcgagcgtcttcgtcgggacccgctgagcgcgttccc

SEQ ID NO: 57550 - DNA, 392 bp, Glycine max
  Clone ID: PAT_MRT3847_22980C.1
cccgcgcgtgcgctccaaggtattataatggaagatgccatgacagccacatggataagggtagatcgctgaatcactgtaggacatgtgtgtacggtattgagatgggatgaatgaatgtaagaatagagatatcttctacattgcatggggaggactggagctagggttacacttgcatatggtggtatacaacctgcatgattacgatgatgcatcttatgtgtcatctactattatataggctgctactctttctagaggataaattgatgctaggcacatgatgtctgagaataatcaacaactctaatgcataggctaggacatatgaatccgtcttggagaatcaactaggagtcatgatgaatgtcacgcggctatatacatga

SEQ ID NO: 57551 - DNA, 910 bp, Glycine max
  Clone ID: PAT_MRT3847_22981C.1
ctagtattagttcttacttttcttactccctcacctgagcttttttcatttttctctttggtgtttctcttttactccctcaactcaactcaaccacctctccccttttgcaattccaactctttaacatggcacaacaccaattacgttgtgcaatcaactatgtttcaagggtttttcttcaattctcaaactaaaaagttaaagtaggttttttttttttctggcagaggtccctctcgctgcttctttgaactccgacacagattagtgggcatatatgatggctgcgagctgggatggaagtagtgaccctggcagtcagtcagatgatagctttcttgagaggttgcacattgagcctctttatgatgcctttgtatgtccgctgacgaagcaagttatgcgtgatcctgttactttagaaaatgggcagacttttgaacgtgaagcaattgaaaaatggttcaaggaatgtagagagagcgggcggagactgctatgccctttgactcttcaagaactaagaagtacagagctgaatccaagtatggctttgcgtaacaccattgaagaatggactgccaggaatgaagctgcacagctggatatggctcgccggtcattgaatatggggagtccagaaaatgagactcttcaggccttaaagtatgtccagcacatctgccgaagaagtcgatcaaacaaatacactgtccgcaatgcagggcttatcccaatgattgttgacatgctgaagagtagcagccgtaaggttcgttgtagagctctggaaacccttagagttgtggtagaggaagatgatgagaataaggaattgttggctgaaggggatactgttcgcactgtagtaaaattcctttcacatgagctttctaaagaaagagag

SEQ ID NO: 57552 - DNA, 350 bp, Glycine max
  Clone ID: PAT_MRT3847_22982C.1
tccgccaccccgtccgttacttcataaaaacgaccataataattcaaaagatgtagatgggttcgttttgccagctctggtgtatttggcccgcgagaagagaccccaatatttccacaacttcaaagctggagctatgaattcattgttaagggtctcttcgaatatcagcaatgggaaaataattctaaatgtagactgtgacatgtactcaaacaactcacaatcagtgagagatgctctctgctttttcatggatgaagagaaaggacaagaaattgcctatgtgcagtttcctcagacttttgagaatgccactaagaatgatttatatggggggtagtctaaca

SEQ ID NO: 57553 - DNA, 797 bp, Glycine max
  Clone ID: PAT_MRT3847_22983C.1
tcgtacggctgcgagaagacgacagaagggggtgtgaagtttttgtcagaaacaaacagaataagaaagagaggaagccgtagattccaacgctttctctctgagtcacacacacacacacattgcagcaacaacaacaaccacacccgattccatgagtcgctacgatcccaatcccttcgacgaagaaccggtcgaggttaatcccttcgcggatggagcagctaaaggaaaaggctcagggcaatcaagttatagtggaggtgcattttatactactaacactggaagtgttccctcctcaaactcaaggctctcaccccttccaccagagccttatgatcgtggggcaactattgacatccccctaaataatgcaaaggacgcaaaagcaaaggagaaggaacttcaagctaaagaggctgaattgaaaagaagggaacaggaactaaaacgaagggaagatgctatagcacgagctggaatagttatagaggagaaaaattggccaccttttttccccatcattcatcatgacattgcaaaggaaataccagtacatcttcaaaggatccagtacattgcatttacaacatggttgggtttggttctgtgtcttttgtggaatattgtggcagttactactgcttggatcaaaggagaaggtccaaccatctggtttcttgctattatctattttatttctggtgctccaagatcctatgtgttgtggtatcgccctctttatcgtgctatgaggactgacagtgctctgaaattggctggttcttcttgct

SEQ ID NO: 57554 - DNA, 463 bp, Glycine max
  unsure (1)..(463): unsure at all n locations
  Clone ID: PAT_MRT3847_22984C.1
aataaataaatttgtattactgctaagatctgaacttgcttggaataaaataggataataattcgataacatttcaaaatntgagaacaacantggtatacgaggatccgagagttatataatattcaatccctcctaaataagagcggactactcgtgaagtctctaaaactctaaaaaacgaagttaccattttttagtgtcacgacattcaaagcagcgattcctagtaatttgattcaacattttaaaaacttcttctacaattcaagaactgtgggaattagagttacaagcaacatttatggtcgatcacaaggcaaaactttgggagatgattgtaacaccatttgtttcaccaaaagatggaatatgtccatttagaagctaatctgcagaacaaactgccgcaataattaattgggaaaaaagccctgtatggggcataactaaaagcattgac

SEQ ID NO: 57555 - DNA, 370 bp, Glycine max
  Clone ID: PAT_MRT3847_22985C.1
cgggtaagtgttagcctcagtattattattattatgctatcaattgcgtccaagggaagttgtttcccttctactatgatttgtttcatgcatattgaagagcgatttctcttttagtacattagttgttgaatgcaggtgatttaaattcttgggcaaaaccataacaagagacgactctgaatacggtcattttactggtttaaatttagtgtgctacgtgtttcgtgggtcattatgtaatgaagacagttacttcttcgttttgaacacgctatgtatatatatacttggtatatccttatatatatgatccaggtcaggacccagttcaatggagttcaaaaccccccccccccccccccccccc

SEQ ID NO: 57556 - DNA, 203 bp, Glycine max
  unsure (1)..(203): unsure at all n locations
  Clone ID: PAT_MRT3847_22986C.1
gtcaggtacttcacagcgcaaaaaaccacgagagcgccagtttcaacgaagcaaagccacggcccaaggggccnggacacgaccaagacaacggcaagaaagccagggaacagcggagcaaggacgaccacagngaccagaagaacaccaccaccaccgacgcaccgacaggaggagccagcacagcaacaggaaccacgaac

SEQ ID NO: 57557 - DNA, 388 bp, Glycine max
  unsure (1)..(388): unsure at all n locations
  Clone ID: PAT_MRT3847_22987C.1
acctttgtgggcaggtgggactacctaattgatagtcctctgctgggggactcagccgtgttgggaacaggaggaggaggctctggtgatgcagtggcagcagcaccccctgctgcctcaggcggagcccatgatggtgttgttgacggcggtgtcggtggcggtggcggatctcatccgggggatgatagagttgacgaatgcgagacgagctttggtgggaacaggtggcctatgcnagatactttggctttgttgctgtgcggccggatatggacgtggcttttttagatgcctgtgttttgggtcccttgtggggagaggtttctaggtcgctggctgagcttggcttccactgatatgccttgcactgccctgagcggtttgc

SEQ ID NO: 57558 - DNA, 325 bp, Glycine max
  Clone ID: PAT_MRT3847_22988C.1
cccacgcgtcaggactgcccaagatgtatagacagtgatacggcgcaggcggggaaccagcatatttctgatcaacagtagtggatacaccatctgggtcgaaattcatgatgggccgtacaatgtgattaagaactgagattacactgggaggattgattgaatccatagtggtgaagggaaatgctggaatgccaaggtgctctgttaagaggagctagtagaagcagttgccacagtcacaggacccaagtgtgactccttatgcttcattgatgtgatagttcataaggacgacaccagtaaagaattgctggaatggggc

SEQ ID NO: 57559 - DNA, 252 bp, Glycine max
  Clone ID: PAT_MRT3847_22989C.1
acattaaaacatactcccctttttttataacaatggtccctaactatacagggtatatttaagggccggattacgactacacccatccgtccatatcacaagttcccatgcccagatcagagaggaacaaacgcaatatcactagactcccacatacccacgttggtccatacatacctatcctacgtatcactgatgctcatgagcacgcctgcatcacatattagacttacaccaattgatgtgaccgat

SEQ ID NO: 57560 - DNA, 1423 bp, Glycine max
  Clone ID: PAT_MRT3847_2298C.1
ggcaagtggggtgggcttcctcgagccgagaaaggcaaatggggtgtgcttcctcgaagcgtgttgatgcggcagcagtcccctaccgtcccgcacccacaagcttggcggtgttcgacatcaacaccatcgaggagccatggctgaagcacctcaacaacaccatcgaggagccatggctgaagcacctcaacaacaccacccctctcccccaagacaataataaaccctccctccccgcccctattctccacaaactcaacttgctcgacgccaccgatgccccccaatcctgggatgagattagcaaaacactccaagacctcaaatccccctccacctcaccccaacaacaaccacctcaccccaacaacaacctcaacctccacaaaagaccaagtccttccacacggtggaagagctagacgccaagctcaaccccaagcccgagcccaagcccaatccagaattgaaaaagcccgctgatcagataattaacagtagcatagttaccgagccagtccgagggaacaagttgaaggaaaacatgttcatagttcgggacaggctggagagacagaaggaagagaaggagctcaccttcgagcgtcttcgtcgggacccgctgagcgcgttcccggagaagtgtccgccgggagggagcgagaaggtggtgttgtacacgacgtcgttggggggcgtgaggaagacgttcgaggactgcaaccgcgcgcgagacgtgctggaggggcacagggtggtgttcgacgagcgagacgtgtcgctgcacggggagtttctgagggaggtgaaggagctggtggacggggaaggggtggcgctgccgagggtgttcgtgaaggggaggtacgtgggtgggttggaggagttggtggagctgaacgagacgggtcgactcgggaggatattgaatgcgacgcgtgtggagagggggattgggaggcaaacgtgtggaggttgtggtggggctaggttcgttccttgcttcgactgtgctgggagttgcaagcttcttcacagagagaggtgccccaattgtaatgagaatggcttggtccactgccctgcttgtatttcataacttccatatctgctgtttaattttgttattcaaatcaccactagaatcatacatatttcacaccttgtctctctctctaccatcaacccttccacccaatatttttggaccatcttaattgttaccaatctagttatggggttaaagactctcttttttttattatcatacgcagataaatttacttgcgcaccttaacctgcacttagtttcatgttaaggttagaaaagttcaaaagcaatatattaaaatcataaaatgtatgtctaccgaattttaacgataagaataatatttgtacttatatatttttttattaa

SEQ ID NO: 57561 - DNA, 705 bp, Glycine max
  Clone ID: PAT_MRT3847_22990C.1
cttagctgtcacattttgtcaatcaattaacaagtgcgtcttttttaatcgcatccctcttgtggctttccttccatttttgcaggagcaatttggcgggttgatcatgagacacgtggttattttttctttcaatttcttgctgctttgtgtcttcatttctgctataacaagcacaaaaagtgaagtatctagcacaaatgaagaacaatcattttcttaccatatcaaagctttggaattcatatggaaacatttgggctatcaacatgtgtggccagaaatggaatttagctggagaattgttgttggaaccttgattggaatcttgggagcagcatttggaagtgtagggggagttggtggtggtggcatctttgtgccaatgctaatcctcattattgggtttgatccaaaatcagcagttgctatttcaaagtgtatggtcacaggtgcagccatctcagcagtattcttctgcatgaagcaaaggcatccccacacttgatgaacccgttatcgactacgatttgatgttgctaatacaaccaaccctcatgcttggaatcagcataggagttattttgagtgtaatatttgctgattggatggtcacaattcttctaattattctatgtataggtaattatagaagatttgcacttcactttatatttcactcagtaatatgattgatttgttata

SEQ ID NO: 57562 - DNA, 342 bp, Glycine max
  unsure (1)..(342): unsure at all n locations
  Clone ID: PAT_MRT3847_22991C.1
cggccgctcgagccggcctggccggacaccttactcaccttgattcactcttcatctctggccgctatgagttttggcggagctgcttctagatttaagagagagatagtgtaaggagaaggttcacatcagtattgtggtcattggccatgtcggctctgggaaatccactaccactggtcacctgatttacaagcttggaggcattgacaagcgtgttattgagaggtttgagaaggaagctgctgagatgaacaagaggnctttcaagnatggctgggngntggacaaacttaagggtgagcgtgaaagaggaatcaccattgatattgctttgtggaa

SEQ ID NO: 57563 - DNA, 416 bp, Glycine max
  unsure (1)..(416): unsure at all n locations
  Clone ID: PAT_MRT3847_22992C.1
atgccattagccttagcattcattaaganaattangcaagancngaagcgaggaattcgtgtgaggcgattaagaaccgaaaaaacttaataatttacgagaaagacggaggagatttggggggggcacgtggaaaataagaaccaagtcccccccccaatctaagataactatctaccattttaattggataactaggaatagaaactaaatttacaaaaccaaaggtaagttaaaatcaaagagatagttcaataaaaagtgcgaagtgctgagaaatgtaaaaacaacatggtcaacgcatgcgctaaaaggataagcgaatcaggatcaggagcagattgatatcctagtctaacggagggtaaaaactaacttagatatgtaccctgaaaattgagtcaaattataaggaa

SEQ ID NO: 57564 - DNA, 595 bp, Glycine max
  Clone ID: PAT_MRT3847_22993C.1
gacattgggctcgagcccatgacccctcagtggtaccttgttttgctggccaagaccggaagagccaatcaatgcaccctcatgcaaacggctacttcgtgcctgggactgtggccaacatcctgttcaacaccaaaaactacttcagcgccaccgtcacagctggtgagactgctgtcacgcagacagctcggactttggcgttgccacacattatggggggggaccagataactaagcaccaatacaaaggcatcgatggcctccaagcacagggagactctaaaggttcagctatggaaggggcaagatgcattgctaggaataccctgagctgaaagggatcctttgcatgtcatgcaactctaataagaggatggccaagtcgacaacgaggatgtgcctggggaaagataaaaatagcgatctacaagacagggatacgggaggatgattcacttggggaactagtatgctcttatgcctgggtttgagatcctatagcattaactgtttgaaaaatcatcaatctgacggcaacacggaagtatatcagccctctacagcgagttgttgattatgcgtcccaaaggac

SEQ ID NO: 57565 - DNA, 937 bp, Glycine max
  Clone ID: PAT_MRT3847_22994C.1
ggctcgaggataatcggttcaagggctgtaattttgttactgaattcattttatgattatttttcatgatgcttttgatgactgaaaatgaaaaacagcgtggcaatgtaatgaggccgtcagtttcccatcctacctcatgacatccctcgcacaccaccgtattgctgcggcgggggaagcatgcaacgccaccaggctcatggctttttccatgggtgacacacgcgccatagtaacgtgcaaccccgatgtcgctaaagagattctcaatagttccacttttgctgatcgtcccataaaggaatcagcttacagcctcatgttcaaccgcgccatcggcttcgccccttacggcgtctactggcgtaccctccgccgcatcgccgccacgcacctcttctgccccaaacaaatcaaagcctccgagctccagcgcgctgaaatcgccgcccaaatgacaaactcattccgaaatcaccgttgcagcggcggtttcggaatccgcagcgtgctcaagagagcgtcactgaacaacatgatgtggtcggtgtttggacaaaagtacaaccttgacgagataaacaccgcaatggacgagctatccatgttggtggaacaaggctatgacttgttgggcacccttaattggggagaccatatccctttcctgaaagactttgacctacagaaaatccggttcacctgctccaaattagtccctcaagtgaaccggttcgttggttcaatcatcgccgaccaccaggccgacacaacccaaaccaaccgcgatttcgttcatgttttgctctctctccaaggtcccgataaattgtctcactccgacatgattgctgtcctctgggaaatgatatttagggggaccgacacggtggccggtttgattgagtggatactggcgaggatggtgcttcat

SEQ ID NO: 57566 - DNA, 375 bp, Glycine max
  Clone ID: PAT_MRT3847_22995C.1
gatgtttcaagggataattaagggtgtagaagagtgattttattggacagtggggcttcccataatttcatttcacaaaagctagttcaccacatggattggccaattgaacagacccaaaaaatgaaagtcaagttagggaatggggttcaaatagaagcacaggggaggtgtagggagctagagatgtacattggcagtcacaaattaaggccaaatcttcaactgtttgaattaagaagaattgatgtggtgttaggcatggaatggttgaaaacattgggagataccattattaattggaaataacatacactgagtttttgggaaaaaaggaagatgggttactcttggcaataaaggagggtgcaaaaa

SEQ ID NO: 57567 - DNA, 359 bp, Glycine max
  Clone ID: PAT_MRT3847_22996C.1
gaaattggtatcaataaccgaagcatgaggagaaaccctcatgcaaaggaaccaaatatacaggactggtggaattacattaaacaattgcatgcacgaactaacactgaatttacagtaggcaccctttattagatgactcccaaccctcaaatggaaacccgctaaatattgttaacagggatattgctattgtataactgaatacatgggttagcagcaggcttcgttttgcacaccattccaagtacgagtattccactaggcgaggtggagggcaccataaaagatcacggtgcgattcattatggcgggaaatatattttctttcaaaagaactctccgggatgcccctttac

SEQ ID NO: 57568 - DNA, 252 bp, Glycine max
  Clone ID: PAT_MRT3847_22997C.1
atttttgtattagccatgtatgaatatgtactaacatttgccttggttaacatgttttcttaagaaaaaaaaaaaaaaaaaaaaaaaaaaaaaaaaaagaaaaaaaaaaagaaaaaaaaaaaaaaaaaaaaagaaagggaggaggacgaagaggaatgaagccaggtcggcgtggaggagacgtcataagacctcgagagcgcgatcgaaattgaatgcagcggcggccaatcgggagagtcacgaggggga

SEQ ID NO: 57569 - DNA, 336 bp, Glycine max
  Clone ID: PAT_MRT3847_22998C.1
caggctatatgcttctttttataaacaatgtacatgcggcaattaatgacatctccgggagtgtagaatttaaaggttgcaagatggaacgctcactattaccaaatttcaaacacaataaccttgcattcaaatcgcagggctctttttggctcaagatacctagatctctctatagtgtgatctagaaatataggacaccttgacctggacagcacctctaaaccacatttggggtccaaccaaactgaaaaaacccaggcatgtggtaatccttatcgagcccagcaaacattgctagttgtcactctgggtaagtatgcctgattggacgcc

SEQ ID NO: 57570 - DNA, 184 bp, Glycine max
  Clone ID: PAT_MRT3847_22999C.1
accaatgacagttccacccgttgtgcttccaccgatagtgaagcccgtgggttttctccctccaatgcttaaccggccaaatgcaccgacaccgtcgccagtgaagggtaggaacactccatgtccaccgccagggtctcctgcacgggctacagtccccattaactcggcgaaactaagtgca

SEQ ID NO: 57571 - DNA, 400 bp, Glycine max
  Clone ID: PAT_MRT3847_2299C.1
ccttcgcgttcggaaagccttacggatcaggttcctgctgatgacacgttgaagactgctgacggttataagcaagcaaaaattattaacctcaaacaaagtgatgctggtgatcttacacttcttactgatgggaagttggatgatggtgaaactactaatggttctaatattaatcgcaagggagaatcatgtaaataaaatacccctaaaggcacaggaggaaaaactatcttgtagtgcaagcgatttgacaactgcaatgctgagtgaaaatagcaagcctgaagctactgcaatgcatgtgggagctttagaagatatcattgataggtgcgcacggcctgactgcaacaaaatacgggcattgcttttggctgatacttataataccaattct

SEQ ID NO: 57572 - DNA, 392 bp, Glycine max
  Clone ID: PAT_MRT3847_229C.1
cataataaggtagaggtaataggaaaaaaccatatgattctaaattatgaatgctttaagactcaaggtaataattcatgttggctttatttggtcaatgtcacccttctagaatttttgggcttaacatccctctcctaacgccttcaatggatgcacctcaatgctttaagaaaataaagtcttcgagcattttcagtgatacagaattatgccaatccaagtatgtaatatgtatcacatgattcaaacccaaatgtgaatctcttaggatccaatggcaagctatggaatttgagtcccatattggacatatcaaattctagtgtgggatttacaatgattgtagtgtggttctcctaaagttctaatcaaattcatcacatgatatg

SEQ ID NO: 57573 - DNA, 380 bp, Glycine max
  Clone ID: PAT_MRT3847_22C.1
cgtccatctgctaggatgcggcccgcgttcatagactatttttatggcaggggaatccgatgatcaaaatggtgctattgcgaatgataatgccggcatcttgactctaaagaataggacggtaactactatgctcctagccgtgagccctaccctgaacactggatcattactgttggcgtatcacgatagcgcaggatgtctcttgatcaggacaaggaatccggttggagggaaccctgtatccatagccggcatgagacggcgccatacttatcccttttctggagcagaaacaggcttggtccggatgtgcacatatacacaagccccaccgtgtgagcacgaagggtcagatgttcaccttaaattggatgtgg

SEQ ID NO: 57574 - DNA, 150 bp, Glycine max
  Clone ID: PAT_MRT3847_23000C.1
atttttgtataatgtatgtgacacgctgtaaggtttctcataattgttataattttcctactgtgtgtttgagttagtaataccgttttaagtgttaaaaatcatgtagatacgtgttgacacatgtgatgtgatagacatgtatgccag

SEQ ID NO: 57575 - DNA, 299 bp, Glycine max
  unsure (1)..(299): unsure at all n locations
  Clone ID: PAT_MRT3847_23001C.1
gaccgacnncggacagatgggcgggtcttgcctatgatatctcagacgaccaacaagacatcacaagaggaaagggtttggttgactccctttnccaagctccacaggatgntggaacnncantatgcagtcatgagctcctacgcggtanctcagcactggattcgccagtattnggganaacaaaatggntggattccnacattggctccagttttangggacaagcttgntggtgcacatgcnccnnggngcttcatggnccgcggcccaancatnagggnngctcncntngtggg

SEQ ID NO: 57576 - DNA, 582 bp, Glycine max
  Clone ID: PAT_MRT3847_23002C.1
caacaagcaagcaactaagttttcattggcatataaatgttttttcttgtaagagagtttttttttcgtttcactccttcgacagtaaatggtgttttttctgtcaagtagtgttgtggaatctgaggagtttgttgctgttgtgcatgcagaaaagtagcaattatagccttagaaaaacagaagaagaaagaattcaaaaaccattccttaaagtaagaaggagtagcacgaacagaatcatgagtgcacgagtgttttcattgatgggtttttagaagagcaaacacagcttcttttccagcctttattaaccgtttctttttcccccactctctcacactctcatatttgtctttggattttgtgttttgttttttatttttatttttattttgttttgtatttgggatttttgggggttgcttacttctgttgggaagttctagtatttgatagagtaccacttctttaatgtctcaacaaaggcaaacccagatggtgggtggtaacaaccctgaccaatataatgacacaactttcaccaaaatctttgttggaggattggcttgggagactcag

SEQ ID NO: 57577 - DNA, 125 bp, Glycine max
  Clone ID: PAT_MRT3847_23003C.1
gttttgaggagcggaatggcgagacagaggtgataagcagcaaagagtgacgagtcgtaaccattcaccagctcattcgttcaattcccgaaggctaaacaatcagtaagaacattttgcgtgct

SEQ ID NO: 57578 - DNA, 406 bp, Glycine max
  Clone ID: PAT_MRT3847_23004C.1
ccaatctcattacattttcaactatgattagctgtgcttccgtgtgttctttgccgcataaggctgtgaagtggtttgagatgatgccctctttcgggtgtgaaccggataacaatgtgtgctcgtctatgatatatgcttatacaagaactggcaatgctgatatggctttgagactgtatgatcgtgcaaaagcagggaaatggcatgttgacacggcggtgttctcggggttgattaagatgcatgggatgtcagggactatgatggatgcttgaatgtttacaatgacttgaaggttcttggtgcaaagccgaacttggtaacgtataatgctctgttgtatgccatggggagagctaagagggccagggatgccaaggctatatatgaggagatgataaat

SEQ ID NO: 57579 - DNA, 255 bp, Glycine max
  Clone ID: PAT_MRT3847_23005C.1
gggggggggggaaaccccacttaaaagcaaaacccaacctccaaaaaatttttaccccaaagggtttccttaaacaaacagattcttttaacaacggggggggaaatttcccgggtcaaattccaaaattagggccccaaaaggaaacccttcccttaatcaaacaaaggggggaaccaatccccattttttatttcccccccggccattgaccccaaaactttaaaaggggggccccacccctgggcgaacccc

SEQ ID NO: 57580 - DNA, 138 bp, Glycine max
  Clone ID: PAT_MRT3847_23006C.1
gtttccttaaacaagagtggccttgcacaacagtggtatgatgaattagatgatcttgctgctccaaaacctgaatctgaaataaatgttcaagatgataatctggataaaaaatcggtagtggaagatgagaaagtt

SEQ ID NO: 57581 - DNA, 340 bp, Glycine max
  Clone ID: PAT_MRT3847_23007C.1
gagggaaaaaacaaaactttgcccaatttttcttttttagggggggggcaaaatcctgatcgtttttcccaccccaaaaatcccccatttttctttttttttcaaatttttttgggctgggaggaagtttttcccgcccaccccaattttatttttaaaactcccaaagagggagtgtgggagggatatttggtaagctttttccatttattcctatcacaaatgtgccctccagggcgttctttacaaaaaaaaacttaacagggggctttgttctccctcttttcccttaataagaagagccccctatttttttgccccgggcccttaaaaacccgtt

SEQ ID NO: 57582 - DNA, 251 bp, Glycine max
  Clone ID: PAT_MRT3847_23008C.1
ctcaataacccaagcatattacatacattgagagaggcatgattcattggtcccatatatgatacccaccttgttattcacaacagacctgactaaatactaatacattatatatccaacatgtcccacttccattcaaactcacaccttgaatataaatgttctcaatcctaaccactattccaaacattaatctctacttgataattcactatcttatcattcttaacattactttctccaaataatat

SEQ ID NO: 57583 - DNA, 344 bp, Glycine max
  Clone ID: PAT_MRT3847_23009C.1
tcggctgcgagaagacgacagacgggggtctgagtccgatgattgaagtggtaaacacggagtagagttaacaaatccttcgaaaggttggagaataacgatgtgagatacacgtttgctgcggatgtcaaaggcagcaaacttgttgttttgtaaaagaccgttttccaacacatcaccggcaacggctatccatcatcattaatgagccgtatgagttcaatactgagctaaacctgggtctgattatgaaactgagggccctgaactttttttctcctcaacacgccgaacattctcacttccgacgcctttttgtcgtcagaggcttcagataccaatct

SEQ ID NO: 57584 - DNA, 367 bp, Glycine max
  Clone ID: PAT_MRT3847_2300C.1
aattcggctcgagctcgagccgattcggctcgagtggaaattacatagtttcctgtcctttatatgttgagctgagttgcaagtccggcacaattgttgatgggggtgggggttcaaaagataattccattaccaaccagggaggaacacttgtctttttattgattctattacaaaaaattcaattcaagaaccattgaaggtagatgtgcaccacacttaaatgattaagggaaacctgacctctgaccatctaaataataagagacttggtgagctcaagaggatgcttaggcagttaacgcttaatgaaaaaccaaaatcccagacttatgatgtcaaggatgtggagaagaaaaggactgca

SEQ ID NO: 57585 - DNA, 352 bp, Glycine max
  Clone ID: PAT_MRT3847_23010C.1
ggcttacctcgaggtagcttttatggctgcagtgctatgaatggctgtggagatagtacccttggttcatgcgtttatggcgttcggacatgtgacgaagtttctgatcaattgcgtcggttacctacagaactgaggaacgccgccatcaggatgcagcatcggagtgaagagcctcaatgccatcgtctagatcgacgtcgaccgcctgacggagtgctgctgcctgaagtcggtcgccagccatatctccgtgcttagagcgaactacgtcgtatcgctcaccggcatatgcatgttctacatcccctgcaagatcagtccctcgatctactgcgctaccgtctgtgtt

SEQ ID NO: 57586 - DNA, 635 bp, Glycine max
  Clone ID: PAT_MRT3847_23011C.1
acaggtaaaacatttcaggaatcatcattcacacaaacttttcatatattattacttcattgattcacgcactcacttaggtgagattgccttttataatgtttcacaggtactcaccacctaactcttactctacataaattttttaaaagatacacgccacgtttcactggtgcactacacgctacgagtattcccataaatgacacttcatgtaaagcagattccaaacatgtatatactaatgccaagatctcactcaatctccaattaaatagacattagtaggctactaaaacccaaaatcttataataatatgcaacatcattggcaatactcgtttcttctgcctggttagagtaacgatcatgaattcacaattgctaaagaagtacaatataatctacaaaatattgctcattgtcatattacccccactcttctctccctggtagtgcacaattgtatatagatacaaccatttccccatcaactctgtagaaaacaagctgcttctacttccacttcacacacaccagggaaaaaaaactacttgaaaagaggaatattcaaaatagtgttttctcatatcagtccctggcgctgtaagtcagggtatgtcttcttattatag

SEQ ID NO: 57587 - DNA, 108 bp, Glycine max
  Clone ID: PAT_MRT3847_23012C.1
accagcagaaaggcttaacgcttgagggaatgcattacttgatatcttttcagaattcttcttttatctctcatggtcaggatgaaagctttttataattctcaatct

SEQ ID NO: 57588 - DNA, 466 bp, Glycine max
  unsure (1)..(466): unsure at all n locations
  Clone ID: PAT_MRT3847_23013C.1
tctgcttttgctagtggtactgtcttagctttgattctctgttctctgttttgttctgtttcgcgtgtaagttcccctgttcctcttttcctctttctaaggtattcttgttcttcaataatatcccccttttttaattttcctttttctttagggggttatatttcttggcttcaatttctgtttggaagatgagaaaattcgaagtttgatttctttttatacttttttttgtggtttatggttttgaggagtgtaaaaataaaaaaaaggtgagttaggaggaggaaattgcatagtatctgctgttttcatgcttttcaattttgttctctctctctctctctctattaatttgaatttgtatactgtggcctcaaagcatgtcaaggggaaggatatatgtgacttgaggagtttntatgtgcttctttttgttgattggtatatcataattgtgataatt

SEQ ID NO: 57589 - DNA, 464 bp, Glycine max
  Clone ID: PAT_MRT3847_23014C.1
aagacgacagaaggggggatgacatctattagaaatgaattgaaactaaaagatagaaggagagagaaatagagagtaagagaaagagagcattgcgtaaaatttgcggaagtgtgacatttaatttcattcccaaacatttttagttacattgtacattttatagagacctatgagagttgcatagcaaatttgtacaacttgcagactaagtttctaagacttgcagagcaagcttctaacagctagctgccagctctcacttgacagccggactactaacttccacactctaatctcatataatcgagtataatactggcatacccctaatagtttttgcttctaatgtcacatgtcatggttgcaaaaacagctcaataacatgtacagaaatacacaagtttcggatgttgggacactcactaatttcaaaatttaactaactacatttcttatgacat

SEQ ID NO: 57590 - DNA, 379 bp, Glycine max
  Clone ID: PAT_MRT3847_23015C.1
attcgcactctggtttgttttgattatttctttgattttgtccttattttgtttggtcaagttgtgttttaattgttgccatgcacgtttccaggcattgaaggcatatgatggaccgtggtgtggttaaaaaaaaaaaaaaaaaaaaaaaaaaaaaaaaaaaaaaaaaaaaaaaaaaaaaaaaaaaaaaagaaaaaaaaaaaaaaaaaaaaaaggggggccggaaattaatgtaccttatagacccggaaattaataccgaaccgaaactggggggctaccctgagtgctcgtatgaaaacctggtaataaatttgggcccacacaagatagtagccgcttcctttttaaaaaaagtatgcgttcccaattccaaaaa

SEQ ID NO: 57591 - DNA, 140 bp, Glycine max
  Clone ID: PAT_MRT3847_23016C.1
cccaccccttggttggggggccaaacatttctacttcggaccaaatggccatttacaaggaatttaccccggccccggtggtcgggaaaatcgggccttacaccggctttatgacgccggcggctacacccaaaaccttc

SEQ ID NO: 57592 - DNA, 307 bp, Glycine max
  Clone ID: PAT_MRT3847_23017C.1
ggggtacacctcgaggtccttccgggtcccctgtacaatattctactttcatttcggacagattaatggaaatgttatccaataattttgtatagaagcaaagctgcaaaagcatggggcttatcttaaagaagcaataccaactctttgtcaaggtcacctctctgtctccaaacttcaaatctgctaaagaaatagaaagcagcagtgcagaacaacctaagagaaaacaaaaaaagaatatcaacggtaatcaacatagaaattcgcacaaacttatgcaatagtatccacgcaaagcattagc

SEQ ID NO: 57593 - DNA, 980 bp, Glycine max
  Clone ID: PAT_MRT3847_23018C.1
ccacgcgtccgaagaaagccaccaaatggatcggctttcatcagcagctacgtttgaaagcatgcactatggcagtgcaagccaaatgggtttgatttggcaacaagccagggcacccctggtggttccattgatgaaattgctagtggttttgtgcctagccatgtcacttatgttatttgtggagagagtttatatgggtatagtcataatctttgtgaagttgtttaggtacaagccagaaaagaagtataaatgggagccactcagggatgaccttgagtttggaaactctgcataccctatggtcttggtgcaaattccaatgtacaatgagaaagaggtgtatcaattgtcaattggagctgcatgtgggctatcatggccatctgatagggttattattcaagttcttgatgattccactgacccaatcattaagaatatggtgggaggtggaatgccagagatgggccagtaaaggcgtaaacataaagtatggagatcagagagaacagaaatggttacaaagctggagctcttaaagaaggcatgaagcacagctatgtgaatttgtgtgactatgtggccatctttgatgctgatttccaacctgaccctaacttcctttggcgcaccataccattccttgcttacaacccagaagttgcactagtccaagctcgatggaaattcgttaatgctgatgaatgcttaatgacaagaatgcaagagatgtcattggattatcatttccttgtggagcaggaagttgggtcctcaacctatgccttctttggtttcaatggcacagctggtgtgtggagaatttcagcattaaatgaagctggtggatggaaggaccgcacaacagtggaagatatggatctggctgtccgtgctggtcttaaggcgggaaatttgtgtatcttagcgatctcaaggtgaaaagtgaattgccaagtaccttcaaagcctat

SEQ ID NO: 57594 - DNA, 1563 bp, Glycine max
  Clone ID: PAT_MRT3847_23019C.1
aaaccccacgttccggcgcaactattcaaacactgaaaccagtccgcaatcttctgttcccattctccattggtgagttcacgaacacaaatgttgtccttaacactacctattcctctgctgaaaaccctaactcctccttctccaaacattaacaacccctctctctctccctattctcattatcaacctcgttcccgttccctaacacggggacttatagtccccaaacacagctccgccactgctcctccgagcgcgacgcttcgggacgacggaacctcactcgctggagattcaccggagccgcttccggaggagttagtggcggagctgatgccaaagcacgtggcggtgattatcgacggacatggtaggtgggccaagttgagagggctgccggcgtccgcggggcaccaagcgggtgtgcagccactgagatggtgagtctgtgttgcagtggggaatgttttcgctatagttcttaactagatcttattcttccatgtgctatgcaaaactggcttaaggaaaagttcttgttgcatctcctcctgtccatctcacatcacgtcaataaactcaaccccctatatctatagtggtcactcttcactttgactgttatcaggttctcacggttttcgtgttatccactgagaactggtttcgccccaaggtggaggttgactccttgatgaagctctttgagacaacaataaactcctcaattgcatggaaggaattcaaatatacgtgattggggattcatcaaaacttcctgagtctctaaggagtactatagctaatgcagaaaagagtacaaaacataactcgagactccaacttattgtggcaatgaattacggtgggaaatacgatgttgttcaagcatgtaaaagtgtagcaaaaaaagtcaaagatggtcttcttcatttggacaacatcaatgaaaaaattattgaaaaagaattggaaactaaatgtactgagtttccttatccagatctactaatacgagctggtggtgagcttagattgagcaacttcttgttgtggcaattggcatacacagaattttattttaataaaacaccgtggccagattttggaaaggaagaatttgtagatgccttaagatcatttcagcaaagacaaagacactatggtggtgaacgacattcataagcatatgtctgtaatatagtattatcacttaattaatcttttaggattaagtgtataatggttttgggattatgtttaaattattggaccaagctaacctactaagtcgtgtgttcattatagctgaggtatctcacttaaggttttgctttgttcaatatagtgacatcactatatgcagtgctaacaaacttttgattagtttgttgttgacctggctttgtaacaatgttttgaagtaggtttaatatattagcttctaaactaaataaatcgtaattagattttgatatcttttataaaaaaaaaaaaaaaaaaaaaaaaaaaaaaaaaaaaaaaaaaaaaaaaaaaaaaaaaaaaaaaaaaaaaaaaaaa

SEQ ID NO: 57595 - DNA, 293 bp, Glycine max
  Clone ID: PAT_MRT3847_2301C.1
aacaaatggccattattaaattctgtatcagacccgggtacatgcgtaaacagcccggaaaacaaaactttaaaaggaaaacattaaaataaaaaagaaaaaggaaaaaaccaaccaagaaaaaaaaaagaggaaagggaaagaaccaaaaggacccattgaaaaatgtcccaccggaaaagccttccaaaaatttaaacggggtaagcactaactgaaaaatggtccgcccacaggaacactgggaaccagggacccgggccaaactgttggcgatcccgaatatccaaggc

SEQ ID NO: 57596 - DNA, 186 bp, Glycine max
  Clone ID: PAT_MRT3847_23020C.1
gagaacaaaacacggccatccaaacactcagacgctaagcgcgaatctgcatgggatacaaattactacaagttgtatacactagcatccatggctgatatgatcaaacattgaatttaaccatgtggcagagctgatctaaattgacaaatagattttacaagttctcaaaaggtcttgatccat

SEQ ID NO: 57597 - DNA, 410 bp, Glycine max
  Clone ID: PAT_MRT3847_23021C.1
ggagggaccgggttttaggcaatgacccgagtaaaatcccaatttcctaggttgggaacttaagggaaaaaatagtttttgcttgtattgatatgcagggtaataccattatttatagggaaataattaagggaaggaataggatcctcccagtttagctaagtaatctaaattttaagtaatgggcttaggataaagtagtttaaaagtaaaagtcctttagtcaataacaaactttttaggctaaaaataggaaattgggtttaattaaggaaattttagagtatcaatgggtctaaatggaaggacctaccttgtcgctacgggatcattaactctaaaacatgaaattttagtttttaagggaaaattccattaatttgattatgaaaaacgggggtaattttttt

SEQ ID NO: 57598 - DNA, 419 bp, Glycine max
  Clone ID: PAT_MRT3847_23022C.1
gactctgcggagatatgggtaccccattgatgcgttgcttgatgttttgagcaaacatagggataagtaccatgagctgcttttgtctgactgtaggaagcagattgcggaggcggttgtggctgataaatttgagcagatgttgatgaagaaggagtatgagtattccatgcatgtgctttctttccagatacagacctcagatatcataccagcttttccctatgtggcgccattttcatccactgtgccggattgttgtcgcattgtgcggtctttcattgaggattctgtgagtttcatgtcgtatggcgggcagcttgagttctaataaagtgtcaagaaatacttagataggcttttgagtgaagttttggacgaagctttagtgaagcttatcaatacttcgataaatgggg

SEQ ID NO: 57599 - DNA, 386 bp, Glycine max
  Clone ID: PAT_MRT3847_23023C.1
ctctgccataccatgtgctgaagcccttctttgtctattcatcagatgatcttatcatttgagcttccttttgctttggttccactcctcaagtttacaagcagcaaaaccaagatggggacacatgtcaactctaccatggtaaatttttttggtaacatgaaatttgtagttgtgcattgcaaccaaatagtaaattgattacatatttgacaaaaatcagtagagaggtgctgttagaactgtaaacataaaaagatgtgtctatattgagaacctggattccctgcagttcggaatttaacacacccacacagtcagctaattgcaatcatcagatgaagatcaaacgatcatattttatctcaaatcaaatttaaaatatg

SEQ ID NO: 57600 - DNA, 338 bp, Glycine max
  Clone ID: PAT_MRT3847_23024C.1
gagattccaagtctacgagaatcgcaaacttactatatctgggaaggcttcatcaaatgggagtggttagcatataagtttttgttgtgtctgcagacaacaactgcttttcttagtcattatactgtatgtatttccttttatctgaatcacaccaacttgctgacccgctatatggatgctactgtagcaatcatgtgcataattggtttagccatttagccatatattgacaactttcaacagtcagtctaaaatcctgtcttcttcgttcataatctttaaaaattgtcaatcagttgttgatgttttaggtttagatctttggtgaatttaat

SEQ ID NO: 57601 - DNA, 234 bp, Glycine max
  Clone ID: PAT_MRT3847_23025C.1
gctcgaagtccgctcgactagccatgagcactatgtagaaatagagaagacgcgaaacacctgattcccctctccataggccgccgagcccgagagagagactcactcaacacagagcggagcaggaaatagctaaactaatccagaaaatgaacagcgccgctgggaaggcggtgtgtgtcagcggcgcctgcggacacacgagttacaagggagtgagattcctgcgcaatc

SEQ ID NO: 57602 - DNA, 834 bp, Glycine max
  Clone ID: PAT_MRT3847_23026C.1
agtttaaaaaaattaccccccgctcggggggcccaaatttgaatacctttttattcgggggcccttgaggtattttattattgttttatggcaaaggagttttctttgttttatatttgagtggttaccccttttttttttaattttttttttttcttttttttatctagaacttctgcacatataattggaatgaaggaataaacattgacatcagtatagcattgatcttttttagctttaaaaatgctcgtgggagaaaaacaccaattaattaatactaatagtactaaagttgcacttttagtcaatgtttccaatgctaactaggcggtgaaaccacaacatcagagcaagatattgcagaactaagcattgtcaatgaatgctaatcgtatttcccaaaggaaactaaaatcagttttgttgttgtcagacttcattctctctaaaacaaattgaaaaactccatcaccatttaagattcaaactcttgaggaagaatatggaggattcaatgcagtcatcatcattcatttaagattcacatcatttggcattttagattcagcaatcaaccattttgtattgctattgcactttggctaaattttccacaatccacatacaccactcgtgaagtccaatatcaaatgtgcttggcaaggaagtcaaggataagttgattcacctgctggggaaactgttcttgaacaaaatgggttccctcagggataaatgtaacctccaaattgggaacaagcttttttgctttttcaacctttgttaaatcctcaatccctggaaacttcagaagataatcccggacgcgtg

SEQ ID NO: 57603 - DNA, 646 bp, Glycine max
  Clone ID: PAT_MRT3847_23027C.1
ttattgatatcaaatgcatttgttttccttctgctttgttatgttcaaatatcattctctctaccatatacattttttctccatttctttctttccttccaataataaaaagaaaagatcgaaaagagcaaagccaacatgaaacattcttttgttgcatgctaaaaagatggttcaactattcactaaaaataaaaaaaaaagttggttcaacttaatcaatgttacaacattagcaaggttttatatgagtggttttggtgtcatagcatcctagttccaaccccaacccgttcttacacgcacccttcaaaaccttaatcaaatccacgcacatgcttctcacgtgctcctcccaccccctctgcataaccaacaaaaccaccacgacgccgtttcgctttgccacctcatctctcaccttcacgttcctgcacaaacagcacaagctccacagcaccgccaccgcgtccgccgccgcagcctttgacgccttcgtaatcctctccaccaccgccgcagcacacgacggctcctccgccatcgccgcccgaccctccgcgcacgtggccaacaccgccagcattctcaaacacctctctgccgtcgccgccgaacaggctcgcagcaatttcgtaaccacttc

SEQ ID NO: 57604 - DNA, 459 bp, Glycine max
  Clone ID: PAT_MRT3847_23028C.1
ggtattttttctggatttccgctcacagttatttgcaatagcattttcaatgagatgctcattagatatagctacgaaaaattactgcgccaggctaaagctccaagcatgttatcacaatccttcaaaaatttcgtttctttgtgcgcgtatggcgatgataacttaattagtgttcatgaatatgtcaagccttactttagtggttctaaattgaaaagctattctagcctggctcactaattactcatccatctactcgattggtacttgcacaaatactacgcgcaacttttgtaatttataaagttagtcagcattgtgattcttctcaagataaactttaagcagatgtttagtgttcgtgggtggctcctgtggacaagcgagttatggtcccaccttcattatcgttcgtgtaaaaatctgcgaaatgcaagaagcttatttcgtcaatct

SEQ ID NO: 57605 - DNA, 106 bp, Glycine max
  Clone ID: PAT_MRT3847_23029C.1
ttatacctacccgaacgccatcctcaaaatcttacaacttgtgagcctcctcggtttgtcagcttcacgacgccgttttcctgtgataagacccgcaggacgacga

SEQ ID NO: 57606 - DNA, 672 bp, Glycine max
  unsure (1)..(672): unsure at all n locations
  Clone ID: PAT_MRT3847_2302C.1
ggtagcaatatttttctttgaccatttacatgaaaacgctttttatgtgctagttacaacctacacaatcaatcacacaatggatgtcaacccatcatgatgacaaaatttaagcatctatgccatcctttgaaacaagaacattctttaaagacttatgaagggggaaaaaaataccactgatggtttgttgccttgaagatatagagcatataagttcaaactcttgaggggtatattatatgaacctcctcttaaaattacgagtagttgcttggtatgagcgtactaacaagctaactcctataccaactcctacacataagccaagcccaattccaacaccaactcttacaccagcattaaaccatgatagttcaccatcttcctcatctacatatattgttctttggcaatacatgctgttgtaatcctctgcttgttccggtttgaagcttctataatcaactacctgccaagcaaaaaaaggggnggaggttagagacaaacacacacaaaccgttaggatatgtactctttaagtacatggaaatttcactgccatgatttattttcaccagctatgaaattgagatgcaataccaggacaaattaaaactagtgcaccccattgcccagagcctcctcagccctggctttgtaaaggtatga

SEQ ID NO: 57607 - DNA, 199 bp, Glycine max
  Clone ID: PAT_MRT3847_23030C.1
tttcgctctcgcgtccgataatgtactctgcacatgtatacctatggaggcgtgataaaatcaactacccctttatattaggcttcaaggaaggaacagaattgggatacagagaacccttccttcttagcccgggtcttgcagtactctcatcggctgttgttctctcaaacttggatatggagatggaccacagaac

SEQ ID NO: 57608 - DNA, 717 bp, Glycine max
  Clone ID: PAT_MRT3847_23031C.1
tacggctgcgagaagacgacagaagggaaccaaagtgagactaaggctaaaatcaattcataagtcaagcttttgtcatcacctaaaaaagccattttttaaggtccaacgcctttaaatggtcttttccgcttttattggttaaatgtagatttctagaggcctaaaatcaacatgtaattttattacctctttcaaaaatatagagatcattaatggtccaatgccttaatgttttatctcttttcaaaaaaatcgaaagattgtttaatggtccaacgccttaaatgacctttcattcaaataagaacacatcttgcaaaaaaggataaaaaagtaacttaaccaaacactttgttctcaaagaactacgtaggtctgatttccttatcacaattgagaaatacatagaagcaaagggatacacccttgtcgaccgcaaaaagataaaaatataaaaagtacaaaaagaaataaagacgtaaaagggaacattaaaattgaagtcatgtttgcacattcgattaaaggctatcgtcccttgtgacgaacgtgtggggttctaataccttccccgtgcgtaaatacaactccaaaacctttcacttaaaatttgtagaccacgtcttttccggtttttccaaagttttcctcaaataaacgttggtggcgactccgcgcgtattcccttattggaagacgcaccagagagtcacg

SEQ ID NO: 57609 - DNA, 433 bp, Glycine max
  Clone ID: PAT_MRT3847_23032C.1
ctctcaaggactcttcttcattctggattaaattgagagagacaaactctgtgcccttcgtggaacctgaccagaccaccactctgtctccgccaacatccactcaggcaccctcgacggcagcatccactcaggcaccctcgacggcagcatccactcaggcaccctcgacagcagcaccaagcagctgcactcgtgcaagtagcagtatgactgtaatactgcttgcggtattagggcttatgctggcactttcacgctcttctaagtagttcatccatcgtattgacgattgttcaatcattcagtaaattttaggcgcagccctcaggccggcctttattattttttttggatttttaaatattgttgtataacctttcaacaaataaataggttggaaccaactaatgccaagtacttctgctgtcta

SEQ ID NO: 57610 - DNA, 239 bp, Glycine max
  Clone ID: PAT_MRT3847_23033C.1
taaggacattgagaatgatcttgatgctcaatcacaggattgctacatagcagtggaggctttatgtgaggttttgcatcacagacagcctcttattgtctattttccggacagttcacaatgtttacataaagccgttcctaagtcaaacagaaatgagttttttcataaggttgaggagatgtttgaccggttatctggccctatagtattcatttgtgggcaaaacaaagttcagt

SEQ ID NO: 57611 - DNA, 472 bp, Glycine max
  Clone ID: PAT_MRT3847_23034C.1
tggaactttgggctgatttatgtgcttgcatggtcgtgagaagatgatagaagggggagccgttaccgaagaagaagtctagactggaaaaaccgattctcttaactttaactttactgccgtaaacgacttgacctacctcgccgtagaataggtagggtaagatttgctccgttaaacatcatgccttctctgaggatcttgagaagtataaggctgaacatgaggcctactggtctgctgcaaatagagatttcaaacatataaaccctgctgagccctgcatgtataagacaacacataggtgacacgtcgggccaccccctctatctcgcgccgacactatcgacaacgagccggtgcacccagagcgtacttacccgcccgcggaaacaccggactatcctcctagtaacgctcgcgagtctgacccggcccccaatccttataaggctcactccacatccgacga

SEQ ID NO: 57612 - DNA, 261 bp, Glycine max
  Clone ID: PAT_MRT3847_23035C.1
cgcagtgaagtgtgatcaagagcataaaaccaagggctgttgtgatgctgagtatacatgctagaatataagatgaatcaatgtattagagagatgaggattaacaattatttaggaaaagatgatagtaatgcatctaagatggtttgaccatgttggaagaagacctatagaagctcaaatgagtagagttgattagataaaggatagcctaatagttaggggtagaagaagaccaaggaaagctttaagtgaaaccat

SEQ ID NO: 57613 - DNA, 715 bp, Glycine max
  unsure (1)..(715): unsure at all n locations
  Clone ID: PAT_MRT3847_23036C.1
cagcattgcaattattttttattcaaataatgtgtaaccggcctctaaaacatatgaatatgaatatctaacaccagctgttgtataagtaatgctatttatggatttatctcttttagttatgatgtggtttagttaagaagcgcagatatggggtcatgtacgaatttgtgtttaactgtattaactagaacaaatgtgtaaatgtcattcttcatgttgtatattctagtgctttctagtttagtctttcttatataattattttagcatgttgatcatcaaaaagagtaaattacacttttaaaatacatgagtggtatatttatttatcttgccatgcatcataacagtcctagagctgcttaacatgtggaaactatattatgttcaatcaataaccagtcaccaactccatctgatatagtaatatgttaatgcttttttgtttcttccaatatgtagtttgattttctagcttcccattgtattgcttcagaagatcatgctaatatactgcttatatttgatacttataggaaatatttggttcgatgccagacatagttcacttttttcttccttttaatcagattatattctcaattctacatataatatctgcagcactaaagaaacattacgtgtttattttccgcttgctntattatatatttctattatcttcacatttagtggaacttttgccgtgatt

SEQ ID NO: 57614 - DNA, 351 bp, Glycine max
  Clone ID: PAT_MRT3847_23037C.1
agctaccggggcattggaacaaaatgggtgtttagaaataaattagatgaaaatggcatagttattagaaataaggctagattagtcgccaaaggatataatcaagaagaggggatagattatgaggaaacatatgctctagttgctagattagaagccatcagaatgttattagcctatgcatccataatggactttaagatttatcaaatggatgtaaaaagtgcattcttaaatggctttactaaagaggaagtatatgtagatcaaccccctggatttgaaaactcagaacagcctaatcatgtttttagaataaaaaaaggctttatatggcttaaagcaagcccc

SEQ ID NO: 57615 - DNA, 777 bp, Glycine max
  Clone ID: PAT_MRT3847_23038C.1
ccacgcgtccgacaatggtcaatctaaagttttttctcttccaaacaaacactgtgatggccatttcctatcctgcagaatgaatactcaattttgcagaacaccaccccatcacgtgcatgcacccatcatccccacttcccacttcccttccttgtacactgtctcaccctcccacccacgtttcttctttcatgccaatttctcagcttctcccactcccatcttggaagaagaaccttcttccaacacccccatcatccatgttgtggatgttaactttgatgttcagcagcaatattccaagccagaacctgagaacttgaacgagtttttatgtgggttgttcgaggatccaaagaccaaggagcttgcttttgactactaccaaaggttgaaagagaggccagagtttagacccgagaagccaacactgaagcatgtgatcaggtacttggtgagtttgaagagttgggattccattttgtcggtttcagatgactttaaggtttaccatgtgttgcctgatagggctacttgctctaggttggttaagttttgcattgagcataggaaattcagggttgctgaggccctgcttgatgtttttaagtctgatagtaaggttgctttcatggcttttagttctgccatgagaagttacaacaagctgcatatgtttaggaacactgttttggtctttgaaagaattaggtcgagtaatgttgttctggattcgagaggttatttacacattatggaagcttactctaaact

SEQ ID NO: 57616 - DNA, 515 bp, Glycine max
  Clone ID: PAT_MRT3847_23039C.1
cagaaacagaaggaaaacaagaggcagtgttgttccctttcatggcccaaggccacataatcccgttcttagcattagcacttgaattagaacagagaaaaaagtacagcatcaccatactcaacacttccctaaacatcaaaaaactaagatcctctatcccaccagactccaccatctccctcgtcgaaatccccttcactccctccgaccacggcctccctcccaacacggagaacaccgactccatcccctaccacctcgtcattcgcctcatccaagcctccaccaccctccaaccagccttcaaaaccctcatccaaaacatcctcttccaaaaccaaaaacatcaacttttaatcatctccgacatcttcttcggctggaccaccggaccggcgtctagtcgtctcagcggcaccggttactacttaccggatttccccgaagcgcgtgtcattcaccgcacgcagttacccaataacattttcgaagcagatggcaccgacccgcgg

SEQ ID NO: 57617 - DNA, 141 bp, Glycine max
  Clone ID: PAT_MRT3847_2303C.1
gcaccgaaatcggcgcgattgcagagcgaagaagcaagcgagcaagcaaacgcagacatgcggtcaaagcgaggccatagccgcaggtgctgtgcacgtgtagcactcttcctctgcgcgctaacccgatccgctgcacac

SEQ ID NO: 57618 - DNA, 479 bp, Glycine max
  Clone ID: PAT_MRT3847_23040C.1
catttccatgtctctaagcctcaacaccacacttgttccaagtagatcccatcaaaatctaacttcacctgataactatcacccatctcaaactggtattttgcacaatccacaattcaacaagggttccgcttttaccgaagatgaaagatcattactcggaattcgtggtttactacctccccacattgaaaccattgaccaacaattaaaacgtgcataccgtcaattcagtgcattcaacacaccacttgaaaagtacatctacttgagcagtttacaagatagaaacgaaactctattcttcaaactattagtggaaaatccagttgaaacaatgccaattgtttacactccaactgttggtgaagcatgtacaaagtttgatgaagttttccgtgcaccaagaggaatgtacatttctctcaaagacaagggcgtgatccgtcaagctttagataattgggaaagaacacctg

SEQ ID NO: 57619 - DNA, 276 bp, Glycine max
  Clone ID: PAT_MRT3847_23041C.1
attcggggacgacctacgcgtccgtgcgagaacacgacaaaagggcgactaaagcagtcgtctaactaataagctaactaggtgggtgtaacattgtgtgaccgtgaacaaattatgatgtccaagaaggacatttttacacctaaataggcggatactgttatataatgcaaatatcaagcttagacagattccactgctagtgcacttgctgcaggcacatctgaatgggctgtatcttggaaacttacttaaccatatctaatcatcctttcg

SEQ ID NO: 57620 - DNA, 291 bp, Glycine max
  Clone ID: PAT_MRT3847_23042C.1
gcctatcaatacttcacaaaaaatcctttgatcaacaaaaatggaaaacccgtggctatctccaacaaagttacgtggatctctagtatgagttcatttgaaagatacatgaagattcgatacgtgctacctctaatgggattaaatgtggtgagtaaggtatgttgccattgttacgatgattttcacatggaaagtcaacgaaaactccaaacattgatgaaaataacaagactttataaaccttatctcctatttgagggcacctttgatgacaagaacgcagaaatt

SEQ ID NO: 57621 - DNA, 282 bp, Glycine max
  Clone ID: PAT_MRT3847_23043C.1
tacacgcgtgcgtgcggatggaagaagacgacagcacttactgctgtggggttgcgcgcggggagttattaaaggagggtgtcggcaaaactgcacaaaaactaccttctgtgattgacgacatcaacaccgaggtttcaaaatcccattttgtggttgctaccttttttactatataaaccaacctttgaatgtactgttgaatgaatacttgcttgatctggggtgaagatggacactactggctgggaagtcctttcttatgatggtcttttctgattt

SEQ ID NO: 57622 - DNA, 424 bp, Glycine max
  Clone ID: PAT_MRT3847_23044C.1
agctaagaaaatgtattacaattctcaaaaaattaaacacaattcagatattaaaacgggactcctttaaaaaataaatcacgatgtacaaagtagtaattctctcatcatactaacagatttaacagaaaagaaaatttccactttaataaaaccaagaaataaaaaattgaaaaagaaattgaaggtgaaaagatggggaaaaatgatttttatcccttgctgaccaactgagaagctattatacttttactcagaaagtgggcaagcagcacgacattttcaaaagtgcatcattgcgcatagcatttggtcagcacccaaaaatgaggcagcagaggcagattcttaattgactctataagaatgtgctaatatgatctaagctatactttcttttcctttaaccgtatgcttgagggca

SEQ ID NO: 57623 - DNA, 435 bp, Glycine max
  Clone ID: PAT_MRT3847_23045C.1
tggcttggaacctttgggctgatttatgtgcttgtttatgtgcttgtttatgtgcctgcatggtcgtgagaagatgatagaaggggataagtccctccccggacgcgataacggccctccgcgggacgcgactaacttagaacttagcgaattgtaattagaagacggggcgctcagagaaaacgtcctcgaggtcccggacgtcgagatcaggctaagcattttcaatgttatcaactagtaaacggataagtgcacgagtcttttgaggacgtttaacctcaaatgaccgaaggaacgaaaaagccttaagacaaataagacccattaccagcgtagttagtaatcggagaaccggttactcgaacctccggaatggtacaccactaccccacatgcaaaaggcaccgacgcaacctctgcgcaacactctcg

SEQ ID NO: 57624 - DNA, 348 bp, Glycine max
  Clone ID: PAT_MRT3847_23046C.1
gcaatttaactagtgacttttcaatctctgatactccacaaatttcttccctcaggtctctctctctcctctcacaccgcgtcaccgcccccccactgtcgccgccgccgccgccaccccccctcacagttccattctcttctcgttttcccttcgtctcactctcacacgaaaaccagttctcgtcgcggcggcgctctcgtcagtcgctgccgtcgccgcctccgttgacgtcggaggttccttcaacaccaaattaaaagtgaaaggagatagtgctttgtgtgccttgaagttcaattacccttcaacctctggacttaattttcctttcttcttcccttcatt

SEQ ID NO: 57625 - DNA, 443 bp, Glycine max
  Clone ID: PAT_MRT3847_23047C.1
ctcgagccgaaagcataagaaggattttaaatgattgtaccaatttttcaatggtctattgccccctccctaaaaaaaaaggctttttttttcaccttttgcatttgggttgcattgtagtgtatgtcatttgccgtgattgcaaaattttgcctttgatgttcatttgtgagacatgcaatcaaagtattaatcttttttctgatatgaaagtgggtatgttagattttatcggtttaaattgtctctgggtattgttgatcgattattttttagtctatgtactgttatttaagtgagccaatatgggttgttttcagttagggttttgagatcatgttgagaaagaagaccatgtcaatccagaaggatcaacattacactgggcaaaaggtaatctctgataccaattttgagtcttattctttggggggtaatgggaa

SEQ ID NO: 57626 - DNA, 217 bp, Glycine max
  Clone ID: PAT_MRT3847_23048C.1
acattaaagagtggaggcccgctatagaagagatcttagcgcacaatgttttaagcgtatcgctgaaatagacaggtgtacaaaaggacaaaagggacgactccgatcatgttgtagagaggagcactcccagcgctgcattttgttgacctagaccaatatgaggtagaaagctaaggcctgcccatcctataggcgaggagccttgaaaacccat

SEQ ID NO: 57627 - DNA, 311 bp, Glycine max
  Clone ID: PAT_MRT3847_23049C.1
gtttggtattttgaggagacaaattgttgagcatttgagggattccagaatattcaaaaaaaaaaaaaacggccgggcataacatcctaattctattgcgatccactaacacccccacacgaaggcttgcctgtctatgtgctatcatttacaatatgctactatattctggataaaaacccacagtcatttcggggggaactcaggaaaaaaatcccgcatggtcagatactttgactgctttttactaacccggtgagggtgtttctggtgtatagacaagctaaagacccctgccggatgcgccctaa

SEQ ID NO: 57628 - DNA, 119 bp, Glycine max
  Clone ID: PAT_MRT3847_2304C.1
tgttataatactccgatcaatgatgctaatacagtgaaaatccagatacactcaggacctgccgtcgtgttagaaggtcggcacccattcctgtatctaccatgtgcacacaattcaca

SEQ ID NO: 57629 - DNA, 168 bp, Glycine max
  unsure (1)..(168): unsure at all n locations
  Clone ID: PAT_MRT3847_23050C.1
tacggctgcgagaagacgacagaaggggacccatatcacgagtatttactgcaaaacgtntcgattcaccggttcacgtcgtatcgggtggccgcaagtagtgttagtattaattactcttaacttttccctgtggtgagcagagggtaatccttccccggttgggtt

SEQ ID NO: 57630 - DNA, 326 bp, Glycine max
  Clone ID: PAT_MRT3847_23051C.1
cgcggaattcggctcgagttgggactacaaaattcagaaaacccccgatagaaacccaccgaagcccccgcccaaaaagggggggaagatttaggacgaaacacccggcatttccccgccagggggaccgcggcgagagaaagtaaacccgaaccggaagcaacggaggggaaaggaagaggaccgtaggagcaggagccaaacaggggcggacagaggaagccaacagggaccgggggacaggctaaagaccacagagagccaccagaggcacctagatcagaaccgggagaagggaaaccacaggctaagtacagggctggcac

SEQ ID NO: 57631 - DNA, 340 bp, Glycine max
  Clone ID: PAT_MRT3847_23052C.1
tctatatcactctacaccttcctcttcgcaatttgtgcgcactccgacaccccctcggccgggtcatattctgggatccccgacacaaaaacactatattgctccctcctctccgtcagcttcagcgaccgtattctggtccctcctctgcgagaagtgtactatgacgggctaatcttcaacatcacccacaggtatgtcccctagatgccggtgtcctactctactgaagagctctgtcaacacttcctgtggctcgaaaagagcatgaattaatggcttgtgcgctaacaaatatcaacatgaaacttttacaccacccatttacctccatacttta

SEQ ID NO: 57632 - DNA, 458 bp, Glycine max
  Clone ID: PAT_MRT3847_23053C.1
atttagtggtgtctgttctattacaaatagttggtggtactgggcatcttaatgctactgatcttgatggagtattttaatgttgtgtttctacacctggattaccctcttctcttttctgggtgcagatttcgagttcctgtagatcagagaagggctgctaatggaggctttgctgctaaggtacttctttactggtttgtgtctgttttctagttttgtatgctgtattcaagattaaaaaaaaatgattttagtagtgtaaccataaaaatgcctttgtatggctatgtctatgtggattattggctaattttgaatagggcggtgtttatttacatatttaatctttttcaaaagctctttctatttaattttttttttagggtaaaaggacctatttaattttttttgagggtaaaaggaccttgcagaaataaggaagctatcactcaatg

SEQ ID NO: 57633 - DNA, 331 bp, Glycine max
  unsure (1)..(331): unsure at all n locations
  Clone ID: PAT_MRT3847_23054C.1
ggggtgtgaccattttgctagcgcaatcatcttgttccccaattaattaggttttttcagagtatcacattttgcatcgattcctctacgcacgccaccgtcaatcatctcagcacaacgttgcgattcggacaatcgcaatacggtacggtgtttcggttcctattgctttataaacgctgcttttatagttgctgtttcggaaatgatgaattaaatctggtactgtaacatggaagcttctttctctatttcctcttctgatntttggttcgatacttgntagacacttagattggtccttttttttttaaaaaaaaattcaattaac

SEQ ID NO: 57634 - DNA, 267 bp, Glycine max
  Clone ID: PAT_MRT3847_23055C.1
gtccgaagagatctcaaggatggggtcaatttaaggattattcgggttttcactctgactcgcttatctaaaactgggagcaagctgactttagcctagttattgtctcaccaccgtcaataaagtaatcgtatttgagacgtcctagttgatttaccttgtgaaaaactctttgtgtccatggcgcatatatgatttactctaaaaatataggctcgttataatagaatcatggcctatgcggcttgaaccttgaaacagcgttga

SEQ ID NO: 57635 - DNA, 355 bp, Glycine max
  Clone ID: PAT_MRT3847_23056C.1
cccacgcgtacgaccacgcatccgaccacgctttcgagcgcatgctaaagcaagctgtggcgagaagatatgcacttgctgaggctcatcgtaagtatatacactctctgaatgcaggaacagcggacattaagctctttgatgcacgccactcttcaccttcatgaactttcctcataactttccatgctccttgcaccttattctgcttattcttctcattctcatcccactgagaatgacataaccaaccccatgttgctgcagcagacaccctcataaaccaagcatgaagccattgcttgagactcatgcatctcttcaacaacctcagagtattctgaggaagagagtg

SEQ ID NO: 57636 - DNA, 431 bp, Glycine max
  Clone ID: PAT_MRT3847_23057C.1
gaagctatgaaaggcgcctatgataggcagataaagcaaagaggctacatcatcaagggtgatggtcacttctcttacaggaagatgaaaactcctagtttccttatgtcatctctctgcaaaagcctatataagtctctgatagccagtgtccaatgaacatgcgataagaaaacttaatcttgtggtagtaactaagcctttaatctctacatcaagctcccgaatttctgaactttccttccatgggaagataacttcaattcaggatggtcctaaaaaaatgaatttaataattttaacaataataacaaatacttattgaaatataacttatttaaaaatacaaatacctcttcattatagacaatgactgcaacatgatcaacatagccaatcagaattgacgtgtcatgcggtccgctgggaaa

SEQ ID NO: 57637 - DNA, 2482 bp, Glycine max
  Clone ID: PAT_MRT3847_23058C.1
tcccacgcgtccgaatttcttcttcggctcgtcaatacaatcaacttcccattttcctttcactttccatcactttctctcgtttccccttcgcaatttcccctctcgaaagagacacgcatcgaagaaaatcacatcacggcaatggaggaaaagcacgcagcagccatcgaatccgcacacgccgaatctaacggcgtctctcacggcgccgaccacggctggcagaaggtgacctacgctaagaaacagaagaagaagactgttaacgccgctaacggcggccccgattcccgcgccaattccagcaagctcgttccgaacggcacgctgtccggcaacgactggcgttttccggtcgctcgaactgcaatcggaggaccggcgccgaaaaattgtggaggcgaagaagctggctgatgccgcgtacgacgacgaagacgcgccgctcagatcgaagcagcggcatcgcgacgacgacgacgaatacgactacgatgacgagaatgtggaccgttctgcggagaacgggaaggccgagaaggcgaagaaaatgaacgccgaagaaaccgcaaaagcctaaggagacaatcgcagaagacgctgggaatgttcgacgccgctgatctgggcgttttcatcatcgagatatcaggatcgttcgagaaccagaagaatatattgatgatgcgattcgttgattattatggacttgccttttcctttcttgaccgcatctgcagctaccttgggtgaaactgttaagggagttcaagcgtggatgagattaacgatacgccagtttctcacatatctgatgctgtataaaaaacatcaatcgactggattaaccaccgttctcctgaagcacttagtaccttactgatttggtctttagatagcattcttgctgacttgtgtagccagcaaaatgtagccaagggttccaaataggctgtgcaacaaacaggctcaaagtctcacgctgcaagtttcgttgttatggcaatagtttttgcgatgggagcctgttgctttactatttgtatcacgctctctgtcggaggcaataaggtatctcaagcaagaaatgctgctagtaataagctgtatggtagtgaccgcgcctatcgctgccaactttctgcaatcgtcaacaagggcaagctttcttctacggataatgatttgcacgaaatttgtgcccccgagtaggagtttgttaaattcctagtttctggaaatgtcaggatctttccttccaggacttccaatccaaagaatctggaaattaatgactgtgagtcttataatccaaggaattcactgtgcaaagacgctgccatttagcgccattccatctaaatccaacttaagggagcccatgggttcataatatgtaaaacccttagccttagacctatgtcagttggctacgccctttgtatgtccacgaaattagatatcttaggattgctcatatttctccgtatgtgccagcgagaaacaacgctttcgttggagatcatttcagattttgctaataagatgtcttcggatggcaaatatcagtcccgtctgattcgttgaaatatttctaggtctacagttaaatcaaatgcttcagatatggagaagatttctgatgattggaaggaggctatcatcataatttgtttcctcatgatcttctgagggataccataaagaactttaagcaaaagaatgagaaagtattggacatctgagactgatgctgctcgtcatgcacacttcaaggatgccgataaatattgtaagataatcttaggaagagtttcgcgaagtcatgggtgcatgacttgtttaacctttacagttcttgctttggctgtgggtgctgctgtttccttgtcccccaatttggaatctttggattttaagaagctctcggaacttttcaacgttcagcactgagtactctggagaatattccgcattaccggcagttggttgcttcaaaacggcaattttcttttcagcccatctcattcacaaatcacaatgggtacagtaaaccaatagcctcataataaagtgcttaatgcggagattgtacacttagttcaaatcctgttcggatgacagagaatagaggtcaacaatgctttgaggtttactttagtttgaccattttataatttatttgttgttcttgtttctgttgagttttaattttattttagttactatgtctttacattaacttatgctggcaaaatgccaatgaggtaactacagctgtatcctgaagttagttttaatcaaaggaattttggtggtacatggcgaaaaaattctgggataaaaatttaaaaaccttgtgttaactcatacatcttttggggtttctcaggctttggtcgtgtaatagattaactcagattgacctttctcattcctctttatttaactctttaatgccatgcaaaatttacttttt

SEQ ID NO: 57638 - DNA, 220 bp, Glycine max
  Clone ID: PAT_MRT3847_23059C.1
gtttgtgatgtggggcgggagctgctccctgggtgtcttccgatactattacttatctaaagagagcaagcttttacttagacagttaatgaattaagtaattaattaataaatagtagttgttaattttgctttcgaccggttgggatgatgatagtattattagtaggattgtgtctttgtcctcgagaaggctaagatgtgatagtgaataagtgtt

SEQ ID NO: 57639 - DNA, 340 bp, Glycine max
  Clone ID: PAT_MRT3847_2305C.1
gacagggggttttctttgaccttttggtttccaatgggaactggatttccacactttcactttccatactccttctattgagcactataatagcaccaaccaacttgttcaaaaagactacaaggtggtccttcttcctttactttcattcatgggaaaagtcacaacttctgcaacccagcctgtatctcaagaagcttccaattatgatgaagtttttatgcaacagagcttgctctttgatgatagtctgaaggatttgaaaaatctgagagcacattatattcacagctgatatttgactctatactcacgatgacaaaacagtgtgtagaacatg

SEQ ID NO: 57640 - DNA, 249 bp, Glycine max
  Clone ID: PAT_MRT3847_23060C.1
gacaagcccataatgcattcaccatatcttttgggaatttatgcttcagagggatggttcatgaggctgatggaagctagtaagcaatttgtgactaaggacccaaagaaggcccacctattttacctacctttcagttctcggatgctagaggaaactttgtacgtacccaattcccatagttctaggaacctgattcagtatctgaaaaattatgtagacatgattgccgggaaacatcgtttctgg

SEQ ID NO: 57641 - DNA, 223 bp, Glycine max
  Clone ID: PAT_MRT3847_23061C.1
ctgatccaagagaaaatgagaaagcctaaaaacgaacgaacgaacaggatcctccctcttctcttctcaggcacacatgaaacaccaaagaagcgacttcaagtcttcaacgatggctacgaatacgattacctcatcctccttccgattagtagcaacgagaatccctctctcccgcttccgaaaaacaccacatctcctttcattccccacaaaacccttt

SEQ ID NO: 57642 - DNA, 2343 bp, Glycine max
  unsure (1)..(2343): unsure at all n locations
  Clone ID: PAT_MRT3847_23062C.1
tgtttctcaatttttcctttccttttcgtttcccttcctactttttcttttatcacatccaattaatgttccatatcctgtgtgcataaattatgttcaagtaacatttctgttattgttttcataaagtttgattaaaatttgtgttgtaggtgtatggccagaatctccgagctttagagatgaggggatgggacctataccatcaaggtggaaaggaacttgtcaacatgatcacaccggcttccgttgtaacaggaagctgataggagcaaggtacttcaacaaaggttatatggcccatgctggagctgatgcaaaatttaaccgttcactgaacacagcacgagactatgagggtcatggatctcacacactatcaacaataggaggaacctttgttcctggggcaaatgtattcggcttgggaaatggaactgccgaaggtggttctcctagggcccgtgttgctacttacaaggtgtgctggccaccaattgatggcaatgagtgctttgatgctgatatcatggcagcctttgacatggccatacatgatggtgttgatgttctttccctctctcttggagggaatgctacggattactttgatgatggcctttcgatcggggcctttcatgctaacatgaaaggcatccctgtcatatgctctgcagggaattacggaccaacacctgcaactgtttttaatgttgcaccttggatactaacagttggtgcaagcaccttggacagacagtttgatagcgttgttgaactccacaatggacagcgcttcatgggagcaagcctttctaaagctatgccggaagacaagctttacccactcatcaatgctgcagatgcaaaagcggctaataaaccagttgaaaacgctactctctgtatgcgaggaacaattgaccctgagaaggcgaggggcaaaatattagtttgccttagaggtgtcactgcaagagtggaaaagagcctggttgctttggaggccggtgcagcagggatgattctttgtaatgatgagcttagtggcaatgagcttattgctgatcctcatctcctgcctgcatcacaaattaattataaagatggtcttgctgtctatgccttcatgaattcaaccaagaatccgttaggatatatttatccacccaagaccaagttgcagataaagcctgctccagccatggcagctttctcttctagagggcccaacacagtcacaccggagatcctcaagcctgatgtcattgctcctggtgtgaacattattgctgcctactcagaaggggttagcccaacaaatctgggatttgataagcgcagggttccttttatcaccatgtctggaacatccatgtcttgtcctcatgtggctggagttgttggccttctcaagactctccaccctgactggagtccagcagttattaaatctgcattaatgacaactgctaggacaagggacaacactggcaagccaatgcttgatggggggaatgatgctaaggcaacgccatttgcctatggatctggtcacatcagaccaaaccgtgccatggatcccgggttggtgtatgacttaaccaacaatgattacctaaactttctttgtttctctatctataatcagagtcaaatagagatgttcaatggtgctcgttatcgttgtcccgatataataaacattctggatttcaactaccctacaataacaataccaaaactctacggctcagttagtgtgacacggagggtgaaaaatgttgggccaccaggcacttatactgcaagactcaaagtaccagcacgtctttccatatctgtggagcctaatgtgttgaaatttgacaacattggtgaagagaagagctttaagttgacagtggaagttacaagaccaggtgagactactgcatttggaggtataacttggtcagatggcaaacgtcaagtgaggagtccaattgtagttgggggggttagagggtagatcattatcaagtgataacacataattaattaggatgacgtcttttttttttttctttttctggtttatattattgggagattgggaaaagggaaatgcataacttaaaatggttggttttgtcattttctattgattagttactctcacttggaagaaccacaatctgtcaatttgagaacaaaataaataaaattttatattaaataaattttcattaaaaaaaaaaaaaataacttaaaatggttggtttngtnnntttcnnntgattagttactctcacttggaagaaccccaatctgtctaagtgatgccnnnnccaaatcccttct

SEQ ID NO: 57643 - DNA, 860 bp, Glycine max
  unsure (1)..(860): unsure at all n locations
  Clone ID: PAT_MRT3847_23063C.1
cggaanncccgggtcgacccacgcgtccgcatcatctctctctctcggctctctctctctctctctagggttcagttttgctttcaattttcgtttaggttttcaattttgaagcatcgttcgaataatactctttcccaaattctctctctctctccctctctctctctctctctctctctctctctctctctctctcttcgcgatcgctgcttccaaagagaacaagttgaagagcgcacactcgtcgcatagctcttaataattgcagaatgaagaaggcagacacaacgagattaaggtagctggcagactaaagggtttcatggcaggcagtggcctgccatctttgggtcgtgtgaagcttactgatttagtcccttcagacgggttgccatctgattcctataaaatatcagtttcaattttgtcacaatctctggctcagttttcggcggtcatcatccagtttccagcaagtgatggggctcttctgagatctagtttagaatctgctcgcctctatttccaccaaagggaaacatatccacctgcagatataatccatactagcgagtctcgtgagtggtgcaaaacatctggttattatgcagatcctcatttgtggcaagaaacttatgactatagaccaggattgactccttcagaacctaataattcaattgagttccccccggcaggtttgccagacatatttgccttattcggaaaagcagccagagatattctggatgcaattagctaccatttgaatttgcgaagctctccttttgtagaaatactggataatgttcccctgagaaatagggaaatttcatcttcagncttgtctgtttgct

SEQ ID NO: 57644 - DNA, 1334 bp, Glycine max
  Clone ID: PAT_MRT3847_23064C.1
aatggcattcattgctgatccctcgaaatccatttctcagggaaaatataataaattcaaatattaagtgtggggcggctgaaggagttagtaaggttaggtccacgcagaaaactaaagtggtaagcatgtcatgcatgcacccactctttttgaccaaatataaaaataaaataaaaactatatgagttattataaaaagaaacacccaaaaaatcataaaataatttcttgcaatgccactaaaatttagatgggaggcaaaaaaaaaaaaaaggtttggccagccacgtggcaaatgaagtctgcacttcaaacaaaggaattcacctcaccaagcctatgtgatgtcttgaatataaaacatcttactacaatcttctggcaaatcgagttatgttggctagggccgttctcaggcttcgaattcctgctccagattttgagcttaccatcatcacaggcttaactacagacttgttctggaagaggctctcttcaatttgcatggcacgtcttgccacatcaattggaaagaccacatctgtcttagttaatacaatctgatattagttttgatctttccattaattcaattagttcaagatctcttggttcataccccacttgatcaatcagaaggcatactcgtctgagaccaactcttgtggacacatactccttcacaagctcctcccaagattctttcacttctcttttgcataagcaaatccatatcctgcaaatcaactaagcaatgctttgttcccagattgaagaagttgatgctgggtaacgggctgctgatgtccgcacaaccatgagtgagtgcattgagaagagatgacttcccgacatttgaccttccagcaaatgcaatctctggaagattaggaggtggaaatgatgatgagacctttgcagcagcaaaaaaatccaatttattcctaaaaatattttcttcaattttctctctttctgaactgctagagaagggaatattatctaagggtgcagaaagatctatattgtaacctgccctttttaagtcaatcatgcgtctcctgcccaaaagatttttttccacaaaggaaagtatcaaagggctaggctgtattgcacggaactgggcattcttggacattttaggctctttctcagactccttttctttctccttctcctctttacttccattaacaccaatgccatcatctagtctcttgtttgagatatcatgtgggtcaatctttatcacccttttcttcttcttcggacgatcatgtagcatctcagcatcatcatcatccaaccctgttctgcggacgcgtggg

SEQ ID NO: 57645 - DNA, 290 bp, Glycine max
  Clone ID: PAT_MRT3847_23065C.1
gaagtggaaaacacactggagagttcttcaggagaagggatgcatggaggaagcatccgatgctcaccaatcagctccgccacgccacccctggccttggcatcgccgtcgtcgccttcggtgaaagccggggatcaccactaaacgtttggacggacgcactccattccatcatcacttaataagcttgctagcatgattttcgagcctttaatgtttaaattttagaccgtgttcgcttctttgcactcactatgtagtcttgtatgcctacattttatgccttcaat

SEQ ID NO: 57646 - DNA, 1996 bp, Glycine max
  Clone ID: PAT_MRT3847_23066C.1
gaaataaggatgttttttattgactgtgtatatgattaattatctgccaaaaattcaagaacttaactaccacattgggcgtacccgaacatcgttgtcttgtaaaaatgctcaattaaatacccaaaaaaatatcaattccaataagtttgatattttatcttaaaacacttcactaacttaatcataaatctaagataaacaagactaaaggatttttaagttcattgtttgatcgctatttattgaaaaagaagatttccagttctatcttatcttgcaggatatgatttcccttcaaaggtgaactggcaagactatattgtcttcatcatttatattcaatattctctctgccagtaacatgtcatcaggtgtagtcaccttaatgttggtataagatccttgagtgatataaacaggatgttttaggtgttcaacaatggacacatcatcagtaacttcaagaccttccctatttacaagctcaaagcctttcctcaacaactcaggcttgataacctgtggggtctgcatctcccatagcgtttttctgtccagtgttttaacaacaaacgactccctgtttgcctctttgattgtggccttcacagggacaccaagaactgcagctccattcaataaaccatctttaaggacctttttcacatctgctgataataccaaaggtcttgcagaatcatgaatgcaaacaagttcagagttaggatcaacagcctgaaagccattataaacagaatcctgtctttcttttccaggcagtgcaaatttgagttctgcttggtaatctccctttgcatcttcaaaaatgtccttgtatgaaggatcacaaaccacaataatttctttgacttgaaccaggtgaaaaaaagtgtggaaactatacaaagcaatgggttgaccaaaaagaggaagatactgctttggcatgctagctcccatcctcttgccctgccctccagccaataggacaaccgaaacacttctctctctcaaagtaatatcactaacctcctgctcttgcatatcaacttgcacaggtgcagagcagagagtgaccacccttgattttgcatttttctttgaacagattgttatcactgacttgcctgcgttttggaatttgtggattattgggaaggccaaaggagaaggagaggaagccaggcgaagatgaaacggaagtggagaaggaggggctccaaagccaatagctaccatctctgactctcactttgccactgcacaccacaccctaaccaaaatcatcataacatcacactccgcccgcccatgggcttcttgggcttcagtttcatccactgcttaatagaagaaaaaaatgggctttaaatagcgtggtgatttgggccgggtctcgggagcccagtaagggtggaaggaaagaaagaaaagcaaagcaaagcgagtgggtgaggaggaaggaagggagggaagaatagaatgggatctggaagtggaaaacacactggagagttcttcaggagaagggatgcatggaggaagcatccgatgctcaccaatcagctccgccacgccacccctggccttggcatcgccgtcgtcgccttcggtatctacctcgtcggcgaacaagtctacaataggctctatgctcccgatcctcattcgatttctcacgtgaaagccggggatcaccactaaacgtttggacggacgcactccattccatcatcacttaataagcttgctagcatgttctcgcagcctttaatgtttaaatttcagaccgtgttcgcttctttggcactcactatgttgtcttgtatgcctacattttatgccttcaatttgcattcacaatgaaactcaatttactttaaaaaaaaaaaaaaaaaaaaaaaaaaaaaaaaaaaaaaaaaaaaaaaaaaaaaaaaaaaaaaaaaaaaaaaaaaaaaaaaaaaaaaaaaaaaaaaaaaaaaaaaaaaaaaaa

SEQ ID NO: 57647 - DNA, 661 bp, Glycine max
  Clone ID: PAT_MRT3847_23067C.1
cggaaaacccgtcgactacgcgtccgccgccgtgggggccatcgcctaccaccgaaccgccgccgtggacgaccgaattgctagaatctttaacacctacaggcctagaatgtgcttcaacgacggtcctgtagtgagcaactatgatgctcaggcactaaggaacgagcctgtgaccgctcttggggatgggaagcagaccggaagtggacaaggtgaactctgctttagtggagggactaatccgtcttatggaaggagaacacgtgcgacctttcaatcgtgaacatccgggacaatttacaatgctagaacttgccaaggtggctcaagaaacactcgaccctgatgctaagatagagtacaggcctgacactgaggatgatcccaacacgagaacgcctgatgtacctagcgctaaagatcaacttgtctgggaacccaaggatgatctgcgctgggacctcccactaatgctttctgacttcctgccactcattgttggtgaccagaaggaaaacgctaccggagactaattcgtgcgtgccatctatctcaaagtgagaaagggatattatataataataggacgaggataaccctggcccgtcaaacgtgccattacctatcacaggattagatgaactctactaaacaggac

SEQ ID NO: 57648 - DNA, 1297 bp, Glycine max
  Clone ID: PAT_MRT3847_23068C.1
tctccctttgcatgttcaaaaatgtctttgtatgaaggatcacaacccacagtaatgtttttgacttgaaccaggtgaaaaaaagtgtggaaactatacaaagcaatgggttgaccaaaaagaggaagatactgctttggcatactagctcccatcctcttgccctgccctccagccaataggacaaccgaaacacttctctctctcaaagtaatatcactaacctcttgcacaggtgcagagcagagagtgaccacccttgattttgcatttttctttgaacagattgttatcactgacttgcctgcgttttggaatttgtggattattgggaaggccaaaggagaaggagaggaagccaggcgaagatgaaacggaagtggagaaggaggggctccaaagccaatagctaccatctctgactctcactttgccactgcacaccacaccctaaccaaaatcatcataacatcacactccgcccgcccatgggcttcttgggcttcagtttcatccactgcttaatagaagaaaaaaatgggctttaaatagcgtggtgatttgggccgggtctcgggagcccagtaagggtggaaggaaagaaagaaaagcaaagcaaagcgagtgggtgaggaggaaggaagggagggaagaatagaatgggatctggaagtggaaaacacactggagagttcttcaggagaagggatgcatggaggaagcatccgatgctcaccaatcagctccgccacgccacccctggccttggcatcgccgtcgtcgccttcggtatctacctcgtcggcgaacaagtctacaataggctctatgctcccgatcctcattcgatttctcacgtagctcttctgttttccctttttcaattcacttcacacactcctttatcttattgagaatctattgaaagggattgggggaacggaacgcacttgctctaggtctagggttcccttttctattttatataattattcaaatttgcgaatgattgattagttatcttctgtgcactgtgagatcagatcaaacactccgggattgcttacaacaactagattgattgctcttgcaggtgaaagccggggatcaccactaaacgtttggacggacgcactccattccatcatcacttaataagcttgctagcatgttctcgcagcctttaatgtttaaatttcagaccgtgttcgcttctttggcactcactatgttgtcgtgtatgcctacattttatgccttcaatttgcattcacaatgaaactcaatttacgttaat

SEQ ID NO: 57649 - DNA, 460 bp, Glycine max
  Clone ID: PAT_MRT3847_23069C.1
ggaaaaaaccttttttttgggtttaaaaaaaaaaaaaaaagggggagggacaaaccccggggggggggccccccccggaggggggggaaaagtcccccggccggggtaaaaaacccagggccaaaaggtccaaaaaaaaaaggggggggccccgaaaggggccaagggtcacaaaaaattgggggaaagggacggggtcccaaagcccaaaattggggggccaaattttcccgggggggggggcccaaaaaaaaaggaaacctgggggggaaacccccagccccccatgggctctaaaaggcccccaaaggggcccccccaatttcataaaaaaaaaaggggtaaggggcaaaaaattttttttggggggggctgggggaatttggaataagggaacaaagtcccttaaacggagcccaaagctttggggccccccctccccgggttcctaagggggccc

SEQ ID NO: 57650 - DNA, 647 bp, Glycine max
  unsure (1)..(647): unsure at all n locations
  Clone ID: PAT_MRT3847_2306C.1
gagttttatcagctacacccatgaactcttctgaggcaaactcatggttcctttctacatattttttctactgttctgatatggaaactcaccacatgatttatactcaaacacaagaggtgctatggcggtttttttgccaactgccataggcaatttgtgaagggaggtccgctatggtgctgccataggctgtaatggcgtgcttatatggaggaatttcggccttccgttgtgttctgccatccgtcattgataacattgcttggtctcctgcttctagataactctcttccataatgaattcagatttataagaaaaaaaatcactgcatttggctaagaaaaaagaaggcagataagttagggttattgaggatataagggtccagtttcataaatgctaagttctgtatgtaatcattttttgattagggattgtgttttgagagacttgtacccggtaggtagagtttttgaaacatttttacctctaggtagaatgtatattaacatacccatctacctacttcaatgtaaatattggtannnnnnaaatgatgtaaaagttgtttaaaacatgtaacagtccctgatgtnnnngcagtacaagttcttcatgtttaaaccttaaacttttggctttt

SEQ ID NO: 57651 - DNA, 343 bp, Glycine max
  Clone ID: PAT_MRT3847_23070C.1
ctccatccgggggcgcttgggttcgtcatcactagtatgagagacccatactgacgatgacaacacgctgccactttgatcggttttgtgatctagataacgatcctggagatgattgcgatcctaagtggtggagtaaggatgaagcagtaaggcgcatcaacgccaactggctgagggccctgcaacggacgctcatcctaagagtcagtaagcgttgtggtctggcctgttgcagagctcgtcgaggcgtgctacgagcaacaccttcctcatgcgcctgtagctgatatacatgctcctcggcatcggcgtactaatgggatacatcatctatgcctac

SEQ ID NO: 57652 - DNA, 155 bp, Glycine max
  Clone ID: PAT_MRT3847_23071C.1
tgctcttttcattcacgcataggttgcgagttccaaacaatgagtttgagtatagagcttgtgtggtaagtacaggcttcaaattctaaatcgcaaaattgtaaggtcctatccttaccaggatgggtggcctatttgtctcatcaatacgcgcg

SEQ ID NO: 57653 - DNA, 282 bp, Glycine max
  Clone ID: PAT_MRT3847_23072C.1
ctatattacttcttacgaggacatcggtgggggcttttattccagttctaacactaatgcagggaaaacatgatttcaacacccctaatggcgcaggaggcaattttgtttctagtgcaagtgattccagacctgcttggtgagttaaaaaagcaagccttaaacctactgcatatgctgtgggagctatagaaattatcattgatagtttcgcaagtccccactgcaacataaaaggtgcaaagcttttggtggacacttatacaaccaaaccctgaaaat

SEQ ID NO: 57654 - DNA, 467 bp, Glycine max
  unsure (1)..(467): unsure at all n locations
  Clone ID: PAT_MRT3847_23073C.1
ggtaaaataagtaacgtttgatgagaaaattaattgtttatatgaattattcattgtaaggagtccaatatatagggaggaagacggagattagttatttcaacaactcttagtaaagtcactcattttattaatagagtataaaatagttntaaattttataaaaaaaaattatagaattgatctgatgaacaacttcaaatttaacaaatgcattaataaaatttaatagaaagagttattgaaatgagtaactttattaaaaattacacttaaaagtaacttgatttctctttatacacggtactctagttctcttagttatgttaaccctttttgagtgctcccccaaagagtttgggtttgtttatatatctatatatatttaacacaactatttgattaatcaatatctaataatctaaaaacatctcaaatcatttatgctcttatcttaaaattggact

SEQ ID NO: 57655 - DNA, 362 bp, Glycine max
  Clone ID: PAT_MRT3847_23074C.1
acctggacatggctcgccttcactaaaaaagaagaccccgccccccaactattggtttgatgcctccgccctgtagatcctgatacccgatagtcctttactgttgtcctgcacagggcaattcaacggagtccatttcaccgtttcggaaagggaaattttccaccggtttaagggttaaattggggggaatgcctttcccttatttgcccctccactaaccttttggaacggccctgggttttgtggggggggacccaagaccaagtgcccctaccataacctaaaaaagaccccgctgagggcccccaaatcctggaacgagggccactccacgggggggttgttctggtattatattg

SEQ ID NO: 57656 - DNA, 208 bp, Glycine max
  Clone ID: PAT_MRT3847_23075C.1
caaagcttgcgccttgattccccgttatccttgggtcgcttggtgggccgagtgctggatgttgctggtccggtccgccgccgcttggtgtccgtccccccccgggggcctttccctcgtcttctttgcggtgctgttggctcggcttcttgccgtggtgcttctcgcttgggtatggcgctgacctttttcttcttccctggcggtg

SEQ ID NO: 57657 - DNA, 254 bp, Glycine max
  Clone ID: PAT_MRT3847_23076C.1
gggtttaggcgtcactatcaatgatcctcttacacattttcggggttaaaacattcctccaccttcatacttttcagaagctaccgcaacattccaggaaagttccaattgtactacatcggtaatcagaaggcaggattctaaaattctttcgactcgattatgatagtaaattagtaatacgaggcatgaagttcttcattataaacaagtaatttctttgcaaaaaaaaaaaaaaaaaaaaaaaaaaaaaa

SEQ ID NO: 57658 - DNA, 421 bp, Glycine max
  Clone ID: PAT_MRT3847_23077C.1
cttttcattttcgttttactgtttgtttatgcttccattttttttttttttttttagtgcgttcttgccagaagttaaaatggcccaagaaactttcctattgacatctgaatcagtgaacgaggggcaccctgacaagctctgtgaccagagaaaccaagctgtgctcgatgcatgcttggagcaggaccctgacagcaaggttgcctgtgaaacctgcaccaagaccgggtggtgatggaaatcggagagatcaacaaccaagccaacgtggacttgggaaggaagcgcgtgcaaattgcggaacattggttttgcctccgatgatgttggccaagatgctgacaactgcaaggtcctccccccattgatcaacagagtcctgatctcgctcaaggtgtgcaccgccaccttacaaaga

SEQ ID NO: 57659 - DNA, 724 bp, Glycine max
  Clone ID: PAT_MRT3847_23078C.1
cccggtcgacccagcgttcgtcccgcgtccgacaaatttgcagcctatgctcaagagcttggcaaacaaaatccccatctaatgagattgattcgagaccatcaagctgacttccttcgcctgataaatgaacctgcagaaggtgctgaagggaacatattggggcagatggcttctgcgatgccacaagcagtaaccgtcactcctgaggagcggcaggcaattgaacgtcttgaagcaatgggttttgatcgtgcaatcgtattggaggtgtacttcgcttgtaacaaaaatgaggaattggctgccaactaccttttggatcacatgcatgagttcgaggaacaatagatctcctttcgaatttgccaaattatttcgtgtcatcttttttctcgatgggtctttgttacatactatgtttaatgaggtaatgcttttgataatgtcaaatctcaagtggataagggatgttttattctcctccatattattgcccatgtatttatcatttccagcccgtcgagggtttcttagtatttcatatacatagttgtttgccttgtattactggtattgtgcatccttttaacgtgtgtaattgtgcatgcttgttcattcgcaagtcgatagatgtgtaattcgtttgacacagactgtttctgggttcagttcatgtttttggaaatataatgactttttgctgtcagttttatattaaaaa

SEQ ID NO: 57660 - DNA, 859 bp, Glycine max
  Clone ID: PAT_MRT3847_23079C.1
ccacgcgtccgcgcctcccgctcttttatttcgttcctctactcgctaccccgtcgttagggtcgtcttcggatcggtggaacttgactgcgccggcgtgaattccgacgctgcgagtggcaccgaattgcgatagcggtgacgaatatgaaggttttcgttaagactctcaaaggcactcacttcgaaatcgaagtgacgccgcaagacacggtttctgaagtgaagaaaaatatagaaactgttcagggtgcagatgtctatcctgctgcacagcaaatgctaattcatcaagggaaagttcttagggatgcttctaccttggaggagaataaagtagttgaaaatactttcattgtaattatgctatcaaagagtaagagcccatccggtgaaggatctactacttcaactgctccatcaaccaaggccccacagacaagtacagttcctgcttcaacccctccagcgtcagtagttcctcaagcttctgctcctgctcctgctcctgctcctgctgcaactggggcactgcctgcatcagttactgcacctatatcttcaccttctcctgctccagccccaactcctgctcctatatcttcaggaactgctgtggaagggtctgatatctatgggcaggctgcatccaatctggttgctggaagcaacttggagggaacaattcagcaaattcttgatatgggtggagggagctgggacagggataccgttgtccgtgctcttcgagctgcctacaacaaccctgagagagctgttgaatatttgtatacaggtatcggcaagctgaagctccacgcttaggctccacttgtagcccaagtgcctgcaagtgctc

SEQ ID NO: 57661 - DNA, 854 bp, Glycine max
  unsure (1)..(854): unsure at all n locations
  Clone ID: PAT_MRT3847_2307C.1
cgtatctattctttgcttttggttttggttgattgaaggccttcacggcattcgttgcggcctcttctttcatttttccatccccgtcgcaccgttcgagcagctttttttcttctttgagttcggtttcgtttatgcagcgttttttcttttccttcttttctattctttgcttttggttttggttgcttgtaggccttcacggcattcgtttcggcattttattcgatttattcatgcagatcttggcatgttataaagggtagactgcaaaatggaggcattgaaagcatcttatggggatggatcttctgattcagattctgaatcagcccattcaattccaacttctgctccctcagcagtattcacacccttgccaccacctcctatctcactccttgatcctccaagcattcttgatctgcagataggtcagacaactagacttaggagcttccctcatgtcgatggtaactatgccttacatgtatatataccaaagcaagatgcacatgacttggcatttcatagcatttggtggagcagtaggactgagactgaaggtgaatctgctcatagtcatagatatgaacaaacacccaaactatctattacctataacaagtttacatttcatctccatcaaagaaagaactagttgctttcttgaaaaaaatctcctctcgggaaccacgtcttaatgttgttgatgttggatgtcccactaaacatcctctgccaaaatgatgagaagctcgaacaagttaccttaggaagagaatttcacataagtttgggaagaactgtccccatacgagtacaccagattgacttcantggtctcaatgctc

SEQ ID NO: 57662 - DNA, 1833 bp, Glycine max
  unsure (1)..(1833): unsure at all n locations
  Clone ID: PAT_MRT3847_23080C.1
atttagcggtgaccacgcgtccggtttttttctttacacttcgcctactctcttttatttcgttcctctattcgctacgtcgtcgttagggtcttcttcggatcggtggaacttgaccctgccggcgtgaattccgacgctgctcgtggcaccgaattgctatagcggtgacgaatatgaaggttttcgttaagactctcaaaggcactcacttcgaaatcgaagtgacgccgcaagacacggtttctgaagtgaaaaaaaatatagaaactgttcagggtgcagatgtctatcctgctgcacagcaaatgctaattcatcaagggaaagttcttagggatgcttctaccttggaggagaataaagtagttgaaaatactttcattggtaattatgctatcaaagagtaagagcccatctggtgaaggatctactacttcaactgctccatcaaccaaggctccacagacaagtacagttcccgcttcaacccctccagtgtcagtagcgcctcaagctcctgctcctgctgcaactggggcactgcctgcatctgttactgcacctgtatcttcaccttctccagctccagccccagctcctgctcctatatcttcaggaactgctgtggaagggtctgatatctatgggcaggctgcgtccaatctggttgctggaagcaacttggagggaacaattcagcaaattcttgatatgggtggagggagctgggacagggatactgttgtccgtgctcttcgagctgcctacaacaaccctgagagagctgttgaatatttgtatacaggtatccctgagcaagctgaagctccacttgtagcccgggcgcctgtaagtgctcaacctacaaatcctcctgctgatgctccacaaacagcacaacctgctgcagttacctcagctggacctaacgctaatcctttagacctttttccccagggtctccctaatgtgggttctggtgctgctggtgctggttcattggactttttacgcaacagtcaacaattccaagccttgcgagctatggtgcaggctaatccacaaatattgcagccaatgctacaagagcttggcaagcaaaatccccatcttatgagattgattcgagaccatcaagctgacttccttcgcttgataaatgaacctgctgaaggtggcgaagggaatatattggggcagatggcttctggaatgccacaagcagtaactgtcacccctgaggagcgccaagcaattgaacgtcttgaagcaatgggttttgatcgtgcaatcgtattggaggtgtacttcgcttgcaacaaaaatgaggaattggctgccaactaccttttagatcacatgcatgagttcgaggaacaatagatctacttttgaatttgccaaattatttcttgtcatctttttctctcgatgggtctttgttacactctatgtttaatgaggtaatgcttgataatgtcaaatctcaagtggataagggatgttttagtctcctccatattattgcccttgtatttatcatttccagcccgtcgagggtttcttagtattcatatacatagttgtttgccttgcattactggtttttgcccatgtatttatcatttccagcccgtcgagggtttcttagtatttcatatacatagttgtttgccttgtattactggtattgtgcatccttttaacgtgtgtaattgtgcatgcttgttcattcgcaagtcgatagatgtgtaattcgtttgacacagactgntcgggttcagtaaaaaaaaaaaaaaaaaaaaaaaaaattaaaaaagggtaaactcc

SEQ ID NO: 57663 - DNA, 676 bp, Glycine max
  Clone ID: PAT_MRT3847_23081C.1
ccgacacgcgtccgccaagggggaaaatgtcttccaaatacattttcatgtgcctcctagtaattctagggatggtactcttttgcaaccacttccctggctgatcatcatttactttcaacagcagaatctcctatgtcagaagttgtccatcgttatagttacgatcatgattataatcccaatcactattatgatcattatcataaccacaatcatcatcaccatcatcatcacaatcatcatcatgattttgatgatcacgatcataattgtggtgatgacaatcaagatcataatgataatcatggttatgatcaccagattcaaaacccacacgatggaaaacactggccttctaccacacaaaatgagccttcaaaagtagaaaacaagaagccacaagaggagcacagttaggtggaggatggccattataagcttcaccacaagaagggtccatggagagaagcatccttaattaggattttagtctaagtaccatggactattgtgaaatatattgtttaattaaagttgagcgtacgttggttcctgaaataaaggaatttaatgttgttttaatttcttgtaatagtatatgttggtgtcaggtgtcagctttgatcagtttggctttgttgaaggaataaagatgcgcatgctacatgcctga

SEQ ID NO: 57664 - DNA, 462 bp, Glycine max
  Clone ID: PAT_MRT3847_23082C.1
aaaaaaaaaaaaacggtccacaattaaatccctttaaaactttttccccggcacttttcaagaaaaaaacggggccgcaataagagccctttttaaacatggcccgggggacactaaatttcggggtttttggacataaataaacctaataataatttggccttttttggggaacctaaggccctgggattttcctatttctgattctccgaaaagaaaaatagggaaaaagaccccaaaggggggtgtttaacaaaaattttcaaccccggggtcttgggcttcctgtttaaagcttaatttcccataaaataactacgtaattttttgcccaaaaaaaaaggggtaagctaaaaggaccttttattaagagaaacatgaacaacattgttcacacccccattatttacttttttcatgggaatatcgggggtggtgctattgggggtggggggggggggg

SEQ ID NO: 57665 - DNA, 276 bp, Glycine max
  Clone ID: PAT_MRT3847_23083C.1
gcggcttgaggtgccattttgcgatcaaaagattgtctatggaagcacaatttgttagcggaaaaaccctgaaacatggtcaacaagattctggggaacagtaataaccgcattgcccttgaggataccaggcaagttatacaaagagtggattctcagatcgctgcggttcatggtgaccaagaaacattggggcgtggcttgactcgcgacgaagttgcttaaattgtctgtgtgggatgtgtgaactactaaaggatgcatggtggatcttaa

SEQ ID NO: 57666 - DNA, 473 bp, Glycine max
  Clone ID: PAT_MRT3847_23084C.1
gtctacgctagagtgcaatgattcgagccacactacaacctggaacgcgaaaaggataatatacgcattggctggactggcattgctacaactggtgaatgacaacggagagagagtgtctgatggagagctggagagggacgggtgctgaccgtgcctcaaaactgagtgctggctgcaagatcacagagagacagcttagggtctgtgtcattctagaccaatgatacactcatgatcggatctcttgcacgtgcacactaattgctgaacgcattactagaagaagtgatttatcacactttcaacctaaaaagccagcatgccaggcagatatagaacaacagctctattaagttctctggctccacctcaagagtctcataagacagctgctgcttacagtcctttttgtatgtgctaccgcacttttgattttctagccctagtgcttgctaccactaaatcatatt

SEQ ID NO: 57667 - DNA, 217 bp, Glycine max
  Clone ID: PAT_MRT3847_23085C.1
gattctttctattcgtcctaccatctcgtccgaccacgcatacaaaaatattataaagaataacttaagagaactcaaagaaccaaaatttcaagggattttatgttagatgtccttaaagattatcaattaatgttatatatgggggggccctttttaaagaacccaattttacttccccttgcttgcaaagaataactttttttttggggccccc

SEQ ID NO: 57668 - DNA, 320 bp, Glycine max
  Clone ID: PAT_MRT3847_23086C.1
ggacaccaatagtgattgcactgcatgctcggtgttcacctgatcacatcatagtcgtcagcgtccagtgatgaagacggcgatgagggccatcgccgtcggacggcctgaaggagcgaatcaggtcgatacgcgaatggtagcagtggatgggtacagttcttcagaagcctcattgttcgccggctcaggctccggcatcgcctacaacaagctcaccgacaacggcgactccactccagccggcctcagctccgcagccatcgcgcatgcattcgccctcatcgtcgccgtctccgtcggcgcgaacatcgccggcg

SEQ ID NO: 57669 - DNA, 391 bp, Glycine max
  Clone ID: PAT_MRT3847_23087C.1
accacttgttgattctgcatctgttctcccccggctgcaatctgagttgatggctaccatgatgattggcgattctgcgatatctgtcttacctgaataggaccccatcttcttactgtagggaacactctctggaaccaacgatcctgtgttggacggcacagagtataggctctcactctccttcctctatgactaccctttcaggcctccatacgtcgagtgtggcacaacctgcttccaccccatttttgatgtgcatggcatcatatgctcggacatactacagcatacatggtcatctgctcatgatgtcacaacacttcttctatctatccatactctgcttgcacagccccacagtagttcaccacctaacgcacgatcagca

SEQ ID NO: 57670 - DNA, 169 bp, Glycine max
  unsure (1)..(169): unsure at all n locations
  Clone ID: PAT_MRT3847_23088C.1
cctcctccttcttccanaacacagnnnncnncanatctcggtagatgggttagatcatcgtttgtgtgcanaatacnngttctcagattcaaaaaaaattaacttttgcgatgtcagtaggtggtcgtgcgtntttgtttcttgggttaatccatgtgatcgtgagaag

SEQ ID NO: 57671 - DNA, 228 bp, Glycine max
  Clone ID: PAT_MRT3847_23089C.1
agtgaatcgtattacgggggggtaactgaatttaaggggccagtgactgaccccccttactcaatttttcttttgaaaccctagaatagctttatactggggcatgattacgagcctaaatgacaggactaatgcccctatggcacttgtaattttataccgccgtttttaaaagtacctgtctttgaccggctggtgtatctggctttgttcctaggtaaaccagtt

SEQ ID NO: 57672 - DNA, 897 bp, Glycine max
  unsure (1)..(897): unsure at all n locations
  Clone ID: PAT_MRT3847_2308C.1
caactgcaacacttaaaggctctcaatttatcagggaatagactctcaggtgaaattccttcacttctcaaggaaagatcaaataatggttcacttttgctgagtgtggatggaaatctggatctctgccgggcgggcccatgtgaagaggataaaatgaatattgccccacttgttgcaggcattctttcagttgtagtctttttcattgtattgggtattgtactgaatatcatttggagaaggagatgcaacagaaaaccagcatcaaagcaagctgtgagattaaatgaagaggttgtgctgaagacaaacaatacacagttcacatactctcagatatcgactattaccaataacttcgacaaaatgattgggaagggaggatgtggaattgtttatcttggttccttacaggatggcacacaggttgctgtcaaaatgctcttgccaaaatgtcctcagggatcacaacagtttcagactgaggctcaactcttaatgcgtgtgcatcacaagaacttagcttcctttgtcggatactgtaatgaagttggacacacaggcatcatctacgaatatatggcttatgggaacttggaagagtatctatcagatgcaaggagagaaccattaagttggagacagaggattcagatagcagttgatgctgctcaaggtatcgagtacttgcatcatggctgcaagccgccaacaattcatagagacattaagactgcaaacattntgctgaatgagaaaatgcaagcaaaagtagctgattttgggttctcaaaacttttctcagctgaaaatgaaagtcatgtatcgactgtagttattggcacattaggatatcttgatccaggatactacacatccagcaggctaaccgag

SEQ ID NO: 57673 - DNA, 380 bp, Glycine max
  unsure (1)..(380): unsure at all n locations
  Clone ID: PAT_MRT3847_23090C.1
tcgggtatgtgttcgcaggacctattgtgttttaaatccacacaatccttttgtgttaaataggcggatggggaaactgacttttcctcagggcacttgccgcagtgttataagaatgcctgtttatatagggggaggagttggcgcatagaatgctattctgatgagtatgccaaatgctgttctttcaatgagacgatattatgttggagatgtcttcttggtagattctaagatgacttgtccctacattaaatgtacagtctatgtcttcataacactgggaaattcggatgttgacgccatcaatcttgcggcttttacacacacgctagggcagattgtagagattcangaaaatgttgtgttgaaattttcac

SEQ ID NO: 57674 - DNA, 766 bp, Glycine max
  Clone ID: PAT_MRT3847_23091C.1
agtgcgtccgtgtacaacaagagtttgagattttggtgcaaatccaacaatcccgggaccaaaatctcaacttgcacgctacccaatttcccaattcaaattctccttctgggtccctgcatcttgtccccagaagcccccacctcttccaattttacccctcccaacgaccttccagctccaatggcaactgggtggcatggccctcttcttccacttcggcaccaacaccttcaccgactcagagtggggcaccggccactccaaccccactaagctcaacgcatcgcagtggataagggtcgcaaaagattcaggcttttcgctagtgatcctcactgtgaaacatcacgatgggtttttcttgtggcccttgattacaccaattattcggtgcgttccagcaactggaggaacgggaatggcggcgtcgtcgccgagctcgcctccgccgccaaggacgccggcgttggcctcggattttacctttcgcggtgggatcgccacgaagcatgctatggtgacactttgcgctataacgagttctacttggcccaaatgactgagctactcactagatatggagagataaaggacatttttctggatggcacaaaaggagacggagagacagaaatgaattatctctttgatagctggatttctctgattcatcagctccaaccaggggccactaatttttctgatttgggtccggacacaaggtgggatcggtaatgaatatggtgctgctggatccacctgc

SEQ ID NO: 57675 - DNA, 281 bp, Glycine max
  Clone ID: PAT_MRT3847_23092C.1
aacacaatctctcccttccaaatgccaattttctctgtcctccatcaggttctgaatggagggcctaaactcactgctgacgaggactcttcacctaacttgcgattctgagagcagtgtttcactgtagtgacacaccagacatctatcgtctaaaacgccagacctccttcataccaacatcggtctcatactggcagagcactggttcaaaccaagtgttctggcaactgtgcacatcgtatgatccttcgtgatggccctgaagcgtcaacattcct

SEQ ID NO: 57676 - DNA, 472 bp, Glycine max
  unsure (1)..(472): unsure at all n locations
  Clone ID: PAT_MRT3847_23093C.1
cacgctttcttcattctcgaacactcttcttaagctaatccagtatacgaagccaccttatctcgagggataaaataaaataaattgataaatggtgtcgtgcggcttcttacagcgtatattttgatgcgaacaatgtatgctatactcatcggtgctgtctgtgttgtgttttgcactgcttacacttaaataaatgacttcactaaaatagagagaggcacacacggcatttcatcgtacccacaaaggtaatcaaggttgtgttttgcttaagaaggacctctatatcgaaacataaaagatggatgatccaaagggtagttcctcgtggttaaaaagtctaaatataagtgacatatttggctggaaaggtcatggagaatatggagctctggcagctatagtcataagcattcttgttcctgtcttgttttcagctntgttctttggaaagaaaaaaggaaaaata

SEQ ID NO: 57677 - DNA, 281 bp, Glycine max
  Clone ID: PAT_MRT3847_23094C.1
agaagacagagcaacattcaatggcgtctaggaagggcttcctttcgaaagtgagttccatgtttgcatcatcaagcaccgatttggagcccaaatccacagatggtgacttggaattggatgaagctgacgtgttcaactggaacatgtccaatgacaacaacaacaagaacactgtgacagagtcgaagaagaggccacgatctggtaagaagaaaaaggtggagggtggtggtggcaaagtgaaccctgtggcctcgtcctcaatgccagtggctatt

SEQ ID NO: 57678 - DNA, 503 bp, Glycine max
  Clone ID: PAT_MRT3847_23095C.1
acgagattcagtctgcgcttgcgcttaaacctgattgattctcctgtctctaacccaaccaacccaacaacaccgtcaagatgaagtacctcgcagctttcctcctcctcggcttggccggcaactcttctccctccgctgaggacatcaagactgtcctcagctctgttggcattgacgccgacgaggagcgcctctcttccctccttaaggagctcgagggcaaggacatcaacgagctgatctcttccggctctgagaagctcgcctccgttccctctggtggtgctggtgccgcctctgccggtggtgctgccgccgctggtggtgccgctgaggccgcccccgaggccgagaaggctgaggaggagaaggaggagtctgacgacgacatgggcttcggtctcttcgactaagcgcgaactccagcaaaggatgtttgatgcggaatcctggtcaagggatggcaattggtggaggaagggtgtcagcggtctgcccca

SEQ ID NO: 57679 - DNA, 216 bp, Glycine max
  Clone ID: PAT_MRT3847_23096C.1
acagctgcgagaagacgacagaaggggtagtgtggatccgtatcctcaattttaaaaacgtcttgaacctctcacttgacttttaggagccatattattttagtcagccaaaagtctgattttcttaaaaaaatgcacttaagatgctgcttcgtacaatatgatttctaaaatcacattgttaatgtgtttctatgtatttctatggaaaatatt

SEQ ID NO: 57680 - DNA, 132 bp, Glycine max
  Clone ID: PAT_MRT3847_23097C.1
gccggatttttcctccgctactaaaaacttgaagaatcaaagtcagaatcagaatccgaaccagagccagagccagaattcgcaggctccggcgaagggtgcccacgatgcgaaggagctccacatgtttgt

SEQ ID NO: 57681 - DNA, 1277 bp, Glycine max
  Clone ID: PAT_MRT3847_23098C.1
catttctattgtcgtggattttattcaggaacctaacaaggttagagtgatccttgaaaatggagagcaacatgatggtgatattttaataggagcagatggaatatggtcagaagtgcgttcaaaactctttgggcagcaagaagcaaattactcgggtttcacatgctacagtggattaacaagctatgtgcccccatatattgataccgttgggtatcgggtgttcttgggcttgaaccagtactttgttgcttcagatgttggccatgggaagatgcagtggtatgctttccatggggaacccccttcaagtgaccctttcccagaaggtaagaagaagaggcttttggatctctttggtaattggtgcgatgaagtgattgcactcatatcagaaacaccagaacatatgattatacagagggatatatatgacagagacatgatcaacacttggggaattgggagagtgactttgttaggtgatgcagcacatccaatgcaaccaaatcttggtcaaggagggtgtatggcaatagaggattgttaccaactgatacttgagctagacaaggttgctaaacatggctctgacgggtctgaagttatctcagctcttagaagatatgagaagaaaagaatcccccgagttagggtgttacacacagctagcaggatggcatcgcaaataatgtaacaactatgcagataaagcaccctggcattcatgtagctcaagcccttttcaagttcacttttccacaatttgttacttggatgattgctggccatgggttgtggtgaacactcatgcaacttgaaaataaaaagggctcaacaatgttaacatgagggtagtaaaaagttaattttatggggctttgtaggaacttttccattcggaagaaacgtgccccaagttattccgtagctcaagatttcaaatagagcacttttccattatttgttacttggatgattgctggccatgggttgtggtgaacactcatgcaacttgaaaataaaaagggctcaacaattttaacatgatggtagttaaaagttaattttattgggctatgtaggaacttttctttcggaataaacgtgccataatttaatccccgttgtatatttcaaatagagtcttggttcttatactttaaaaaaatgatttgtagtaattagaattttctaaatttagattttgatccttattattttattttaaattttggatcatattggcctttcctcaaaaaaaaaaaaaaaaa

SEQ ID NO: 57682 - DNA, 620 bp, Glycine max
  Clone ID: PAT_MRT3847_23099C.1
actcttggggaattgggaaaagtgattttgttaggtgatgcagcacatccaatgcaacaaaattttggtcaaggagggtgtatggcaatagaggattgttaccagttgaatactttgagctagacaaggttgttaaacatggttctgacgggtataagttattttcagctcttacaatatataaaaagaaaagaatcccccgagttagggtgttacacacagctagcaggatggcatcgcaaatgttagtcaactaccggccttatattgaatttaaattttggcctctatcaaatgtaacaactatgcagataaagcaccctggcattcatgtagctcaagcccttttcaagttcacttttccacaatttgttacttggatgattgctggccatgggttgtggtgaacactcatgcaacttgaaaataaaaagggctcaacaattttaacatgatggtagttaaaagttaattttattgggctatgtaggaacttttctttcggaataaacgtgccataatttaatccccgttgtatatttcaaatagagtcttggttcttatactttaaaaaaatgatttgtagtaattagaattttctaaatttagattttgatcct

SEQ ID NO: 57683 - DNA, 1208 bp, Glycine max
  Clone ID: PAT_MRT3847_2309C.1
aactgggaagagcgagcgcactcattcacaatagtgtcggtactagtgtataaaaaaatattcagttgtagcaaagcacgatgtcattgcaaaaatatgcatcaattcaaacactaaacagggtctcatatttaggtcctatacgcaaaccacattaaactgagaagtaacccttactaaataatgtaccacttgctattctaacaactagaaagtaacagccactggagcattgcttcttaccctaaaaccagaaatcacctatgttctcgaccttcgcaccggcgaacgtgaacagctgcgatatctaccgtattcaggactcctgggcttcccataatcaggactcctgcgcctgccatagtcaggactcctgtgcctgccataatcaggactcctccgcatgtctggtccaccaccattgtacctatcatagacagggctgcgtggacgaccatagtcaggacttggtcgcctgtgataaggactgggtgatctctcataaccccctcttcttctaggactgtcataattgtcacccctctcaccatcatccctcagagcatactccacagataccaccctgtccaggatcttactcatatttgtacactctaaagctttggtagcatcttcttgtgtttcaaactgcacaaatgcaaagttccgccgaattcgaacgtgaagaacattcccataaggttcaaagtgtttttctatatcacgaactctagtacggattgggtcaaagttaatcacaaacagggtttttgttggcttctgatttgcctttgatccatcatgatgacgtccacgttcacccctagcccactccactgatagccttcgcttttcatgaccaaaatggaacattgtcaagtgcacgaattgcttcttctgcatcacgctcatcctcataatagacaaaagcaaaaccagatttcatgtccacgcggtcaatccttccatactttgcgaacaagcgttcgagctctgattgacgagtatcatactccaagttcccagcaaaaatcggcctcatcctcttcttccctcaaaatcgctttcgaaatcaaacctatttcatacagcacaaccaaaaatcaagccacgaaaccctaacaccccaaaaaatctaacccggcaaacaagagaaggagaaaaaggcataaaccccacaatgccctaaccttaacaccccttttatc

SEQ ID NO: 57684 - DNA, 258 bp, Glycine max
  Clone ID: PAT_MRT3847_230C.1
tcatcaagaaccaacctctccactatgatgcatgatactagatacatatcaaatccacaatcttatcatgcacgatattaacatccctcactccactttcaacctaacagcgcactccagtggtttctcgcaaagatctcaccgccaccagaaacgcgaagacctcgaacgttgtggcgtgttggtcaaggttgtcagggaggagggcacggatggaggcaattttgatggggctgaagaacaacgagcgatgttcgg

SEQ ID NO: 57685 - DNA, 308 bp, Glycine max
  Clone ID: PAT_MRT3847_23100C.1
tcttgcttataccatccattacttcataagagggtgagatgcgatatgcagctctaagccatcattggatgcagttgctcggaacactcacaagataataactaataagctatagggaaaagactacaacttttgtgccgaattgggagccccaataaatgtacactgccaacttaggggaccggtggacggcgtgcccgatcctgggaggtatccacggcggccggaggcataaattgtcacatggcagctcccggttaggagattaaaggtcacaaatcgttggcgggggctgggacttgtggagc

SEQ ID NO: 57686 - DNA, 313 bp, Glycine max
  Clone ID: PAT_MRT3847_23101C.1
gacaaaaaattaattcacactattttaaaccagggaaacaaaaaaaaaaaggtttatgatacaccatcaactatttctaatagcaatcttttttcgagtacaacaaaataaaattactatacttagggtaaaacgaggccaggttcggtgagaaaaaaatgacatatttcctgccttgctgagaaacttctaatttagcaaagtagcctctattttaataaggtgttcaaggaaccttggagcccgaccatgcatatgataatcacatttggtggttaacattccttgtgctgaaaggggggagggcttgttt

SEQ ID NO: 57687 - DNA, 497 bp, Glycine max
  unsure (1)..(497): unsure at all n locations
  Clone ID: PAT_MRT3847_23102C.1
acgnggaaagggggcgagggcggagaaagagacncngggaaggaggcggcangcgaananngngaaacgggggnnnagnngcagnggngangagnnnagganannnggngnangagnacanggagaaggggagcnnaggggangngnngcanggngaggacaagggagaagagcaaaagaattttttttggaggnncgcaanngcngngggngcggcncaggggggggctnannngcacccccccccngngccngctanngnncacagggacgncaagagnaanaacannnngaaggaccaagagaaagngccaagagnagcagaaaanggncnggctaagacanngcaacgngaggccacccagggngcnangnccagggnngcnggancananggnnacanngcnccngagnangcnnanacaangaaagngacngagaagagcgangngnanagnnnnggggnggngcnganggaanngancacaggcaagagg

SEQ ID NO: 57688 - DNA, 548 bp, Glycine max
  unsure (1)..(548): unsure at all n locations
  Clone ID: PAT_MRT3847_23103C.1
cttttagtttcatcattttttgaataatttaccagtaaggcttgattctagatacttttgctacattctctgcaattgcagatattcaatgaccttgttgctatgggtatatgactatatgcatatgtgttaaaggttgaagattggaaatgatccttttacattggatattgttctctttgctatttatttctacctttcactatttttattatttgttagtttctttttattctactgaagcagtagaatatcttatgcaggatttctctatttgttcttattgtcaatagctagcaatggtagagtaaaaacaacacttccatcaacatctaatagtcttttgacttgagacaaaaagttaaactagatccttcctcccctgagcaatccttgattgtgttatttttcttacaccaaaaaattttcatctgcaaaatatgagctattaggtgcttttgcaatatatgcatcagcaatntatctgtgaacaatgaaggaaacagatagattttgacacagcaggcagcatagtttgttagacaaat

SEQ ID NO: 57689 - DNA, 311 bp, Glycine max
  unsure (1)..(311): unsure at all n locations
  Clone ID: PAT_MRT3847_23104C.1
ggtatccccattcagttggccaatcctcttcacttgttctctctctctctcctcagtgtctcttctctctggttgcaacttggtctgtgtgtgtgaaagcaccaaaaataagaattttctgcaaaagaaatcaatcccctctctcccaaaagaaatgctaaagtgtgggagaaaagggtattaaaaaagataagtgccaaacctcanagttgtgctttttacctncctcagntaaagaaaaaaccaggaccaaaaggaataaaaaataaggtagagagagaaggcattaaggtaagagttaagactagtta

SEQ ID NO: 57690 - DNA, 311 bp, Glycine max
  Clone ID: PAT_MRT3847_23105C.1
aacaaacaatctttgatacctgattttataatatttatctactctaatcaaaaccaggctccatgtgtttcttctaatgctgcggcgtcaacgacaaatactacttcttgcattgttccaattacatatgtatcaagctatgcttcttaatgtataacgatacacattctacatttttcccagggtcaaaccttattatacaataattcttcgtcgccccattttctatgaatcaaccttacatactcaatcattttaattcatttcctttttataatttcacctaacatttacttattttttcgcccttt

SEQ ID NO: 57691 - DNA, 312 bp, Glycine max
  Clone ID: PAT_MRT3847_23106C.1
tttcacctttgtgtggtgggggttgagttagtcacgtatgcagtgtgccacaggtgcaaataaccgaatcagattatacatagttacacaattagcagcagctcgaatcaacgtggtgctcactgaacaaaatgaagagaccgcaatccaatcacttcaaacactaaaggactaaggactatcacaccttgccctgattcatcaaaatgatgtggctgatgcaacaagtgaaactactgtggcagaatttataaaatctaaatcagaaacactacaaattcagattaacaatacagggattcatgactccgt

SEQ ID NO: 57692 - DNA, 1305 bp, Glycine max
  Clone ID: PAT_MRT3847_23107C.1
ttcggctacaaagtcaaaatcacattttcctttggttcctacttccctgttttgtattttctcatttaccacacactcaggaccctttctctattctcttctgcatcaccattcaccgctgagagaacaacacaacacaacaaacaaaggagcctctcggtttccaatgtgaagagagcgaacatggctctaatcgctgccaggattctcggttccaattcgaggccggcggtcgcgctccaccgctggcagtggctggcgtactcctccgcctccgcggcggtggcggagccggagaccacggaggtgaaggactacgccgattaccggcgctccctgtacggacagatcacgcacaaggcgctcctcgtcgacgccgttggcacgctcgtcctcccttcgcagcccatggctcagatatatagaaagattggggagaagtatggagtggagtattcggaggatgagatactgttcagatacagaagagcgtatggtcagccttggggaaaatctcgtctcagatatgttaatgatggtaggcctttttggcaatacatagttagttattccactggctgttcagatcctcaatattttgaagaactttataactattatacaacggacaaggcatggcacctcaatgatgctggtgaagaagaaggattcagagctcttagaaaatcaggtgtgaaattagctgttgtgtcaaactttgacactagattaagacctctcttgcgggcattaaattgtgacaattggtttgatgcagtagcagtgtcagctgaggttgcagcagagaaaccaaatccaactatatttctcaaagcatgtgaattattggatgtaaaacccgaggatgctgttcatgttggggatgaccgcagaaatgatatatggggtgccagggatgctggctgtgatgcttggctttggggaagcgatgttcactcctttaaggaggtagcacagaggattggggttcaggtctgaaagatgatctctttacaataagtttgatgttatgtatagagtcctttaggctttagctgtaaggctgtacatgttctgctcccttttacaatgtatgtatatatgtatgaaaaagatgtgaacctataaaaaccattaataggtgtaggtaggagcttttgtttttccattgatccgtgttttctacgaagtttattttaaaattataaataaaacaaatgaaaaaaaaaaaaaaaaaaaggacgagccgccgtcctgtcgtcgggtcgacgccggggatgtttgtagtgtccgggcagaggacac

SEQ ID NO: 57693 - DNA, 250 bp, Glycine max
  Clone ID: PAT_MRT3847_23108C.1
agggtagaaggtcctctgtggtggatgtaagaagtgttgaactacatgaacccaaagagactagtgagaagaaatctaagaagcaaaaatcttctaaatctcagtcttctgataaggttaagggattgctaaaaaatgtgattttgcagcagtcaaagaagtgagaatcttgggagtggaagtagagtgagaggaacaaaggtgaaggagcgcatgagacatgtctgcgagagacaatggataagggtaa

SEQ ID NO: 57694 - DNA, 423 bp, Glycine max
  Clone ID: PAT_MRT3847_23109C.1
gaaacctatcttagtgaggaagaagagatgatgatgatggaagagtcagaaatggaaatagagtcacaggtgttcgttgctcacgagattgacttggattacgagttcgacgcagttcgattcttcgatttcggtgcacaagaaactcccgctcaagctcgccaagccgaactctggtttcattccgcccggcagctatcctccttctccttttgtggcgaagttagtggcgagagaggacgacgttagggaatgcgcaaccaccgttcacgctgccaattctaatgttccgtccgggattggattttttcgcaccgtttttcaccatgacggttcaaaaggagggggtgggagtgggaacatttctgccttgctgagtggtgttccgcgggatgttaatatgcaactgttacacgtaacctc

SEQ ID NO: 57695 - DNA, 820 bp, Glycine max
  Clone ID: PAT_MRT3847_2310C.1
ctagtttcttctcttgtggattatagattcttacttcagacgggcatccccaaacgcgtatatgtcgcaaacttggtttccaacccttgaataattcaaaaggtgtctttgagacagccttggttggaactcggtttaatatatacgcagccgtcttaagagcatcaatccacaaaaattgaggaagttttacattactcctcatgcttctcaccatgtctaataaggttcgatttcttcgttctgccacccattctgatccggagaaccaggcatagtgtattgggcaacaatctcatgttcttgaagaaatttcgcaaatgaacctggtgcttgtccatcctctgtgtatctaccatagtactccccacctctatctgatctcacgatcttaatttgttttccacattgtttctcaacttcagccttaaaaactttaaaggcatctaaagcttcattcttagaatgaagtaagtagagatacatatatcgtgaataatcatctataaaggttatgaagtatttcggactatttgcatccatgtctggacaacatatgtctgtatgtatgatttctaataaattagaactcctctttgcaccctttttagacttgttagtttgcttacccttaatgcaatctacataagtctcaaaatcagcaaaatccaaagtactaagtactccttcatttactaatcgcttaattctctcaatagagatatgtcctaatctccggtgccacaacatagaggattcttcattcataatacatcgttttaacccaacagaaacgtgcatagaagtagcgtcatttttc

SEQ ID NO: 57696 - DNA, 1151 bp, Glycine max
  Clone ID: PAT_MRT3847_23110C.1
gaaaaaatgaattaatcttgttgtggatggccgaagatcttttgaagaaatcaagcaaaggtaggactttagaagaggttggtcatgagtattttgacgatttggtttcgagatcattttttccaacgttcaaacacaagtagaagtagttggccttatggcaaatgttttgtgatgcatgacctcatgcatgatctagccacatcactcggtggagatttttactttagatcagaagaacttgggaaagaaacaaagatcaagaccaagactcgtcatttgtcatttacgaaattcaattcttcagtcttggacaactttgatgttgttggtagagcaaaatttctgagaactttcttgtccattatcaattttgaagctgctccattcaacaacgaggaggcacgatgtatcatagtgtcgaagcttatgtacttgagagttttatcattttgtgacttccgaagtttggattctttgcctgattcaataggtaaattgatccatctgcgctatttagatctttctgattcaagtgtagaaacactgccaaagtcattgtgtaatttatacaatctgcaaactttgaagttgcgtagttgcagaaagctgactaagttgcctagtgacatgtgcaatcttgttaatttgcgtcatcttgagatattttggactcctataaaagagatgccgagaggaatgagtctgtctccctcccttacgtctctgtatctatatgacttgtcaaatctggagatgttggactgcacggggtttttccatttcgcatccctgcaaatattacccatagccaattgtcttttgctggagaatatgtcaggagaaaggcttcctgtctctttaataaaattaaccataatgggatgtcctttgctggaaaaacgatgccgcatgaagccccctcaaatttggcctaaaatttgccccatccctggcattaaggttgccgatagatggatttagcccccaaggatgatcaccaggtattttttaagtccaaccaactacaaaactatttctgtcaaggatatgtttcatttcatgtctttctccttttacgttttactacatccttcaagtgaacttcagaaggattggatgatttcagcttattttttatcccctgtcct

SEQ ID NO: 57697 - DNA, 331 bp, Glycine max
  Clone ID: PAT_MRT3847_23111C.1
catgggattggttcatagattatagggcaaaaaaacacacaggactaccgggaaaaaaatattaagggaagaaaattggtatatatcaacttttatgcccccaaagattcaacaattcccatgtaacaggaaggcgtgcatactagatcaggcctacagagaacaaaagagaatccatcttgaagcaaaggaatgaccaaaccctagtgaaggggctccgcaaaaaaaaaaccgttgccctgctcattcccactggctacataactagagaaaaccccccctccgctgtgagccaaccgaaagaaatccggttggggatcgtacgcagctg

SEQ ID NO: 57698 - DNA, 131 bp, Glycine max
  Clone ID: PAT_MRT3847_23112C.1
tatacttcgaatttcgaaattcgaagttcgaaggcatagaattcggcgaaacaatgagggtttaaattggtggcagtgatgtaatgttcgcttcgtgctgttcgacacgacaatggcgtatcggtcccggg

SEQ ID NO: 57699 - DNA, 440 bp, Glycine max
  Clone ID: PAT_MRT3847_23113C.1
cgaccccacgcgtccgaataaatagtgttgtaaactaaagataattgattaaataaatccaaggatttatttcaccagtaccaaggtacaagagcaatcaggacctcaaaccatataagtgaagatcatacttaaaggtagaagcaagctaagttcagtaacatttatgaatataaacttttcttttctagatatgcttggcccaaaatgattcactaactagctaaaatcaatttggctcaataaatatgggtgataatccatggacataatgatgagaaattaataagacttcaaaaacaaaggcttcacacacttattaaattttttaacctacaaataatgctgtagagttccggccttgctctcatccagtcagcaaaactacagtgatcagcagtattagaacggagtgcagccctttctgaatgactgtacac

SEQ ID NO: 57700 - DNA, 253 bp, Glycine max
  Clone ID: PAT_MRT3847_23114C.1
acttactagatgcccccacattctactgggcagaatatatataggagcccgatctcttctgggtcagactcacaggagtgctggctcgcttttttgttgagaagacagccttgctgtgacgttatgatgatcgcttatcacgctgatggtgacaccttgcattttcggtatctcctcgctgatcctagatggcgcgccattgtgcgcagccttcggcggggacactatcgtctcgtgggagcctgaaccgccc

SEQ ID NO: 57701 - DNA, 1016 bp, Glycine max
  Clone ID: PAT_MRT3847_23115C.1
agaagaagaactaattaatatttttttacttggtttggttaatctgacctatatttgatcctcaagatgcacttgagattttttagtaagttaactagttataaaaagtgagctaattatgtcaccaccaacaatgactcttcaaatggacaccccttaaacttttaatctagtccctacaaaccatacaccataatgaatgtgacgaagaaataccaagataattatgtcaccacatgtgacacattgaatataacaatttccacattttacatacgcaactttacagataaaatggaaggggagactaagcatggagagttaataggaaaagtgacaattaagaaattggagagtaaagaccctcttgagctgacaaaggatgcagggattgacgttgcttcgaagagatatatttgttcttcaatgaggatcttctgagtaaaatgtctgggatagttcttttggtgtgtaataatgatgtaactctctccttgtgcttaagaaccaagaaaaagagcaacctataacatatcaagaacaaaaccagaactcctaagtcccaccattttgagtaatcatttcgaattccaaacatatcatgaagtatctcttcaccctttatcttggtacccccgggcacctgtggttcaaattcaagacctatcaggtcattcttgaactgaccctgtattgaccatgtaatgtagctgatataggacattggatagcgccaaaagaattttggaaggtctgctaggcttctgaatatattagatggcaccatcatgaatacctgtgtgcacaacttaaagttataaggtaaataacacttcaaattcatgaaaataaggaggatgatctttgaatttgctcacaatggcaccggttgcagttcccattgctaccaataggtcgggggcaagtgctgcaaagaataatgtgcagccttctgtgacagcaatgaggcaaaatataatcatgcaaaaatagcagtaatgagagaagcctggatg

SEQ ID NO: 57702 - DNA, 750 bp, Glycine max
  unsure (1)..(750): unsure at all n locations
  Clone ID: PAT_MRT3847_23116C.1
attgaacagatcaagacacccccatgtccggcaaaactcgatccgattcggctcgatattcttcacactcgatcttgtgtgttcgtatattaattattcccttttgtttctttcttattgctatcaatggcgactaaagaattatttcactcatcagatcaagaagaagcagtaaatgaagaaagcactctactgcagcatgaggtagatccatacgaagaagaagaaactctatctctttctgaccttccaatttacagtggcgcctcaatttcagctagatggggtggtgatttctccaaagaagatggaaaaaactttgttgacgatgacgacgataatttgttcgagttcttcagtgaagaattcaccgcatcatcaaccaattatgcaaccgcagagaatataatcttctgcggcaaactcatccccttcaaagatattaatcctccacgtggtgatcagagcaatatcaatgtccaaaagggtattacaaaacgcagttcaaagggttcaaagagtagttttgcagccagtgactactcatcatcggttgggaaggtgtcactggtgaggagtcccacaaagtcaagatggtttttgttcatgtttgggatgtcaaagttgtccatcaccactgagatggaactcanagacattagaaataggcaaagccgccgccggaggggacccacggcgacgatgatgattccggctgcgccgaaaatgaaaagnaagagtggctgctgt

SEQ ID NO: 57703 - DNA, 477 bp, Glycine max
  Clone ID: PAT_MRT3847_23117C.1
aatgtataatcacgcgcagcttcaattgtaaaaggaggatgacaatcaccctttacaagcctcttgttgtatgaagcgtatcagttttaaccgaaaatgatcatctaacagaaagcgcgattgatgctagaactttaatcgggggcaataagcatggattaacctatcagccatgagaaatccacagcgtgaccattggggaaaattatcacagactatacatgatagttcctacttgacacagagttggtccaaacaaaaaataacgaatttcccttataggaactaggtgactcccgtatacaagagaaagcgccggaacggaactatctccgatgagacctctggggattaacggaagtttaaagagttttattccttaccgcccttaaaaagggaaaattctactcataccactgattggcggaatcattaacaaacaattcatgcaaactcgcctggatacccctctcccca

SEQ ID NO: 57704 - DNA, 612 bp, Glycine max
  unsure (1)..(612): unsure at all n locations
  Clone ID: PAT_MRT3847_23118C.1
ccacgcgtccgggggaactgacaacggaaatgggtttcctcgggcagattttggtatggtttcaggtagccagcagcttgtgtctctggtgaagtggataaatgcggtgcttcctaattttaatctgcctttagatacttcagaggaggaattgagggcatggttgagggatggatctgtattatgcagcattttggacaatcttgttcctggttcggtgaagggaagtggttctttgaatgagctaatcggtgtgaaaaggtttctggtagctttggatgaattgggattgtctggatttgaattgtcagacctggagcagggatccatggtgcctgtgttgcaatgcctcgagactctgaaaactcattttgcttataatgctgcacgagaaaatatccaaagttgttcaagaaagagatgggaccagtcaaatttaacatcctttgaggaatctgatagttgcctcaaggatgcttcaaaattgcaacatgctgttgatggnttctgttgtatcagatgaaatcacttccgtagatcatactggaataaagtctaacgaactgttccagttgaagcaaggattgcttgcagatttttctgatgctaaac

SEQ ID NO: 57705 - DNA, 452 bp, Glycine max
  Clone ID: PAT_MRT3847_23119C.1
gtaaatgcaacaattgattagtgacgaaattttatgttgaatggattgcattgttaggtaattgtatttcttttacacgcgaagataattgtatttagtaggagaaaatgatttattttattttagtttgaaaaaattatgatgaagtaaaatagcaacataaaatatataaggtggttcgatatatggcccaatttgatcatgccagaataataggaaattgtttaagattttcttcctacatcaaaaaatattctatacccaatacttttttaaatattccaaaattatccccttttgaaatatttcaaaatatttggatttgtaatccgtaagaattatccagattggccatatgattcttccagattaacaatccatatgaatcatatggattgtcaatttgtatgattcttatggattgtgaattcgtaatggcctgatctcctcgc

SEQ ID NO: 57706 - DNA, 2143 bp, Glycine max
  Clone ID: PAT_MRT3847_2311C.1
atgtacgaagattctctatcttgtattgttgacctcattgttctattgtttatttttgagaatcttgccctcattttactcactcaggacaatttccagaatttaatttaaatctacaacttatgaaaaaatagggggaatatgacgtcatcaattatcggcgacatctccaagttcaccgtcgattatagcgatgggaagccgacgtggttgacgaagagtgtgatgagacactaaccgaatctccgtcacacaaaatgttagaaaggtatttcccaatatcatcgggtagaaagtccctaacggatttcgacccgacccgattcttctcgaagaacacgctgtacttttgcatcagctgtcaaacctgtgcaaacaggggaggggatgtaactttgttttcttgatagacaccaccaccttgctgttaaaaaaaaaaaaaaaaaactaaaaaaactcgagttttttttttttttttttgtagcaaagcacgatgtcattgcaaaaatatgcatcaattcaacaataaacagggtttccggtctcatattcaggtcctatagaaccattggcactgactgctaaacagcaaatacgcaaaccacattaaactgagaagtaccgtttactacaatataccacatgctattctaacaactagaaagtaacagtgccactgaagccttccgtcttaccctaaaacctgagatcacctatgttcttgaccttcgcaccggcgaacggctgcgatatctaccatattcaggactcctgggtttcccataatcaggactcttgcgccttccataatcaggactcctgcgcctgccataatcaggacttctgtgcctgccataatcaggactcctccgcctgtctggtccaccaccattgtacctatcatagacagggctgcgtggacgaccatagtcaggacttggtcgcctgtgataaggactgggtgatctctcataaccacctcttctaggactgtcataattgtcccccctctcaccatcatccctcagagcatactccacagacaccaccctgtccaggatcttactcatatttgtacactctatagctttggtagcatcttcttgtgtctcaaactgcacaaatgcaaagttccgccgaattcgaacatgaagaacattcccataaggttcaaagtgtttttctatatcacgaactctagtacggattgggtcaaagttaatcacaaaaagggtttttgttggcttctggtttgccttcgatccatcacgatgacgtccacgttcacccctagcccactccactgacagccttcgcttttcatgaccaaatggaacattgtcaagtgcacgaattgcttcttctgcatcacgctcatcctcataatagacaaaagcaaaacctgtaacataactagtattagaggcagaaatgattatgaaagacatcggcatgttattcctcaccagaagtacatcagccaaatcaggaaatcattttccctgtcaggaacaaaggaatacaacacctgaatataagtgagggctgatgcacatgaagctgtagaggcgttgaatgaggaacagaatcatgattgcaattaaaggtttaaatccaaaattcagatctgagactgccaagcatgcttctccattcagacagcacaagtgatttcagaaatagaatggcatgacttgacagaatttcattgatcccctattttcagagaagctaggcatggcttaataaattgattgatgatcccactaacaacattctgatggaaatgtcaatgttgggagatggtgaggtgagtgacgaatgatcagatgtgaaaatgcagatcagtgagtagaaggagagcagacaagcaggaagttttccttcccaaaaaaaatttgcagagaggttggcaaaccaagacagaagctcagcatattttcccttagtagaagttccagatttcatgtccacgcggtcaatccttccatactttgagaacaagcgctcaagctctgattgacgagtatcatactccaagttcccagcaaaaatcggcctcatcctcttcttccctcaaaatcgctttcgaaatcaaacctgaaaaaaggcttcggacgcgtgggtcgagccgggaattccg

SEQ ID NO: 57707 - DNA, 207 bp, Glycine max
  Clone ID: PAT_MRT3847_23120C.1
cctactatgctaatggctttaaagcctattggcttatgtacgcttccgctgatccttaccagataaacgaaatctcatctgtatttccacaagcttcaaatcatgaactccacattgccaaaactttatccttcagtgattgtttatctcaacccctacaatactctactggatcctacaatgacctaattatttcatgtcttatat

SEQ ID NO: 57708 - DNA, 443 bp, Glycine max
  Clone ID: PAT_MRT3847_23121C.1
cccacgcgtccgttcgttttcgacctcactttccttacggctgcaacaaagtttatgcaagatacttatagcataagagtggcagaatctctagccttaagatggtgtgttgaagtcatgtaataagggaccaacactgcattacacatattttgatggcattatcaaagattgcattcaattgatgcactctttttcatcacctggtgttcaatggataagaagaattattgctaataagttggcttctctagctttcatgctttaggaaagatactaaataaaagaggtttcaccttagaatgttagctatctgcaacatgatgtatgaacctcttttcctcaatttggaatataaaaaaaaaggggaaagggccccaaaaggttttaaaattttttttgtttttcccctttttacccttttttttccccttttttttttt

SEQ ID NO: 57709 - DNA, 596 bp, Glycine max
  unsure (1)..(596): unsure at all n locations
  Clone ID: PAT_MRT3847_23122C.1
tcgcatggccaccgctgttacgttaagctttggctccttctagggcggccgccctcccccccccccccccccccccccccccccccccccccccccccccccccccccccccccccccccccccccccccccccccccccctttttaaaaaaaaattttttccccctttttttttttttctttgggggggggatttctttttacaattggtttgggaaattaaacctttgggtttttttccttaaacaacaatttgggggggggggggggtttttnnggaaaaaatttccctttttttcaaaaaaaaagggggtttttttacctttttttttaaaaattttttttaaaaattacttttttttttgtttgacaaaattttggggttagcgggtttttttttttttattttggggaattggggcaaaatttttagggaaatccctttgaaagcccttaatggtttttggggggaccaaggtgggaattaaccttttttttttttttttttgaacaactttttgggtgaaagaaccttaacccccatttccatttccctttttttcctccgggaggaggttttttttaaactttttttt

SEQ ID NO: 57710 - DNA, 532 bp, Glycine max
  Clone ID: PAT_MRT3847_23123C.1
aatctaaatatccttgcccatctatattaattttgactgaatgaaatgatccattcaatttcaagtacagactctacaagaaaaaaataaaagcatattggttgtacaaattttatagatcttttacttctacaccaagcttcccaacatttggttggagtgagctaatagtttcacagaactattctataattctcagggtggacacactagaatgagcacattaagtcggtacaagaaaatggccttggtcctgactgttgatccaaaggaaaggagtagctattgctaaaagagcaaaagaaatgccctaaactaatttatgcttagtcttttgaaaaggctttcccatgagaacagtttcagtaccatttctactttcaggaccaacctcaaaaggcttctgcgtatcggtattacaaggaatgtcatctgttgaagagactgactccagcccaccttggaactgaacatgcacttcaccatcggcacacaagcttccactctctttagaatcatagttgacatgatc

SEQ ID NO: 57711 - DNA, 474 bp, Glycine max
  unsure (1)..(474): unsure at all n locations
  Clone ID: PAT_MRT3847_23124C.1
tgatgatgttataacttgtaagctttccctgttctacctttttcttttcgtactcataaaactacttttctgacatctcatcatattctgttctccgaaggtaacagctgcttcttctggttccattttgcatatctctatcttcatttgattttcaattttcttcatttggggaagtgggtaatgtttttcgtggcacccaattgcttgttttaaattctcactaccattttagtggctagagattgatcctttgtttttcacgttatttccccttacaggtatcttcttttgaagtagacactataggacactaaatacgtgcacttctcctagcagggatttgaaccttggtttaccaggttgtaatagactaaccccttctgctaaattcaaccatagttgggtgnttttcatgctgtattttatttttggaatctcagtttgatgagagggtagttgttgattaatatt

SEQ ID NO: 57712 - DNA, 632 bp, Glycine max
  Clone ID: PAT_MRT3847_23125C.1
gtcgaccttgacctgtttttttgtggccaaacttgactagggttatttttgactgatttttatcaacctcttttacacaaaaaataaagaagtattatactaaaatagatgtttaaattatggaaattgaaaaaaaataatggtacaaatttttatggccatgggccagcccaaccccacagggtttggggggctttttggtcctatggaccatttatatatggggcccatttggccccaacccacatgggccaaggccaaatgggttggggttaaccaattagacaactttagtattaatattaagccgcattttgggagagataaagggttggtaaacaagagggatcagatatcttaggaagggggggttgaattaagatatcaaagattactcccctattaaaattttaactctctttttgaatgattaaagcacccttaatttgaattactacaaagacaattcaaagtaaacttctttaatgcggacgataccgaacattatataaaagaattttaagggaagagagaatgcgaactcagatattatactagttcggtcatgccctgtgcgtacgtataatccccaacaacccgcttgagattttcactatcgtgaaaaacgcctt

SEQ ID NO: 57713 - DNA, 283 bp, Glycine max
  Clone ID: PAT_MRT3847_23126C.1
gaccgataccgattctttcaccttcaacaagttcaacccagtccaaccaaacattatgctccaaaaagatgctataatttaatactatgaggtgttacaactcaccaaagttggcagtaacagcgtgcccacctcgggatctctcggactagccctttacgctgcccaaatacagagttgggacaacgaatccggcaaggtaaacagctgggctacattctttaaattcaacatatacgcacccaaccaatcaaactcagatgacgggcttgccttcatcttg

SEQ ID NO: 57714 - DNA, 1523 bp, Glycine max
  Clone ID: PAT_MRT3847_23127C.1
gccacgcgctcgcgtcagacccttcttcccttcctcgcgctcctgtccagccaacgtcgcgccctggtcgcactcaaacaccatcgcggtttcaggcccacagctgtggcgaccgtcgtcctgccgccgccgttgcgcctccgtcaccactggtttgggccttttgcctctctcgtaagtggtttgtcatcaattgagcctaaaccacttcttttctgaagagagaatgggatttgcaggagccctaagaaacattgttcgccctctttcagttgcatcatcaagagctttaatccctccctttggaatcaattccacagcttgacagacactcgcttccccaagagacgcccctctgaaacacctcgtcgaaagagggccagctagtgactcctctgggccttatgcttgggttcaatatacaccaggccaaccgatacttccaaataagcctaatgaagggagtgtcaaaaggagaaatgagaagaaacgcatgaggcaacgccgtgcctttatattggcggaaaggaagaaaaggaaagctcagctgcaagaggccaatcggaagaaaaatattcagagggtagaacgtaaaatggctgcagttgcaagggaaagggattgggcaaaaagattggctgagttgcagcgacttgaggaagagaagaaaaggcttatggcttgaattagataaggacggtacctacacttggttagattcagtatgacctcctataacagcattaatctatgtcttgaatttgtatttatgggttgtgatgtctctaaacactgttgttttttcttagaacatggaagttagaaacttatccgtgatttgtgaaaactcaattccctcccctgcttagagagagtaatgctaaatgcttacccttttttcgaagcaacaaaaatgaaagaaataaaagaaaccgtctgtcgttagatcactctgcatgttagcaaatctaacagtctatattcatgggagactgtattcaccctaattgtgggttttgatccatctgatagaggttcaacgttaggcccaaagtagggtagcactccatactgtccggtaaatactaaatactataaggaaaggaaagggttaattaggcagagacaaggagaaaccattgggggagttgggaattatgaggaatctgttgggaagaatcatgagaagaagccacgttagtagaagtggttttgttgtgatcaacagcaatataaaggaaggtggaaggaaggcaaaagggtatcctggatctatcatcctttttggcatgtgctcgaggcaagtctgacatgcacggagtctctcctggtgaattctttccttgtttttgaatctattgttcaagttctagttaactactcatcgtggaactttctttgtttataagtatcacccctttgtagggattgttaataaataacagcagaaattttatcccagctctaccactatccttatgcttggtgaacttgtatattccctttccatgtctcgtcaaaaa

SEQ ID NO: 57715 - DNA, 863 bp, Glycine max
  Clone ID: PAT_MRT3847_23128C.1
cctcgcgctcctgtccagccaccgtcgtgccctggtcgcactcaaacaccatcgcggtttcagtcgcacatcgttggcgaccgtcgtcctgccgccgccgttgcgcctccgtcaccactggtttgggccttttgcctctctcgtaagtggtttgtcatcaattgagcctaaaccacttcttttctgaagagagaatgggatttgcaggagccctaagaaacattgttcgccctctttcagttgcatcatcaagagctttaacgcctcggatctccaccaatgcttcgatggcaccattttgtcctgcttttccgtctccctgcaaaactcctcaatggcttcatcccctttggaatcacttccacagcttgacagacactcgctttcccaagagacgaccctcggaaaaacctcgtcgaaagagagccagcttgagaccctctgggccttatgcttgggttcaatatacaccgtgccaacccatacttccaaataagcctaatgaagggagtgtcaaaaggagaaatgagaagaaacgcatgaggcaacgccgggcctttatattggctgaaaagaagaaaaggaaggctcagctgcaagaggctaatcgcaagaaaaatattcagagggtagaacgtaaaatggctgccgttgcaagggaaagagagtgggcagaaagactggctgagttgcagcgacttgaggaagagaagaaaaaatctatggcttgaatttggttttatcggttgtgaactctctaaacactgttgctttattttaaaaatgttctatgacttccgttatttgggagactgataggaatattatcacggggtccaagcccaaatcgaaatggaatgagc

SEQ ID NO: 57716 - DNA, 266 bp, Glycine max
  Clone ID: PAT_MRT3847_23129C.1
tagcaacactactttttctttacatcaccgtgttggccattattggctacaggagacagagtgacaccaaaatccccggtaacaccgaatgtgacggcgttggcattttgggcatggcttgggcctagggtggcatgatcttaatccttgcttactgcactggcggaatctctgggggacacatcaaccctgcggtgacattggggatggtccttgaacgcaaggagtctttggtgagggcgtctgtgtacatgatagcacaaggt

SEQ ID NO: 57717 - DNA, 506 bp, Glycine max
  Clone ID: PAT_MRT3847_2312C.1
gcacaccaccaaattcaactcctccaattttctaaatggtttccaatggagatgaagaatcaggcacacaagtccaactacctgaaaccacaacaaaaaattcaccttcaccctttttcaggtacaactcaccactagttcaagtgattctcattggtgtgatctgcttttgttgccccggcatgttcaacgccctctcaggaatgggtggtggaggccaagtggaccacactgcctccaacaactccctcactgccctctacaccaccttcgccatattcggcatcctcggcggcggcatctacaacatcctcggaccccacctcacccttctcgcaggttgttcctcctatgtcctctacacatcctccttcctctactacaatcaccaccaccaccaagccttcgtcattctcgccggcgctctcctcggcgtaggagcaggcctcttgtgggctgcacaaggtgcaataatgacatcttaccctccaaccaatagaaaaggt

SEQ ID NO: 57718 - DNA, 581 bp, Glycine max
  Clone ID: PAT_MRT3847_23130C.1
tcatttcagaggcccgctgtgaccggttttcccgggtctcatttccttttttagggtcccacccagtattgggtcggctcgcgttcctctcttctactcaacaatcaaggttgcatagtcggattgtgtccttgcacctgctctccgcctgtcgggttctaaaagctatccgcatctttagccctccttttccggtgcggtgttggctagactctactcatcgtcagctggtgcagacagcgggtagtccagtcgcacttctcgtgccacctgccctagtacaccgaatcctattgacaccaaatataccgcttgaccctgcccgttagaacttcgcctcatatgccgttgctttagaagttctggtgtggccagatgattcctgtagctgctaacgatgttgcattctccactcattcagtcatagtacatctaattatattgtcccaaattgcaatgttggaacgtggtggtctcaactgctcctcgcatgccattgcatttgccgctctggtccggattgtttagcagctcttgttattcaaagatagtaaatgatctttgatttgcagcgtggaagt

SEQ ID NO: 57719 - DNA, 273 bp, Glycine max
  Clone ID: PAT_MRT3847_23131C.1
acaaaccttaactttatctatatgagcaggagaattacgcaaacagctgaatgagaaaatttgcgctgcgcttccaattttatgatcctacctatataactagctacttatatcaaggaggacttggaaccttgcacaactcctccgctcctaattatggacaaaagcgaaccacgattgaaaaccaagaacgatctgctcgctctaaattgtgaagctggacaaagatccctgagcataatgctccacaaaggggcgcgacttcctaacatt

SEQ ID NO: 57720 - DNA, 309 bp, Glycine max
  Clone ID: PAT_MRT3847_23132C.1
gggaattagtttcgaggaggttcatcagggtcatttattggattacacccttgaagatgttactgacgataactcatcagctgctctacttggaaataactcaacactgactgtcggcagtgggaaggttgtggacagtggacctgacgagcatatattcgtatactatacaggaccatgtgggtgactgcgctgctcgtgatgccaggtgatgcttacctatgcgcggatgatctgattgtactctcgcagaaaaagcttgcttttggaccatatacaaacctagtatgttgcatggtggcatgtgaa

SEQ ID NO: 57721 - DNA, 197 bp, Glycine max
  unsure (1)..(197): unsure at all n locations
  Clone ID: PAT_MRT3847_23133C.1
caaaggggttttgaagaatctgacatttcaaaacaacagggggttggtacctaccccaattcattcactcaccaacaccatagatacaagtccttgttagacgcacacactgcgaagcactatcccatcttgctctccacagtatcaaacccacaactttcacaacaccgcccaacacgcangacaaaagcgcgctc

SEQ ID NO: 57722 - DNA, 438 bp, Glycine max
  unsure (1)..(438): unsure at all n locations
  Clone ID: PAT_MRT3847_23134C.1
cgaatatctcggtttgagacttcatattggtctccccaatttcttccactatcttgaattaggttaagagccttttcctctagtcattttaatcattctctttgtaaatgatagttgttagatgtggtagaagttgaacaatctcattctgaatttttgccaaacttttctgcaagagtccagcaagcgaaaatatcagtctgagacttcatattggtttccctattttcttccactatcttgaattgggtcatcacaatcgttcactttgtgaacggtagccgttaattgtggtagaagttgagcaatctcattttgaatttttgccaaacttttctgcaagagagtcctacaagtgaaaatattgatttgatacttcatattggtctccctaatttcttccactgtcttgaattgngtcaagagatttgccttttc

SEQ ID NO: 57723 - DNA, 219 bp, Glycine max
  Clone ID: PAT_MRT3847_23135C.1
ttacgaaacataaatatttattcggtcaggatatataatcacgatgaacatactacgaacaatactatactcctagtcatttttataataaacaacattattaattacccatatcatattatcactctacttataatttaatgatatcacctcaataccacataattcaagtaatattaccaacctcaaaaccttatactacaacatgctatcacttac

SEQ ID NO: 57724 - DNA, 809 bp, Glycine max
  unsure (1)..(809): unsure at all n locations
  Clone ID: PAT_MRT3847_23136C.1
cacgcgtccgaaaagttcctcctctctctctacctaactcccaaatttcctcctcgtagggttttctctctccctaagccacagcgtcagcgtcccaccttcctccctttctccttccttccccctttttctcctccaacctcgctgagtccacttcgttctcttcgcgcctccgacaaccctaacttttctcctctaattttcctcgagtgagttcttctctcttccacaaaaccctctctctctctctctcgagccgctctattccttcaatttctaactccgtgtcttctagttttactttcctgaagcgttttacaacttcaatttttcccaagttcatccaaacacgacttttcgatgattccgaggtaaagagaaaaaaaaacaccacaccgatttggaatcacttatcacacggcaatggaagcttctagaatagagaatttgattagagccaagaaatccttgaagataagcttagagaaatcaaaatcggtaggtttagcattagagaaggcggggccgaggttagatgaaattagggtgaggctgccgtcgctgggatcggcagtgcggccgattcgcgccgagaaggacgccctcgcggcggtcggcggccacatcaaccgtgcggtgggccccgctgcagcggtgctcaagggtttcgacgccgtccacggccttgaaaagtcactcctgtncgatcccncgaccgacctggccggatactnngtcgtgctgaagcgcctncaggaggctctgaggttcctgggagacaattgtgggctggccatacagtggttggg

SEQ ID NO: 57725 - DNA, 171 bp, Glycine max
  Clone ID: PAT_MRT3847_23137C.1
ggttttggcttgactaataccttttaactttgggaccttcgaacaactcatgtgttaagtgggacccataatccacataaataaggcaccctgcgcctattcggggagggggaaaaaaccaaaaaaccaaggaggcccgcccaaacattttttctgggggggggaaagaaa

SEQ ID NO: 57726 - DNA, 482 bp, Glycine max
  unsure (1)..(482): unsure at all n locations
  Clone ID: PAT_MRT3847_23138C.1
ggaattncccgggtgcgggccgacgcgtaccgtagcttgcgagaaagacgacccagaaggggaattgcgaatcaaattagtgtcaattctcttttgcgcggggtnccctacctctccggtcgaggatgcannnatcttcgtcaagaaccctcanccggaaagaaaccatcacccttganggtggaaagcgtctgacanccatcgacgaacgtcaanggccaagtatccagngacccaaggaaggaattcctcccggatccagcaacccgtctcaatcttcgcnccggaaagcagctttcgaggaccggccccgtaccctcgcccgactacccaacatccagaagggagtcannacccttcaccttgtcccttcgtcttccgtgggtggcagtgcgagaatcttcgtcaaagacttctcnnactggcaaaaccccataacccnntagaggtcgaaagctttctgacaccattgacanacgtca

SEQ ID NO: 57727 - DNA, 3408 bp, Glycine max
  unsure (1)..(3408): unsure at all n locations
  Clone ID: PAT_MRT3847_23139C.1
tcttttctgtttcttttttgtttttctgttttttttctgtttcttctttcgttttttatagcatattgcgtataattttattgatatactaaaaaattttggaacatgaaagcacgatgcgtataatttattgacatattaaaaattgcaaccctctgatacaataaaccaagaaatttccctgtacaatgagaaaattccctttctttccatcaaaataggtggaaccccaaaattcttcatatttacatttcaaaatataactcaaaatagtgagagcaataagagcttgccgccaaaaaaatcccccatcccttatgaagaacttagatcccatgcagaacaaatgaattacctaacctacttgatggcatatgaacgggtacacactgattcaagagcctctgtgaacaaggaagagaaactggtcagtgcctgaaacactccaggcaagcccgtttgcaaattgttgagggtcatggctcttgttacctccacagcttttgaatgcctcagcatttcatcttcaacacgcctttggcaggttgccagttctagttttttgtcagcaagtgggtcacgcgcatccaacacttgtccattgtcaggtgcagaatcaggaaggctaatgcctaccatagaatatgagctgtagaacttcctctctaggtttcgcagagaggaagcctttttctcaagttccttagatgcagtctcggttcgttttttgatcttgagctcttccacttgcttggaagatatcacgtggacaacattgataaagctcttgatggcttcagatgcaaccgtgtcagggacacggtcaagtgcgagtttccattcatcaaaaaattggtatgtttcagaggtttccctgccgttgatgttatcattgtggactggaacaaggctgagcttgaaccagccatgcaaggacaggatgaattcgcgctgaaattttataaggcgacaaaaactgttgtgccaagctgaaacggctgattcaaggtcccgagttgcctgcctgtggagttcagaagtggagtcacctcttgatgatctgttcacaagaccacggacttgctgcactatattgctttgaatttcatggtagtggtgcattgatctccacatgtacatgaatccatgtatgagatcaacaagctgagggacaagatcagagtccctaaggccaataatggcagttgaggtggtagacacagcctgagatgtaacacttattagtgactgcagcctatttatggaagccttggttttgaatatcttagcttcatcctctcctttgtattcctgagtctgcagtgctgacaatttcttttcatgttcaatcttcacaccttctctagccttaatctcctcgtagagcttcttctcccacgccaaaaggcgttccaaagtggagcagagactcttgccaccggcggtttcgaggtccgactcgggcttaagttgctaaataagctacaccagtgatacacagtttcacccaaatcctagatgctccgatcaagtagcgccgtactgatctcaagcatctcagaaacctgatccccagcggagccgccgttatcggatctgaagcatgtcagatccacgatttccctcaagtccctatgtctcaccaccatcttcattagcctccacgatctccctcaagtcccagtcgaatacattcgcgccaccgccaccgccaacgccaaccaccgactctgcccgcaccgacgacccgaaattcgaccgggttccgatctcggagcgcgacccgaaattcgaccgggtcccgatctcggagcgcgactccacatccccctccaccccatcatcaccatcatcagaagaactcgtggtactataatgatccccccattcactacactgaacttcttccctctcagtttcagtatactcctccggaagatgatgagaatgagaatcagttttctcattctcattctcggtttcgagttttccgtcgaagtaatcgtattcagatctctcagaatcagtgtcgtggatttggagattggtgtgttgttgtgtcttgtgagagtaatgagagggtgtttgtgttttgtgagagtaatgagaaggtgtttgtgttttagtgtgggagaatttttgttgttgttcttcggggaagtaaccggaagcgggaggaggtggaggagggtagaaattttcccagttccaaacggaggaggtttgggaaggggtggaggagtaagtagaatgtgcggtggggaagaagtttgacacgtggcttcttggggtggaggaggggcttgagtcggagaggatgtgcgggagcttcggcggcggtggtttgcggcggcggggtaggatggggtcgagtttcggcggcggaggagaaggagaaggttggtgctggtgttggtgttggtgttggtgttggaggtgttgggagttgttgaggaagacggcgggggtgtggtcggagacggagaggggttcgccggtggagaaggtggagagggcggagccggtgaggcggagggaccggcagtagtcggagtgggcagcagcgaggtggtggcgcgcgtagaccgcctccttcatgaggcggcgccgctccttgcaccgccgcaccgtgtcctcgttttccagcttcgacgccgtgcaacccatgggtggtggtggtggcgcgtgggggaactgaaagtgaaaaaacaaagtgttttgagttttaactaagtgaagggagttagtgagactgagagtgagagggtcatagtgttgttggcctttgcggttgcgttttagggacgtacaagtgccgggccaaggtttgatataaagaggtaggcagtagttggacagtntggtacaaagaggcacatgcaattacacagagcagataaagcaagttgcatacgaggccagtaagccataaagttttcaactacccacccaagattttcttgacccatatactaggcagcatattcacacgagaataaatgagggggatttgaaaataaaaagcatttcaactgtttacatttaaacttaaaccttctttcagagggttggttatttgttacagctcaaagccctcacatttacaatatcggttgtaaatatcctatgagcaagccacagcatgatcgtaaattatggccacacaacaagctgcacagtattcaaagtgggtttgatcatgaagtctcaaatgtcacatttaatttgtaaatggacaaaacaagatcaaaacacatgaaattttcaatagtccaaaatactagacaattttttgggacccaatgaatttatttaagttcatttatttacagtagtacaaatgggcagatcagtgagctcctataggactggtttaatgtcaaattgaattattgttcggacgcgtgg

SEQ ID NO: 57728 - DNA, 317 bp, Glycine max
  Clone ID: PAT_MRT3847_2313C.1
cggctcgaggaaaatgtgtggaatatttgcgtatctgaattacgacgtgaacagagacagacgatacatcttgcaggttctcttcaatggcctcagcagattggagtaccgtggatacgattccgcaggcatcgcgatcgacgattccaatttctctccccttgttttccgtcaagaaggaaacattgaatcgctcgtcaaatcggtttatcaagaagtgggagaaactgaactgaacttgggggaatgcttcggcactcacgcgggaatcgcgcacactcgctgggcgactcacggagagcctgcgcctcggaaca

SEQ ID NO: 57729 - DNA, 528 bp, Glycine max
  Clone ID: PAT_MRT3847_23140C.1
cccccccccccccccccccctccctttgatgaatattattttctttttttggaatatgggcgcccaaatgtggggagccgcgaattttttacattgaacctttactctagttttacagataatcccaaaaaaacaggaaaacctatttaggggcaaatactttcctgtacaaaaggtacatactaaataaataaaacaacttgaggaaaatgatgtccaaaaacaacctaattaggggggagagggaataccaccacctttggcgtacggatgaaaaatgggaaatcgtttaagttacaggaaactttacaggaaggatgccggtttttaaaaaaaaaaaggaagtttccattggttgaaaaaccgaggcggtatcaaatctgaaattcctaaagcttttgccaggccccagggcaggggtgggaaaatcaggttcaggttttgttggctgaataaccattacgggggagttacttccaataaagcgcgggttttgctttccacacccaaattcctttacgaggcaaa

SEQ ID NO: 57730 - DNA, 353 bp, Glycine max
  Clone ID: PAT_MRT3847_23141C.1
attcgtgccgtctgcccaaccacacaacgcggatgacaagactacatattgtataattacctgctaagattttatatcatcaaccttattagaggtattcacgatgcatccttagtattgaatgagcaactatgagatgaatttattaagttgagtcatctcattggaccatgcaacaaatctgctatgctcctttatccatgtatcttggctgctgttcttactgcatatggatatccatgacccttttcagagacttcatgctgccttacaggacgcactagatctactacttttaactccattcagaaccgacacaagatcatccatctcatgaccatcaacaggaccta

SEQ ID NO: 57731 - DNA, 1895 bp, Glycine max
  Clone ID: PAT_MRT3847_23142C.1
ggaacatgaaagcacaatgcgtataatttattgatatactaaaaattgcaatcctctgatacaataaaccaagaaatttccctgtacaataagaaaattcccttttccatcaaaataggtggaaccccaaaattcttcatatttacatttcaaaatataactcaaaatagtgagagcaataagagcttgccgccaaaaaatcccccagcccttatgaagaacttagatcccatgcagaacaaatgaattacctcacctacttgatggcatatgaacgggtacacactgattcaagagcctctgtgaacaaggaagagaaactggtcagtgcctgaaacactccaggcaagcccgtttgcaaattgttgagggtcatggctcttgttacctccacagcttttgaatgcctcagcatttcatcttcaacacgcctttggcaggttgccagttccagttttttctcagcaagtgggtcgcgtgcatccaaaacttgtccattgtcaggtgcagaatcaggaaggctaatgcctaccatagaatatgagctgtagaacttcctctcaaggtttctcagagaggaagcctttttctcaagttccttggatgcagtctcggttcgttttttgatcttcagctcttccacttgcttggaagatatcacgtggacaacattgataaagctcttgatggcttcagatgcaacagtgtcagggacacggtcaagtgcaagtttccattcatcgaaaaattggtatgtatcagaggtttccctactgttgatgttatcattgtggactggaacaaggctgagcttgaaccagccatgcaaggacaggatgaaatcacgctgaaattttataaggcgacaaaaactggagtgccaagctgacacagctgattcaaggtcccgagttgcctgcctgtggagttcagaagtggagtcacctcttgatgatctgttcacaaggccacggacttgctgcactatattgctttgaatttcatggtagtggtgcattgatctccacatgtacatgaatccatgaatgagatcaacaagctgagggacaagatcagagtccctaaggccaatagtggcagttgaggtggtagacacagcctgagatgtaacagctattagtgactgcagcctatttatggaagccttggttttgaatatcttagcttcatcctctcctttgtattcctgagtctgcagcgctgataatttcttttcatgttcaatcttcacaccttctctagccttaacctcctcgtagagcttcttctcccacgccaaaaggcgttccaaagtggagcagagactctttggaccgcccggttcatccagcgaaccggtgtcgagccggtacttaaccgccagcggcggtttcgaggtccaactcgagcttaagttgctcaatatgctactcgagtgatacacagttttcctcaattgcttgaagctccgatcaagctgcgccctactgatctcaagcatctcagaaacctgatccccagcggaagccgcgttatcgaaattctccttaatagcctccacgatttccctcaagtccctatgtctcaccaccatcttcatctccgccgccgccaccgacgacgccgcatcgaatcgcttcgcgccaccgccaccgccaacgccaaccaccgactctgcccgcaccgacgacccgaaattcgaccgggttccgatctcggagcgcgattccacatccccctccaccccatcatcatcagaggaactcgtggtactgtaatgatccccccactcactacactgaacctcttccctctcagtttcagtatactcctctggaagatgatgagaatcagttttctcattctcggtctcgagttttccgtcgaagaaatcg

SEQ ID NO: 57732 - DNA, 280 bp, Glycine max
  unsure (1)..(280): unsure at all n locations
  Clone ID: PAT_MRT3847_23143C.1
gattgagnacttgatgccanatcccaatatggggtgattgcatgtgacataaacatgttgnacaagtagatctgaaatggtgttagacggttggncattcctattgccattatngtattttggattagaactnnnatttncctttntgcttgaataatgagatcataccatatccaatctcattattcaagcaccanagaaaatgagattggatatggtatgatctgtgcttagaaattatnattagacatggggatgccaanttctgtganggaatgtc

SEQ ID NO: 57733 - DNA, 414 bp, Glycine max
  Clone ID: PAT_MRT3847_23144C.1
ggctcgagggccagattagcctttatattaacaagctctctgggccgttgccatccaccattgggaacttcactagcacgcagacgcattcttcttgatggggacgcgacattcaggtcgataactctcactcagattgcaacggctgcaacaggtttcgaagattgatcttcgtcataacaagtgctggggtcccattgctcctgctatcagtaggtgcaagctttagaccttcattgtgctcattggtaatgagccttctggtgagatttcaaaccggattacctgcatgcggatactgcatcatgtcaaccttccaagaaaccatctagctggtggtattccaggttccatcgcctatatgcaaaggttgacttctggtgatggtgcatacaacaaccggtcagggttggg

SEQ ID NO: 57734 - DNA, 436 bp, Glycine max
  unsure (1)..(436): unsure at all n locations
  Clone ID: PAT_MRT3847_23145C.1
cctatacaattttatgttttattgattggtattatatattcaaattaggaggaggcttgattatggttgcttattgatggagtacaaatcaaaaaaaaaaaaagggtccatttttgaggggaaaaagaaggaatattatttaatcccttttttctccccgcactggggggggggaaatacatctaaaaaggcacaaaggaacgcataagggcattattaggacaaagacaaacccgaatcaacgaataagattttcatccgaaacggaaagcaaaggcaggtcaagctggctcttttaagagaacccccgaacagctaaatcccaggcaaagacgggagaaactggcaattaaaaatagatgaacggatttggaaaccttcatcaccttaaaaaagcancggcaaccttgtcaagaaaatgccacaggcttgttcc

SEQ ID NO: 57735 - DNA, 549 bp, Glycine max
  Clone ID: PAT_MRT3847_23146C.1
ctaggaagaacacttgctaaattaaaaattccaaccgtgttaagaaaaaaacataatgttctttttttatgcatcccttgtagttctttttcttttctaccccagaaaaaggacgggagagatcatatgttacaattccaactcatacctcaccttacccagaatactgaccgttttaaatatttaaggcctgatgttaatggcctacctaacttatggggattcttgattagggccaaccccaaacaaacctccaaagagcttttgcaaatactggagagggaccgtgatctttggcgattgggctgggataattcccacctcagtatgaccctgacgttgacttgaaacagggaaatttgctacccccttatggcctagaaaaagatacgagccgaacaactttaccggtccttgatcatttaccctagggccccgtttgactgttatcacacaacctttgataaacacaacttcgttggcagcgagcttttatttgggaccctcaagggaccaagcctctttatactaaacaccagtggttaaaat

SEQ ID NO: 57736 - DNA, 454 bp, Glycine max
  Clone ID: PAT_MRT3847_23147C.1
ccacgcgtccgtacggctgcgagaagacgacagaaggggatattttaaatttgattctctttttctccatagctcataagggattttttcaaaatttttataaggtattctattaaaaatatgacatgcagaatataaagtttcacccaagtgtttgttttattgttttgtgtgttgtattttcacatgtttattttttttagcaatgagctatatatagagacaatcagtcaccaatgtgtagcaacaaaatacttggagcaataatgttaaacaacatacaataaaaaccaaacaacaaacttcctaattttaaagacttgtaacgttcacaaaagaatttgaccaagtaaaaggtagcttcctaacataggaatggaagtagggggatgcttttagttttttcaaggaaactaattctaaaagcattttatctttaaaaaacataattgat

SEQ ID NO: 57737 - DNA, 287 bp, Glycine max
  Clone ID: PAT_MRT3847_23148C.1
gaaatttgcctactactgtgggctatgtctgataccatgccgagggcttttgttgatctagggagctcttgctgtgtctaggggaataggagatagacacctgaaacaatggctgacatcccagcctgataccaaaggctttataattcctcaccagcatgactcgttaatattagctccacatggattatgggatcaggactagagctggaccatccactaaactgcgcctagcgcgtttttaagcattttttaatattgttgctcatgcattggactgagtcact

SEQ ID NO: 57738 - DNA, 151 bp, Glycine max
  Clone ID: PAT_MRT3847_23149C.1
ggctgacaaaaaagcatgttacacattctcaaattcattgattgaggaagtaaatagatggggttgctggaaaccgacaacggtgactcttatgtacatgatggaattcaggtccaaacacactaacaagaatgtgctgatctctacccag

SEQ ID NO: 57739 - DNA, 343 bp, Glycine max
  Clone ID: PAT_MRT3847_2314C.1
gattcaaaaccggccaaaaaaaaaacaaaaaatcacaaaaagaacgagccaaaggggacaaaactggaaacacacccccaaagggaacccaacctaaccaaagaaaagcccgggacctggaaaggggcacccccacggactaaacggggaaccccctcaaagaagccacccgggggacccggggcggaagcccaacccgggacttgcatttgcgggggcgtccaacacgacagccagggagcgccaaaacaaccaagaaaacgcacccttaaaaaccggagggagggacaaaccggagaccccaaaccaaaagcccccgaaaaccaaagccgaaaacacccgg

SEQ ID NO: 57740 - DNA, 340 bp, Glycine max
  Clone ID: PAT_MRT3847_23150C.1
tctatcaccagacgacacacgttcgaccgcccatggaagctgttgcgtcactggttcaagaggctaaaggtgtacaaagcggtgggggaatagctcaacttgcaggcttagctcaaagcctctttaaaaaactattcctacgccactacgtacgcccttaattgtgtccttattcttgatctacttgtcccgtttggctaatattcaccagatcatacatttaaatcttcatatcataaattaagcaactgccaacttgcaaagtcttgaatttcttacttctaattctagtattgttaatgctgttgctatatgatgaatggctgaataaatctgattt

SEQ ID NO: 57741 - DNA, 783 bp, Glycine max
  unsure (1)..(783): unsure at all n locations
  Clone ID: PAT_MRT3847_23151C.1
accaatggtatcctccaccaccggggatcctctagagtcgacctgcagcagaacatgcatagaagcatacaacagatgggtcttgtagaaaaacttcacttcacttatgtggtgaaatgaaatgaattaagtaagtaccgcgtccaatgtccatagaaagagcaacccaagtgaaatatagaagatttgctgtggggaaatagcaaaggcattccatgcagcaaggcctcctacaatagcagcaatctggaggtttctctcaattgaaccaagagttgtgtccacgggcgaaagaagagacaaagtttcaatcccattaagcctcaattcatccaaggtgtaaagcctttgaggcacctacgtaataggcatagaagaaaaattaatctaaaatatttacaagaagaagcaagagggcacaagactactaacctgtctggctgcaccaaaacaccgaaggccatcaggcttaccctgcaaatccttgacaagtgcgagcgcagctctatcatctccctttgctagctccttgtccaatttctccagaacttgttgcctagaaacaccaacattggaggagcatcggattctgaccctaaattcacatgttaccggtttcagttgtccagggcatgatgtcagggccacacccacatgctgcatcaaagccaaaccgaccatttaattcaaactattntgggtttcatgaaagaaattattaccttattgtttttccacggacccagccttttcaaggcttagtgttgcattttttcattgcat

SEQ ID NO: 57742 - DNA, 153 bp, Glycine max
  unsure (1)..(153): unsure at all n locations
  Clone ID: PAT_MRT3847_23152C.1
cgaaacctttactctagcatctcantctctcgttgccactgcgccganacctatcaaccaacgtgtcaccgcctgtcccgccgccgcntttacatcattncnttnttccgcgtganccaaattgnctcttttcctcancttcanctntcgnnt

SEQ ID NO: 57743 - DNA, 664 bp, Glycine max
  Clone ID: PAT_MRT3847_23154C.1
cccacgcgtccggatttcatttgctcttattaaactcaccaccaccaccaccaccaccacgctctcttccattttcccgcaaaacaaacacattcacatacttttccctcactttctcggcggccaaacgccataaaaatggcgtcgaaggtggcgctgatggcgctgttctccgtcgcgctcctgttctctccgtcgcaatccgcggtcttcagcgtagatctaggctccgaatcggtgaaggtggcggtggtgaacctcaagcccggccaatccccgatctccgtcgcgatcaacgagatgtccaaacgcaaatcgccggcgctggtctccttccatgacggcgaccgcctcctcggagaggaggccgccggcctcgccgcgcgctacccgcagaaggtctattcccaaatgcgcgacctcatcgccaaaccctacgcctccgcgcagaggattctcgactcaatgtacttgccattcgatgccaaggaagattcacgaggcggcgtgagttttcaaagcgaaaacgacgacgctgtttattcccccgaggagctggttgccatggtgttaggttatgcggcgaatttggcagagtttcacgcgaagattccgataaaggacgcggtgatcgcggtggcgccctacatggggcaggcggaac

SEQ ID NO: 57744 - DNA, 419 bp, Glycine max
  unsure (1)..(419): unsure at all n locations
  Clone ID: PAT_MRT3847_23155C.1
gctcgttttcggcccgccctttcctgtgtgtcctgggtcaccttctgctctcnaaattcagtgctgaagcatggcttcggctactctctctgtagccaaaccagcccttacagcaaacgggaaaggcttctctgaattctctggcctccgccactcataaggcttccttccctttcctagatgggggtggagaggatgtccattctgtccttgccttccagacctatgcccctggaagcggcggacgatacaagaacggtgtgactgaagcataactgaacgctgccatacacggatttggaaggatgtggaacgaacttcttgaggtgctggcacggtcgcaaagactcccctcttgatgtcattgccatcaacgacaccggcggcgtgaaacaagcctgtcaccttctcaaattcga

SEQ ID NO: 57745 - DNA, 425 bp, Glycine max
  Clone ID: PAT_MRT3847_23156C.1
agtctaataattttttattctcttgctaatactgaaaaatacctgtctacctataaatcgttttggctctaccattttgctcatgctttatgatctactaaggggatacatttttgcaagatagtactaattttaatgggttattagaattgatatgacaaatacaccatgttgactctgcctccttgtgtagtcttgcaaaagctgctgaagactgagggagttctagtctatcacataaagaattactgaatgagtgtcccttgtttatcatctagatgtaattttctacacgaagcgaagcccacaagccaaataaggtaagtagaagcacttcagaatgtgaagcaaatgttgctgtgttggggcttcctgctggtcctgtaccatagactgaggctccaccaggaattgttgtcatgcct

SEQ ID NO: 57746 - DNA, 1997 bp, Glycine max
  Clone ID: PAT_MRT3847_23157C.1
cctctcgcgttcgcccacgcgtccgtgtccatgttgaggcagagagagcgtaatcataaagtccgtccgaaacaaaaagtccctccctccctccctcccaccagcttcactcccgaaaccggcttataattcataaacaacgtttcatcattaatacggcgccgattccaagatgttcaataacatagagccacgtggttggcgacaagctaagacatgactacgcggtttcgctgttatttttgttcacgcgacacatgagcctgctccgtcgtccctccctcctcctctcatggaagaagaaatctgaaaccctcagagagaaagagaagtaagaaacattctgaacaacaccaccccatccacgatcttctcatccttaaactgtgttgtgcggatctcagatgatgatgtcttccgggacatcctcgtactggtgctaccgcttgcagccgcttcgtccgtgtctggccccaccacaccgtcgtctgtcccgactgcgacggcggcttcatcgaagaaatcgaacacccgccccgctccgtccacctcgacccccgacgccaccgccatcgcttccccgctgccgccatgtacatgatcggacaacgaccctcctccgacccccgccccgcctcatccctccgccgcacccgccgcaacggcggcgaccgctcccccttcaaccccgtcatcgtcctccgcggcggcgcggaggacgaaagtcgcggctttgaactcttctacgacgacggcaccggttccggcctccgacccctgccaccaagcatgtcagagtttcttctcggatctggcttcgataggcctttggaacaactctctcagattgagatcaacggtattggaaggtacgagcaccctcctgcttcaaaagcagccattgattcattaccaaccatcgaaatcgatgacacccatttagccatggaatcacactgcgcggtctgtaaggaagcttttgaaacaagcactgcagttagagaaatgccatgtaagcacatataccaccctgaatgcattttaccatggctcgcacttcacaactcttgccccgtttgtcgccacgagttacccgctgataccccgaatccaaatcaaaatcaaaatccgtctcaaaatgttgccttgaacgaggaggagaatgtggggttgacgatttggaggttgcctggtggagggtttgcggtgggtagattctccggtgggagaagaggtgctgagagagagcttcctgtggtttacactgaaatggatggtgggtttaacaatggggggggtgagccgaggaggatttcttggtccagagggaatagagggagggagagtggagggttgactaggtttttccgcaatctgtttggttgcttcagaggaagtagtactcagcgttctgcttctagtagagagtctatgagggcgagttcctctcgttctagtactatggatccttcgttgcggtctcggaggacttggtctatggatgtaaacagtgggatgagagcgtggtagtagtagtaataggatcgatgactgatgagggtaaaaggctaaaaatctcaactttgtttctgggttcctctgtgtaccgtgtcattgtcaaagtgtacataatgggattgatcgatcgagagtcgtcgaggatgcaatgtcttgtgattgattctcacattttcaggatgttggatggggaaaccgttgtgttagcaataggggattggggcagggagtggcatcaacaatgggagaaagtgaaaccaatggggaggaatgaggttgaaggagggactcgggccgtgattgtgaagtattatctttggaatttttggggggaggggggacatgatgtgatgatgatcatgaacttcattttactttgataatgaactgaagcaccttcgtattgttttttcattccatgctttatctttctcgtcattggtatatgatcctctaaattcatggtgtcgttttttgtc

SEQ ID NO: 57747 - DNA, 270 bp, Glycine max
  Clone ID: PAT_MRT3847_23158C.1
gaagaaactgtatccctgtttaggctatgttataagtttatgtctagtaagtacaatccatttactagtagctttttattattttttctttctccacttgtggatcaatgtaaattgaagttcacctagtaagtgacaaataggctaaggctataaaggtaagggtaagcctaaccatataaccttcgtagttgctccgtgttgtcttttgaagaagccaaataggtgtagaaaactaaatcctgttgatccctgtaacagattaaacac

SEQ ID NO: 57748 - DNA, 1020 bp, Glycine max
  Clone ID: PAT_MRT3847_23159C.1
gtcgaggcagagagagcgtaatcataaagtcccggtgaaacaacccggccctccctccgtcccaccatgcttactcccgaaacggctcataattcataaacaacgtttcatcattaatacggtgccgtttcgaagatgttcaataacatagagccacgtggttggcgacaagctaagacatgactacgcggtttcgctgttatctttgttccacgcgacacatgagcctgctccgtcgcccctccctccccctctcatggaagaaggaacctgaaaccctcacatagagaagaaaaacaagcccaacaccacgccatccacgatctcatccttaaactgtgttttgtgggtttgtttgtacttggtacgagaatctggtcctcataaatttgaatccggggtgcggatctctgttccgttccttcgagatccacggtccctccctcccatcatgatgatgtcttccgggacatcctcgtactggtgctaccgctgcagccgcttcgttcgcgtctggccccaccacaccatcgtctgtcccgactgcgacggcggcttcatcgaagaaatcgaacacccgccccgctccgtccacctcgacccccgccgccgccaacgcttccccgccgccgccatgtacatgatcggccagcgcccttcctcggaccacccctcccgccccgctgccctccgccgcacccgccgcaacggcggcgaccgctcccccttcaaccccgtcatcgtcctccgcggcggcgcagccaccgcggaggatgaaagtcgcggctttgaactcttctacgacgacggcgccggctccggcctccgacccttaccacctagcatgtcagagtttctcctcggatctggcttcgacagactcttggaacaactctctcagattgagatcaacggtattggacggtacgagcaccctcctgcttcaaaagcagccattgattcattaccaaccatcgaaattgatgacacccatttagccatggagtcacactgcgcggt

SEQ ID NO: 57749 - DNA, 228 bp, Glycine max
  Clone ID: PAT_MRT3847_2315C.1
gcccgattacgcattttcaagaaatcatgaggcttaaatggtcatatatcaattggaattagttggactgttattacgcctatcctgaagcccaatggcttgagatcggcatacctcggtggtaccgagcttgcattcgctatagtgaggtcgcttagctacggcatcatgtgatagctgattgctgagtgaaatcgatattcgatcacaattacagacatcatacga

SEQ ID NO: 57750 - DNA, 206 bp, Glycine max
  Clone ID: PAT_MRT3847_23160C.1
gccaaaagctaagcacaacaagaccacaatccaaataagtgttgacaaaaaaatgcgtttggttggttggaaattagttattaaggattttggaatcatccgaggaaacaaagggcacaagataaatgggaacttggtgattaagccaaaaaatgtgttggatatcaacagcatcaccaatgttaaaggtgtcaatgggaaccgga

SEQ ID NO: 57751 - DNA, 266 bp, Glycine max
  Clone ID: PAT_MRT3847_23161C.1
cccacgcgttcgcccactcgttcgctctatttccattccacttaggattcaattcctaagcgattcccagcttgttagatggcccacaacgtttcaatttccagattcttttggaaaaaaaaaattatctttctttgcccaacaagtaaattggaaaaaaatggaccattacaagacttggtgccaaacttcttctgaaaggcctatattgcgcattaaccacagtggattttttggaaattcaaatatcatgaatatgtgttcta

SEQ ID NO: 57752 - DNA, 512 bp, Glycine max
  Clone ID: PAT_MRT3847_23162C.1
ccacgcgtccggtgtaattcctcccttgccccgccgtcgcatcctcttcgaagttcgaatcgaatcgcgccgcgatcacccacctcatggcggacaaggagcctgtcgtggagcggccagaggcgggtgaggaggaggaggacgcctcagccgccgccgccgcgggggaggaggaggacacgggcgcccaggtggctcccatcgtgcggcttgaggaggtagccgtcaccaccggcgaggaggacgaggacgtcctgctcgacatgaaggcgaagctgtaccgattcgacaaagacggtaaccaatggaaggaacggggcacgggcgctgtcaagcttctcaagcacaagcagaccggcaaggtccgcctagtcatgcgccaggctaaaacgcttaagatctgcgcgaaccacctcgtggcctccaccacgaagatgcaggagcatgcgggcagcgacaagtcgtgtgtttggcacgctgctgactttgccgatggcgaacttaaggaggag

SEQ ID NO: 57753 - DNA, 361 bp, Glycine max
  Clone ID: PAT_MRT3847_23163C.1
tactgctgctagaagacgacagaaggggaggtattttctcaactgtccatagatgtctaatatcacatgacatgtggcggttattattggggtatctgggttattatctattgatttgaatagttttatctgaattattattgtctaatatcataatatcaattattattattgtatatctatatatatttgtcatttaatcttaattttatagaaaataatatcaatacccaaatggtttatgagtgagtattatttttgtatctaatgtgatgatgtattgatttatatttgcattttccatttaatcttaaccttgttttttaaaattactttacggttctttattgatatcttattt

SEQ ID NO: 57754 - DNA, 162 bp, Glycine max
  Clone ID: PAT_MRT3847_23164C.1
aaatcgctaacaaaaccataccattttcacagagtcagcacatacgaaggcgcgccattgcatatacctacttaaaaaaaataaagacatcgcctggtcgcatcataattatctctataactatctctatgttaactctactttactcactacccactagtt

SEQ ID NO: 57755 - DNA, 415 bp, Glycine max
  Clone ID: PAT_MRT3847_23165C.1
tctcggtgaagaccaatcccacacattcaagggctaacgaggctaaattgtgcatataagaatcggaactactcgaaatatcattacgcctatcctgataccacaggaaatgtgctcggatttcctctgctatctccaattcacagatacttacgacatctggaatgctacacgttcatatggataatgtgataactgagtcctatatgaagccgatacggacggcgatgtatatggagtctgaggcacttgaactcatgtagatagcaagcttctacaggtattgcagcagagctgatcgcatgctcaagatatttagaatcagaatcagttgctgatcaatgagatcaaccgaaaccatgactgcaagatgcctgataatctgagtcgaaatgtgggtttgaatagagagctc

SEQ ID NO: 57756 - DNA, 2831 bp, Glycine max
  unsure (1)..(2831): unsure at all n locations
  Clone ID: PAT_MRT3847_23166C.1
caacacatcgaatctcaatttcctcccattctcaaacgctacaatttccattaaaagtcaggacacacttaatgatctcattaactatttcaatggacatttgcatcatcattactccaatgatcgttaccacgccagtaaactaaaaccttcgttccagtcatgctgagtcgatcccatagattatgactctaattaaatttctccaacaacaaaactaaaaaaaaaaaaaaaaagcagaacaaaattggcaatgaccataaaacagaaaagaaaagaaaaagaaattgatgagagtgtaataatattcacaaaattgagcgagagagttagttggtgtagatgacccctttttcttcggtgtgtcgagaaagaccagctgagtagagaagataatagaaagaaagaaaaaaaaaaatagaatagaaaagagaaggaaagcgtattcagttttgaggtcactcactcccaccgatgactgatcatcattaacacctttttctttcttcaattatcccaaacctcttcttcttcttcttctttccctatcacaaaaacgcgtcaacaaaacacaaaaaccctattatcaccacacacttccctttcttggatctgtagatctaacgctgttgcatcacataaccgttcctctgcaacctagtgctgttttcactgaaattcaacgcttgaatttcttggattttagtgtttggactttgatttgaaattgattggtaacaatagaatatgtgtgtttattattagttatttagttatataagtaataataggtgaggaagggtttgtggggggtggggttggagcatccatttgtggatgtgaaggaataggaggttgttttggggtgaaatgagggatgctatcaaggttgatggactttctgactgcctgctggcggcgaagatccttctccgacggcaagggtggttccgaggttacggggcggaaggaagggctgctgtggtacaaggatgcggggcagcacttgtttggtgaatactcaatggctgttgtccaggccaacaacctgctcgaggaccagagccagattgagtctggtcctctcagcctgcttgacactggcccttatgggacctttgttggtgtatatgatggacacggtggacccgagacgtcgcgctacgtctgtgatcatctcttccaacatctaaaacgatttgcatctgagcagaagtccatgtctgaggaggttattcggaaggcataccaagccacagaagaaggttttttgtcagtggttaccaaacagtggcccatgaatccccaaattgctgctgtgggatcttgttgtttggttggtgtgatttgtggtggtatcctctatattgctaaccttggtgattcccgtgctgtgcttggccgggtggtcagagcaactggggaggttttggcgatccagctttcgtcagagcataatgtggccagagaatctgtgagacaagagatgcattctttgcatccggatgactcaaaaattgtggttctaaagcacaatgtatggcgggtgaagggtctgatacagatttctagatccattggcgatgtttacctaaaaaaggctgaattcaacaaggaaccattgtatgctaagttccgtgtgcgggaaggttttaagaggcccattttgagctctgacccatcaatttccgttcatgaaattcaacagcatgatcaatttctcatatttgcttctgatggtctttgggaacaccttagcaatcaggatgctgttgatatagttcaaaacaacccacacaatggaattgctcggaggctcatcaaagctgctttgcaagaagcagcaaaaaagagagagatgaggtactctgatttgaagaaaattgaccgtggtgtccgccggcatttccacgatgacatcacagttgtagttgtatttcttgactccaatcttgtcagcagagccagctcggtaagaggtcctcctttatcggtgagaggaggtggtattcccctaccttctagaactttggctccctgtgctgcacctatggaaacttagttcaggttgatgaagctggctgtataatctgttatgcttgtatttagtgttgtacacttagcagacattgagctctggtgatccaccagattgtatatccaatttaacagattgaaaaaatgtccggtccattagtacaatgtaacaagagacttggggtatgtagcttgcgtgagtataaagcatcatggaagtagagtaccaaagccaaaggtgacctttaatatttgatcattaagaggcaatcatgtttgcattgcatctcatatttttctcatccaatggggagtgatttctgtaaaagctggctgtatgatctgttatgcttctatttagtgttgtacccttagcagacattgagctctggtgatccaccagattgtatatccaatttaacagagattgaaaaaatgttcgttcaattagtacaatgtaacaagtgacttggggtatgtagcttgcgtgagtataaagcatcatggaagtagagtaccaaagccaaaggtgacctttaatatttgatcattaagagggaatcatgtttgcattgcatctcatatttttctcgtccagtggagtgatttctgtaagtttttcgtacactcctttgaatgcacagttagtttgttgcacgcaataggaaaactatatagataagtatccnnnanaaaaaaaaaaaaaaaaaaaaaaaaaaaaaaaaaaaaaaaaaaaaaaaaaaaaaaaaaaaaaaaaaaaaaaaaaaaaaaaaaaaaaaaaaaaaaaaaaaaaa

SEQ ID NO: 57757 - DNA, 487 bp, Glycine max
  Clone ID: PAT_MRT3847_23167C.1
gacggagaaggacagatgcttgtctgcgaaccttctaccatatgtagaaggcataattctactggacatgtgtggagacatggatgggcactcaggattgcaactcattgatacacccactggatacagtgcttcttacgtaggtggatgactgctcgaggcagtgaggcgacatacttacactgtgtgacgtatctgtgatatcgataatgcccatcctgctgtattcaacatgaagcttcagatcctggaagagggaagattatcagacagtcttagatgatctgaggacttcacgaacacgctacttataatgacatccaatgctggaggcagagtgcatgagaaacgaggccgtataatatgatttgaccttgattacgatgagaaggatagcatgctctaccgaatcatgagctaggtgactgacgaactgaagccacactgcatgccagagagcttgaatagggagaacgatatgattgtc

SEQ ID NO: 57758 - DNA, 596 bp, Glycine max
  Clone ID: PAT_MRT3847_23168C.1
acggctgcgagaagacgacagaaggggaactcgaagccactccacagagagaaccaagcccaaaaaagctgagaactttggcacaaaaccaacaagcccaccttcaaatcaccccatattccccattcccatgcagagattccatctgggtctccctcattcaccaccaatggacaccagcacacccttccaagaccttccagaagcatctccaaagcccttcttcaagaaaaccacactcacttccttcatcatgtcttcaacaccttccttcaaggaagacacctactacatctcccacctcaaatcctccgagaaaaaagccctccaagacctcaagaacaaactccaatcttcttattcttccaccccttccatgtggggcgttcctttactcaacaacaacaacgccgacaacgccgacgtcatcctcctccaccccttacatgtggggcgttcctttactcaacaacaacaacgccgacaacgccgacgtcatcctcctcaagttcctccgagcccgtgacttcagggtccacgacgccctctccatgctcctcaagtgcctctcatggaggaccgagttcggagctgac

SEQ ID NO: 57759 - DNA, 320 bp, Glycine max
  Clone ID: PAT_MRT3847_23169C.1
ataatcatatattttattacattcctatattttcaaaagggaggggtactataaacatcttctcttcatattacccccctatactaaacattctacatacatcatttatttaagaaactaaattattaaactatctatacatatttctaatactttttttctcatttataaacatgtcgcaatctcaaaattccttaatgaaattatacgcccttccatcataaaaaaactcatatttgcctccctataaaaaatatccgataacaataacatatcatattattgggcattatatacaacataccgtccgatttaaaata

SEQ ID NO: 57760 - DNA, 550 bp, Glycine max
  unsure (1)..(550): unsure at all n locations
  Clone ID: PAT_MRT3847_2316C.1
acgagcccactttgaacccaactcactcttgtattcgagaataccatagcctctgcacagctaccaccccacaacccttctttgtccaatgttcaaccttgacaacctctaaatacgcagcatctcttagccatcatcatttgatcctcccgaaacacacttccgcacgcaatctctgccacgcacaccaagctcgggggtttcttttcaagatgtatgtgacgacagacttgaaatagaagaagcagaggccggaacaagcaaaacagggctcaagaaagaaaaaaaatgaaagactcatgattgaagaatagttgcaacacgcaagacccttttggtggtaaagtcaacaatgactctcactctgatataagaggaggaagacaaccaagagggggagggggtactttggggaggaggatgaaggtttaggggagaattttgtataaaggaaaaaaaaattgtgaggaggtaataattgttctaattttcttgactcaaaaaggatccagcttgtatttgggcatnnaattattaatagaaggaaact

SEQ ID NO: 57761 - DNA, 483 bp, Glycine max
  Clone ID: PAT_MRT3847_23170C.1
tcacaggtgtttgggataggacataatactacagataatggggttgagaaaaaagagtcaaggggaaagaaatatcacaaaaagaagcacaggaagatgcaagagtggtggaaagaagagcatcttgctgaattaagcaagaagaccagtaaacttaaaaatctccataccaagtggaagaaaggcttgaaagtgccccattttgatttgggtagaaggttttatctttgcaggcgtaagaagtttggacaggagggtgagaataagtgtgatcaaaatggggagtttagcttcagaagaggatggaagaagaaaagcactcgttccattggaagtgacatgtggagtggagatcttttcagccgtgagctcagcagcacaacaagcatgagagggacactgtgttatgtggcaccagaatatggaggatgtggattcttaatggagaaagctgacatttatagttatggagtattgattctt

SEQ ID NO: 57762 - DNA, 581 bp, Glycine max
  unsure (1)..(581): unsure at all n locations
  Clone ID: PAT_MRT3847_23171C.1
ggggggaaaccctccggggcnncctattttttgcccggggagtttttttacctgttccaatgcatttcttcatcccggtccctcagtacaattccctgggtttgctaaggcttccctcccgatgggaaagaagttgcttttttcctgataagcctaacctgatggatctcttatttcttatgacaaaccttcaatttccctacctttgttaccggtggtttggaaaccctcccgcccgagtaatgtcctcccaacttcctgtttctgacttagccctcattggttgaaggccttgaccctccccaaacacaccccttacggcgccttctgctttttttccttccggggcgaataaagtccttcggccccccccctgtgggtctagagtttttgtttttgcattgggggttcttcccctcggccagttggggccgattttcctgggtggtctgcccctccngctgcgcccttcctatctggtccgaacctcttcgagcttgttctggtngcttttttctttgggttgggcccccttgcttttccccctgcctcgtgcttgggtgccgggaggggggggggcc

SEQ ID NO: 57763 - DNA, 200 bp, Glycine max
  Clone ID: PAT_MRT3847_23172C.1
ctcaagatcagggctatttatcactatgtatattctatccacaattatatttaccacacaaccactaataaaccctttttgacaaaaactttgtgtttactatgaccttcttcatgcattatattagaccataatttcaatctacaaaataactgctataattattattcaatgcaataacataattacctatatacata

SEQ ID NO: 57764 - DNA, 632 bp, Glycine max
  Clone ID: PAT_MRT3847_23173C.1
cccacgcgtccgaaaaaaaaaaaaaaaaaaaaaaaaaaaaaaaaaaaaaaaaaaaaaaaaaaaaaaaaaaaaaaaaaaagaaaaaaaaaaaaaaaaaaaaaaaagcaaacgcacaaaaacatacaaaagtaaaaatcattttttaattgtgtacatcaaaataggggggctgggccttttttttgtccccctttttcgtgggcggtcccccgcgctttccccctttttttttgggggcgccctaaattcccttttgcgggcgggggttttccccccggaggggccgggaaaaccttgggtttcccccattttgtttccttggagtgcattctctttttccctgtggggggtaatttaaagggggccccctcttttgccttcccccagggggcccccccctttgggggggtcggtccccccctttttttggtttttttaccctcgggggggggggggttccccccctttccccccgtatctttaccgggggctttgcccccgggttttagattttttccccctcctttcccccccccatggagtgttttcccggggggggtttaaggggggggcccttttcgggtgcccaatttttttttctctcgccctttccccccaaaatttttttttgg

SEQ ID NO: 57765 - DNA, 411 bp, Glycine max
  Clone ID: PAT_MRT3847_23174C.1
aaaaaaaaaaaaaaaagagccttttttgccccgggggttttttttgattttgaaaataacaaaataacagccggacataaaacggggggggggccctttccaacttaaaagcgggggataaatttggcccttgacccaacacatgccccccctaaaaaataaaattttacctttttccccccaaaaaacaaggccttttatttaaatttaaaaaaaaaaaagatacccccctccttttggtgaaaggaaccccaacccccaaaacctgggttgggtttttttggggggccccaactttattaaacaggaacgggtggatggaaccccttggccttgaagggaatggccctctttcccacccggggggaaagggcttcaaacccccccccaatgaaagggcccccccaaaaa

SEQ ID NO: 57766 - DNA, 276 bp, Glycine max
  Clone ID: PAT_MRT3847_23175C.1
cggcaaaaaaatggggttcgcgtgcactttattacatccatccatttccatgaagccgcagcctttgcacacagggaagcatccacattatgagcaaagcatatttttacattttgcatgtaaccatgacttttaacatggatgataaacagcaaggctccagcaatgctttattggaagcaaaaaaggaaaagactttcatacctaatgtcaccaaccatggctccctcatcatccacatggccacttgctgttgacaacccctgaccctggccc

SEQ ID NO: 57767 - DNA, 225 bp, Glycine max
  Clone ID: PAT_MRT3847_23176C.1
attgtctcaagcaaccatggcaatggcaacccaagcctctctcttaaccccacccctctccggtgctcaaagccggcgaccgcgcctccgtgccatggaagcgaaactccagcctctccttctccagcccgaggcccctcaagttctccagaacaatcagagcagcagcggccgaacgtgaccacagaggcaccagcaaaagtagagtgtgcaccggtcgggttc

SEQ ID NO: 57768 - DNA, 334 bp, Glycine max
  Clone ID: PAT_MRT3847_23177C.1
gcaacataaacaagttcccctttctttgcttcttgtggtggggtttttctctttccttgatcccttgctttgttatccttttcttcactttttctctcaccaattttctctcttctcacaccttcttgttgttttgtaattttccattttattaaaaaaaaggcaaaattgaatttaatatttaaaaggttatttttttattctagaatttttgtttcacgcaaccacatgcatgttctcttcatgcttgtctgatctggattggatcactagaatctttgccatctgcgctttttgtttggtacatgaagggtagtagtgagtggtgtggggg

SEQ ID NO: 57769 - DNA, 399 bp, Glycine max
  Clone ID: PAT_MRT3847_23178C.1
ctcgagccgcggcgggtgctgtccacgctctgagcactgccgtcggcggtggccaggagcgcaccgacggctcttcgcgggccacgccgaccgaggccagcagccgaacagctccgacgggcggcgcacgcatccgcactccggcgcccttcgtcggcggcgactatggccttgagcacctgtacgccgtcgtcgacgcagcagcgcggcgcgacccgcgtcgtgcctctccgtcggccaaggccagcatgcccatctcgcctcgctcgcgcgccgcggccctctcgccgcaggtggccggtctctttgcgccgcaggtgccgccattcgaaggcccggccaagacgcgcgagtcgtacgtcaggctcgacaatcagctgaacgcgcctgaagacacac

SEQ ID NO: 57770 - DNA, 401 bp, Glycine max
  Clone ID: PAT_MRT3847_23179C.1
ggtttgacaaaatgcctgaaagaaaacaagaaacttttcttaccgtcgttgggcttttattttacttgcttggaaggtgattcttagtttcagcacaatgagttgtagattttggaagctactttacggtggaaatcattttattagaaccagcaagtctgcagctttttacctgaactccatgttttatcactcttcaaaagaggctctcaacttgcagtggtatcagaatgagtttcccaaggtgaaagagttgacccatttgctagcaaatgtggattcagttaatgggaggcttgttgatattaatagcaattcgaccgttttttgtgatgacgttgagcgtgaaatgtgcaccttcaagtcccttgttcgtgagtttggtgagtctccatttggtc

SEQ ID NO: 57771 - DNA, 208 bp, Glycine max
  Clone ID: PAT_MRT3847_2317C.1
tgggactgttcatttgacaagatgggtagtgtgagttggagcaggctgaataacgccatgatagcagtcttggtccctctacccttcatcctattctacctctcattccaatcggtcattaatactccttcttcttggtcttctctgtggacatggtgctattaccaaccctctgctatttgcccattggtctttttcttcttaaatg

SEQ ID NO: 57772 - DNA, 382 bp, Glycine max
  Clone ID: PAT_MRT3847_23180C.1
ggctcgagctcaaacacattatcatccatggctgtgtgaaacttcactgtcagccatgctaacggagatagtgtgaccctgaatgggtctggagctggagcttcaatttcaaagacacatatctgtggtgacagctggtaatagggaagagccttgcgggcatctatcattgaagcttaccgcagtggctatatgattgatgcggttcactataagaaagagagctgagatacccatcatacctgctgggacagagggaaggttcttgcctgtgctgtctcatacgacctacatgacatctcacgatgaacatgctcgagctgctcaatttcgcaagcttgacatgatgatggttctgactatgcagtcatgaccgtctact

SEQ ID NO: 57773 - DNA, 165 bp, Glycine max
  Clone ID: PAT_MRT3847_23181C.1
cggtttcattttttctttttttcctttttttttggaacacaaaacaaagactaaagcgctggccctttatttattgataggagaagctttactgatagtaacataggccgaactttcctcgctcactgggactattacaccctacattttacaacatacttatga

SEQ ID NO: 57774 - DNA, 355 bp, Glycine max
  Clone ID: PAT_MRT3847_23182C.1
tgttaaccaaacacactgacccacccaccacagtttttaattgattgacaccgtaaaacatgtttggatgggtgttggatcaagtacatccacgttcttccaatgcattttactattgcttgttgttttataaaattaacatgatttttttttttacagaaatacaattttcatcagtaaaccaaacagttgatgtttacagggacaatgaccatttataatttttaattggctgacactataaacatttttagttcatcaaaaattaaggtgacaacaactatatatgttttgatgacttaattattatcattaattttttaaggcatggtgatttgcattacagtttggagga

SEQ ID NO: 57775 - DNA, 748 bp, Glycine max
  Clone ID: PAT_MRT3847_23183C.1
cttgcgcggcaagttgggtctgaactgattaaaagccccgagccatgcattcataccgcaaggcacggctcggggcttatcggtgcttagttcaccggtgcgtcgggcttgaagtcttcaattggcgctccagtgggtgtctgcgttaccggatcaatcgcataccatttagtgtctatttgtaccgcatatgtcgggcagcttcgactcacgcccagctggcttcctgggtaagcgccgctcgcctgccgtggggctaacgcgtcatacgccccaagcccccaacggcatttctcaaaggcggtggtcgtcagaaaaaagcctggccccacacaaaccaattcgcctctgagcacctgcctggccgcccccagggctttggggccaatcctgaacacatcaaaaaccccgtccagcgggttgaacaaaccgcgcaacattttcgatccacccttcagcgcggtcatcgtaaacgcacgactgccgaacggcacaaccgttttgaacccactgaaaaagccacgtaacccaccggtaaacgcaaaggaggcaaagtcgatcaccagccccttcaggcctgcgccaatgttgccgtcggcgatatcggcaatcgcccccacaaatgggatcaggcttaataccatcctgaggttttcacgggtaaagaccttttcggaatcaaacggataactgcgtcttctctgtagcgttgtcggcgcgttggcgtattccaacagcgtctcgcgct

SEQ ID NO: 57776 - DNA, 633 bp, Glycine max
  Clone ID: PAT_MRT3847_23184C.1
tacagtgaaacaaattcaattcccagaaggaaacatgtttactatttgcaacccctcttctctttctcggcaaccgggtatcgtggctccgattccggtaaaacctatcaaacactcttcgaatctctctgtcaccaactccgcctcttccggcgagagaatcagcagtagcaccaggcgaagaaccatttcacccttcgaatcccgaatctcactcatcttcgccctcgcttctcaagccaactctctctcccagcgacttctagcggacgtggctgccgagactgcgaaatacgtgtttccgaagagatttgaaagccgcaatcttgaggaggcgttgatgagtgttccggaccttgagactgtcgacttcaaagttctgagcagaatggaccagtatgagattagggaagtcgagccttactttgtggcagagacaacaatgcctgggaagagtgggtttgatttcaatggtgcttctcgttcctttaatgctctagctgagtaccttttcggtaagaatacaactaaggagaagatggagatgactacacctgttttcacaagtaagaatcaatctgatggggttaaaatggacatgacaactcctgtgttaacaacaaagatgggaag

SEQ ID NO: 57777 - DNA, 1125 bp, Glycine max
  Clone ID: PAT_MRT3847_23185C.1
cgtggccactgcatccttcactcccacaacaccattttctgtcttaaaggcggcgacactttcattccatgtctccactctcttcatctatgaattttgaacactttttttcactcttgttcttcttctcgttcctattccatttagtttgatgttctccctcgccaagggactcgattctcttcccaaccctctcattccgccatttcctcgaacatgtggcggcacgccgccaaacacgcctgccgcggtagtattcgccagagcttccacccttccaggctcctctctctctcccacggctccattttctcccccaaaagggaggctttcttgtacagcgtggcaagactaaactgtattggtcgtggcgattttcagtttcagtttggtgccaaagggtattccggtgttgccgaggcggcttcttccactgatgtggaggaagatggtgtttttgttgatgaaattcagcaacttttattgcaggagatgaatgatgaggtggagagtcaactggtggaggaagagggtgccccaattgatgaaattcagcaactgttattgcatgagatgaataaagaagagaagaatgaattggtggaggaacaggctgccccagttgatggaattcgagagctgttgcaggggatgaagaaagagaagcagaagaaggtggttgggtataggtggaagaatcaggggaagggtgtggggcagtctaggtaccaggagctgagaaggaggcaggttaagattgagactgagatgtgggaagaggcggcgaaggagtatagggagcttttgatggacatgtgtgagcataagctggcacccaatttgccatacatgaagtcgctctttctcggctggtttgagcctctgagggatgccattgtcaaggaacaggagatgtatagtgaagggaagaataggatggcctatgcgccatactttgttcagttgccggctgacaagatggctgttatcgcaatgcataagttgatggggctgttgatgacaggaaacgaacgtgtcaccattggcactgccagggttgtgcaggctgcgttcggcataggtgatgccatttaaaatgaggttagaattccccagtttttggag

SEQ ID NO: 57778 - DNA, 420 bp, Glycine max
  Clone ID: PAT_MRT3847_23186C.1
gaaaattgaaaattgttcatatcttcttcaaatttgatcatgtttagtcctcaaataattgactaataaagaccttacaaaatggcaattgattgaggaggtaatccatatgcaagaaacaagattaaaaatggaaatcttatcaactaagtatgtgtatgaacttcagaacaaaacttccatactggaaatgctgagcttgaaatgacataggtttagaactattgccaatttgccacttcggtatcatcggaagcaacactgaacaataagataggacaattccagaatattatgtttgttcccactgtaacaatttcttgttaatccgtatcataggaatgtgagcaattctgggccaatctacagcttttttccctttacatctttcttcaagtcttggactcgtcatgatatgaa

SEQ ID NO: 57779 - DNA, 419 bp, Glycine max
  Clone ID: PAT_MRT3847_23187C.1
gggaaatcatcgttaaagatagtaagcggcttcacaaatttgccaatggagaatgctcatgtggaaattttggcggttttctctaaaagcagcagctaaaagttcatgtgttggcaatcaaaagctgaccatcaaaatctgataagagttttttacacatcactacacttattaatataacacggcacactacattgattagtttcaaattattgtgattatagcttcccaaaagtttagagcatgtattactagatcatacatgaaactgttaacatgtattaaacaatgtaaaaatggcaaaaagcttgcctgtctaagatggcttaatgatcttagctgcgcagaacatgagacattggatttcttgagtttgactcaaatttttgtattactgttacatgttcagaaataatcca

SEQ ID NO: 57780 - DNA, 296 bp, Glycine max
  Clone ID: PAT_MRT3847_23188C.1
cagtgaaatccaagtgcacattttcaagatttaaggatgaccttaatgttcatattacactatgggattatttgttttcgtattaggcgtatcctgaatccattggaaatgaaatcagaattcctcggggaaatccagttcctcattttcaagatttaacgacgcaacaatgttcatatatgaattggaattaattgttttcgtagtaggcctatcctgaagccacaggaaatgagataggtattcctcggggaagtcgaattcgacattttcaagaaatatcgaggcaaaaatgt

SEQ ID NO: 57781 - DNA, 464 bp, Glycine max
  Clone ID: PAT_MRT3847_23189C.1
atattttttttttttttttttttcttttttttttttttttatttcttacgggtttttgtttttatataattttttttatatttatttttttttttttttttggaattttaaaaaccacccccaccaaaaattaaccccaaattttaactgtcccttaaaaaaaaaaacccaaaaccaaacggtgagcccaaaaacttgtttccttaaaaaaaaaattaacatggggcgccccccggtgactacccgaaaattacgcaccaaacccttcgggccaaccaattttcctaataaggaaacgaataaaaactatggcgaaaaaaggataaaacgccttccctgtgaaaaattttatcacccaaacaatccacaaaaaaataccctccaaaaacaaaaaatgaaaaacctggggcccccaataaacgctccaacccaacaaaatgcggtggccccaactgccccttttt

SEQ ID NO: 57782 - DNA, 2216 bp, Glycine max
  Clone ID: PAT_MRT3847_2318C.1
ctgttgagagatctttggatgaatcttttcctcgtctaccatctagtaaaacaaccggagttttgccagaggtgctgaaaaatctggttgatcggaggaaaatggttaagtcgtggataaagaatgaaaaaaataagaatgaaaagactgatcctattagagttcagcaactggatattcagcagcaagcactcaagcttactgcaaacagtatgtatgggtgcctgggattttcgaattcaagattttatgctaagccattagctgagcttataacttcacaaggaagggagatactacagagtactgttgatcttgttcagaataacttgaatttagaggtgatctatggcgatactgattcaataatgatttacagtgggctagatgaaattgaggaagctaataaaattgctgtaagagttattcaagaggtcaataagaagtataaatgcttggaaattgatcttgatggtttatataaaaggatgctgctgcttaagaaaaagaagtatgcagctgtaaagttgctgtataaggatggcaccccatatgaggctattgaacgtaaaggtcttgacattgttcgtcgtgactggagcatattagctaaagaactaggagatttttgcttgactcaaattttatcgggagggtcatgcgaagatgttgtggagtcaatccacaactcactaatgaaggtacaagaagaaatgagaaacggacaggtagcattagagaaatatgtcattacaaagacattgactaaacctcctgaagcttatcctgatgccaagaaccagccacatgttcttgtggcacaaagattgaagcaacaaggctactcttctggttgctctgttggtgatacaatcccttatataatttgctatgagcagggtggtagtccaggcagtgcagctggcattgctcaacgtgccaaacatcctgatgaacttaaacgaaatcacgggcccttgctgattgacattgattactatttatcacaactgatccatcctgtggtatcacgtctttgtgcaccaattaagggcacaagccctggaagacttgctgattgtttagggcttgactcatcaaagtttcatcataaatcaagtgaagctttaaatgatgattctgcaagcccactctcgtttgttgctgatgatgaggagaggtatcggggatgtgagccgttggtcttgtcatgccctagctgctctggtacatttgactgcccacctgtttttaaatctatttgtttgttgggaagtgaaaggcaaaggccaaccagtgtagccccagaggaagctgagtacaatttctggcgtaagctgtgctgtcctaaatgcccagatgttaaaatttctcctgtaatgatagctaatcaggtcaaaaggcaagcagagaggtttattttaatgtactacagaggtttactagtgtgtgatgatgaaacgtgtaagcatacaacgcgaagtatcagccttcggttggttggtgattctgagagaggaactgtttgtccaaattatcctcgctgcaatgggcgtctagttagaaagtacacagaagcagacttgtacaagcagctctcgtatttttgccatgtgttcgatactgtttcttgtatagaaaagatggaggcaaaatctagaataccgatagagaaagagttgataaaaattagggcggtgattaaatcggcagcatcaacagcacaggagatcagggaccgttgtgcctttgggtgggtgaaattggagaatctggtcatttcagtttaatttgcagatttgatgccagagtcggtttatgtagtctagcatccatccatgtgaatctacttgagcaaggggattctcagcagattcatgatatattataaatagactatcaagggttatcgtcactggttttacaagcaagtctgatcgagtaaatctacgcaataccctctactgtttatttaagaggcagtaatctgctattgactgctactgtccttataacaatttccagtgttctgtaaatatgttttattagtttgtgttatttacaaaagctcatcaattgattgaagggtgaccaactgtaattttttgcttatgagtttcgagggaatagggaatatgtaacgtgtgtgacgcccagtcttgcaacaacaggttcaaggatgttatatttaaaaggaaaatgtactcaaatttgtt

SEQ ID NO: 57783 - DNA, 139 bp, Glycine max
  Clone ID: PAT_MRT3847_23190C.1
aaataattcaagcacgatagccactccagccaaggggctaggctatgagaacaactatttggactacacaccaaccataacaactttcaactcaggaaacttctcatgaaaacaagctccaaatcgaataacgctattg

SEQ ID NO: 57784 - DNA, 393 bp, Glycine max
  Clone ID: PAT_MRT3847_23191C.1
aaataaacataaaactttcacatatcttgtcaattgaaaatgtcacataagatccactcctgcataattatttactcaaaacaatgtgtataactgggcttctcagtttgtatttgaatatttaaatttctctcgtcggattatatttatatttttaaaattaaaataattttgttaaacttctttaaaagtgatggattagacatggaagatgactttcacgcgagagctccatcttcgtagattggcttcaaacaatagaaagaaagaaagcaacgatttctgacagactactctttcttttctccgataaaccaaatgcagcagattgtatcccttttgtaactagttacaaattcaatatgcaagcaggtatattcacccacaagacaa

SEQ ID NO: 57785 - DNA, 349 bp, Glycine max
  unsure (1)..(349): unsure at all n locations
  Clone ID: PAT_MRT3847_23192C.1
ctatatattcggctccgttttctccccananaaatatgatgtgcacatgtacttacacgcttttcaaggattctgtttttatgcttctgaccgggatattataaagtgcttatatgatctatcaattcttctctacctgtccctgtcgtacaaagaggtccatctgttcttgtattgcccccttcaactggacttctgctcccccagtgagtggctgaggagaagatttgattggttcgatttgaggttcatacgggtttgattaagggcgtgcctcaacaagtgatcccctcacctgtaccctttgtaatgaaccaagacaaccatccgtgccaggatcaatagccct

SEQ ID NO: 57786 - DNA, 1905 bp, Glycine max
  Clone ID: PAT_MRT3847_23193C.1
tacggctgcgagaagacgacagaaggggagaatgtgatggaagcatgtgcaagaacaccttccataacaagatgcgtgttcacatcatcactatcagcttgtgtatggcaagacaatgcacaatcagaactttcctcagttattagtcatgggtcttggagcactgaatcattctgcacagaaaagaagctttggtatgctttaggcaagatgagagcagagaaggctgcttggagaatatctgatgaaaggggtttgaagctcactactatttgtccagctctaattacaggtcctgaattttgtaacaggaatccaacagcaacaattgcttatctcaaaggtactacttactattgaccaaaatcagtggtccaatttcttgtactatgtgatattgatataatatgttgtaaagtccacgtggtttgtctcaattactagggtgtaacttatatattcatttttgagcaatttcacttaaactccatttagtttaaaaatgcacaccccaaacatcaaatctttccctatttattttttcgcctcatgcatatatacacattttactatatctatttaaacatcttagttttccctagggccatatattataccatatttatatatcttcacatacttaataatatataataatgggtgttgtacggacgtgggagagcaggagggcggagctggaggcctttcgccggagcctggtggcagccgccggcatccagcggcggaaagacgatgagggggggagaacccacaagtttgtttcctcctatgaacatgatgatggaaagggtaccttaatctgtgtcacttgtggagtttcctactttggtcttgccttggtcaaccatctcttgctcttaggttactctcttcgagtcaccgttgacaacccagaggacatagagaagctgagggaaatggagaggcgtggtgaagtgagggctacagaaggaaatttggaagtaataatggcaaagctaactgatgttgatgggttggagaaagcatttcagggctgtcgtggcgtctttcacacttctgcatttacagaccccgctggtttatctggctacacaaaatccatggccgagattgaagtaagggctgctgagaatgtgatggaagcatgtgcaagaacaccttccataacaagatgtgtgttcacatcatcactatcggcttgtgtatggcaagacaatgcacaatcagaacttaccccagttattaatcatgggtcttggagcactgaatcattctgcacagaaaagaagctttggtatgctttaggcaagatgagagcagagaaggctgcttggagaatatctgatgaaaggggtttgaagctcactactatttgtccagctctaattacaggtcctgaattttgtaacaggaaatccaacagcaacaattgcttatctcaaaggtgcccaagaaatgtactctcgtcgtttgctagcaacagttgatgtgaccaaattggctgaagctcatgcaagcgtattcaagtaaatgaccagcaatgcatctggtacatacatttgctttgaccatgtaattgatacacatagtgaggcagagaagctggcaaagtatattggaatgcctgaggaaaagatatgtggagatgcatcaaacaattctattataaatagatttgaactgtctaatgagaagttatgcagactcatgtcaaggcgactcaggtgttacagtgaatattagatgaaaatcatgttatgcttggcttatttaaagacgtgccttaggcttaggagtctagaagagaaaatagacgaggcatgtttaatagtttgtttagtaatttgtaatgcctgtatgttatggtttaattatagtatataatttattcaattttggtaa

SEQ ID NO: 57787 - DNA, 1451 bp, Glycine max
  Clone ID: PAT_MRT3847_23194C.1
atgcagatccaataaaagtgtggatgaccactttctattagtagtaagatgaacaactggacaaacaagcataatacaagacgacaaatcatcaaacatgaagttcaaccgaaagaagactatgtgcaatcaagtaagatcatcctcctcaagttctttggctttcagtttttccttcaccctaaaaagaagtgttgtcttccaagaatcctgatatcgttccaatgcattggtaatagcaataacattatctttacaaagttggcccacgcgtccgtccaaatggaagcaattgggagaattagccatgtctactggaaagttagaaatggctgaagagtgtttaaaacacgcaacagatttgagtgggttattgctgctatattcttctttaggagatgctgaaggaatatcaaaacttgcaactcttgctaaagagcaagggaagaataatgttgcattcctttgcttattcatgttgggtaaacttgaggactgccttcaacttttggtagaaagcaatcggattccagaggctgctttaatggctcgatcctatctcccaagcaaggtctcagagatagtggcaatttggagaaaagatctcagtaaggttaatccaaaagctgctgaatcattggctgatcctgaggaatatcctaatttgtttgatgattggcaagttgcactagctgttgaatctaaagctacggaagcaagaggtgtttaccctcctgcatcggagtatgtgaaccaggctgataaatcacatatcacccttgttgaagctttcagaaacatgcagatagaagaaggggatcagcctcttgagaacggggactcaaaccatgagttgactgaccaaaatgtagaagagccctattcagaggaacatgaggagcacgaggaacaaaatggagaagaaggaagccaagaggaggcagttgtagtggatgccgattctactgatggtgcagtccttgtcaatggtaacgaggcagatgaagagtagggtaaaagtaatgaaggagccccgtcagctgagaagtatttggttggggccgtgtgaaaattgaagttttgtctcgggtggttggttgtttctcaagtgccatatctaactcccattttactataattgctaccccgagtccctagcaattctagttttgtttttttagtgtatcatatactttactacaactaggctgtatatttgggaaatagagaggaaattataaaaattacgcccattttcagtagtgaatcagtgaccaactctcagaactcatcacctatttttccataattttgtacggcaatttggcttggaattttgtaacgttttgttgcttgagcaatcgtggtataattcttgcaaaacgtttcctgtaaacttgttgtgtaagatgaggttaagataatgaattctgggttgttttattttctac

SEQ ID NO: 57788 - DNA, 210 bp, Glycine max
  Clone ID: PAT_MRT3847_23195C.1
acgcaccctaacatttttcccatcaaattttatgtaaaattcccaaatctatatttaggcctttgatctgttacaccttttaccccaatcaaaaccaacacaacgcctcaaaaaaaaatcagtgcttagataaatatacactgtcacattcactgtacccatgtaccacatcattattgcatagtattatcattttaccttatcactata

SEQ ID NO: 57789 - DNA, 898 bp, Glycine max
  unsure (1)..(898): unsure at all n locations
  Clone ID: PAT_MRT3847_23196C.1
gcacgagtaaggttaatccaaaagccgccgaatcattggctgatcctgaggagtatcctaatttgtttgatgattggcaagttgcacttgctgttgaatctaaagctacagaaacaagaggcatttactctcctgcatctgagtatgtgaaacaggctgataaatcacatatcacccttgttgaagctttcagaaacatgcagatagaagaaggggatcagcctcttgagaacggggactctaaccatgagttgactgaacaaaatggagaagagcactatacagaggaacaaaatggagaaggaagccaagaggaggcagttgtagtggatgccgattctactgatggtgcagtgctcgtcaatggtaacgaggccgatgaagagtagggtaaaaataatgaaggagccccgtcagctgagaagcatttggatggggccgtgtgaaaattgaagttttgtcttcgggtggttgtttctcaagtgccattgccatatctaactcccattttgacaactagatgcttttactatcattgctactacgagtcctggcaattctagttttattttttttagtgtatcatatactttactacaactaggttgtatatttgggaaatagagaggaaattataaaaattacgtccattttcagtagtgaaatcagtgaccaactctcagaactcatcacgtatttttccataattttgtacggcaatttggcttggaattttgtaacattttgttgcttgagcaatcgtggtataattcttgcaaaacgtttcctgtaaacttgttgtgtaagatgaggttaagataatgaattctgggatatattttattttctaaaaaaaaaaaaaaaaagnggagggagaggaganagaaaaaaaaaaaaa

SEQ ID NO: 57790 - DNA, 469 bp, Glycine max
  Clone ID: PAT_MRT3847_23197C.1
ggaaaatcttctcttttccctaggaaggttgaatgatttgtaaaaatgcgttctggcattgtgaatccagaagaagacgccctagaaaaggatactgtcggtgtttctgcctctgaaatttcagatccaacatagtataccgctggaattcactgcccgggaattgagcatattcctttgtctgcggaaaatgatgcgtctgctctcttccatttttcccggtcgcgggtctctacctttttcgtgtttcggcccccgccctacgcttccgtaggctgtctaccatgtcctcctttgctatcactcttgttttggtcatgcacatcttggcttatatcccgtcctactctcccccttaccatttctctattctttcccccttttttccgttttcccgttttttttccctttcttctctccccttcccccttttccttcttttccccccgtttttgattttctccccccc

SEQ ID NO: 57791 - DNA, 320 bp, Glycine max
  unsure (1)..(320): unsure at all n locations
  Clone ID: PAT_MRT3847_23198C.1
ggcgtttttgggggtggnggggttgtggggtggtggtttggtggtcaatgggaagggtctgggctgtgccgtgttgcaggtggtgcatgtgcacttgtggggcggggggctcttgtgtgaggcccaggggagcctagagggtgggattgggggtgtggggactggcttgggggggacgttgggggggggggagnttgttgtgttgggaccgtgttgtaggtgtttggtggagttgcttgttgtctggcaggtgatgccttatgacctggggggacctgacagggctggtgtttttgatgagggctgcaggtgagggagga

SEQ ID NO: 57792 - DNA, 352 bp, Glycine max
  Clone ID: PAT_MRT3847_23199C.1
gacagatattatctatgattgtggatagagtataaaaaaagctgtggatttaggacagattgaaggatcagttatcaaagggaagggtagtttagtggttgaagaatatgaaacaagaattgacggtttgatcttgggagatggaaaatggaagaacaaaattgacacaaaggattttttttttgaaaagttgaggggaaaaagggtgaagagagaaaatgaacaacaaggggatatgagagaaaaggatagaggcgaaggacgagtaattcgagcggcgagtgggaactggggaacaagaagagcagaaaaaggagcggagagggagctgctaatagaggaggaacggaga

SEQ ID NO: 57793 - DNA, 488 bp, Glycine max
  Clone ID: PAT_MRT3847_2319C.1
cggacgcgtgggcaaaaaacgattgcggtggttgcagggcaaatgtggtgtttcctctagttgaattgtttgagaaaatttcctcttttttgttaaaaatggtcctatacttttgtacagttaaattgactgcaaggagtgatgttagttgcaaattttactaatttgattttgtgcttaatgcctatactactgagtttatgaatttggaattttgggtgtaaaaacagcactttgttttcgaactattgtttgacttgttttatgcatgattgtaatgctttccaaacctatgaactagacatatcagagagagatattatattgcaccattcgttcttgaagtttatctttacagatacaccaatcagcatggatgacattgacctagaattggatgagatggaactagttgctgctgctgctggataccattactatagctgtctgaccaaacagccgctgcgtggtctatcaccctgcccgtg

SEQ ID NO: 57794 - DNA, 1919 bp, Glycine max
  Clone ID: PAT_MRT3847_231C.1
cacccacgcgtccgctattttatgcctttcttcttgttctctcgacaatggtggataaaccaatgagcattaatccgtacccggttcccattcttgattaccaagctcctcttgtggccgctaatctctactcagcgttggatttaaattgtgaccctcctcacgccaacgccatcgttgttcccctttctctcgttttttctcagaaccttctgaggttaaagcaaaaaacaaagagagagagagagagaaaatgatgaagccatcgatgctcagatctctccactccgccgccacccgcggcgcctctcatctcttccgccgtgggtacgcctccgagccggtgccggagcgcaaggtagccgttctcggcgccgccggcgggatcgggcagcctctctcccttctcatgaagctcaatcccctcgtttcgagcctctccctttacgatatcgccggaactcccggcgtcgccgccgatatcagccacataaacaccagatctgaggtagtggggtaccaaggtgatgaagagcttggaaaagctttggagggtgcagatgttgttataattcctgctggtgtgcccagaaagcctggaatgactcgtgatgatctttttaacatcaatgctggcattgttaagacactgtgtactgctattgctaagtattgcccccatgcccttgttaacatgataagcaatcctgtgaactccactgttcctattgctgctgaagttttcaagaaggcaggaacttatgatgagaagagattgtttggtgttaccacccttgatgttgttagggcaaaaactttctatgctgggaaagccaatgttccagttgctggtgttaatgtacctgttgtgggcggccatgcaggcattactattctgccactattttctcaagccacaccaaaagccaatcttgatgatgatgtcattaaggctcttacaaagaggacacaagatggaggaacagaagttgtagaagctaaggctggaaagggttctgcaactttgtcaatggcctatgctggtgccctttttgctgatgcttgcctcaagggcctcaatggagtcccagatgttgtcgagtgctctttcgtgcaatccactgttactgaacttcccttctttgcttccaaggtgaggcttgggacggttggtgtggaggaagttctgggcttggggcacctctcagattttgagcaacaaggcctcgaaagccttaagcctgaactcaaatcatcaattgagaagggaatcaaatttgccaaccagtaattgaacatgttatcacatacatgtctggtaggttactggatattcctttaagaaccaaatcaaattttgcattctcagaaccattgatgtattgttgtcggcagtggtgtggcggttttgttgttttatttagtgtaggtatacgccatggtttaataattaaagtctgagagctgtttgttgccaaagggattgaacgatcttaaaaccaggtttaggatttggcattccattaataatggtcccttttaactgtatggtttcacttaatgtaattgcagggtgttgtaccctttattcacattttttctcacttaaatatgtttttgatttctgtgaaaaaaaagaaggaggaaaagaggaaggaaaggaggaagaaagagaagagagagaggaaggtaggagtatataagaggatgatggaaagaataaaaaaggagggagatgaagagagacagagtagggagggggagtggagagaagagaagtatagagagcgcgagatgaataaaggacggggtatgagagagaatagatggaggaacgtagtgtacagagggagcagtggaaagatagggagtatgcgatgaggagggaaaagaagaggcaacgcagagagcttacgaat

SEQ ID NO: 57795 - DNA, 279 bp, Glycine max
  unsure (1)..(279): unsure at all n locations
  Clone ID: PAT_MRT3847_23200C.1
tttttttttttttttttttaactgggccatgttcgggaaataaaaaaggggcttaaaaactcaagctggatactaattttttggaaaatttactgattaaatggaaaaaaaaaaatgctgttactaaagattttctatcaaatatattgatttttttctctaatgcgggataatcactattattttttttataagcnttattagaaatagggatcccatgatttttatttatcaaaggggtattttttttttaatttttttcatatgggatggaggttg

SEQ ID NO: 57796 - DNA, 453 bp, Glycine max
  Clone ID: PAT_MRT3847_23201C.1
agagacgttgctttttaacgccggcgaggaattttcggtcactctcgccggaaagcctgttttccgtttccagttgaaaactcttccggcgaactccgaataccccgttcctgcatttctcggtttctggatcgagtcttctacaacactcttggtgatgtttctcttcattttttcttctttgtttaactttgaagcacacccaggaaaaaaaaaagtaccttacttgcaaagtgggatttagagttcggttactctttagtctttatcttctgtgaccatttcttatcttagtttacttttttttttttgggttctttgtaacgtttccttgaattccctcacccgaaaatactactttctagtcggggtccacaccattcccttttgcttccttactctcaaatctagccggtacccaaaaataaccagctttttttttttttggtttgg

SEQ ID NO: 57797 - DNA, 624 bp, Glycine max
  Clone ID: PAT_MRT3847_23202C.1
atggcggaatgtacatccactcccaccaacagcagtctcaggttaacagccaaagtagccattgtcacaggaggtgccagtggcatcggcgaagcaacggcgcgtgtctttgcggagcaaggcgcgcgtatggtggtaatcgcagacatccaagacgatctggtgaatcgagtggcagcgtccattggcactcacaggtgcacctacgttcactgcgacgtggcagacgaagaacaagtcaaatacctcgttcaaacaacggtcaatgcgtacggtcagattgacatcatgttcagaaacgctgggatcgctagtccctccaaacagacagtatccgaactcgacatgtcccaacaactgttcgcggtcaacatgcatacgtggaatagcggcgtgcgtgaaacacgcagcgcgtgcgatattggaggggcgcgtgaggggaagcattatttgcacggcgagcgtggttggcagccacgaggtttaccggcagttcgcgagactggaaggagtggttctcacgcccaaagacgtggcagacaccgtgttgttgtctccgatgactccgcgtttatcactggctttgatcttatagtggacggtggctttaagtatggccagtga

SEQ ID NO: 57798 - DNA, 613 bp, Glycine max
  Clone ID: PAT_MRT3847_23203C.1
tgacacacttgttatgattcccttccctagctagctacccaccctatccctcggtactgtccactgtccattatttttgcctaattattaacaacacatacagttctctctttttctctccatccatgactccttattctctgaacccaccaggcccttccatacaagctggtcaaacccaactcttcaatatttctcctaataatcaggattgccgtaccatttttaacatatttgatccaaggaaaaccaggatagaaattggagggttaagagataattatcatcaacaggatgacaagatgatggtattgcatgatggatcatcaagcaacagcaacaagtcgtccttcaataataatatttgatgagaccgagtatcagtccaaccactgacaaagcaatcaattcaagcccaagattccaaaatcatcaagggctcgaaagcagaaggtacagccaaagaagccctcgtaacaacaacggcagtagcacccctagggtttgttcggattgcaatacaagcactaccccactttggaggactggcccctagggtcccaagtctctttgcaatgcctgtggcattagacagaggaaagcaagaaaggca

SEQ ID NO: 57799 - DNA, 347 bp, Glycine max
  Clone ID: PAT_MRT3847_23204C.1
cccactcatcctcgcacacaaccccacacaactgtacttgtactaaaattaacttcttactcacgcacgtacttataaacacatgcatccacttccctcactcattcaaaatacccactttcatatttctattcattttttcttatcaattaattcaactagccaaactcatctctcattccccatacaacctctttagcgatactcacaacttcttaattcaccctatatatacaaagcagtcacttatacttctcattactcacacgtcataccatacttcactgattcccccttataaataaatatattattttctaacatctattaaaacatttacctctcca

SEQ ID NO: 57800 - DNA, 454 bp, Glycine max
  Clone ID: PAT_MRT3847_23205C.1
caaaacacaaaaactctcacccatgatggaaccaccaaatataactaattgctgcaattcacccgaatttgagtggtggatgctcggaaacccttctttccctcaaccgaatcttctctccgccgacgaactcttcgtcgacggcgtcctcctccctctccatctcctccctaacaaaccagaccctccccaagcctccaactttataactccgatccaagaacccgacccggaacccgaacccgaacattcgccgagcataaccgaatctacctccaccaccgcgctctcatcctcgaagcggtggaaggacattttcaaaaagagtgataagaaaaacgcagagaacaacaacgaagaaaaagagaaagtgaagaagaaagagagaaaaagtggaagcggaagcggagcgagttccgccgaattgaacatcaacatatggcccttctcgcga

SEQ ID NO: 57801 - DNA, 134 bp, Glycine max
  unsure (1)..(134): unsure at all n locations
  Clone ID: PAT_MRT3847_23206C.1
ttttcacgcgtttctctgagtaangactattgctttggagcaggatatgtggattttttgggcatatataaaaatcttaccaagccttgcgacacagattggttttctttttctaataaagccttctggtacta

SEQ ID NO: 57802 - DNA, 439 bp, Glycine max
  unsure (1)..(439): unsure at all n locations
  Clone ID: PAT_MRT3847_23207C.1
taaaaaatataaaaaaaaaaacggcctccttctattaaaaaaanaacggnggggaacaaaacaaaagccgcccttttttttttttttttcatgaataattcancnaactatncctgggggtggtgcattaaaaaccatctccacccaaaccaaaaaaaaaacatanaactattttcttaaaaccacaacaagaaaacaagcctacaagtaaaaagtggaaaactgaacaaaacaacggattagtcctaaaccttgacttacgacttcacttaacaaacatccaatatcttgatgacagtaccacactcaagacggtgaaaagctacaacaaagtctccaggcttgcaacaagtcatttttttttgcatatcaaagagcaagctgtatggatacttctgttgattcaatcatggaatctccaaaaaaacctgtgcccaaa

SEQ ID NO: 57803 - DNA, 200 bp, Glycine max
  unsure (1)..(200): unsure at all n locations
  Clone ID: PAT_MRT3847_23208C.1
cggcnctggatttccgggtccgccccacccttccgtcccattggaatttttaaaattgccggggttaaccttaagattccaattttggaaatggattaggtaaccattttattgggttgggccgattggtttcaaaaaaagggggtcctacctcccatttctttttttttttggatttacccgaccacctggcttggttt

SEQ ID NO: 57804 - DNA, 167 bp, Glycine max
  Clone ID: PAT_MRT3847_23209C.1
cttatattattattttctttggcggttctggatcatgttatgtgattaaattttgcaccttgattttttgtatgtgtgtctttgaatcaatgggttcgttgtcggattgcgactgggatggcgtgtatctaatactcaacataaatctttttgactgcagtatggaa

SEQ ID NO: 57805 - DNA, 240 bp, Glycine max
  unsure (1)..(240): unsure at all n locations
  Clone ID: PAT_MRT3847_2320C.1
gggtggcttgctgttataaagnagctggcagaggatgttgatncccctggtagacctttgttgttgaaaccntgtagctttctagttttgcnattaagggtctgtttgaagatcgtgtcattgttagcatgatttgtgattctttaaatcntttcatccatcgattctaancaattacagtataaatactgaaagaaaatacattaatagattgtggtggattttactgcttcttggtgc

SEQ ID NO: 57806 - DNA, 599 bp, Glycine max
  Clone ID: PAT_MRT3847_23210C.1
ctcttccccccttcccttcttcccctctttctttttttttttttttttttaaaaaggtttattttttttttcctgttttttctgaataaaaagtactccgttttttaaacagagtttcccaaaaaacactcgctctacagttaggaactaaatcctccattttttggtacggataaacagcaaaaagaaagaatttttagggaaaacataaccctgctttagttgggggcacgtggagttgaccatgctttatttgactatgcaaatctttatgacagaggcatttcctatactatgcagggcttcaactggatgaccaggcttacaaagggccctttttgttggggacttaaaagcttccttaaagaatgtcctttggggattctgaataggaagcctttgaaaatcccttgcccattttaggaataaagcccttggatatcccgctgcgccttggtggcgtctcctccctggaggtccaatgaaatggggcggggctcaacactgggaccaccaccgaaattattggaaccgctggcctatacttggcaactaatttggttgtacacccgccacgtgttagcacaacaatgggtttt

SEQ ID NO: 57807 - DNA, 300 bp, Glycine max
  Clone ID: PAT_MRT3847_23211C.1
tatgagagtttcccatagagcaatacggttgagactgagccacaggacacagaacagaggattccaggggccgcatgcctgatcactgcgaaggtccttagctatactatgattaccctgcatgactcgtcttctaaaggaactggcagatgagctcttttcgactagctaatccgccagcttttagggctggagccttattccttatacatactcatgccagctgaataggcctcacattgcataggccactaccaggcgaaccgacgaagccactggattgacctgagccagaatcgc

SEQ ID NO: 57808 - DNA, 728 bp, Glycine max
  Clone ID: PAT_MRT3847_23212C.1
tacaaaaataggtattcattgatttcaattaacaaacaagcataagattaattgagagacgcagaaggtaaagatcgaagaatggaagggtcttcaccatccattgaagaagagagaacagccactttctatgtgtaccatccttgctattttcttcaacaagcactcagggctctcttgaagtgtgtaggtattgatgagtctgaaaacacaatgtgttcacaggccaataaacaagagaaaagctcactgccacaaactccttctgcagatgatcctattacaaactctccaacccacaaaagctccccagatgctgcagatccaccttccacaactaatcaaaccattatcattgcaagtttaatggcaacgcgtggcagtcgagggtctaaaattagcgatgggtcaggccctcagcataattaaatagataccatggcttttcacttggttggattataaagtgtgtgatactcgaaggtcaggacttaattacccaagggcccaggccttcagagaataaatgaaaaatttatgctgaatttcctcttagtgttagtctagttgtcatagttttgcttcctctagctgtttattttaacctttctttcctattttccttcttctttgcaattttcagatacattgtacgtgtgtgggaattaaatatttatgcagatatatagaaggcatgacctgtaaatgcatatcaatatttaattgct

SEQ ID NO: 57809 - DNA, 469 bp, Glycine max
  Clone ID: PAT_MRT3847_23213C.1
gctgcgagaagacgacagaagggagaagttaaaagctactctacttcagtttaacttcaaatccaggtgtgacccttctttattcatctacactgattccaataacactggtttatatgctactgtatgttgatgacatcattgtcactggaaacaacttctccatcaaatcactagttactaaactcaattctgagttttctcttaaggacctaggaagtcttgactatttcttgggaattgaagtcagatctcagcccaatggtgctcttattctaactcagtccaagtacattagggatttgttgagtaaaacaaagatggacgaagctaatctcatctcttctccaatggttagtggttgcaaattgactaagtcagggtatgaatctttccctgatcccacacactacaggtctgttgtgggagccttgcagtattcaactattactagacctgagataagttt

SEQ ID NO: 57810 - DNA, 2515 bp, Glycine max
  Clone ID: PAT_MRT3847_23214C.1
cccgcgtccgctctgagaagggtaagaagccattcaaggaaataaaaatagcagtcgaaaaagaacgcgctttcttgtgagcccgtttttttttcctctcaacgtaacggattttctccttcactgtttccaacatacccagagggaaaagagaaagtgggtcttcttttcttctcagaaagtttcattcttggcttcgaatctcttcattttcttgatctctgtccaaagggtctcgtgtagtgtagtgccttttttttttttttttcctctttttctcgctctagagaatgggggcagtgagaaacattgtgctgctgttgctttgcattactgttgtggctccgattgtgctctacactgatcgccttggcacctttgagtccccttcaaacaaacaggagtttattgaagatgtcactgcttttgctttcagtgcagcagactttagtcatttgaatctgttaccccaggaaacttcaacggctgtgaaagaacctgttagggttgtgtatactgaggaggattcaactaacaaaaggaatttgcctcaaggcttgcaattggtgaaatcaagggagcatgtgtttgccaggatgttgtcaactacaactgaggaagatctggctaaaaaggagaaccccattaaactggtgactgatggaattaagcaaggaaatcaaggtgatgcatctggtgaaaatgtaaatggggaagatgctattgatgttgatgacaatgatgggaaacttgctaaatcaattagtgcttctactcaagagcctgaaattaaggagcaacaactagccacagaaacttctagcaaaataaaccaaaaaggttctgaattgtctgaaaccaataagcagaatgatcgaacaccatctgatgcccgggtgaagcagataaaagatcagcttatccaagctaaggtctatctttcccttccagttgtaaaatccaacccacatctcactcgggagcttcgattacgggtaaaagaagtttcacgaacacttggggaagcaatcaaagattctgatttacctaggaatgcaaatgagagaatgagggcgatggagcagacactgatgaaaggaaagcaagctcaagatgattgtgctgctgttgtgaagaagcttagggctatgctccactcatcggaggagcagcttcatgttctcaagaagcagactttgttcttaacacaattgacagcaaaaacactgcccaaaggtcttcattgtcttccattgcgccttactactgagtatcataatatgaattcttctcaccaacaattcccccatcaagagaatttagaagacccccatttataccattatgccatattttcagacaacatattagcaacagctgttgttgtgaactcaactgtttccaatactaaggatgcctcaaaacatgttttccacattgtcactgatagactcaattacgcagcgatgaggatgtggtttttggggaatccacctggcaaggcaaccattcaagttcaaaacattgaagactttacatggttgaatgcaagttacagtcccgttcttaaacagttgggttcccaatccatgattgattattacttcaaggctcatcgagcagcctctgattcaaatctgaagtttcggaatccaaagtatttgtctatcttgaaccacctccggttctatctgcctgagatctttccaaagctcaacaaagtgctgtttttggatgatgatattgttgtgcagaaggatctgactgatctgtggtcaattgatttgaaaggcaacgtaaatggtgctgtagaaacttgtggagaaagttttcaccgatttgatcgctatctcaacttctcaaatcctcttattgcgaagaattttgacccacatgcttgtgggtgggcatatggtatgaatgtctttgatttagcagaatggaagaggcaaaacatcacaggggtgtaccacaactggcagaatctgaatcatgatagacaactatggaagttaggaacactgccaccgggtctcataacattctggaaacgcactttccctctgaaccgatcttggcacatcttaggtcttggctacaaccccaatgtcaaccaaagagatatcgagcagtctgctgttgtacactataatgggaacatgaaaccttggcttgagataagtattcccaagttccgaagttactggacgaagtatgttgactacgatcatgtgtatttgagagaatgcaacatcaatccgtagataggtcgtttttgtacgtttaaccattgaagttttcttagcatttgctaagttgtggtgcaccttttaggtctgcaattccatctgagtagggcttctatatttttttaagctttacaattctttttgtatacgtgttcctgtttttacattgttattttttggacttgcaacccttgatcacaaacctgcagagaatgctaactgtacttgtaaatgaaatgaagaggctagttctttttatttccgtg

SEQ ID NO: 57811 - DNA, 168 bp, Glycine max
  unsure (1)..(168): unsure at all n locations
  Clone ID: PAT_MRT3847_23215C.1
ttttnnnaaagaagcaaactgatgcattttcattcaagaaattcaaataggggatggagggcaattaaaaacaaaattatggagctacatttatatattgagtttggaatttgtacaacagcatggagttttcatttgaaatactactgccaactatattttttttta

SEQ ID NO: 57812 - DNA, 356 bp, Glycine max
  Clone ID: PAT_MRT3847_23216C.1
actagttagctttacccctgcctttgcatcactttcttctcttgcaatgatccatttttggtgcctctgtgtgaagccatggtttgaagtccctcttcaaccttgaggacaaggttgattttccagcggtaggtaatgatagcaacaccagttgtaacatgtcccataatagacccaagaggactactaagaagtccatccatttacgtgattacgtgtcccataacagttggagaatatcccatcacatatcattttgttactactacatatcattctattattgccttttatccatcatccatttccgttgtaaccgtttcagtgtaagtttgttagtcatgtagtggtagctg

SEQ ID NO: 57813 - DNA, 336 bp, Glycine max
  Clone ID: PAT_MRT3847_23217C.1
gaccgctgtcgccctcatggcagaaaagccaacagctgacagacgctgaaatagtgacttgtctccatcagtgttgatcaataaaggctttgagtttgaatgccatatccacctgaaatcgatgtcctccccatacccaatgcctcaaagtcccgacctttcagcccttcttcacattcaatccattcccaaattcaagccatgggcaaacgacagctcacactcttcgactcaccatcagctgcaaactgaaacactcacactaaataaagcttagggggaagagtgtgacacaaaatattgtgttatcagaggcttcatctcacacactcacag

SEQ ID NO: 57814 - DNA, 419 bp, Glycine max
  Clone ID: PAT_MRT3847_23218C.1
tctggatatagcagcagataaagcgtcttaattaaaacacaaacgaggtttttagagttgttccattccacctaacacattctgccacgccttctttaatttctctgatctgattcatggctttagcactttcctccactgcattgtcaagccttccaaacagagaaattcgtcaaaagggtttcccagacagaacacccacatgcttgagtttgaccagaagaacagttgcatatgctacaaaaggggtctcagctgtctgtgagccacttcctccagataggccattgtggttccctggtagctcacctcctgagtggcttgatggaagtcttcctggtgatttcggttttgaccctcttggaattaggctctgatccacagctgctaaagtggattgctcaagcagatctaatgca

SEQ ID NO: 57815 - DNA, 1391 bp, Glycine max
  Clone ID: PAT_MRT3847_23219C.1
cgttccccacccccgctgttgcgcccccagccgggcctcgggtggatttgatattccattggctctcatttcatattttcgttccaagcagaacatcacaccttatccatcatctggatatagcagcagataaagcgtcagaattaaaacacaaacgaggtttttatattgttccattccacctaattcattctgccacgccttctttaatttctctgatttgattcatggctttagcactttcctccactgcattgtcaagccttccaaacagagaaattcgtcaaaagggtttccccgacagtacatccacatgcttcaggtcttcagcactttcctctaccgcattttcaagtcttccaaacagagaaattcgtcaaaagggtttcccagaaagaacacccacatgcttgagcctgaccagaagaacaattgcaaatgctacaaaaggagtctcagctgtctgtgaaccacttcctccagatagaccattgtggttccctggtagctcacctcctgagtggcttgatggcagtcttcctggtgatttcggattcgaccctcttggattagggtctgatccagagttgttaaagtggttcgctcaggcagaactaatgcattcaagatgggcaatgctggcagtgttcggaattctggtccccgaattgctcgaaagaatcggctacatcgagaacttctcttggtacgatgctggcacacgagagtattttgtggaccccacaaccttattcgtcgtgcaaatgggcctgatgggctgggtggagggtcgaagatgggccgacattgttaacccagggagtgttgacattgagcccaaagtgccacacgtcacgaacccaaagcccgatgttgggtaccctggtgggctttggtttgacccaatgatgtggggaagaggttcgcctgagccagtgatggttttgaggaccaaggagatcaagaatggaagacttgcaatgttggcttttgttgggttctggttccaagctatttatacaggggaaggacccattgaaaatttgatggcacaccttgctgatcctggtcactgcaacattttctcggctttcacgcgttagggcaatgtatagtttgaagaaaagaagactgaagatatgcgtcaggaatgaacatagtagctttatgctgcaccagcaatatccgttatttactttatacatgtactttgcttcctaatccaagctttacaattgacacaaggttttgattcttttaaacaaaatcaaattgcaattgctttggatcattgaggtattgaggtgtcgggtgtaattaaggtaaaccttaaaagcatcattgtaatttactcttttttctattaaattacaagaagggaaatttcgtgt

SEQ ID NO: 57816 - DNA, 501 bp, Glycine max
  Clone ID: PAT_MRT3847_2321C.1
aaagaaaagtgtattagattttattttttaaaatgaggaggtatgaaaagaaaagtacaaaaagaaatggcctaattgtgaaaactttcggggggaaccaaccgaacataagccctaggaaaatgtactcatacatccacactctctctcatctcactttcacctcacttgttatatttattattttctttctctaccttattttttgttcttatctctcttatttcaatcctaatccactccagtccattttatagagtatatgaatatcataactcttaagtagtaacacagcccataagcttatgatgacaccatagtacgacacaaatctagtaagaagctccacccaatgaaaaagctttaaaatgcttcgtgggatttgtcgattcttaacatcaattattccgaattcctacacagccttaaataaataaaatccccaaaaaaatgaaaaggaagcatattagacatttatactttatattagattagacaagc

SEQ ID NO: 57817 - DNA, 1492 bp, Glycine max
  Clone ID: PAT_MRT3847_23220C.1
acgcagattttcatttcattcattttcaggtttagagagacccaaacactaacacactgagcgtgatcaagatcatcaacaatggcggaaaaccctctcgaaacggcgccgtccgagctcacaaccttcttcttctcagaattcgcctcaagattcaccgcaggtccctgcattttcgaattttatgccctttccgggtgggtattatcaaatgattcctggtatgtaccctgcgctagttccagggttgactctgccgcaacatgaggagaatgggaaccgcggagctggcatatatgctgttcctgttaacccgtatgacagacaaattactggacttacatacaacactctgattccgctgacttaccacacacccagtagcaggccaagttctgaagctgctgctgccagtgaaaatcaggggcaagcaggacagctacctcaacagcagcagcctgcacctcagacgttgagtcaaattgcttatgcttttgacacccatccaaaagcagaggcaagaagtaaagctacctcaacagcagcagcctccacctaaacgacaagttgttgttaggagatttcaaattgcatttcaaattgatttgtttcttatgttgaagctggcagctgtgatctttttgtttaaccaggatggatcaaggctgagcccttccctcctccccgggttccccacccatatggattgaactatattttgtaccttgcaaggtttgtggagctggcatatgctcggtatgcggccagccgcagcacctgggccggcaccttctcctgcagccagggatgagcatattcccgctcccgcgcctgagggtgacaatgcttcttcagctgcgactatactccaacccgagatatggtaccaccccggtgttcctgttgtccagccagttgagaatgaaaatgttgcagaacctgacaatgtcaatggtggtaatcagtggtggggcattgtgaaggagatccagatgattgtctttggatttatcacttcccttctccctgggttccacaaccatatggattgaactatattttgtagcttacaaggtttgtggaattgacatatggtctatgtgactatacctgagacatgggagaagggggttttctgaaataaaatgtatagcatcagaagttccaagcgtcataactaatacatacatagttaggtgcaactatataatccagcggaagatatggtgcaactacagggtgccgtttttgtatcattatttggattgttgataaaacacttttttttggattccagagcccaggtttctacttagcagggactttagatttttttattttttccttagtactgtttttaattgcaagttcctgatgacttgtttcttttcatagtttgtacgatctttcaaagcgcctaatgctttttccaatctcagttagtcgttggttcaacgttatggagagcaattgctaattattttaaaaattt

SEQ ID NO: 57818 - DNA, 335 bp, Glycine max
  Clone ID: PAT_MRT3847_23221C.1
aacttaaaatcttaagactcaaatttatgtgtatgagactttatctcacacttgtactctaataggttggacaccacttgacacttgatatatatatatatatatatgtgtgtgatcaaacagggatatatactagattactagctataacttaattataaatatatacgtacatctgtaacctaagtgtctacaatacacatacatacatatgtaaaatctgtgccataagaaaaactgaatggttgcacgttaattaaagttggtttatttgtgtcatcacctcccagccggtcaaattcttctgaatgataataagtcacaccatgtccctg

SEQ ID NO: 57819 - DNA, 179 bp, Glycine max
  unsure (1)..(179): unsure at all n locations
  Clone ID: PAT_MRT3847_23222C.1
tcgcgatctagaggattctacccgccgctcgatgggaattgcgcttcaaggcgtctcgtagggctaatccgcctcacgagggtcaccaacggcacgtgcctttggggggccgcggcnccctactgctggctagcccacggacggcggccgcacgcctctcctttcccctggattccgac

SEQ ID NO: 57820 - DNA, 1375 bp, Glycine max
  Clone ID: PAT_MRT3847_23223C.1
ttttcattcattttcaggtttagagagaccctaacacacttagcgtgatcaagatcaacaatggcggaaaacccttccgaaacggtgtcgtccagttcccaacctcctcctcctcctcctccttcttcttcttcttcttctcagaaatcgccccaagattcgccgcaggtccctgcattgtcgaattttatgccctttccgagtggatattattatcaaatgattcctggtatgtaccctgcgctagttccagggttgactttgccgcaacatgaggagcatgggaaccgcggagctggcatatatgctgttcccgttaacccgtatgacagacaagttactggacttccatacaacacactgattccgctgacttaccgcacacccaccaggccaagttctgaagctactgttgccagtgaaaatcagggacaagcaggacagcaacctcaacagcagcagcctgcacctcaaagacaagttgttgttaggagatttcaaattgcatttcaaattgatttgttgcttatgttgaagctggcagctgtgatctttttgtttaaccaagatggatcaaggcagaggcttattgtccttgtgttctttgctgctcttgtatatttgtaccaaactggagctttgacaccaattataagatggctttcacaaggtatgcagagagcagcagcacctcctcatccaccaagacctgcagccagggatgaacatattcccgctcccaggcctgagggtgacaatgctgctccagcagagggtcaacctgaagccgagaatgggaaccagcccgctaatgatgcagaccaggcagttgagaatgaaaatgttgcagaacctgacaatgtcaatggtggtaatcagtggtggggcattgtgaaggagatccagatgattgtctttggatttatcacttcccttctccctgggttccacaaccatatggattgaactatattttgtagcttacaaggtttgtggaattgacatatggtctatgtgactatacctgagacatgggagaagggggttttctgaaataaaatgtatagcatcagaagttccaagcgtcataactaatacatacatagttaggtgcaactatataatccagcggaagatatggtgcaactacagggtgccgtttttgtatcattatttggattgttgataaaacacttttttttggattccagagcccaggtttctacttagcagggactttagatttttttattttttccttagtactgtttttaattgcaagttcctgatgacttgtttcttttcatagtttgtacgatctttcaaagcgcctaatgctttttccaatctcagttagtcgttggttcaacgttat

SEQ ID NO: 57821 - DNA, 724 bp, Glycine max
  Clone ID: PAT_MRT3847_23224C.1
aggcttatggtccttgtgttctttgctgctcttgtatatttgtaccaaaactgaagctttgacaccgattataagatggctttcacgaggtatgcagagagcagcagcacctcctcatccaccaagacctgcagccagggctgaaaatgttcctgctcccaggccggagggtgacaatgctgctccaggtgcgggtcaacctgaagccgagaatgggaaccagcccgctaatgatgcagaccaggcagtcgagaatgaaaatgttgcagaacatggcaatgtcaatggtggtaatcagtggtggggcattgtgaaggagatccagatgattgtctttggatttatcacttcccttctccccgggttccacaaccatatggattgaactatattttgtagcttacaaggtttgtggatctgatatatggtctatatgggaccatgcctgagacatgggacggggtgttctgaaataaaaatgtatagcatcagaagttccaagcgtcataactaatacatacatagttaggtgccaactataatccagcggaagatatggtgcaactatagggtgccgtttttgtatcattaattggattgttgataaaacactttttttttggattccagagcccaggtttctacatagccaggggctttagattatttattttttccccattactgttttttttaattattattgcattgcaagcgcctaaaa

SEQ ID NO: 57822 - DNA, 2373 bp, Glycine max
  Clone ID: PAT_MRT3847_23225C.1
atgtggaccactacgggaaaaagggggaggaggttgccgcccagctcgcccaggcgagctcagctcgcccaggcgagctcagctcgcccaggcgagccaggttgcttcctccagaagcaacagcttcaggaggaatattctggagggcccaagtgggcctgggtgctatttgcacccccatttttactaaaaacttacggattgtgcatcaatatttttttggtttttcggcatgtcctggaatttcacaaattgcctaatgatgggtaccaagcacctcacaaggaccaaagaaaggtcgcatgtcatcaagcaaaggtcccggacgaaattaggaaaatggaaatctttattcaatcaattgatcccgatgcatggaattccattgttaaaggtcctttcattcctactaaagaaatgaatggtgaattagtacctaaagaatgggatgatatgaaagatgacgagaaaagaaaagtgcaaaatgatctaaaagctaaaaacattttaacttctagtttatcttctgatgaattcttttgtactacaaggtgcaaaagtgcaaaggaaatttggaatatgctcaaagtcactcatgaaggcatagcggatgttagaagagcaagaaaacacactcttgtatccgaatatgaagcattcttaatgaagaatggagaaaccattttagaactccaaacaagaaaacacactctagagttcaatattcaattaggatcaacatttcagccagcaattcaatcaccaaaactcaaattcacaatagacacaatcataaggaaacctaaaagttcaagaaaagcttctatggaggttggatctttgagcttcaatggtgattttccaccatggagatgcagcggaaggcaaaggagaagaggagaggggaggcaccatccacaagggaataagccatggaagaaggagcttcaccaccaagaatgtgccttggataagaagcttgaagaagatgctttaatggaggaaaagaaagagagaaggggggagcatgaaattgaaggaataaaagagggagaaaagtggaaatttgaagtgtgtctcataagattttcattcatcaaagttacaacaagtgttacacatgcttctatttatagactagggctaaaaccctatactactagaatggccaaaatacaaggcccaaaagaagaagaaaaaacctattctaatatttacaaagaagagtggacccaaccttggcccatggactcaaaatctaccctaaggttcatgagaaccctaagaccttctttatcagctctagcccaatcctcttggagtctcttgctcatggctctgtcaatggatgactcatcaaccattgaagaaactgagctaaattttgaatttgaagaagttttggaagcattgaatgaaatgcatgaagaagctcaaaggcttgctatgttgaacaaaaagttgaaatgcgatatgaaattgcatatcactaaattagcttcaacacaaagtgagctagataaattgaagcaagaaaatgaaaaacttgtttcaaaatataaagccattggttgtgattctacctctacttcttttaacatggatgattacaagtctttgcaaactgaatttgaaactttcaaagaggatcactatgctgaacgtatgaagttccaaactgagccttgctatcttaaagatctttttggaaaattaaacaatggaaagagtgatctcagtcacatgcttagcgtgcaaaagcatactgcagataagactggtttgggatttgatgttccaagaggcaaatgtatttggattccaaaagatttatttgtgaagattaaccccattgaacccaacttaaattgggtgtgcctaaaagcaagggattcactatggtacttggatagtggatgctctaggcacatgatgggtgacaagtcaaaactcactgactttatgtcaaaagaaggaggatatgtcacttttggagacaacaataaaggaaagataatgggagaaggaaatattggaaatcagtacaaaacacaaataaagaatgttctatatgttgatgaactaaagcataacctcctgagcattagtcaactatgtgacaaaggcttcaaaattgaattcaacaagaatttttgtcttactagtgaagctatgctctgtgatgttgtccatattggcaagagaatagtatgtgatgaaactaactctattgttcaagataattctttagaagaagaagatgcaggttttcaggaaaaggattctgctcttgaagatgacatcaaacctgaagagcttgaacaaagaaaagagatctccataagaatgcctaaagaatttcctagagaatga

SEQ ID NO: 57823 - DNA, 337 bp, Glycine max
  unsure (1)..(337): unsure at all n locations
  Clone ID: PAT_MRT3847_23226C.1
tttcggttattccgacaaaccgggaacacagggggccggaccgcaaagccggaaacaaacgcaaaccacgcccggcggaaggaacaccacaagcggcggcgccggagacgagnacggccaaanaaacggaaagaagaaaactcccagggctgacggcagacaccgggagacacatgcncggccacgacgagggcagnngaggagcgccgaccnacacgccccacggaccncgagaaagaaanaaacacggacagcagaaagacaagggacgagaaaggacngaagcagaagcacgggaaaaacggcaacagaagaccacagcnccaaacggggacag

SEQ ID NO: 57824 - DNA, 258 bp, Glycine max
  Clone ID: PAT_MRT3847_23227C.1
ggaacacttaatatttttgtggtagagcagaaaagagaaaatacatgctactttttcacctccacagagattgattcacattccatataaagttttcgtcttgttcatgagcttgcttatctatggcggaaacacgctgcttaatgttaaattcgtggtgattttattgctgcttattagcactctgtatctgatcggttgaagggagaagaagaaaaggactttcttctgtagaattctttctcttctaatttgtag

SEQ ID NO: 57825 - DNA, 505 bp, Glycine max
  Clone ID: PAT_MRT3847_23228C.1
cttgggggggggggggggggggggtggggtgggggagaggcggaagggggcatagatgatctgggaccaagcttaggacaagccccgagaaaaagcgtatcttctacacccatgatgagggatagccggatccttgaaaaggggtacaagtgaagaccggtatgaggacggaggtgactggtgggcaggcgaaccgaccgtgaatgataaggccagtggtagaaatacgataaccagtggggtttaaaacaccaggcttaagatattaattgtttccgcgaaacgcattagggcaagtggtgtaaaccgcttggagtaaggggcggcacaatgccagtagttggccgaaatgggccactaaaaccgctattatgagccattagcgtagtaaaagctgttaagggtaacagcatgccagctgcagggcctcccggcatttattggtgcggatcaaaagtagcaggaagccagcccggtgcagaccttgtagcaggctgaagcattc

SEQ ID NO: 57826 - DNA, 579 bp, Glycine max
  unsure (1)..(579): unsure at all n locations
  Clone ID: PAT_MRT3847_23229C.1
cggagagcgagggcagagagcgtggtgggcgagctagcccccctccccatcaattcaaactaaaatgtctatgctagcttcccccttccagctcctggaactgaacatcatatccgcccaagacctcgcacccgtctccaaatccatcaaagcctacgcagtggcatggcttaacccggagcgcaagctaaccacccaaatagaccccaacggccaaaacaaccctacctggaacgagaaattcgtcttccgcgtcgacgacgacttcctcacctccgacgaatccctcatcatcattgaaatctacgcctccgcctggcttcgtgacatcctcatcggcaccgtcaccgtcctcgcctccaacctcctcccccgctccatcaatacccgcaaatcaaagatccgcttcgtcgccttgcaggttcgtcgcccctccggtcgcccccaagggatcctcaacatcggagtcaacctcgttgactccaccatgagaagcatgcccatgtattccgaactcagcgcctnncgctgtggctattgggacgtaatggaccccaagaaaccgaaactgcagcaaat

SEQ ID NO: 57827 - DNA, 722 bp, Glycine max
  Clone ID: PAT_MRT3847_2322C.1
ttgttgaaatgatttcatgcatgaggcctaatatatgggccactttggctgatgaagtacctgcttgggtgactgataaaaggaacaaaacctcagtagacagaactgtgcgatggcttgatgactgccttgcattaaatccggtagttggatcagtctttggtgccattgttggaggcacgaatttggatgaaaggaagcgatgtgcagaggaggtagccaagcgaaatgtatcaggttattggattggaggatttggtcttggagagggcattgatgagcgacctgctcttctaagtgctattatagatctcttgccagatgaaaagccacgcatgatcagtgggcttggactcccggaggagatcttggagggcattgatgctgggattgatctttttgattcaacgtacatctattccctcacacttggaggatttgcactaacgttttcactagacaagggtgggaatcaatataattttcagaaaagccagattggaagtgacttgactaaaattaatttgagagcaaaagtttacaggaaagatatgtcacccattttaggaaactgcatctgctatacatgccagaatcatactaaagcatacatcaatcacctatttaatgttcatgaaatgctggcacagattctgttagaaatccataatacacaccactacttgacgttctttcatgtaataagagaatcaataaaggat

SEQ ID NO: 57828 - DNA, 476 bp, Glycine max
  Clone ID: PAT_MRT3847_23230C.1
gaacctcacatgagaattgtattggatactagttattacgatggtttggtgacagaacgaactttatgaatgggactcgtgcatatatatcacctctcatatctcgattgtgatcctatcatatatatcagaaaacttagtagcactctcctcgaattcttatttacacactttacacacaatgctcactgacaccattgttactacatggacctcaacattctgagactcatagagatacagatgatggcatgctagcgcgacattatgctatcctacttcgtgcaggacaacgttctcgtagtctcttggcgatgcattactttgcccgacgtgcttgcagaatctggagtcactctgtctggtccatcacctgaatatcctatactagttccacttctacttcgatctacatcgactgtctcatctcctgcgcccaataatgctacctcgaacacctgatgaaaaattaccat

SEQ ID NO: 57829 - DNA, 411 bp, Glycine max
  Clone ID: PAT_MRT3847_23231C.1
gaaacaaggaaggtgaagcatcaatctctttccattccccatccttcagtttgatttccaagccattcagattattcagctgatgtacaatggatgtgatggtcaagtccgagtgaggttgcagtcccaaatcattttcatccatctggggtgttctatacttcatgcatcgaagtagataatcgtttgattctatgaaagaatcgcatcgttgcatgtccacaccatagctctcaaacaccattctcttcgccatatggactaattctcctaacaacttagcatactcattgatgctttcactatatggaaaattaaacctctactatgagcaattaattgttcacaatcatattatatataaacaaaatatagctaggaaaataatatatgtcgttgaaagaaataata

SEQ ID NO: 57830 - DNA, 182 bp, Glycine max
  Clone ID: PAT_MRT3847_23232C.1
ccaaaacggcgattatattatttaaaaataaaagggtttaattttacatctacatactcaaagagataaaaagggggagaaaccctaattaaatcgggctaacagaaaaccctgacgtaaacacacgaaaccaatgaagagctggggaatttggggacgggcttggtgccttaagaaaacgg

SEQ ID NO: 57831 - DNA, 465 bp, Glycine max
  Clone ID: PAT_MRT3847_23233C.1
gtcaatgatgaacagaataagactcttctagaccaagcagaagaagatgatgatgaagaagaaggacaacaaaagactaagaaacagtgggtttttctatttatctcatcgcttttttcttttctagagaaaaccattttttttctaatgaaaagataaggatatggtggtttgttttttttaattttgtgcaagtttttagtttatttttttgtcaagaccacaagtatccttcaacaatcatattctaatgtctaagctagcctgtgattgtattttccttttatttttcttttttatggtggtgggggtgaagcttcagttctcaaaagttaattttagcattgaatggttcatgggatgtgaagaacacacaatttgggatggtctctctagtataaagtacgtgtatgtttttatatctgctgctttcgctttaatatgtggcaagctagggagaacata

SEQ ID NO: 57832 - DNA, 207 bp, Glycine max
  Clone ID: PAT_MRT3847_23234C.1
gcctttagagcgtcagagaattataatagacccagatctccaattatatatcatacatttgttacgcacacatagtcggatacgtgtgttgtattatcagaagcaaatcgtaccttacaagaaagacgcggaatattatgttctagggagttgcttggaaggaaactggtattcagacatgcttccatctatatcaatgttttaatc

SEQ ID NO: 57833 - DNA, 458 bp, Glycine max
  Clone ID: PAT_MRT3847_23235C.1
taaaaatgaagatgtttgtccaacattataattatctgtcaacaatgtacaactatatacatggtaatatatcaaaactatgtgtagaaagaatatatgaatcaaaattcagatgccgatctggagacatgtgcgaaactagttatacatgagttcatctaatagacatttactgatgaagatgctcttgcatgaatataataatggtgaacagtatacaactttatacgtgattgtatattagaattacgcctcaaaaaactaataaaaatgcaactgctatccacagattccgctgcttttacagtgatctactcacatgagaaccttgaacgtagaagaattgtgtcaatgacctagaatcaaggcactttttaggactctcaaaagatgtgccggtctataaattatcgtttatacagtagactcaatattaagaggcttgtttcagatgggag

SEQ ID NO: 57834 - DNA, 183 bp, Glycine max
  Clone ID: PAT_MRT3847_23236C.1
tctcgagccgattcggctcgaggtgaaagtttcttcaactttttcactcctcccgaggtccatgaggatgatgatgatattgctgaggatgctgttgaagaactccagaatttgatggaacgtgaattatgacatgtggtatctacaatccgggacaaaattattcctcatgctttcatggtc

SEQ ID NO: 57835 - DNA, 431 bp, Glycine max
  Clone ID: PAT_MRT3847_23237C.1
tttttggggtttttttgatatactcaggcaaacacactaagatgacatatgattgcccagaatgggtggagacacaggacgttgtagcttgacggataaagggacaggggagttgcttagtatattacttacaaacagatgccatcattttcttaaaggaggtgagacacatacgggttttgcagatccaaaatgaagtttcagaattcaagagacatatattcgatccttattaggggattaggatgtgttgggtggagacgacaggcaaatgggatatgggaagtgggatgttttacgctctgatcaaacccaatgtccactgttattgcacgtggcatatgaaaaggtggctgacagaggagagtaagcttcctgaactggtactgcaagatcatgtggactgtcatgagcattctgattgcatgcat

SEQ ID NO: 57836 - DNA, 467 bp, Glycine max
  Clone ID: PAT_MRT3847_23238C.1
ggctttgcctggatttgaatccatcccagactccaccaacactaacctatacaaccttggggaagttattgaacctccaagggccccagattatagaagcgtaaaacatacttttggtcttcgtgaccaacacaccctaatgtgacacccctccccctctcccccccagtgattcacatccttgtatgagcccttctccttgagtgaattggaatttggaacttgcttctaacttacaagatatggcaaagatgatgggatgtcactccctgtgattataaaagattgtgaaatgcaggtggcccctaggatgcgaggattgtctctgcttaacagtcagtaaaaggccaagtctctcagtcttgaacccgccagagaagcaattttcaacaaccccactgagccttcccaatcaaacctccagatagaaacacagcctgctgacaccttgattgcagccttgtgag

SEQ ID NO: 57837 - DNA, 397 bp, Glycine max
  Clone ID: PAT_MRT3847_23239C.1
tttcacgctgggtgtttttaatactatctcttctcttttctcaagtctcacacgcggagcacaaaaacaacaaaagtaactagtgagtatcatcgtgtctcgattctgaaaccaaaacacattacaatgcaacaacattctcagaccctcttcgccaccttcaccataatcttctttgccttcttcttcccttcaacattctccttcactctcacccaagccaaagaaaggaacaagaacaagaccaacaaaagtacgtgaaagagaaagagatggaggaaattgttccagtggtggatttccagaggctttcataggaagaggagcgcaagaagctgagaaaaacatgtgagaaaccaaggtgtttcagaatcatcaaccactcaatttcactaac

SEQ ID NO: 57838 - DNA, 335 bp, Glycine max
  Clone ID: PAT_MRT3847_2323C.1
ggttagttttcaaatcgagggtttcaaaacattctatggacccgaagaggcccccaattgaaatacgtgcttttattggatttactatctgaaccccctaaaggcgtgctttaatcatttttttatttaatcaaaaaatgaaataaatttccaccgatcatttgaatagtaaaatacggttgtttttgttaaaatgaaataccgccgttcggtcacgccgaaactacattggaagccaaaaaaaagggtaaaataatgatatgttaattaaaaatattttttaattaaaaaaatcaaaaataatgaaacgaacacttttctttgggaagtctctt

SEQ ID NO: 57839 - DNA, 261 bp, Glycine max
  Clone ID: PAT_MRT3847_23240C.1
ggggaggaagcacagaccacaggggcatatcccaaatttgtttacacagtggctcacataacatacattgactaactgagggtttggtacttaagttcaacttagttaaaattgtttgtgtctggaattggagtttggaagtggctctcattgctgcaatttccaattgtgcagttgccactgatgcagctggagttgcaggaaatgtctctgcctttgggttgtctgtgtcgcccatacccacatttaggacgattatca

SEQ ID NO: 57840 - DNA, 398 bp, Glycine max
  Clone ID: PAT_MRT3847_23241C.1
acggctgcgagaagacgacagaaggggttcttatcaaggatcaaattgaataaagagtttaacataaggggccaaagagtaattttacctagttttttttggcaaaaagattactatatgtcacaaataaggatgctaaaattcattgatgtataaatctaaatcttcataaccaattttgttaggaaatcatagtagagataaatgggtagtattaaatgttatactatccaataaaaaaagttctacttttggatgttcacaaaaaaaaaaaaaattaggaaaatggttagcaaaaccatttttctaataatcctcagaattgctaagtagaaaaccttaattgcttttgatattgttcttaaatcaaaattaagtttcatgaaaggaagatggaa

SEQ ID NO: 57841 - DNA, 401 bp, Glycine max
  Clone ID: PAT_MRT3847_23242C.1
acacccttccggttgaacaggctttggaataataatatttttttaccttttaagccggggttccaagagaagggttgggacaaagataactccaatctcaattgggtttttaaggaaaagcctcttttttggttagggcagttgttattccccttgtaaggcagggatcagccagcctttgggggttggcttaaaagcaaagtttttcttactgggatggcagctttccggtggactatggatttgaccttttggaactttcggaccctgaaggaccaggggggttcatggacccgaatgggttagcttagggggggatattcaatggccgttatccaaggttggtggcagttggggcaatagcacttgaatttttagccagggttggtttgttccttaag

SEQ ID NO: 57842 - DNA, 217 bp, Glycine max
  Clone ID: PAT_MRT3847_23243C.1
atgatactgtgtgactactgtgctcaagttagtctcaggaggggtaacaataacagcagacattttaagcggggattgaacgcactttaatgactgcgatgtgcacctgctcagacctctgaccaaccaccgcaacattctgctttttaaatcaaccataatatacagatattgtccttgcttcatagatccatatgtatcactcttacgattggga

SEQ ID NO: 57843 - DNA, 824 bp, Glycine max
  Clone ID: PAT_MRT3847_23244C.1
agcacttgtcaatgaggtctttgaaattttggtggatccaagattgggaaagaactacgatagaaatgaaatgtttcggatgattgaggctgctgcagcctgtgtacgccactcgtcggtgaagagaccacgcatgagtcaggtggtgagagctttggattccttagatgagtttacagatctcaataacggaatgaaaccggggcagagttcagtgtttgattctgcacagcaatctgcacaaatcagaatgtttaggaggatggcttttgggagccaagatagttccagtttcttcaatgagtctcagagtagctggaggagtagggatcacaactcaaatactatgttctcccaaaataaaactgggccttggaacgtttgagtgacatgactcactcactcaacacagacagacatctacctgccaattcatttcttgtggtgtaaatctcattttcctaacatgattttgcttgctattctttgtaaattaggctatttgttacataacgcaatgtatttatttcatgtataataccatgatcgatctgaattcaacactgcccttgtaatcacaatttatccttagttggtacttgcttatgtgcatgtggacacagcacatcatgttgaggttaactcctcttttacgtagggctatacacaaagttgccacttgccacccaagtctgtattttttcttctataagaaaaaaaaagaagtttatgcccaggaatcaagatctgcaatgtaatattctcttgaacgtaaaaaaaaaaaaaaaaaaaaaaaaaaaaagggcggccgttctagatcgcga

SEQ ID NO: 57844 - DNA, 389 bp, Glycine max
  Clone ID: PAT_MRT3847_23245C.1
gagtatactggaaaaaataacactatcaatatcaatattatgtaagttatactccaattttattccacattttcatgattgttttgttattaggaatatagaggtcatttaactaagcatttattgaataaatacttatcctacaagtatttataggttgtttctataatagaagagaaaacgagactaaatagttttcatataagttgcaagctattttttacgagttataatcatgagtttattattaaaaattaattgaaagcaatttatgaacctatcataacttatttttatgagttcgctcaaataattatataaatacttactttatgaaataaaattaaataaactgtaaataaattctttaaaaagcaccaatgatacca

SEQ ID NO: 57845 - DNA, 265 bp, Glycine max
  Clone ID: PAT_MRT3847_23246C.1
cccagctcccactcaggcctggactcaaccccagagtccctcgcacaagtacgaggttagacgccgtgtcctcgggcaggggtggaggtgagagagtatagctataagattatatgggaaacacatgtgaatacttaatggtggcattcactattggcaaagattgatgaacttcatagccatttccggtgtcatgcagtactagaatcgttccgtagtaaagtgggttttagacggtcgaaacgcagaacgagggcgagccctc

SEQ ID NO: 57846 - DNA, 2655 bp, Glycine max
  Clone ID: PAT_MRT3847_23247C.1
gatttgtgcagtgatggcttcagcaaacccttccccaaatgcttcccctgttgcagtgcctccagcacttggtgctattttatcaccacctccttcttcatcttctccaacaaacacttccaccccaccatcacctcccagttcttctcagcctaatcaaacacaaacacaaacacaaacacccaattcccctgctccttcatctccttctgacccttctgctccacctccttctcctcctcaggcagtgccattaacccctcctccttccatatcactgtctcctccaccatcatctacaccaccaccaactttgccccctccatcaccacctgattctccaccaccattgccacctgcatctccaaccccaccagttacaacatctcccccctcaccaccagttacaacatctcccccctcaccaccagctaccacatcccctcctccagctgaaactccaccttcccttccaaatttgtctccaccatctccaccagccggttcccctcctcctcaatcacctcccacaacaattccacctccctctcgaccgatttcgccatctcctcctcctccggccaattttccaaggccaccaaccactagaactcctccagagaaagaaaatccaccaaaaactactccttcacatgcatctcctccatcagtttctgaaactcctcctaaacctccttcctctgatgttccccctccatccacattgccttcaactcctccttcagacccttcaggatcttcacctccagcttctttgcctgatcccccaactaataaaacagtggtggggggtccgaaggtgtcgctaccctctcttccaactgagaaacccactgctagacctactaatgatggtactaacagtatgtcttcaaacaacacaccttcacattctggagggttgagcactggaggatctgtggctattggaattgtagttggttttattgtcctcagccttcttgttatggctgtgtggtttgcacagaagaaaaagaagaagggaacaggatcaagaggtagttatgctgctccttctccatttacctcatcccacaattcaggtaccttattcttgaggccgcagtctccggccaactttttaggtagtggctctggtagtgattttgtatattctccatcagagcctggtggtgtaagtagttcaagatcatggttcacatatgaagaacttattcaagctacaaatgggttttcagcacaaaatttgttgggagaaggtggatttggctgtgtttataaaggtttgctgatagatggaagagaagtagctgtgaaacagctcaaaattggtggtgggcaaggggaacgcgaattcagggcagaagttgagattattagccgtgtacatcatcgtcatctggtttctttagttggttactgtatatccgagcatcagagattgcttgtatatgactatgttcccaacgatactcttcattaccatctccacggtgaaaatagaccagttctagattggcctaccagagtcaaggttgctgctggtgcagctcgtggaatagcttacttgcatgaagactgtcatccacgcattattcatcgagatattaagtcatcaaacatcctacttgatctcaactatgaagctcaagtttcggactttgggcttgcaaaattggcattagattcaaatacacatgtaactacacgtgtaatgggaacctttgggtacatggcaccagaatatgcgacaagtggaaaacttactgaaaagtctgatgtatattcttttggggttgtgcttttggagctaattacaggtcggaagcctgtagatgcatctcaaccaattggtgatgagagcctggttgaatgggctcgacctctgttgacggaagcacttgacaatgaggactttgaaattttggtggatccaagactggggaagaactacgatagaaatgaaatgtttcggatgatcgaggctgccgcagcctgtgtacgccactcatcggtgaagagaccacgcatgagtcaggtggtgagagctttagattccttggatgagtttacggatctcaataacggaatgaaaccgggacagagttcggtgtttgattcggcgcagcaatctgcacaaatcagaatgtttaggaggatggcttttgggagccaagatagttccggtttcttcaatgagtctcagagtagctggaggagtagagatcacgacccaacaactgtcttctcccaaaataaaactgggcatgggaacgtttgagtgacatgactcactcactctttctttaagggattgcatgcacacagcacccacctgtcaatgcatttcctgtggtgtaaatctcatttttactatttttgttctcattttcctaacatgattttgcttgctatggccctttgtattctttgtaaattaggctatttgttacataacgcaatgtatttatttattcatgtataataccatgatcgatctgaattcaacactgcccttaaaatcacaatttatgcttatatattgtttttgtttgtagggaaagagagtaaaaaagagagaaatgaacaatgaaataacaagagtttcacacttttacatccaattttaattcaaaatttgtatttcaattc

SEQ ID NO: 57847 - DNA, 499 bp, Glycine max
  Clone ID: PAT_MRT3847_23248C.1
acgagcctttcttagtctgcggggttttctctttctagagaatccaagcctaccattgaagtggaattctgtgaggctaagtaaaatggggtaccagccattggaaaagggaaaaccaaaacataagaaggggttatggtcacctgaagaagacaacaaactcagaaaccacatccttaaacatggtcatggctgttggagttctgtccccattaaggcaggcttgcaaaggaatggaaagagctgtagattaaggtggattaactatctaaggccaggattaaagagagggaaattcagcaaacaggaagaggagacaatcctcacccttcaccacatgctaggcaacaagtgggcccggatgtctcagcctttgcccgcttggtcagtcttcgagagtttcaccttttggcgctcgttgttgcggaagagggtggccttggctttggcagtcgaatctcttgaccaagtcttgtctgctagctcaagctcagatact

SEQ ID NO: 57848 - DNA, 193 bp, Glycine max
  Clone ID: PAT_MRT3847_23249C.1
tgagatgaggtggagtggtgtcggaatcgactagtggtggaggaatgaacagttttttgtcttttgttgtttctcgtcacatctttttgctgttttccaaggcttgctcaaagtgcttgcttgaattgacaccaactttacttttaatcttttagtcttttatgaagacgtagtctttgtttttcttttcatg

SEQ ID NO: 57849 - DNA, 271 bp, Glycine max
  Clone ID: PAT_MRT3847_2324C.1
agcgtggctccttctctgggaaggactaccaggaccctccaccagcaccactcattgatgctgaggagctcacaaagtggtccttttacagggcccttattgctgagttcattgccactttggtcttcctctaaaataatggtgtcacaagtattagggaacagccacaaacgggtccttgtgatgcgttttgttggggttggcatccttggcattgcatgggcctttggtggcatgatcttcatcctggtctactgcactgctgggattt

SEQ ID NO: 57850 - DNA, 393 bp, Glycine max
  Clone ID: PAT_MRT3847_23250C.1
cacactcttgcagatagtactcacccaaagtaaaccctgctattgccagcccgctatctaggggtttattgcacccatttccaacattatcccaataagtgctgaaagaaattggagattatcgcttcagtcaactataccaagaactattattagaccaatctggtggagccaattccactgtactacacatgaaaccaagctttgcggacaagcctattctacttctgctgtctctgatagtcttcactaaagaaacttttctctctccgaagaattcacaggaaaaacaacattgccggaacgctatgccttcgactactccctgcgatacccagtgatgtactaggatgcacgaattaatttaaagtgccccaacaatttggcgctcaa

SEQ ID NO: 57851 - DNA, 279 bp, Glycine max
  Clone ID: PAT_MRT3847_23251C.1
aaagacaacatccgcactcgtataatggggctctgaatgtaaccatccaaataaatgtaatgtttacccactacaagctccaatgataaacgaaaaataaatgtattaaatgctgcaatctcaagaactcaatctcctccacaaattctgcctagtatacctaaacacggtgtgcccaacccaataattggcctccttggaccttgtccaaacacatggtggtgtctaattcacacttatagttggctgcactgccagggccctgggaagatgcattca

SEQ ID NO: 57852 - DNA, 610 bp, Glycine max
  Clone ID: PAT_MRT3847_23252C.1
ggctcgagggctcgagctttttttttctttccctctcacaacaccacttcacaccaaaactcaacttaaagcttcggtttatttccatctctaaaaacgtatctttccatttttttgacatgttcatactttccctggtcctcgaccaccaccctctttagccgttcaaaaataatcgtagaagaagaagaagaagcataagaaagagaagatctttgatgacccactttgctaaaaaagagaagatgatgatgatgctggccacaactggcacaccttgctgctcctaggaactttgtaacacaccacaccacactacactacactgcactgcacttatcccgtgtccgaatcctcatgtgaatcacgaacacccgggattttcgggtacctcaaactccttcactcaattttctcatcaccatgccctcgagtcattacaccaccaccaacaacaacctcaacaacaagactaggaaacgaggttgttcctcatcttcctcttcctctttggtcagaagataccgtttcaagagagccattttggttgggaagaaagaaggtcaagttctccagttcccatgtgaaagactaacacaagttcttcttc

SEQ ID NO: 57853 - DNA, 510 bp, Glycine max
  Clone ID: PAT_MRT3847_23253C.1
ctggcacgcggcgagttgcggtgcatcggtgcgacgacgctagacgagtatcgcgagcacgtggagaaggacaaggcctttgagcgtcggttccaacaggtgttggtgaacgagccgtccgtcccggacacggtgagcattctgcggggtgtgaaagagcgatatgaggcgcatcacggagtgcagatcatggattcggcgctagtcgctgctgccaagcttgcagaccgctacatcaaggggaggttcatgcccgacaaggccattgatatcattgatgaagcgtgtgcaaacgtccgcgttcagctggacagtcaacctgaagccatcgatgaattagagcgccgacagctgcagttgcaggtggaggctacagctcttgcgaaggagaaggatgaattgagcaagcagcgtctgcaaaaagtgcaagaggagctgaacaagattcaagacgagctgagtccgttggtcctacgccatgaggcggagaaagctcgtgtgaacgagatc

SEQ ID NO: 57854 - DNA, 628 bp, Glycine max
  unsure (1)..(628): unsure at all n locations
  Clone ID: PAT_MRT3847_23254C.1
gcttgantcctcanaagcggccgcccttttttttttttttttttttttttttttttttttttttttttaagataagtctcatacaaagaaaatgaatgcagacagtaacactccttcatttccatcatgtatacaaatgatatctcctacattttactcaaattacataaaaactcttttgatttgcttgaaaccactttctgtgacacccacacccatatcgatgtcatatttagttttaaaagttgaaactgagaattacccttgattacataattacacatatgccctctctgggtttttatacatattacaaatttaacaccatgattttcaaacattaggcacaataaccctttattgtttcagatttggattactaagtgatagatccacaagtccccaaattgaattggaatattgataactcagttgcaacactaatgaaaattaaaaacacaattaaaaaaactcacctttgtacttcaaattctccttagctcttcttccttccctttttctgtgggctctcatatgactagtatcttgttgggtctcttccctgattcttgttgcccaattgcaccctatcttctcggtccaatgggcaatttatgcggacgcgtgg

SEQ ID NO: 57855 - DNA, 448 bp, Glycine max
  Clone ID: PAT_MRT3847_23255C.1
aattcggctcgaggatgacgagaatgccacgcaaattagaagtgaaaacgaggcgaaggctgcagctaagaaaatatttcaaaatgttgctagacgcgggtgcaggtatatatacccggatgacttgatgcgctttatgcgagaagatgaagctgcaaaaaccatgaatctctttgaaggagcgtctgaagctgagagaatcagcaaatcggccttgaagaactgggtgtgtatttaacaaagctcagctggaaggggttgtagaagccaattcagttcttagaacctgtctatgtcagttgtgcagatggtcaatgccttcagggaaaggagagcacttgctttgacattgaatgacaccaaaacggcagtgaacaaacttcatcgaatgctcaattttatagttgcaattgttatactgcttatatggctcttgatattggaactt

SEQ ID NO: 57856 - DNA, 107 bp, Glycine max
  Clone ID: PAT_MRT3847_23256C.1
gtagcaacaagcggacacatacacacagtgacagtgaagtcgctgcaaatttcctaaggcagcgaaagcgaccccaattaatggctcttcctcggaaccctactttc

SEQ ID NO: 57857 - DNA, 1475 bp, Glycine max
  Clone ID: PAT_MRT3847_23257C.1
aacttcgcgtccgcatctatcctcctcctaaaaattggtcaaaatctatccaatctctttgcatattccttcttatcatcatcttcttcttcttctctgttgcctctagaattgaaaagttcttcttcctgcccatagtctttgacacccttttccaacctctagattttttcttccctctataattatctccttcacagaaaccttcttatcccacatatcatcaattaccttgttcctctcaaagtttgattctttttctcttgaattggattgttataatttttgttcatacttacatgttatgcagttatgaatgattgagagacaacacaaatgtcttctccagtgatctccgagatcctcctctctggcttcaccataaactcttccctaagacgcaggacacacttggtgcaatctttctctgttgttttcctccactggttctacgttttctcatgaactaaataaattaacctcgtacatagtataaacatagtacgtaccgtgttcttttttcaataccatagcttattcaagtcattaaacctagctagcaaattagggttattatttctcacaaaactctggttctaatagcaaactagtgcatggcttctcctggtagaagtggaacctattcatctgggtaaaaggtctcttcaaaactctggttctgaaggagacagagacatcatggaacagaggaagaggaagagaatgctatccaatagggaatcggcacgtagatcgaggatgaggaaacagcagcacctggaaggtctcagtgcccaattggatcagctaaaaaaggagaacacccaaatgaacacaaacataggcatcagcacgcagctgtacctcaacgtggaagctgagaacgcgattctgagggctcaaatggaagaactgagcaagagattgaactctctgaacgaaatgataagtttgattaactccaccaccaccaccaacaactgcttgatgttcgatgaggcacaggagactacgactcagttgttcaatgattgtggcttcatggatgcttggaattacggaataccactcaatcaacaaatcatggcttacgctgacaatgacatgttgatgatgtattgattggtgaaattaattttgagttggagtttttgtgaatcctggtgctaatcctttgtaacacaactacaacacgtgtttgttgtctcttgttttaatttgtttttttgtttttgtttttcttgtaataagtaatgtctattgttttcagtttatgttatgtttagggttgtctttgtgtattttaagaggggttattttttcttctcgaaaatgtaaaaaatcgagcttttattttccatgtagtagtatatgtgattttcgtgaatttccactcatatcaattaaatctccagcttatgcatagtataatattccatatttgttatgatatttaaaaacggacgcgtgggcgt

SEQ ID NO: 57858 - DNA, 1389 bp, Glycine max
  Clone ID: PAT_MRT3847_23258C.1
agccttccgccgcgtccttcctcctcctcctcctaaaaattggtcaaaatctatcctatctctttgcatattctttcttatcatcatcttcttctctcttgcctccagaattgaaaagttcttcctctgcccatagtctttgacacccttttccaatctctagtttttttattttcttccctctataattatctccttcacaaaccttctatccctcataacatcaattaccacaaacccaagccttgtacctctcaaagtttgattcttttctcttgcccaaagcgatttggattgctataatttttgttcgtactacatgttatgcagtcatgaatgattgagagacaacacaaatgtcttccccagtgatcagcgagatcctcctctctggcttcaccataaactcttccctaagacgcaggacacacttggtgcaatctttctcagttgttttcctccactggttctacgttttctcatgaactaaattaactgacctcgtacataggagtataaacatagtactcgtgttcttttttcaatactacatcacattcaaatcattaaatctagctagcaaattagagttattatttattatcattgcacaaattaaatagcatactagtacatggcttctcctggtggaagtgggacctattcatctggttcaagttctcttcaaaactctggttctgagggagacagagacatcatggaacagaggaagaggaagagaatgctatccaatagggaatcggcacgtagatcgaggatgaggaaacagcagcacctggaaggtctcagtgcccaattggatcagctaaaaaaggagaacacccaaatgaacacaaacataggcatcagcacgcagctgtacctcaacgtggaagctgagaacgcgattctgagggctcaaatgggggaactgagcaagagattgaactctctgaacgaaatgataagtttcattaactcccccaccacaacaactgcttgatgatgttcgatgaggcacaggagactaccactcagttgttcaatgattgtggcttcatggattatgcttggaatggaataccaatcatggcttccgctgacaatgaaatgttgatcatgtattgatcttgagttgtagcccaacacccacgtcttctcttgttttaattttttttttttttttattgtaatagtgatgtctattgttttcagtttatgttatgtttagggttgtcttgtcttgtgcgtatttcaagagggggattcttttttcttctcgaaaatgtaaaatatcgaccttttattttccaggtagtgattttcgttcctttccccttttttaaaaaaaaaaaaaaaaaaaaaaaaaaaaaaaaaaaaaaaaaagaa

SEQ ID NO: 57859 - DNA, 607 bp, Glycine max
  Clone ID: PAT_MRT3847_23259C.1
gctgatatttgtctagaccctcaccggcgatagcatcgctcttggggtggaaagctgtgacaccatcgacgaggttaaggtcatgatcctggacaaggaaggattccctccggaccagctacgtctcattttatgcggatagcatctggaggacggacggacccttgctgactacaacattcagaaggatagtactctccacctcgagctccaggtccgtgatggcatgcagatctaccttaatacactcgccggatggaccatgaccctagaggttgaaagcttcgactccgtcgatagctgtgaggccaggatccatgacagggacggtatccgaccggaccaacaacgtgtgatcttctccggaaagcatctcgaggacggccgtaccctcgccgactacatcatccagaaggagtcaacccttcacctcgtgctccgtctacgtggtggcatgcatatcttcgtgaagaccctcagccgcaagactattaccctataagtcgaaagctccgacaccatcgacaacgtcatggctaagattcatgacatggagggaatcctctcagaccatgaggagctgatcttcgcctggaagcagctcgag

SEQ ID NO: 57860 - DNA, 252 bp, Glycine max
  Clone ID: PAT_MRT3847_2325C.1
cggaaaaaacacttccctcggcaccgtttccgcggaaccggtccaagtttcagtcctaaagccgcatttggacacacgaaccccaacacgaatttttcccatcgcaattctccccctttcagaagcttccaaacacgccgttagctttaaaaaggaaaaaaaggaatatagcacgttggagcatcatgtcttgttcgttacagtccctcgcttcacgtattaagaagagcccaaagcgaattcgaacttaga

SEQ ID NO: 57861 - DNA, 562 bp, Glycine max
  Clone ID: PAT_MRT3847_23260C.1
ccacgcgtccgatcaaactctcttataatcacaaccctatttttgctttttaaccctttttctttttcattctttggctatcatgtgcttacaagctttacaaaactgggatttacactcattgcaaacgagctcaaggatgtgacgaaggaccctgctacttactgcagcgcaagagccgtggcagcggacatgtctcacatgacaggcaacactcacgtgaccttgtgagagcacatataccgttggtgtatacatagctgcaagacattctcctactgatgatacactgaaacacacaaaggatgcattgaggcactaaagattgacacccaaacatgaaccgatgtgcaagtatatggcttgacattctagaccaacaatgatacccaatgctaactcatctgtaacgtccatcttgtccatttgctgactgacaaccgatccgaaccctgatgacacaatggtgcctgaaatagcacacatgtgcaagactgacagggctaattataaagccacatgatgtagctggacacaaaattatgccatgggatgattacgc

SEQ ID NO: 57862 - DNA, 255 bp, Glycine max
  Clone ID: PAT_MRT3847_23261C.1
aattaatgtactttaatttttcattttcttttaggatatttagaccacccttgttccacgcaaaccagggtgggtcagtgtttgtgtgtgtgttaaaatgataactaacatgtgaataaaatactccatttgaaactcttcggttatttgatatggctttgaataatgtttaaatgtcattgtgtaatgctattcaattagctttattactttctcaaatagttgaatatgttctatcacttaaaaacttaaaaa

SEQ ID NO: 57863 - DNA, 418 bp, Glycine max
  Clone ID: PAT_MRT3847_23262C.1
ggcaggaagaaaagtttattaagtacctaaggaacatggctaaaactaccttccacaagctacaacaaatacaaaacacgaaatgatgatatttactaaaagttataattttaagctaacgatgaaacttcgccactttaataagcaaagaaagtttaaaagtccatctgcatatccaaatggagcaccgtctaattcattccctataggtgattcgacattactgcattggctccattgatttggcaaaccaagatttattacagaactattgcttagctctcattctattactgggaaggcaactgaatctgaaaaaaaaatgacaaagatgtgcaagctctcagatgcagcaaaatacacttcaacaagtcacttgcataatcatacatcttaaatgaacaaacgaaatgcaaca

SEQ ID NO: 57864 - DNA, 313 bp, Glycine max
  Clone ID: PAT_MRT3847_23263C.1
gactacctcaacatgcctaggccctgcgttggatctatgccgaaattaatcaaacgcatcgtgtctcaagcacatcgccattgctttcattatcctctactgcatggccgatatctccttacctctcatgctataactccgtcactccctccgaaccgaccgcaccctgttcgacactgccaatgacttatacgtctgcttcattcttgccaccggatgctctcacatgctcttctacgcctccaatgcacttattcacccgtacctaccagcgatcccgtggtccaagtttcccttcaccggcgacttcaca

SEQ ID NO: 57865 - DNA, 334 bp, Glycine max
  Clone ID: PAT_MRT3847_23264C.1
gtctatctgttttttttttttattttttttgtgggcattattgccaccatagcctgtaaagtgaagcattatgattcatgaaaccgaaaagtaccaacaacagtactcaactgagcagtgattatgttgtattttccattaaagtgtgataaacgcacgataaacgcgtgtacattcaacacatacgaccataaggcttatgcacatggcacatagtctgacttgaacggcgactcatttcgacatatattcttaatacactgtcgacttaccgaatttgattaaaattacaagagccttgtcactgtcgaaccagccattcttgtgaacctgt

SEQ ID NO: 57866 - DNA, 402 bp, Glycine max
  Clone ID: PAT_MRT3847_23265C.1
acacggtccttttccacgttttttttttaaaatgggtattttccccttttaccttttggtttccccttataaaaggttcctttcttaaatatcttgcggggagttggccctatttggggaggttttcttaaaaataattaaaaagtgtctttgggcgaaaacgggccttgttaaaaataggaacggttgggacctttttattggccatttatttttaaagtcgaaaagtggccttacatgtccaccaacaaacctggtagcagtatggggctggaaaataaattcttttttttccctaaaatacttattttaaattttttggactaaggtcacctgggaaagtacggccaggggggggctaaatggaggggtgccctttaacctttgggggcgggcgaattc

SEQ ID NO: 57867 - DNA, 205 bp, Glycine max
  Clone ID: PAT_MRT3847_23266C.1
ctatggactttttactagctgagcttcacaaggcttgaatacatactagctcacatcacctgttttacaacaagtctgcctatcaatcaatagacgcatacttcagaattattggctatcgagatgatgttggtcagatggatagtatggtacaatagacatggtggttagcatcagacctgatgatgaatatagcacttgtaca

SEQ ID NO: 57868 - DNA, 169 bp, Glycine max
  Clone ID: PAT_MRT3847_23267C.1
gcgtacgtaagcactcagctcgaggtcatcactggatttggcatcgactctctttgacgtctcttgctacatgatgtacctctgattgaagttccttcccgcttattcctggctgggctctacaattcgtccataccggctcatggtcactcggtttctaacgggagac

SEQ ID NO: 57869 - DNA, 412 bp, Glycine max
  unsure (1)..(412): unsure at all n locations
  Clone ID: PAT_MRT3847_23268C.1
ggcgagttctgggtggcaatccactgccgccgaggtctgtacgcccggcttatgagccgccatgtcaagctgaggaagtttttgctcagcctcccgatccccgccaagtaccactacctgatgcagatcggtggcaggctccacgcgctcatcatcaagtacagcccagagggccaggtgcttgacatcttggaggacaccaagggcgaggtggtgagagccgtcagcgaagtggaggagaaggacgggaagctctggatagggtccgtcctgatgccgttcatcgctgtctttgacctcgcgaaggcgtcttagccgcctcaagtttgattggaaacattgttgctttaagacatgaagtccatggntaccgctgcacgcttctctgagaggatcagtgatcccaataatg

SEQ ID NO: 57870 - DNA, 340 bp, Glycine max
  unsure (1)..(340): unsure at all n locations
  Clone ID: PAT_MRT3847_23269C.1
aagcnagatccttttagggccgcccttttttttttctccctttttgttcttacccacgcccacaagggtaaatatgaggcgctgtttacttcaggaaagattttttctcgggcccaaggtgcaacatgtaaatttcatacctttacccttttgggtttacatattttaataaaaaccatggtctggcccctataaacccatgcagaaaacaaaaagcagcttgagacacaagtatttacttcacattgatacaatccaatcacaatgacttagctccaaccaagtgaagtctgacccccagatggtcacaccgtgtccatcgagtcctgtcagaaaacca

SEQ ID NO: 57871 - DNA, 383 bp, Glycine max
  Clone ID: PAT_MRT3847_2326C.1
gggtttggttttttttttttttttttttttttttttttttttttttttggaaaacaataaacaccaaataaatcctaaaatttttattacaaatatatctggcattctaattataaagcagacccaaagatgtaaacttggaacattactaattttttaaggctacactataaggacttatttttatatacaaaaaaataaatctgcaagcttaagctctgctatagggaaaaattctttcaatatctaaaatctttcaatcccatttcttttaaattttctttcaattcacaattctttgcacccaaatctctaacggagtattcatttttcccttgggaggtgaaaacatgtggaactgacagggtttacatggaccaaac

SEQ ID NO: 57872 - DNA, 288 bp, Glycine max
  Clone ID: PAT_MRT3847_23270C.1
aaaagttaaaggctaatcccttaatatattgaaagaataatccaatcaaatgaaggattaaactaaatttataattatatatttaaaaaataaaattatccgctaattatagtaaccggatgagactaaagatattttgtttgttcttaatggtgactcaaccttggttaaacaaacccgaagccccctttcatggcaccaggcaccactttatatatttattggtaatgaccgaaacaaacggaaccacctaacgatgaccccaaacgttcaaatccctccctggga

SEQ ID NO: 57873 - DNA, 371 bp, Glycine max
  Clone ID: PAT_MRT3847_23271C.1
ggggggggccctgattatatatttatatgccggggtggggaaacaatttattccccaattttctatcccccatttgttaacccggcccacttatttttttgccccccaaggaaatggcccttcaaattcgaaaaaccaaaaaacaatccctggaaaaggggggggtccttaaacttttatttttgaaaccaattaaacgggttcaaattcaacaaagcaggggccttacataattagagggccctctaaaactttatttgcccatattcattggccctaaaattggaaaaatcaaaggccccattgaccccccccccttcattgggtttggctaacaagttgcccccccttacaatgtaattttgttctgg

SEQ ID NO: 57874 - DNA, 347 bp, Glycine max
  Clone ID: PAT_MRT3847_23272C.1
tttttcactctttcatacttcttttatattacgactattggggacacattttattccctttaccaaaataactattaacatttaattaaaatcaacatccatcattttcttctattctacaattttattatcatcacaattccattcattaccatattattcctctccaaattaacactatctattctcccctactcataaataaatcccaattaatctttctattaacacaacacattttttctttaaaacattccttaaatttcttttatacaacaaaatattacatacattgctaacattatatatcatactccaaaactattaaccaacaatttttactttta

SEQ ID NO: 57875 - DNA, 720 bp, Glycine max
  Clone ID: PAT_MRT3847_23273C.1
ccacgcgtccgtgttgtacgtttaaaccttggcgtttccttttgcacctctaagaaaaactaatttggggggtagttttaatttgctacccctcccctacgtggccaaacggaatgcatgcatgagaatgtgttttcctaaaagagtttctacacatgtttctatttttctaatctagtgcgtgtttggaaacagatcacgggtgtgattttttcatgtcaaagtgaactttactagttccttttgcgttttttcacatcacaaacgtgatttttacgtgtaaaacgtagtgtttccaaacacgccattagttctcttggtgaagttaagcaattggtgaacttttctggaattttctgaaggctgggaagaagcaggagaacatttgggctcaagtctatcttaacgtgcaacccagggagagcatttgaattgacactgggggtgatgaaatacgtgtctgaacattgggaccaccttctctgaagtcattttgatcttaaatgcgttttttggtggcttcttgaggagattaaaggactcaggtgaaagagtaacgtatctatttgtgttgctaataagcactgaaaggtgggtgtgttttttttcaaaggtaagcagatccttgagagagagaaaggttccttgcttagaaaaccggggtgcttaatttatgtttgagggtttgtgcttgaaaatggagaaaagagggaatgtgtt

SEQ ID NO: 57876 - DNA, 673 bp, Glycine max
  Clone ID: PAT_MRT3847_23274C.1
tctgtgtctaacgttccatctcttcacgactctctcgctcgtcccttccaacgttaaccctttctttttctctttcttcattcttcacaccctttgtgccatcttctttgcctcctcattgtcgtaattcatctgaattctcctaaacttttatcttattccttttgtttggatgatcgatcaagggagagtataaaaaaagggagagcatttgaattgacactgggggtgatgaaatacgtgtctgaacattgagaccacttctctgaagtcattttgatcttaattgcgttttttggtggcttcttgaggagattaaaggactcaggtgaaagagtaacgtatctattgtgttggtggtggtgtttttttcaagggtaagcagatccaagacagagagaaaggttcctttcttagaaaaccggggtgcttaatttatgtttgagggtttgtgcttgaaaatggagaaaagagggaatgtgttgatggagaagtatgagtttgggaagctattaggtcaaggaaactttgcgaaggtttaccatgcaagggacgtcagaactggtgagagtgttgccgttaaggtgattgacaaggagaaaattctaaaaattggactagtggatcagacgaagcgagagatatcgattatgagactggttaaacatcccaa

SEQ ID NO: 57877 - DNA, 520 bp, Glycine max
  Clone ID: PAT_MRT3847_23275C.1
tttttgaatttcagtgaaagatgacgcggaattaactcaaactggactcatctttgtatctgacaacgtaggaataccaaagaaactcctttataacaactaagcttacttgctgtttcgagcagcattgtgggttttggtctgtgtctaacgttcgatctcttctcttcaaggctctcctcgtcccttcaaacgggagagcatttgaattgacactgggggtgatgaaatacgtgtctgaacattgggaccaccttctctgaagccattttgatcttaaatgcgttttttggtggcttcttgaggagattaaaggactcaggtgaaagagtaacgtatctattgtgttgctaataagcactgaaattgctggtggtgtgttttttttcaaaggtaagcagatccttgagagagaaaggttccttgcttagaaaaccggggtgcttaatttgtgcttgagggtttgtgcttgaaaatggagaaaagagggaatgtgttgaggtagaagatgagtttgggg

SEQ ID NO: 57878 - DNA, 136 bp, Glycine max
  Clone ID: PAT_MRT3847_23276C.1
ggaggattgtctctcttcagtgacacttgagttcataccatcaattttcttctgaaattcccttacttgttcaagttcccaaagacacttcattggagaataaaggagccaatgaagtgtctttttgtcaagcttt

SEQ ID NO: 57879 - DNA, 370 bp, Glycine max
  Clone ID: PAT_MRT3847_23277C.1
agggggagctccactacttgggatactctacctgatccacgcccagagaatcctcttcatctgtgccacacaaggtaaccaaatggatgccactatatatgacaacattgctgataaacccctcgatgatgtcactgacccaatctacccaagagttagcttcgaccctttgggccttgatgatgacccataaacttatgctgagctttaggtgaaggaactccagaactaactatcgctcatgttctctaagtatggctgctccgttcatggcatagtgcacggaacagtgccattggagaacctcgccgatcaccttgctgaaactgtctacaacatcatctgtagctataccaacaacttcggcccc

SEQ ID NO: 57880 - DNA, 323 bp, Glycine max
  Clone ID: PAT_MRT3847_23278C.1
tattatacaaaaaaaatccatcatagacactaatgggattagattcttggtgttcatagacaaactttggatttccgatctcaggtaagatcggttcatgatcatgggatccttgtttatcaaactccaagggctgcttcacaaaatgtacttctaatgaattgctccatagatcctatatctatctatatgaagaagaaatcatccgacggcggggattcttatttgtacaaaatggtacttccaaccttggaacgagtattgaagaaaataacgattcttctttacccttttgaagttgttcttgccggatcgggtcgcct

SEQ ID NO: 57881 - DNA, 108 bp, Glycine max
  Clone ID: PAT_MRT3847_23279C.1
aatcaacaatcttgggaacaactttctggaaacggttttccttacttagagatgctggtaatgcgggagttcctgttggcaatgttgcttcagcattcatatctgttg

SEQ ID NO: 57882 - DNA, 254 bp, Glycine max
  Clone ID: PAT_MRT3847_2327C.1
gttccaaagaaaaaatagctatcatcaactgttcatctcctacgtatatatggttttctgtaactctattagggtctttctgggaaagacattggagaatgtcaaggttcatattattggtaaaagatgaaggtggaaagggtttcaatattccagtggtgggttagagtagctgtgcagctcagcttaatcttgcttggtgccttttctgatagagtctcatcaattagaagcgtttcgacgtctcctccagt

SEQ ID NO: 57883 - DNA, 481 bp, Glycine max
  Clone ID: PAT_MRT3847_23280C.1
acggctgcgagaagacgacagaaggggacatagaaaatagatatacctacatacctacctaggttcctcgctctctcccttggcctcctcaagactcgtctaaagtgacacagaacgctatctgggtatattatttacaaatggagaagcagaagatgaagagagcgagagaaggagatgatgaaactcagaacgcaaagaaaagagatgcgtgtggcatgaaggacgtgaaaaaggaggagggttgttcttcggaggcacttggggtatttgatttcccttggctgaaagatggtgtcacgtctaaatcagaggactacttgttggattttgaagacaatttctcgtcattgctagaacaagaagactcttcctttcaagctgcaacttcaagtattcatttctcgtcagaagcaaagttggagaatcttgcatggcagccatttgaaagtgagtgttagagcttgaaactgatgatgtg

SEQ ID NO: 57884 - DNA, 387 bp, Glycine max
  Clone ID: PAT_MRT3847_23281C.1
gatgtacagaaaggaggatgagacgacgtatgaggataagaaaaactagacaagcttatggtaaaaatgaagacaacgaggactggatcagtgagagagaagttgatggtgaaactgaggacgatggggacatgatcagtgagaggaaaagaaacattagagaagttgatgctgatgttcaagatagggtcataaaatatgctctgttgcacaatgtccagaagttgaaaatgaatataaattcaacaacctatagacccaattttaagtccctccctttaatctttcgcagtcagtctttgacatctcttgagctttccaataagttgagcccttctaggttaaaacttccaaaatctctatgcttgcctgcattgaaaagcttgc

SEQ ID NO: 57885 - DNA, 673 bp, Glycine max
  unsure (1)..(673): unsure at all n locations
  Clone ID: PAT_MRT3847_23282C.1
gggaataagtgctctgaatgatttctggtgttggaacagacgatagttcacttgtagcacaacctggtacttcctaagaggtgataagaaaatgcaattgtaccatcatccatttgatttggactcccagaagggagtaaagttttggaagagaaaggcattgattatacatctcaccatgccacatcccatttactgtttnnnnnnnntnnttnnttnnnngtntttatttttgttgttttttttttttattttatatatttattnattttttttttttttttttttttgattattttttatttttttttttttttttttttttttttttttttttttttgttttatttgtttttatttttttatatttttttattttttttattttttttatttttttttatgttttttttttttttttttgtattttttttttttttttatttttttttttatttttttattttttttttttttttttttttttttttttattttatttttttnatttattttagttttttttttttttattttttattttttattttttttttttttttttttttttatattttttttttttttgttttttttattttttttttttttatttttttttttttttttttattttttttgtattttttatttttttttttttttttttttt

SEQ ID NO: 57886 - DNA, 164 bp, Glycine max
  Clone ID: PAT_MRT3847_23283C.1
atcttatttttgttttattttatgttgatgtgatttctccttttggtaggagattgcgcgaatcaagggcaaaattactagtttacatatggtgcgtggaaatgatgattattattataactttggtgtctctaattatgtttattggagtggaattttcatct

SEQ ID NO: 57887 - DNA, 235 bp, Glycine max
  Clone ID: PAT_MRT3847_23284C.1
gctatatgtagtctatcagtattacatcgcttggataaaatcaatgtggagacggctgtgcagtacagtacttgctgggcctgcgaaccccattgcccataggctctacgctacgcgaagggatagggaaaggatgtctcatatagcctaacccttgcagatcacaaaaggcggtctccggacccggacccatgaccaagaggtcaccatggcacaaagtcaccgctgcaccagg

SEQ ID NO: 57888 - DNA, 805 bp, Glycine max
  unsure (1)..(805): unsure at all n locations
  Clone ID: PAT_MRT3847_23285C.1
acaaaattaaactttattaaactcatgaaagtcccttctagcgtggaattcgcaacaacaaccatcagtcatctaccactatatattactcctcagctcttatatttagacgcacacaattatacagctctagagaatcaccagagaattatcatacccattaagatgaaaccgtacctacgtccagtattcctattattccttatccttctcgaccaatccatttcggcgagtgctggtaatttttttgattcattgaaaaaattatttggtccagcattagcaaagataccgagcaagaaagaagatttgaagaaggctgagaaagcgaaggagtggatcgagaaagtgaaggacggcgtagaacttggaatagaaaatgcccctccctcaccgccaaacgaaccaccgaagcaaatcaatattaaaggcctgtctgtcgtcaaggattacttatctgagtacggctacattgaatcctctaggccatttaacaattctttcgaccaggaaacaatgtcagccattaagacctaccagaaattttccaatcttaaagttaccggcgttccgaacaaacagcttattcagcaaatgttgtccctacgatgcggtgtccccgacgttaactttgactacaacttcaccgacgacaacacttcctatcccaaaaccggacaccggctggttcccaaacagaaacctcacataccggtttcttcccgaaaaccaaatcccagacaacatgactaaagtggtcagagattcctttggcgaggggggnccccaagcctcgggggacttt

SEQ ID NO: 57889 - DNA, 715 bp, Glycine max
  Clone ID: PAT_MRT3847_23286C.1
gaaaaccaaatcccagacaacatgactaggtgttcagagattcctttgcgaggtgggcccaagtttcggggtctttgagtctcacggagacaacctacgacaacgccgacatccaggtagggttgtacaacttcactgccttgagaattgaagtggaggtgtatggtggcagccttatatttttgcaaccggattctagtaagaaaggggtggtacttatggacggtaacatgggctggttacttccaagtgaaaacgccacactgtctaaagatgatggagttttggacttggagactgtggcgatgcaccagatagggcatctacttggacttgatcactctcacaaagaggactctgttatgtatccttacatattgtcctcacagcaacgaaaggtgcagctttccaattctgacaaggccaacattcaccttcagtttgctaagcatgactcggatttgacttctctgccaaactcgcatgactctgcaagccacggtgggcgtttggatgtgcttttagttaccactttctctcttggatttgcttacttactgctccttttgtattagtggctcctgtcccaccttgcttttggacttatgagctttttatatttctgattgttcaatgtttattgtatgtggctgtttcttataggcctttcaaccaccagtattaaataaaagatcattttgagctttttaatttt

SEQ ID NO: 57890 - DNA, 470 bp, Glycine max
  Clone ID: PAT_MRT3847_23287C.1
caagtgaaaacgcctcactgtctaaaaatgatagagttttggacttggaaactgtggcgatgcaccagatagggcatctacttggacttgatcactctcccaaaaaggactctgttatgtatccttacatattgtcatcacagtcacagcaacgaaaggtgcagctttccgattctgacaaggccaacattcaccttcagtttgctaactctgcaagccacggtgggtgcttggacgtgcttttagttactactttctctcttggatttgcttacttactgctccttttgtattagtcgctgctcctgtcccaccttgcttttggacttttatgagctttttatatttctgattgttcaatgtttattgtatgtgttccccaacccgtggtgacttttcggtttattcatgtgcctgtttcttataggcctttcgattttaatctaatggctcattttttttttctttta

SEQ ID NO: 57891 - DNA, 211 bp, Glycine max
  Clone ID: PAT_MRT3847_23288C.1
acgcccccaaagaataattctccttgaaaaggagaaaggatttccccaaccaactaggggagtcttcttttaacctatgggggaagcccattccgctctctctttcttctacctctgccctggcccgcaataatggatatttcttaggcgagtcctcgacaaaatctgctgctttgtacactttgactacctttactactactgcatgtaa

SEQ ID NO: 57892 - DNA, 691 bp, Glycine max
  unsure (1)..(691): unsure at all n locations
  Clone ID: PAT_MRT3847_23289C.1
tccggaattaccggctcgaccccggcgtaattcggaaccaagaaaattattatacccattaagatgaaaccgtacctacgtgcaatattcctattattccttatccttccttcggcgagatggggcgaggctaaaattgataggaagacgataacaatgttttggggcaaggttaaagatgcgacgataaaaaatttcccgagtcgtgatgagcggaagaaactgagggagtattacgagaaattcagggaattcatggatcgtgtagaacaaaagacgacccctcccccaccgccaatgtaccgtttacaaccaaagtcccctcccccaccgccaaacgcaccaccgaagcaaatcaatattaaaggcctgtccgtcgtcaaagattacttatctgactacggctacattgaatcctctgggccatttaacgattctttcgatcaggaaataatatcagccattaagacctaccagaatttttccaatcttaatgttaccggcgacctgaacaaacagcttattcagcaaatcttgtccatacgatgcggtgtccccgacgttaacttcgactacaacttcaccgacgacaacacttcctatcccanagccggacaccgctggttcccaaacagaaacctcaattacggtttttcttgcggtaaaccaaatcccagacaacatgacttaa

SEQ ID NO: 57893 - DNA, 250 bp, Glycine max
  Clone ID: PAT_MRT3847_2328C.1
attccgggtggaccacaccgtccgtccacctgttgagaacaaaacggggcaattttttttatgtttatctttccaaagagggtggtggatataaacatggggttccattgtttaaaattttatcttttaggttcaataacttgctttctaaggtagttttgtattaaaactttttaaaaatatataatataatggggggtctctcttttttatccaatttttttacctgttctttttatttttaattttt

SEQ ID NO: 57894 - DNA, 198 bp, Glycine max
  Clone ID: PAT_MRT3847_23290C.1
cacggtgtctgcttcctgtggttgttgatcgttgcgttttcgtccgttggtcttgctgttgctgtgccaggacagcgacagcaacatcgaatcttggcgctcccggggcggccacgtgtggcattctctcggttctccggttatgtcgctgtgaacgatcaacgtggccgggcgctcttctactggctcactgagtcc

SEQ ID NO: 57895 - DNA, 2450 bp, Glycine max
  Clone ID: PAT_MRT3847_23291C.1
ccacgcgtccggagaatcacatcgaccagtttagagaattatcatacccattatcatgaagataaagatgaatccacaattacatctaatcttccttatgttccatcatcccattagtaattatccttcccttcaagatgaaaccgtacctacgtccaatattcctattaatttacattatacacttctcgaccaaatctcattacgaaagagtgcatgctaataaatattaatggtacttgaaaaacaaaattagagaagttctaaacaagtcacccgaatcatcaagcttccggcaagataaactgaaagaatggtgaagagcaccactgaaggcaactggattatctgcttggcgaatgtaaggacaggcctgcctcaagaatttcaagaattttgcccgaaatttaagaacgattatcaacaaaattgccccgaatgccgcgtatgaagcacgtttgcccgttactgaagcaagcgattcaaatatgttgcccagaaaacacgcataactctgacaaggccaccggtgggcgtttggatgtgcttttagttaccactttctctcttggatttgcttacgtattgactccttttgtattaggtggctcctgtcccaccttgctttctggacttgagctttttatatttctgattgttcaatgtctgttgtgtgtgctctccaacctgtggtgacttttccggtttattcctgtggctgtttgttgcctgccttacgtaggtccagtcttaaagcaaatttcatctcatgaagacaatgaaagacaacgccgacatctaggtagggttcccaaacctcagtgactttgaatttgaagtggagatgtttcgtggcagccttatattatggcaaggggattctagtaagaaaggggaggaactaagggaaggtagccagcgctggttacttccaagcgaattcgcgaaactgaggagtgatgcttatggatggcaacatgagattgttgctacccaagtgatagtcgccacacctggctaaagatgatggagttttggacttggagactgcggcgatgcaccagatagggcatctaacttggacttgatcactctcactaaagaggactctgttatgtatcctttacatattgtcatcacagtcagatcaacgaaaggtgcagctttccaattctgacaaggccaacattcaccttcagtttgctaagcatgattaggatgtgacttctctgctgccaaactcgcatgactcagcaagccacggtgggggttttggggatgtgcttttagttaccactttctctcttggatttgcttacgtattgctccttttgtattagtcgttcctgtcccaccttgcttttggaattatgagctttttatatttctgattgttcaatgtttattgtatgtgctccccaacctgtggtgacttttcggtttattctcacgtggctgtttcttataggcctttcgacctccaatattaaataaaagatcattttgagctttctggctgtttcttataggcctttcgacctccaatattaaataaaagatcattttgagctttctaaaattaaaaaaaaaaaaaaaaaaaaaaaaaaaaaaaaaaaataaattaaaaataaaaaaaaaaaataaaaatataaaaagtaataagaggtctttagttatatgcttaggaggatctttaggggggggtcttggataaatcttcaataaaagtattataaagatctttaaggtagaggatgaattattgtagaaacattcggaagacctttgcataagctttaaaaaaaccaaagaatttcttaaaaaaaatccacaggccaactcctggggtccgttgcggcgagcgcttcaaatagcaggcttatagaattcttttcaaaattaaagaattcttttaatcctaagtctgaagaactcaaatcaaaagatataaagaagctcccgagcgtcgaatatttgaagaagatacatgagggagttaaggacttatctcaagatttatttatcccgaaaatcccgtttctcaacccgaaaaacccgaaactcccaagaatcccgctatttaaatctcccccaccgccaatgtaccgtttacaactaaagtccgatcccccaccgccaatgtaccgtttacaaccaaagtcccctcccccactgccaaacgcaccaccgaagcaaatcaatattaagggcctgtccgtcgtcaaagattacttatctgactacggctacattgaatcctctgggccatttaacgattctttcgatcaggaaataatatcagccattaagacctaccagaaattttccaatcttcaagttaccggcggcctgaacaaacagcttattcagcaaatgttgtccatacgatgcggtgtccccgacgttaactttcgactacaactttcaccgacgacacatttcctatccca

SEQ ID NO: 57896 - DNA, 117 bp, Glycine max
  Clone ID: PAT_MRT3847_23292C.1
gctcactctgacgcactcgctacactgtcacctacagagcctgggtctattaagtgtagtgcgagtcatctgcgtcgattacgtagtgtagttgcggctatgtctcgagcctcttct

SEQ ID NO: 57897 - DNA, 2016 bp, Glycine max
  Clone ID: PAT_MRT3847_23293C.1
ggaatatcaactgtttccaaattaggaataaaacttcatcaaactcatgaacttactcagtcccttccagcgtggaattcgcaacaacgaccctgagtcatcatgctctatatattactcctcagctcttatatttagacgcacacagttatacagctctagagaattatcataccctttaagatgaaaccgtacctacgtccagtattcctattattccttatccttctcgaccaatccatttcgccgagtgctgctattaatattaatggtctgataaacaaatatgcacaaattctaaaggggcccccgagaatccaaattccggcaaatagactgatgaagctgaagagaccactgttgacagtgcaggagctgatgggcaaatgtaaggacgggccgcctcaaggaatttgcccgaaacttaagaacgcgtatcaacaaaattgcccgaatgccgcgtatgaagcactttgcccgatagtgaaggtagtgtatcaatggtgttacggctgcgagaagacgacagaagggggcgcacacagttatacagctctagagaattatcataccctttaagatgaaaccgtacctacgtccaatattcctattattccttatccttctcgaccaatccacttcggcgagtgcttctaatagtaggtttatagaattcttttcaaaattaaagaattcttttaatcctaagtctgaagaactaaaatcaaaagatataaagaagctcccgagcgtcgaatttttgaagaagaaacatgacggagttaaggacttctctcaagaagctatcctgaaactaccaattatacactggccgttcccgataccaaaaataccaaaaaacttctggaaaccaaagtcccagaaaccaaagcaccctcccccaccgccagactaccgtgtacaactaaagtccgatcccccagcgccaaacgcaccaccgaagcaaatcaatattaagggcctgtccgtcgtcaaaaattacttatctgactacggctacattgaatcctctgggccatttaacgattctttcgaccaggaaataatatcagccattaagacctaccagaatttttccaatcttaatgttaccggcgacctgaacaaacagcttattcagcaaatgttgtccatacgatgcggtgtccccgacgttaacttcgactacaacttcaccgacgacaacatttcctatcccaaagccggacaccgctggttcccaaacagaaacctcacatacggttttcttcccgaaaaccaaatcccagacaacatgactaaggtgttcagagattcctttgcgaggtgggcccaagcctcggggactttgagtctcacggagacaacctacgacaacgccgacatccaggtagggttcgacaacttcactaactcgaggattgaagtgtatggtggcagccttatatttttgcaaccggattctagtaagaaaggggtggtacttctgaacggtaacatgggctggttacttccaagtgaaaacgccacactgtctaaagatgatggagttttggacttggagactgcggcgatgcaccagatagggcatctacttggacttgatcactctcacaaagaggactctgttatgtatccttacatattgtcctcacagcaacgaaaggtgcagctttccaattctgacaaggccaacattcaccttcagtttgctaagcatgattaggatgttctctgctgccaaactcgcatgactcagcaagccacggtgggggtttggatgtgcttttagttaccactttctctcttggatttgcttacgtattgctccttttgtattagtcgttcctgtcccaccttgcttttggaattatgagctttttatatttctgattgttcaatgtttattgtatgtgctccccaacctgtggtgacttttcggtttattctcacgtggctgtttcttataggcctttcgacctccaatattaaataaaagatcattttgagctttcc

SEQ ID NO: 57898 - DNA, 311 bp, Glycine max
  Clone ID: PAT_MRT3847_23294C.1
tgcctttccaaggaaggaccctaccactgctgacagcaatgggtgcctatctcgtgaggcacgctacaatgatcgttgtggcacttggcctctgcagaacgtgcattgtccgagtttactatgccattggttgtccctgagcccttgtcactgtataggggtcatcttatgggagcgtgcgaatattcctgtcctggagattctgcatattagagaaggagaattgcgactgctgacctggactgatcacctctaactcgaaccttaagaggggtgagcatagcttccttaagacagctgcttatggacac

SEQ ID NO: 57899 - DNA, 489 bp, Glycine max
  Clone ID: PAT_MRT3847_23295C.1
ggctatcatcatgagcaaaatattaaatgatatttttaacttcaagttaatctatcctcaaggaatttgaacaaaattaaaaagaaaactaatcctggatttggaaaatcttacctagataaacttgccttcctttccttccttggccctctttcttgcagctgttgtcccatagatgagcttcatatctaccagtccacctatgcctgttgaacaaatattctttggaaatcaaagcaaaaaataaacagtcaaatatgttgttgacattaatcttacatgaacccttaacttcttgagcaaggagcactttagaagaggtagaaattattaagcaaattagcgaacatcattatagccttatttttcaataatacttgtaatgtgccagaagtactagtaagatttagaaatgagcagaagagaacaaaccttgttacacctctatattgagatgttctttgcccaaggtatctatggatttcctat

SEQ ID NO: 57900 - DNA, 1199 bp, Glycine max
  unsure (1)..(1199): unsure at all n locations
  Clone ID: PAT_MRT3847_23296C.1
ctaaaagtgggtttgcgaaatctttgggtgctactattcgatacagttatccttcacttgatgttcaggtttttcgtgcccttatagctgttaactttttttatgatttttccttataaaatggaacatagcatatctattttgttcattatgtttttactggttctgtcttcgcactctttatacatgcctgtgtgaatttaattaagatcatgaagcctatgggtgagtttctgtcatataaggttactgaaaaactcccactctctagtctctaggctagagtatcaattgttctcggtgatactttgattttatgtgggctttaaagctattttttcttgttttcatttcataagcaagcaaaatggatcatgttgtttaaccaaatatttgaactctcacaatgtgtatgcataagtttgtgagtgaatttactcatcaacgcaagtatcatggaggaagatattcccaacagtcaatatctacatcttcgtgaatagctgaaattatattcttcatcttctaacttatcgttcagaatattttcaccatgtgtctctggttgtgtatgggttcaatttcaaaagatcagatgaactatgtttgtagttgcttcagaatgacttatatttaatggcatanttgtctcgctgtaaatcgaaaccccgagagaatcccaacagttcatcctccatgacgcgaggcacaaacacagggaagaagggacctcaggctagcaccgcgctacctgttcttccccccacggctttcgcagctcagctcacaactctcacacaggacattcagctgttagcaatgcactcatcgtcgaaggggccgcctcgtctgattcgcagcgccctgctcctactcataatcttgtgggagcttctgggtcccttaaagctcgcatgtgccagcattgggatgaatggtcaatatagtaatttcgatcagcggcaactttgggagttgccagactttacccttctccaaactttcacggacagggactcgaaggtgccgcgatcggggacgatgcgctcggtaggttctggaccctgcgccttccttgtcctttcgctggctccgggtccgggcagcttctcgcccagatagacccatctccctcggctcccccaaccttggccttcacatgctcagaacagtaaagcttccaaaagaattcaagcgct

SEQ ID NO: 57901 - DNA, 366 bp, Glycine max
  unsure (1)..(366): unsure at all n locations
  Clone ID: PAT_MRT3847_23297C.1
cggtccggaatcccgggtcgacccacgcgtccggtctattctgggcaaaaaaacatgcgtgagggggagggggggccanatcatattagaatcacggacggtgccgttactataggaagtacatgttatttagtcttttttaatggtatggttgagaatgtctctttaggagcgggacaatggtaaaaagtgggtgtactgggaagggattgtacagggagagggggggcacagaagagagcatagagatttattagaatggaggtgattataacaccatttgtgagtttatgtgggagagaacgactgtttgaaggaggtgggtcagagttcatggatatgaggactaaagattctcagaatata

SEQ ID NO: 57902 - DNA, 444 bp, Glycine max
  Clone ID: PAT_MRT3847_23298C.1
tagagaaatttgagtttgctatagcgagaacataaaagtgtatggtttttgaaagaaatttttggagcaaaaatggaaatcaagaaagagaaggcattgatggtttaaattccatagcatttgacatatgtgattcattttctaatcattttctcaattcaatgcaaccaagtttcaactcaattgattaatcctaattccttaggtgattagtccttgattttgaagttaatttcataattccttaggtaactggacctagaactcaaaatatgaacaatgaatctctgcaatgcaaaaaacatgatttcattcctaaaataaagttctcacacgattcaaattcagatgtggaatcaaacttgtttctacacaattcaattcctaaaaactagattgatcgagcctaagcatgcatctaagcaaagaattggaataggatca

SEQ ID NO: 57903 - DNA, 1030 bp, Glycine max
  Clone ID: PAT_MRT3847_23299C.1
tcctttagaattcatctcaattgaaaatctaacccgcaattccaccccgacagatgccattctcttcactgaaataacggacttcctccctctcctcataggtttccctctcacaagaccacgcacctccccattttcactcttctcatcaacggtaacagcaatggtaggagtattcctacaagggttgaattcaaaacgcaaactgactcaactacaatactttgacatcactcactgcaacttgtaatacaagaagaagtaaaattgaatgcatccatatttttactgcactgccgaaatgtcaggctcacctcttctttgatatagcattttctagttcaggaagaagtcccacaaatatgcctcagctatacacactagaagtcttcattcatgtaaaaaaccaaaattgctgccatcattatgcagacactaaagctccagttaaggctcagtcctcactcctctctacaccctctttaacgattagtgtacgtccataatattctgttccattgagagacattgctgcatcacgttctgcctctgattgaaaggagagaaaggcatagactcggctgttcccttgtttaaaatcatgcaacactcttgcactaaccacatttccaaatctgctaaagagatctctcaactgttcaggtctaacagtcttggcaagattgccaacatacagcttatgaggtgattcatagtatgaaattctcgtggtggaagagttcattattattaaaactcctccttttagaattcatctcaattgaaaatctaacccgcaattcgcgcccaccaacatccttcagtcaaaaacaaaaaaaatttgaatcaaacacctagggcatgatgaatctaatataagcaagggagagacagcttcacactactaactgatccatccaatgcagcaactgcatttcttgctgaatatatagatcccagtgtcacataaccacaccccttactttcattagtctcagcatcccggcaaacctcgacagatagaatggtc

SEQ ID NO: 57904 - DNA, 450 bp, Glycine max
  Clone ID: PAT_MRT3847_2329C.1
cgatgcgtgcggccgattctactccacggcttaagcgttcattattgaggttcacacgggtccttgaaaatttatttctgaccgatattttcattatgtgattgtggttgcttgtaaaagggtcgatagctcaaaaatcagattgtgggagagtacttaagatcttacttgcagcttctcaaacgatctgccacaaggtagatgtaggccttggatatgccaatttggaattgtgaagctgctacaaaggccaaagccttctttttgacactaatgacatgctacaggttagatgcctccatatagctctctctccctgatgacgtcatgtagatctggggctgaaactgtgcctcgattatttctgcactgccaagctgtgtgacttctttggaataaactactttgggcattttcagagagcactggtctttgcctagctcatttgat

SEQ ID NO: 57905 - DNA, 450 bp, Glycine max
  Clone ID: PAT_MRT3847_232C.1
gcaaaactaagtccaagctattataatatctggcaattttaacatacaacttaacatacaattacaatgactttttagaatgacctaaaaattatgtggatctccgtagggataattaatgtgtatgacatgacatcggggcatgtgcaactgctaccgaggattaattcatggttctgaagaggatcttgataaatcctgacgccattcttcagatgttcccttttttactgtgactgttcttgtacaaaaaaataaataaatcaacgttgataaaagatgatttgtgtacgatctcctagaaggatcaacggaaatacctccaagcctatttataagatcttcaattttgagtatttattatccgtggaagagatatccaaatcaccattgtggctcaaaccaaatgtcaccaaaagctcaagcatgatatttggatcaaaaggaata

SEQ ID NO: 57906 - DNA, 270 bp, Glycine max
  Clone ID: PAT_MRT3847_23300C.1
gggcaagtaaatgactaaaattctaatgattaaggtccctgtccaaattctggacattaaattttaagcgtgacccttaaaaagggccctccgtgtttgtccagctgatacaagttaatcaacttaactttcagcgtgctttgtacacacccccaacaattttttggattcagtgaaaatagaatctttattgccgagttacttgtgtgaccaccacttgaattaactattttaaaccacttgcagcaagcctatttccccttttattta

SEQ ID NO: 57907 - DNA, 270 bp, Glycine max
  Clone ID: PAT_MRT3847_23301C.1
ctataacattatctttacagaggggggaaccccctcctcaaacgatcctacatacgatggagacctatcggccccaggccagaggtgtcccttaccgagcggggtgtaaaaccacacgaaatttcctattcactccttggtcccaaattgaagctttgtctccgcaatggtttatatcgcctattgaagtaattgttctttatttggccaatcattgttttattttccctgcgtacacacgaacataatttcttaatgttttcccagctt

SEQ ID NO: 57908 - DNA, 322 bp, Glycine max
  Clone ID: PAT_MRT3847_23302C.1
atacatccttaaatttgtcaatgcataaaaataccaagaacactaccggacaagaaaccaacccacaacaaaaaatcaaaccccagatagctaacctctttcccaaatgctcttgccaagatagctcaaaattccttaagggttgagggccaaacctaatccaacctttgcactcttataaatgaccctagtgtcaacctccccagaaatggtgaagaacaatctgggacgccactcaagcttgatgaaatcatttgccttgcccaaaatgctgatacgatccttaacaacccccaatggatccaatgcatgctgggtgcca

SEQ ID NO: 57909 - DNA, 269 bp, Glycine max
  Clone ID: PAT_MRT3847_23303C.1
caaaataagtagaacctaacatcggttgcatattgagagtagaattactggctagaagatacaaagtatatgtattcactcttgcattttaatccttttaacctatgttgtgaatctcaaatcagggaggcaatggggaaattcttgctcgtgggcacagccgagttcccgtctattctggaaatccaaaaaacattattgggcttctactggtggggtttaaatcctcctcattttgactttaatttagtctatcccttttaattact

SEQ ID NO: 57910 - DNA, 332 bp, Glycine max
  Clone ID: PAT_MRT3847_23304C.1
gttttcttcatataccctaatttgttttcacagctatgacatctgtgaagctcacaaccccccagacgggcgagttcgagcagcccaccggactcttcatcaacaatgagttcgtaaaggccgttgacggcaagacctttgatgttatcaacccctccactgaggaggtcatctgcagtgttcaggaggccaccgagaaggatgttgacatcgctgttgctgccgcccgcaaagccttcaacggcccatggcgaaaggagacaccagagaacaggggaaagctgcttaacaagcttgccgatctgttcgagaagaatgccgacctcattgct

SEQ ID NO: 57911 - DNA, 251 bp, Glycine max
  Clone ID: PAT_MRT3847_23305C.1
tttgaaataggactgtcattggttttacaaagtatgttggcttgcaattcactcaatctaaggattgatgaaattaatatggttgagttactacctcatctatgtggtgtggccaggtggcttgggggttgctgtcctaggcaacctgagtcagagcgaggaggatacatcatgcaattttggcaagattacctctgctacattggtagagtttgctaagaaaggttggatctgactggaaaagactgaat

SEQ ID NO: 57912 - DNA, 252 bp, Glycine max
  Clone ID: PAT_MRT3847_23306C.1
aaagggccttgtcgaccacactcaaaattaaattacataattttatcataaaagcacaaaaagacgtaacatggggaataataaaacattttcaagtcatatttgcacactagattaaaggctttcaacccttgttactaatgcgtgtggttctaatacctttcctttgcgtaaaaacaactcccgaactattcacacttaaagttcttctaccataccttttcaattctcccgactcttacctcaaataaa

SEQ ID NO: 57913 - DNA, 399 bp, Glycine max
  Clone ID: PAT_MRT3847_23307C.1
cggaattcccgggtcgacccacgcgtccggataatatttggaatttagaattttataaatgtcatctttgtatttctgtgatgatcaactctcatttcacgaaggaacactgtcagaatttttttatagaatatatattaattggttaagaaaaagattttagaatcactaatctttcaaaataatgtagattaataatccattcaaagatacacactaattctcacaacaatttttttaaaacctgtgtggcaataaactgctaataataattttttgactgatatgctaataataattttttgactgatatgctaataataatataattcatatttttctataaaaaatgtaacattagttttaagcagtattaatcacataaaaaatgtacccccc

SEQ ID NO: 57914 - DNA, 296 bp, Glycine max
  Clone ID: PAT_MRT3847_23308C.1
gcccggaactcatccagacctcacgcggcgcccccccccacccccggcccactaccaccccgcacccaatagcccctcccacgctgggcgcatgcttgatcctcaccgcagaccttgatgcgggggggggggctggctcacgtgaatgtcccgcgccggccccccgccgctacgaactacacccctgatgactctccccggctggcttggtctgccctactcttggccggctgcccacccgaccccctcccttcaaaagcctgccccggtcacgggcctgcacgcgaatgccccat

SEQ ID NO: 57915 - DNA, 406 bp, Glycine max
  Clone ID: PAT_MRT3847_23309C.1
actcaccaaaacaaatgataaaacgtgggatttactaaaaaaataaaagggttttggttgattttcttaaacaagaccatacaggatacacccatagcaaagactaaaaaaccccggcgctggcgcacccgaagagctatgagcccaactatcctaaagagggggcggggactacaaccaatgaagaaatgaatcatgtgtccgcagggaaggtaaaagacctaagcgcaactttccctccatatcaacttgaacaacctgaatggatctgtcctcaaaaccccaatctagattgctggagcctgtactaggccaaaatgttcatcatagcaagacctggaaaaattttataaaccgatgaccaccatccctatcccgatacttggcgcaggttcaaagacccctc

SEQ ID NO: 57916 - DNA, 252 bp, Glycine max
  Clone ID: PAT_MRT3847_2330C.1
gtttctacacaagatcgaaaagaggacaccttaacactttggagctccaaacctctttcacctccattcaggtagtcacgatgagaagatcaaacttggagaaatttaaaaggacaaggttagtatgatcttgttgttcaagcatcatcaacaatgggtggtgatcagatttgcttctagggagaatgcaaactgaaatatcacagcagtccaataagcatatgtcgttgccaatagctcgatctatcaaag

SEQ ID NO: 57917 - DNA, 391 bp, Glycine max
  Clone ID: PAT_MRT3847_23310C.1
gcgggtgcgggaggacgacggcgggggacacaaagaatcgaagtcatagttagaagatttagacgtttatccgtgattcggatagttctaatattacacttgcgctaaaagatgtgtttgattccgagagtctttggtggcagaaggagcaatgttttggatcctttgtctctccatgtgagggaccctactaaggatttatctttaaccactattctttctgctgagaaatcagcgttcgagagcacacgagtggattgtaaggagacaccagaagcacacgtgtacaaagctgatattccagggctgaacaacgaggaagtgatgctgtagatttaatatgacagaattcttcagataattctagagaggaacgttgagaaggaagaca

SEQ ID NO: 57918 - DNA, 535 bp, Glycine max
  Clone ID: PAT_MRT3847_23311C.1
gagcactaaatgatggactatcgacgttaaatgcatagccaccaacaaactttgggggagggaatactagcccaggtaaatgagtggtactttcttcgctgagggagactcatgaagctaacgctcatcatctgggccctatctgcttttcacccttgctacataaagggtctgagaaccgaaaaacttcgtactccggactccggaaactgtcacggaatccataacggctgcttatgacactgtttatctggaagctcttgttgcttatcaaattcctttgcctgataaaagttctcgaaccctctggaaggatctgaatcttatgctctgataatcatggcgcaccaacttataagtcccgctgactcaatatgattgatggatgactttgcagtgtgatctaggctctctcgaggacaaaattcttgacgcatacaccaatacgccgggccgtgcattgtctagaaacaaacctgagctctacatacttggcctttacaatacaggtgctagagcagtacttataaaacct

SEQ ID NO: 57919 - DNA, 209 bp, Glycine max
  Clone ID: PAT_MRT3847_23312C.1
atgagtaacgtgatcccaccgtggcagtcatagcccattggctgggacaatgggtcgacaaagttaccaaggcgacgaactagattgcgccactgaaactactagcctgatatgttgctgagaggatgaatggtgatccgtgggaacgaggactatacccgattatgacctgagatggcaacggagttgatgacgtgggagctacagct

SEQ ID NO: 57920 - DNA, 964 bp, Glycine max
  unsure (1)..(964): unsure at all n locations
  Clone ID: PAT_MRT3847_23313C.1
cggtccggattcccgggtcgacccacgcgtccgggagagagaaagtgcaagaattggaagagagagagagagagaggtttggtttgtgatgtggtagctttgaaggttaattttggaaatacggaggaggggtttcttccataaataaatgcttctggttagatgatttcattgacgatctagttcactgttgctcattttagtgtgtatctaatcgaagacgagggggttccgatgtcttctctcagtagggaattggtgttcctgatcttgcagtttctcgatgaggaaaagttcaaggagactgtgcacaagcttgagcaggagtcagggtttttctttaacatgaaatattttgaggatgaagtgcacaatggcaattgggatgaggtggagaaatacctctctggtttcacaaaggtggatgataataggtattccatgaagatattttttgagataaggaagcagaagtatctggaggctttagataagcatgaccggtccaaggctgtagaaatattagtgaaggatttgaaagtgtttgctacatttaatgaagaattgntcaaggaaatcacacagcttcttacattggaaaaattcaggggaaaatgagcaattgtctaagtatggtgatacaaagtctgcaagggcaatcatgttggttgagctcaaaaaggtgattgaggccaatcccttatttcgtgacaaattgcaatttcctaaccttaaaaactcaaggctacggactctaatcaatcaaagcttgaattggcagcaccaactttgtaagaatccacggccaaatccagatataaaaactctttttgtggatcattcatgtggacaaccaaatggtgcacgggctccatcacctgctaataatccactactaggatcattaccaaaggctggaggatttcctcctcttggtgcacatgggccttttcaacccactcca

SEQ ID NO: 57921 - DNA, 1095 bp, Glycine max
  unsure (1)..(1095): unsure at all n locations
  Clone ID: PAT_MRT3847_23314C.1
ccacgcgtccggtagattagtccatttccgcgaggagagagaaagtgcaagaatcggaagagagagagagcgtttgtttagtttgtgatgtggtagctttgaaggttaattttggaaatacggaggagggttttcttccataaataaatgcttctggttagatgatttcattgaagatctagttcactgttgctcattttagtgtgtatctaatcgaagacgagggaggggttcggatgtcgtctctcagtagggaattggtgttcttgatcttgcagtttctcgatgaggaaaagttcaaggagactgtgcacaagcttgagcaggagtcagggtttttctttaacatgaaatattttgaggatgaagtgcacaatggcaattgggatgaggtggagaaatacctctctggtttcacaaaggtggatgataacaggtattctatgaagatattttttgagataaggaagcagaagtatctggaggctttagataagcatgaccggtccaaggctgtagaaatattagtgaaggatttgaaagtgtttgctacatttaacgaagaattgttcaaggaaatcacgcagcttctgacattggaaaattttagggaaaatgaacaattgtcaaagtatggtgatacaaagtctgcacgagcaatcatgttggttgagctcaaaaagctcattgaagcaaatcccttatttcgtgacaaactgcaatttcccaaccttaaaaactcaaggttacggactctcatcaatcaaagcctgaattggcagcatcaactttgcaagaatccacggccaaatcccgacataaaaactctttttgtggatcactcatgtgggcaaccaaatggtgctcgagctccttcacctgctaataacccgctactaggtgccttaccaaaggctggaggatttcctccacttggtgcacatgggccttttcagcctactccagcaccagtgccaacacccctggctggttggatgtcaaatcctaccactgtagcacatgctgcagtttctggnagtggagctataggtcttggntgctcatctatgcctgctgctttgaaagcatcctaga

SEQ ID NO: 57922 - DNA, 677 bp, Glycine max
  Clone ID: PAT_MRT3847_23315C.1
cttttctttttcttcgaaagaaagagaaagagaaagaaaaaagatatccgtaagaccttgatccaactcatcatcgtgttcgtcttcttcttcttcttcttccttcaactcgcttttcttccaaccaggacatggcagcagatgaagatatgtcagctttgaagtctaagctgagccaatcaaatgaaacttggaagaaggagatggaaagaagccaatctcaagtggatgtattgcaggcaaggataatggaggtaaaggcacaaatacaaggctcagaggaagatgcgaaaaaggagttagaggttctatggcgaagagtcaagactacttctaccctgttgacctacttaaaatcaaaagctagaatcatggctgttcctcatctagcccatacatcttgtggcataaaaaagttagatggagtagggcttgttgacaaagatgggattccattatcaggttggtctaggaatgttgatctttgttcctttgatgatccagatgaagaatcttggattggaattaaccgtcagcatggttccttggaccaacaagatgcagtttatataggtgagatactcaagtctgttcagatggtcacggatgtgatggaagcccttgtcaaaagggttttattggcagaatcagaaactactattgagaggaaaaagtga

SEQ ID NO: 57923 - DNA, 709 bp, Glycine max
  Clone ID: PAT_MRT3847_23316C.1
gggagaactgaaataggaagaaccagaggagtggatttgcagaccttgaccattgcgtatgaagattttgattaggaccttcaaaaggctctagctgctgaatgtttcgagattctctagtaacatggaatgaagcaccagaattaggaatccaattattggaattagattggggctgagcatctgtgagcatagcaccaggatttgactgatgattggtactggtagacttgtaactggtattagtccaaacattagcaggtctagtatcaccagaattgttactattctgtgaatagttgttgtaattggttgataatattgatcatagtggtaatagcaaacagaagtagtgtgaacaaatttgaaacacacctgacactggaagttagcaaaccggccaccacgacggccgcaaccactgccaccaccacgacggccaacaccaccacggccatggggagaactaccaccactgccagatccgccacggaaagccgagaaactctcttgatctgtcttgtttggcacaaaatatccatcggagctaattgcggaagacttgtgttgtgcttgcgaataattgatggaaggtgaatcagactgtgtttatattaattaatctggattctatcagcctgtagtcagcctgatctttgaatccagtagtaaatctagagctatgctgtatctttagtacctctggtac

SEQ ID NO: 57924 - DNA, 897 bp, Glycine max
  Clone ID: PAT_MRT3847_23317C.1
aaccgggcactacggtgagacgtgaaaacacccgatcccataaaccaatctcatcatatattctcaaaccatatcagcttccccaccacacaaaaccataaaccaaaaactccattgattgaagaaaaagagagcatcatatcatcgtattcatggacacagaacaagaagagatgcagttcatggggctctacggcgtctacagagaatcctacaagatcatattcgcatggagcaaggtcttcaacaagatcaccttaaccctaatcctccctctctccttcatctttctcatccacatcgaagtctccaacatcctcttcggaaaaatcctccacaacacccaacaaatgatggaaaccccacaagacacgccccaataccacaacctcaccaacatgctctcttccgaatgggccattttcattctcttcaagctcctctacttcaccttcctcctcgtcttctccctcttatccacctcagcagcggtctacaccgtggcctcaatctacacttcacgagaagtcaccttctccaaagtcatgaacgttgttcccaaagtatggaaaagactcatggtaacttttttatgcacctttgtggcgtttttcgcgtacaacgttatgacactcgttgttttcgttatatgggcacttgcaataggactaaggaatggtggggttgtggttttggttgtgttggggatgttgtatttcgcggggtttgtgtacttaacggtggtttggcaactggcgagtgtggtgaccgtgttggaggaagacacgtgcggggtaagagcaatgatgaagaccaacgagttgataaaagggagaatagggttgaccgtactcatattcttgaagctcgtgatttcttttgggttgatacagtttc

SEQ ID NO: 57925 - DNA, 1280 bp, Glycine max
  Clone ID: PAT_MRT3847_23318C.1
ggctcgacaaactcttattcccactcagtggtgaatttgccaaaccgggataaccgtatccctattcaggaatacaatgttctcgttaagactccctattcctctcgttaaaacaccaccttctccctcttgttattattctcactattatcactatcgttatcgttatcgttgttatcatcctttccatcaccgttcccaaacacagagtcttatcgtctcgaagcgcggttccgccattgcgaagtgtcacgctgatagcgtgacacttcgtgatgacggagtctcgctcgcccaagagtcgttggagccacttccggcggaactcgcggcggagatgatgccgaagcatgtggcggtgataatggacgggaacgggaggtgggcgaaggtgaaggggctgccaccatcggcggggcaccaggcgggggtgcaatcgctgaggaaaatggtgaggctgtgttgcagctggggaattaaggttctaacggttttcgcgttctctacggataactgggttcgccccaaggtggaggttgatttcttgatgaggctgtttgagagaacaataaactctgaagttcaaacttttaagagggaaggaattagaatatctgtgattggagattcatcaaggttgcctgagtctttaaaaagaatgatagctagtgcagaagaggatacaaaacaaaattcgagattccaacttattgtggcagtgggatacagtggaaaatatgatgttgtgcaagcatgtaaaagtgtagccaagaaagtcaaagatggtcacattcacttggatgacataaacgaaaacattatggaacaagaattggaaactaattgtactgagtttccttatcctgatctactaatacgaactagtggcgagcttagagtgagtaacttcttgttgtggcaattagcctacacagaactttattttaatcgggaactctggccagattttgggaaggatgagtttgtagatgcattaagttcatttcaacaaagacaaagacgctatggtggtcgacattcataaacatttgtttgcaatatatagtgatataccttgataaacatatacattaattagatactaagcaacataaatattagtagtttgctagttatcaatgccatgatttaggcataagaaagcaacatggaaagatatttatatatatattgatctacagacttgttaacaggtatttggaaaaaagataaatgatattgtagacttattatattcttaaaatattgtctttttcttc

SEQ ID NO: 57926 - DNA, 238 bp, Glycine max
  unsure (1)..(238): unsure at all n locations
  Clone ID: PAT_MRT3847_23319C.1
ggactagagaccaaacaatgaatgacaccgttgaagaagaagccgaaatccgaaacggtacgatcagaacaaccctcgtgagaggtatagggacgttcaatttcattccacgcattgcctctgaatgagaaataatacgccacatggattacatgctcatctgggttaacacctgtaaaaggattgaagatgcaagaactttgattgcagttcaaaagtanaanaaaaaaaccctgca

SEQ ID NO: 57927 - DNA, 1269 bp, Glycine max
  Clone ID: PAT_MRT3847_2331C.1
accaggagaactagtttaagcagtaaagggtacttcactcataaagtaaactagcactacatattcataaatgatcagttctcactaatcacatcacatctgaaatacaaagtagaggggaaaccagtaaaagagagtttctcccatacaagtaaaagtaaaaacttgaaagcctcagccacataataatagagtagctgatgatgcatatagttcctataccataccatacaactcttacattaccactgtttttgaatactatactctttacaggtaaatgaaaagatatgcgtatgactaactataggttcatattgtgattgtgttgtttggctggagaaagcaactagccatccacaacgttctcactgttcataacttgttgtccatgcaacaaaagatgcactaaaatgctaaactatcctcctgtttaccttaaggagcatgtcctttggcaagtgtgatcttaataatagggacccccttgccacaggttacttcctaaatcatcttcaaccccatctttcttgtacagcaaagagttgtatcctgaatcttgtgtactcttgggacaagaacatatgtcctggccaccataatggattgatgagctaagttgacatggttgaagtctttgttcctgatagatagaactcatatccttatgtgtcgtgctctgagtttcaccatcacttcccttgctgatgtaatcaattttggagctccacctctcattggcagttttctcacacacttcagaacgcagagactctctccctaacaccttagacggtggaggaaacatagattcaaaaattccagaagcagcagatttctggaactggttggatccaaagagctcagaagtgaaagaagaagaacccatttttttccttccttccatttttctactaccacaacaccctttaacaatctctgcctcaacccttcaaacaaggtgaaagttttaccaaccccacaaagaaacactaaacaccgcctaagaacaaaaacctttataagagtaaagaaaaataaatataaaggaacccaattgaggctttttcttttcctaggaaacaaacagagcaaacagaacagaacaagggaagagagggacacgtgaaacgatggtggctaaagagacgcgaattgagaaaaatgttgtaaatgaaacggttgctccaccatttatttataattggagaactaagaagtagctgaatattttcatacaaaaaaaattggatttgtatcttttctctc

SEQ ID NO: 57928 - DNA, 378 bp, Glycine max
  Clone ID: PAT_MRT3847_23320C.1
aaaagaaactgaattggtataactcacatcacgatagctatttattcatacacaatcatctcaatcaagtggatcaatacagctggaaaatcaatgaaaaacaatgttttttcaagtaccatacaatatcatcatcaacacaccaggaatcaagcccctctcagtaggcacatatcacaagccaaaattttgaaaaacccaacacattgaaattgatatacactacaaattagcgtatatcatgataagagaaattctctaatatcatctttccgatacattctcttttatttaatgaaattcatgtgaccgtgaatccaattaaatatgtatgtctcgtttctaagttaataagaatcacatgaatttcaatagata

SEQ ID NO: 57929 - DNA, 325 bp, Glycine max
  Clone ID: PAT_MRT3847_23321C.1
ccaagatggaccccactagacctcttcaaattcctttccgggatatagcgtcttggccacaggttactccccttgcttaaaacgaggggcctaacgctctcccttctatccactacacggtatactttttccactttatggatcactttctcgccgattacctaccccgtgaacgctcccctttcgccctagctctcaccgtcgaatctgttcaattacactcccgctgctacactgtatgacaagttcaaattaaatgctcccaatagcacttatttttgttcatttcagcatttatacaagtttagcaatttcccacgttttt

SEQ ID NO: 57930 - DNA, 337 bp, Glycine max
  Clone ID: PAT_MRT3847_23322C.1
ggaacctttgggctgatttatgtgcttgcatggtcgtgagaagatgatagaaggggctattatataataaataacaccacctaacagagaagaaagaaagacgagcttaatacgggcccccgcgccaggcaccaccgtagtaacgccggcggccgcgaacggataactactaacgaagttaccggcgaagatagcggaaggggaagaaggcgcgcgatatagggcgggagcgtaagggccggctcgtccaccgtcgtaacgagatcactcttgaccatccctagatacattagtccgagaattctcctgtgaagtgtaacctgttggcggtatacat

SEQ ID NO: 57931 - DNA, 496 bp, Glycine max
  Clone ID: PAT_MRT3847_23323C.1
aaacgtcgcagcgagcgagcgagcgatggaagaagaatattttgatttcgagaagaaggtttcgataaaggagacgatgtcgatggaggttgatccagccaaagtccttcttttgcttcgcggtttcctccaaattcagcaacgcagggccgaagcatattccaagctcaaatggttaataataattacttacaaggctttgcttggattccgccaaaatatatgcaaaatcattttcttctcgttatgatcgcatctcttatcttcgagtgtatttgaatcaaaagattacttagggatagcaatattttagggttcatatttgagcttcagggaaaaaagaactgtttgaatgagattgatccaaggaaatcgaccgaaagaatggttttttattttattttattttttgtttattttctaatagaaaaggattgcatactatgtaattgaagttcagaaatatcagtataattcccccaaaaacaaaaaaaca

SEQ ID NO: 57932 - DNA, 251 bp, Glycine max
  Clone ID: PAT_MRT3847_23324C.1
ggacagacccgtgagcatgcttagaaataccagcttcagaaccaccattggtggagtcaattagatggacagcacagtctgcctgggaagtaccagtactcatgttcttgaccccaccactggtggttatgaagctggtatttctacagatggacagatccgtgagcatgcgcattctcgctttcaccacaggtgtcaaccatatcatgtgttgctgtaacattatcgacgccactactcccaagtatcac

SEQ ID NO: 57933 - DNA, 265 bp, Glycine max
  Clone ID: PAT_MRT3847_23325C.1
ctcacctagtgggataaccccataaggctattattgttgttgttttgtagtagtagcagtgtcttctagggtagcaaagggatatcggtttcactctgaagtttaatattacttgagataaagtattaaagtcacaaagttcataatctattggatgaatattgtcaaggaatattttcatgtctaaaaccttaagctgttaagtggagactaaggaatatttttatgtctaacaaatattatttgatccattaaaagtcagtgc

SEQ ID NO: 57934 - DNA, 488 bp, Glycine max
  unsure (1)..(488): unsure at all n locations
  Clone ID: PAT_MRT3847_23326C.1
gatagatgcatggaccagagcctcctcagaacgggacttagttgggcggtntagtcattccaaacggagcacggagaccaaaggaattggatcaaactctatgagatatctctcagaggctgcaataaacacccctgcgatgagcaagaatgctgcgtattctagtgctataggccctacaccttaattgaaaaactcacaaggagccccacatcgatcagaactgcagatcggctacaatgggcctgaaacgtaaaactgcgaatagaacacaatctgttcttactgaataggcatatagagagattgtatatatctaagcttttggtgagaggtttcaattgatataacgacccgcgagagagagagagagattgttacaagttttttgaaggcccttatacagtaatcacacgaggaatggaaccatactggctggagactagtgggcgtttaggcattattttatttgactctaaaattgattt

SEQ ID NO: 57935 - DNA, 367 bp, Glycine max
  unsure (1)..(367): unsure at all n locations
  Clone ID: PAT_MRT3847_23327C.1
ngganangngaganaangnactgagcagaanagggganaggnanngcacagtcctngcngtngntgcntgcgtgcgtaaggtnggagttcggntngaggtgtgtttagaggntngngtggtgtgtgtntntgtnangcnncccnncnannagtcagggtnttggagtggngaagncgnagatttgncgtattgggcggnntngnngntngcnnnggtgcngatgtctcgnagtntggnnnggancgtggtggngagtagnacagtggctgtgcacaantggngncnggcataggnggggnttctgnncntgcagtagnnagggngtctggttnnnggttgnngtnganacctgggttgnnttgangg

SEQ ID NO: 57936 - DNA, 286 bp, Glycine max
  unsure (1)..(286): unsure at all n locations
  Clone ID: PAT_MRT3847_23328C.1
gctgcgcgtaagacgacgggaggggggcggggggagtccgatatattcgcattcggtgtgggtatttgcctacctctcccttcaagatgcggagcttcggggggaccctcgccggcgagaccatcacccttgaggtggaaagctcggacaccgtcgacaagcgtcttggtgcaagatcgtggaggtgggagggatncccccggagcagcaacgttttgttttcgccgccaagcagcttgaggacggtcgtaccctgggtgactactacattcaggaggagagccct

SEQ ID NO: 57937 - DNA, 328 bp, Glycine max
  Clone ID: PAT_MRT3847_23329C.1
ctctaagcagatctctattattggagagttggctcatcatgacatgcgagtcctaggcacgacttcattgtgcttcgtgaaactctctataaatgtaataagcacatctcctcaatcttgtaaatatgatactaagatttgatttctatcagtacatatgaagctcgtctaatgagaatgatagctgtctctagactcaaatgcttacagacagctgacgcgcctaccatatcacagatgtgaaaagctccattccatgcacatgatgatcaatgctccttatcccaaccataatatagatttactgctgaccatagatctgtcggat

SEQ ID NO: 57938 - DNA, 1265 bp, Glycine max
  Clone ID: PAT_MRT3847_2332C.1
cttcccttcacatacataaaagcctcgttccagagcagatatagccccaacaaagcaaacacaactttgcccccttgtaaaacttcttattgtgatgtctaaaagcgaagacttgaagcttttgggaggctggttcagcccatttgccctgagggtgcagattgcccttaacctcaagggtctagaatatgaggttgttgaagagaccttgaatcccaaaagtgacctgcttcttaagtccaaccctgtgcacaagaaaatcccagttttcttccatggagataaagtcatttgtgaatctgcaatcatagttgagtacattgatgaggcttggactaatgttccctccatccttccacaaaatgcttatgatcgtgctaatgctcgattttggtttgcctacattgatgagaagtggtttacgtccttgagaagtgttctagtggctgaagatgatgaggcaaagaagccacactttgagcaagcagaagaagggcttgagaggttggaagaagtgttcaacaagtacagtgaagggaaggcctatttcggaggagatagcattggattcattgacattggttttgggagcttcttgagttggatgagagtcatagaggagatgagtggaagaaaattgcttgatgaaaagaagcaccctggtttgacccaatgggctgaaacgtttgctgctgatcctgctgtgaagggcattcttccagagactgataagcttgttgagtttgccaagattcttcagctaaaatggactgctgcagcagctgcagctgcaaagtaaatggaatcaaattaattgcgagagtattttcaaaattgttgtccaagttgtttttatctcaggctatgttgttgcaactttatttatttaaaagttattttaaatttaaaatgtaaaatattaagaaagtttaagtaagttagttgaaaaattttgagttattatatgttctaactttatgttggcttaaaagttactttaaaaggtctaggttgtctctgctagcaactgagtctctctctcttgtttgtagttcatgtctcctgtttttttatttagcaaaaaggagtgctaagatgcagcacaaccaaaataaatgttatgataatatagtaaaaaaatattttagtggcataaacctccccaggacaagttacttgaacctaaagaaatgcaatacatacctattgcgaagaaagtcctcccatataaagctagggagggttttccaccaagtaaatttcct

SEQ ID NO: 57939 - DNA, 287 bp, Glycine max
  Clone ID: PAT_MRT3847_23330C.1
acactggcctattcaatccgctcttttctcatcaccaacacgctgctatgagtattcctacccatcttctctacgctgtatgaccaactggacagcccgagagggctcgactgcatctgcagctggtcctgcaagccacggcggctcccggggccgcgatgacttagtagccggacgcgaacccccacctgggccacctggctcacgaggacacggaggtgctcgtttccggcacagccaggctcgtgaacatggaatacgctgccagcgacatcacacgcgagcag

SEQ ID NO: 57940 - DNA, 464 bp, Glycine max
  Clone ID: PAT_MRT3847_23331C.1
gtatcctctcttcaaacaaattcagccaaaacccagtaaccaaaccatggcctttttcctaacacccattcttctcaccacacctcccaagttctaaaatccccagtcacctcaccaatttttaacccaactccagagtcccctgttttcccctgtttcccttcccctgctttttgcacattttcactgttgttgagtgtggacactcacaatgtcctcctcaagtgtctgccaagggttgcaatcttgtctcgaaccccgcgtgatggagccacgtgtactcaggctcaaactcgcactacaacaaggttccaattttcctcaaccctctccctctcccactaccaacacattttcactttcacccctctctgactccgaagaaaacccacctaccaactgccaatgtgacaaaaatgacacaaaatccggcgagcctagtggctggagtttccttcaaccct

SEQ ID NO: 57941 - DNA, 242 bp, Glycine max
  Clone ID: PAT_MRT3847_23332C.1
aggttaaactaacaacaactataaaagaccatgtgagtgaatgaatgctagcgccgcaaagcgaataatatgaagatcttccggcaaatgttctggtgcttaatggtgttccttctcatcatacttgtcacaattcttttgatatgggcatttcttttaccctcctaacccaccttcactctccattacttcaccttttacaccttcaacgccaccttggctaacttcctcacttctaattt

SEQ ID NO: 57942 - DNA, 339 bp, Glycine max
  Clone ID: PAT_MRT3847_23333C.1
acgtcctgcagttgtaacagtgatgggccatgttgatcatggcaaaacttctcttcttgatgccttgcgtcaaacttcagtggcagccaaggaggctggtggcataactcaacatataggtgttgctgagtggtggctagtggtggcttggctgttccggcattctgactgttcgtattcacctcctgacgcgcacagtaattaatgcagcatttaaaggacataattagggtaaaaaacgaagagcccctctgggcctggaccaaaaaaagagaccgaaaagaagaaaaaggaaaaaaaaggaaaggaaaaaaaaaaaacaaaatataaaacagcaaa

SEQ ID NO: 57943 - DNA, 512 bp, Glycine max
  Clone ID: PAT_MRT3847_23334C.1
cgtaaatgcgctttcttttcttataacaatcatagctaactagtagttttcctgtttctaaaaattagacgttttggttatatatcgttttactattctgtatttaattttattagctgagttggggctagtgcatgtttgaatttatcgaatgtaatatattatgtgcctagtcgtaacagaattctgttaacatattaacttaaggaattatacaagagttgttacattcttcaaggttgagtttagtggaataaggttttccgtttgaattttgtttgtactgtgtttttaatagatacatcgtttaacatgcagaaaccagcgtcgaaggatgcccaaccgatgaatatcgacagcaaggcataaacatcatggaaattcagctaatttcgagggtctgttatttattattatttgtggacatttggaattatgatggattattcaatgtgtatggagataatccttctttccctattgcaaagaacgtggaaatcttgacgaaatta

SEQ ID NO: 57944 - DNA, 215 bp, Glycine max
  unsure (1)..(215): unsure at all n locations
  Clone ID: PAT_MRT3847_23335C.1
aattcggctcgagggaggcactgcttaagggcctcagcccatttgaaaancggagttttccnccacngaaatatgagnacttnaaagggcctnttaaggggccgggcccgacctaacaattaacaaccaaggggggaatggcaggaatggaggaggccaagggaccccaaagggcggggccaaagggggaagggtggcacgccacaacaaacccc

SEQ ID NO: 57945 - DNA, 279 bp, Glycine max
  Clone ID: PAT_MRT3847_23336C.1
aaagactcagactcagactcagtcaccatgttattcaccttttctctgtttctcactcatgggccctttacaatccttgcctatatcagtgagagtctctcgcctttatgccaagctttactttcaaatgccagcattgtgatactgtcaacagttagtgggggttctgacttctgagtagttcgtcaccttaaacagaacacatggctaattttgagaaagattaggtgccaattttctcagaagttcatcccaaaccatcaaatgaacctgttgata

SEQ ID NO: 57946 - DNA, 370 bp, Glycine max
  Clone ID: PAT_MRT3847_23337C.1
gggaaccccaaccttttattgaaacatgcccactcaaaaaattgcaaccagccaaatttagtaatttatagggagcaaaaattaggcctcaaatttacaggctttaaccaacatgccgaaacaagggacaggggggaactccactttacaggggatacattaacgcttgaaaacacaaaaaatttttcacccaatggggggatttaactctcacatctccatttggaaaagcgctttgggcctgaaattttaacttaaaaggtggagaaggaccaatctttttaaaaggttcaaccccctaaaggaaagtctgctccaattcccccaaaaaatggtggggcaaaccctttaaaacatcaatttttccttt

SEQ ID NO: 57947 - DNA, 802 bp, Glycine max
  Clone ID: PAT_MRT3847_23338C.1
gcggacaaaggcaactagggagaaggcagagaaagaaataggaaaggaagccaaagaattctacacaaaaatggttgaacaaaaaaatcaggtcatccctcttcttactccttacaggatggggaacttaaatctttcacacagaatcgttttggcgccactatttagagcaagatcttacaacaacgttgctcagccgcatgctattctatattactctcaaagagctaccaagggaggtcttctgattactgaagctactactatttcacccacttctaaataccatccaaacgcagttggtatatggtcaagagagcaaatcgaagcatggaaacccattgtggatgctgttcatgccaaaggtggtatattcttctgtcagattgttcatactggaagggcttacgatccagatcttaagcccgatggacaaaccttaatatcatcaaccaacaagccatttacacataatgccaccgaaccaacggcactaaggacggctgaaattcctgatatcgtcaatgaattcagacttgcagcaaggaatgctattgaagcagggtttgatggagttgagatccatggggcacatggttttctaattgatcaatttttgaaagaccaagttaacgacagaacagacaaatacggtggatcattggagaatcgttgtcgttttgcattagaagttgttgaagctgttgttgaggagataggggcagatagagttggaatgagactttcacccttttcagacttcaatgaatgtagtgactcaaatcctcaagcattaggtctc

SEQ ID NO: 57948 - DNA, 1910 bp, Glycine max
  Clone ID: PAT_MRT3847_23339C.1
ggctcgaggtggctatagaatagtccacttgtcttgtttcacagcgaaccaaatctctttaattgatgatgcagaagacgacagaaggggaacaacggaacaaaattttctgtgttccaattttgctttggacacaacaaaacggtagcttgagctttgaaacatagcagcattcacttttcacgagagaacaaacaaggccttcttcttcaccttttcacattgtgttgcatcatcaccatccatttccattgttagctcctcttaatggttatggcaactgtggggtctgaacctgcttgtgcaagaacggttcatgatgttgcatcttctttcagctctaaatggcagcactcttctacggttaagaagcagccacgtgctcgaattcttcaatgttctctcaggattagagcttgtagttccatggctaacaaaaaggatatctacaaacaagtgggtttattttctctaaaaaggaaaattgaagatgcagttcttcgtgctgaaacgtttgcatcgacagccttggaaatggaagaagcaacgtggattaagcaggaagaaatggtacgtgattttgatatgtgggatgatccagctaagtccaatgacatccttgtcaagttggcaaacagtgccaaagtggttgattctctaaaggacttgaaatacaaggtagaggaagcaaagctgatcaatcagttggctgagataaatgctattgattatgggctttataaacaagcatatgaaacatcattggatgtgagtgagattgtgggatcagtacgagatttctaagcttcttaaagggccttttgatatggcaggagcatgttttggttataaaagctggacctaagggcatctatccaaagctctgggcagaacagatcctaagcatgtatcttagatgggccaaaagacgaggttatgaaggaagaattgttgacaagtgtccgttcaagaatggaggaattaattctgctattatagagtttgaatttgagtttgcatatggctatctttcaggggaaaaaggagttcactacttgataagaggttctccaaatgaatcttctcagcttgaggtgagagaagccactttgcaaataagatgaaagcactaaacagactgaaagctaaacttctagtgacaacaaaggaacaaggagttgcaagtataaaaagtatacaaaaggaaaacattgtcaatttatggcaagaagaaattcggaggtatgtctctcatccgcacaagttagtacatgatgtaaagacaggcgttgaggtgccagacctaaattatgttctggaggggaatattggaccccttattgcagctcatattaatagcagagtcatgtcataaggtcagaatccatgttccttaggccaccacgttctcattttgcaattgtttagcaagatagacttattattttcaccttttcaatcctgcaaaattctcagggcttacttcaatcccttgatttcatgagccaaaaacaaaaaaacaaaaaagagtatcaattcatcaatttttgcctgtattgatagatatgttgatgagttgaatgccaacagcattatattctaaacatttttttttatttgctttggcatcaaactctgccaatgtttcttcatagtcaatccctagccctggttaaggaggagggttgtttaggccctcggcaaccaacgtaaaactcacggttatacctatcatggatcattcatgagagatttttgtaaatgccaggccgttaccaaaaagtatcatgctgtatcacctgaatatagtgtcaaatgagcagggactgctacatcggtgctctcggatgtagtgtaaaatgagcaagggtcctctaatttttctggatgaatatgggtaaagaagttca

SEQ ID NO: 57949 - DNA, 1219 bp, Glycine max
  Clone ID: PAT_MRT3847_2333C.1
cttctatatttttcagtattttgttatggatgattttggtggtcctccccaccttcagggtccttcccgcaccctcaggttattcctctattggtttggggaattggattgaagcactatggttttattaatgatgtgaaaagaattaggattttcttctgactcgcataattatttaattagcacctttctttcatctatcaacaccttacattgaacctttgttactaactatttcctgcgtccttgtttgttaacttttggcctctaataggttcgtttgcaaaggtaaaaaacaaaaagaagagggaggagggaggaaggaggaaggagagagactttatatacgaggtaacagggcactgtggaattgcgcgtgtgggtgtgttgtttgaggttgttgtcgttggttgtgttgtgttgtgttgtgtgggttttatgagagtgagtttcacatggggagggtttttgttcttgaattggatggcagatcttacggatgcaaattctgcaacacccctcttgccctcgctgatcacattctctctcggaatttcaactgcagtcaagggagagcctaccttttcagcaaagtggtgaacgtaatacttgggcctcaggtggagagaatgatgatatctggactgcacactgttgaagacatattttgttgcaactgtggaaaccttcttggatggaaatatgttctggcacatgaaaagaatgaaatatacaaagaagggaagtttgtgcttgagaggtggacgatagttgacaatgaagaggaggaattgaattctgatgcacaagctggctctcaaactggctctcaagctggctcaagtgacacagaaaacgcctagcaagtggcttctttttcatgaatttgaagtattgtagctagcaattaatatattatagtattattattatacctttagtattgtaggttgcaaatatattatacctttagtattcctcaagatacaatttcacatagaaacttcttagagcaacttaagcttagctcatttgcagcatatataagtcttaaatattgtcatagcgcaccgaatcttgcaatatatttatggagggcatataattcatcttatttatgagtcgaaaatctccactttgcttaatctcaaaaattcagatatatgtggagttactgctctagaaataagtttgcaattacaatttttctgtgaagtgt

SEQ ID NO: 57950 - DNA, 508 bp, Glycine max
  Clone ID: PAT_MRT3847_23340C.1
gtagaatcgtgcatacatgcccggactacttcaaataaacagcataatcttcatcaatcgtcatgtcattactattcacccattcgccgccgcgaactctacgtcggcacccgcccaaccaaccccgccccagctccaagtgcccctgctagactcctcgctccattgggcaagaaaccttctatcgctcctgcagagtagacggtattgaacgagttgaagtatagggcgtctcgggggtgcaggctattacctgtccagagtgtggaagctgccaggacgccgattgcaagggtcaggccccaaggcaacatcttggctgaccacgcggagtgcaagctttttggaaccttgtaccggtcggaagcccgatccgagacgatcccgcgcttggtcctctccgctttccgcaactttaactgctcttccagcacagtacacctcactcccgttgcctggacgagcgcttcgtactcgtcatccgcgtcgatatcttgaccatgcttgc

SEQ ID NO: 57951 - DNA, 632 bp, Glycine max
  Clone ID: PAT_MRT3847_23341C.1
gactcaataaaggcaatcttcccaggaatgctaatataaaaaatatatattctgcaataatagccaacagtgccaaaaatacacaacaattaagggaaatacacttactaaagtatatcttggttcatgcattcactaacgtcaatcagctcaatcccatgcacttaacctccgaatttcttcttgccataaattgacaatgttttccttttgtatactttttatacttgcaactccttgttcctttgttgtcactagaagtttagctttcagtctgtttagtgctttcatcttatttgcaaagtggcttctctcaccataggattggacacttatgccagtaggtatatgctgaatgcaaactgtatgatcagtttgtctcttgtttttcccatgaatcaagggagatgagataatcaaatcctcagaatcaatttcaagatcacaagcactctcaagaaacatgggaataacatctacagttgctgagctagcctcaagctgagaagattcatttggagaacctcttatcaagtagtgaactcctttttcccctgaaagatagccatatgcacactcaaattcaaactctataatagcagaattaattcctccattcttgaacggacact

SEQ ID NO: 57952 - DNA, 283 bp, Glycine max
  Clone ID: PAT_MRT3847_23342C.1
cccactctttcgaagaaaggtggcgagaagatcattcttgtttttgaccttgtgggtgggccatgtgctgattgattcttgtccttcgattcagatagttctcgcactagtcatcattccctttgtttctgatgcttgcttggttgttcttcttcttcttgttgatcgtctgggtcgaatgaggtcttgaatttttcttgtattatgattccgttttcgctgtttttagtttggttctgtattctaagggggatggagtctgcgtctgtcagttaatgcttct

SEQ ID NO: 57953 - DNA, 371 bp, Glycine max
  Clone ID: PAT_MRT3847_23343C.1
cgatctatatttttgcatgaaaacttttttatttgtgtgtgtgccgataatccatgcacagcatgtgccgatagggacagagctaggaaaagtgaaataaatggatcatgtctaagaagagggcgacaaattgctggtgtcacgaacctccacgcaaaatgagactcggacacacatggtgcacagagggccgaattggtgagtgagctcacccccagaactcgcggagagcacagccacctgaacactagcggaaatagagtcggaccgcctaccagggtcaggaatcaagcccggcgggaagcgtatcgggtggtcagacccacaggctggtccctttttgccaaagacaatgcgactgcaatgggagc

SEQ ID NO: 57954 - DNA, 153 bp, Glycine max
  Clone ID: PAT_MRT3847_23344C.1
tgatgatagcaagttggtgctgataggcatagacggcagcgagcagtgcatgttacgcggctgatatgtggctggtggagtcacttcttcccgagcccaatcttcaagcgcgttctcatccactcaaggctcatcggcagctccgccgtgggc

SEQ ID NO: 57955 - DNA, 653 bp, Glycine max
  Clone ID: PAT_MRT3847_23345C.1
aaagggttaaaagaagtatattagaaaatgaattcccagcactgttctttgctacatcaatataagctagacctatcctctcagatctaatgtcacacccatctgaaatgattataagcattgcagtatgcatagcttggcaatagtccaaatgggagagataaattttagcaatgtatcaaggcagttccacccctcttttctgcactcctaataaggaaaccccctatatatgcaacacgaatacaaagatcttataccgcttaatgtactcaatctttagcgtgtgacagttctcaggacacattcattttgtaatgccatcaaacctcttatgagtaaaatgaacagttacaattgactctttctaaacttgctagtatattatgatccttaaatcaagcaaaggaaagaaagaaaaacaaatgagggagaatgaaaaaaaaaaaaaaaaactgaagagattcactcgggcctggacctaaattcttagatacttgcaaatatcagcactactctacataatcacactgacccaaaattttggtacaccaaaggataaatacataaaaagaaaaaaaatgctccttcttttttatatctacaaggatataaatcagtgcttctgattgcttgtacaagtgcactttgcc

SEQ ID NO: 57956 - DNA, 223 bp, Glycine max
  Clone ID: PAT_MRT3847_23346C.1
gatgtatggtaattgaaatatcatttcactttttatgcttctgtattttatcttttttggttcatgattttcttctttacaattaaagctagccccaaaacacatccttttgaagaacattattttcatcaatatatttctgtgtaagttcagttgttgaagggaattttttgaagttcaccaatcatttgttaaatttcaggagtacttagctaacccagtg

SEQ ID NO: 57957 - DNA, 452 bp, Glycine max
  Clone ID: PAT_MRT3847_23347C.1
ctgcgagaagacgacagaagggaacacaacaatagttattattatcattattaatctttaaacttttgtgattccctaagttgttggttgcttttgcttcttgtttctaacttatttgttgattcactttctttgtatatttgtagctcttctttcttccattcatctgcttcttcagcaattgtaacatatttattatcttggcttctgcaattgtaacatatttatcatctatctcattatttgttactatgaaagagtatacatacttctggaaaacaatgggataaatccagtgctactacttcctcctcctcatcctcctcctccttcttcacagaataccttaggaggaagtttgcttaaccaaacggttggagttcctggtcctgagcaacatattcataacattaaaagaaatatttataacattattaggggctttaatttct

SEQ ID NO: 57958 - DNA, 174 bp, Glycine max
  Clone ID: PAT_MRT3847_23348C.1
acaatcatcacacaattttttatcgagactcctgatgtacacatatggttacaattaaatgagtaggttatacatagatacttaatacgtagaattattatgcatatctaattgaatatcattatatcaagtttaatatttcatcataaacttaaatatcatacccattggaca

SEQ ID NO: 57959 - DNA, 549 bp, Glycine max
  Clone ID: PAT_MRT3847_23349C.1
gttagtcattgtgggtagagactaattcgtcaactatagaatgtacatctattagtgttgaaaagacgtgtgaatgcttgccgtgtgacgaaacgcagggtcatcaatgagctttgaaacaaggcttgggaggtacgtattgcacgccatgaagaaagctaagaattgcaggttgcatagccatggcttgctgttcatacttttttttttttcttttcacaacaccttatcagttgcagctacgcctacgtatacgtttgcatgaactacctccctactatgggtgtgggcagattttgttagatgatctcattattcgttatggggtttgccctccttttattttgaaagtttaaatcccatcgaattcaacactgctaggcccacatctattaattcttaaaagctttcattgttaaaggagtcattaattcgcggaacgagcaggtgaaagatcacggtaaagagatggcagcttgacaagagttaatttgttatttttattacaaattattttagtttgagaaataatattaaccatctaacgtg

SEQ ID NO: 57960 - DNA, 285 bp, Glycine max
  Clone ID: PAT_MRT3847_2334C.1
cccacgcgtccgcttttgtgtgctgttgatttatcccaagggctcaaagcaacagcatccacgaggaggtggtaccaaaattcctcatcctcccccaacaccactaccaacaacaagggaattccaacaacaacaacatgggagagaacaaaccatcagaggttaaggatttccagatagtggtagctgcttataaggactagagcaagaatcaccaacagtttgcaccaaagaagagttccaacaaggacaggcacaccaatgttgatgtcagggggaggagga

SEQ ID NO: 57961 - DNA, 2134 bp, Glycine max
  Clone ID: PAT_MRT3847_23350C.1
tacggctgcgagggaaaactggaaggttgttcatttgatttgatttgatcctttgggcgttgttcctcttccaaagagaatgaatgactctattcctccaccctgtcaaccataattgcctttcccttctttctcatcccactgttagttgtatactactactatcccactctctctcaccatcaacttttcaaccccacaccacccacccttttccaattctctttccgtccttccccacctcaattctagggttttcccattctttcttctttttttattacccctttttctctcctcttttaattcgttagttaggttaccctctcatcactctgcttttcgatctcctctctctctctctctctctctgatactcagtatatttcttctaaatcttcactctcttgtcctttccttttgtttttcttcctacaccacacgcacacacaattcttcctttctcttcttttgatgtcttaggaaccatccaatctgaatttgtgtattcattgcgtgattgattttccttcttcctttttgttgttgctgtgtgtgcgtgtggcggagaatagtgatcgatcgttgttaatggcataccaagcgatccaggttccgagttcgggatcgagttcgagttcggggtttcagttattgaattctccgttcggagacaccacctacaccaaagtcttcgtcggaggattggcctgggagactcagagcgaaaccatgcgccgctacttcgaccagttcggcgagattctcgaggccgtcgtcatcaccgatgagaacaccggaagatccaagggctacggtttcgtgactttccgggatcccgaggctgcaaggagagcgtgtgctgatccatctcctgttattgatggcagaagggccaattgtaatttggcttcacttggtcgaccacggccccctctgccttatggacggataagacctgcctccccttatgttggaagtttgcaaccagctcgtggtgcttatgttgggggttttggctaccagcacaccagtttcctacagctatcaacaaggattggtttaccctccttatgggtatacgtcatacggacctgagtacatctacccacagagtctgtacaacccatatatggggcaacagtaccttcagatatatggagtgcctggggcagtgaatacaacaactatttatccttatggacaagtgggtcaggctattaccagcggtcatggttattcggctatgcagggttatacagtaccaggtcatcagattgtgccctatggtggatccaatgttaatgccataacaacttcacctatgcctgccattcaagcttcatatcctagtggaattgctgcaccagttcctggccaaccacaatttattgttcctgctccttctcctcagtttatgcaaggtagtggtcctgaccaaacagctgggtgagggggcgaataaggtatccatagtttgcagcaggactaagagcagcggaactgctacttgagtggcgggcttccaatctagccttgcaagttaattattttgcattctagaggtcatatatagtcatgctcaccaagttgtgtctgagtcgctccagatggcgaaggaaactggaatgtgcgggctgcttttccatttggacatttacactagtgtatttatacctaatactacctgtactcaagaagagtggcagtagtattggatcaatgggtgctggaataggtttctagcagccattttaggaataaacttctgtaaaaaagaaaatcacgtctgaatcaaaatatgattctttgtagtcttgtccagcattgggtttgtagatagttgtcaatgttggtgaattgtgtgacgatggatgggccatcacattgaatgtgatttttgtgcatagtagttgtcaggggttctattagaagacaagggtgtaattttatgattttaagaacctgccgattatgcagggtagaaccatcagtatattccattagagaggattgcagtggttctttagtgttatattaccgtctttcagcacggagtcacatttcaacattttcttgaattaattttcaacctttcgtcatggtgcccttctataattgataaaaaaccaaa

SEQ ID NO: 57962 - DNA, 252 bp, Glycine max
  Clone ID: PAT_MRT3847_23351C.1
caaagcggcagtgcgtagagaggatcgtcgaacagaacagcatgaagatggtcatcgttctcgtcgtgtgcctggctctgtcagctgccagcgcctctgcaatgcagatgccctgcccctgcgcggggctgcagggcttgtacggcgctggcgccggcctgacgacgatgatgggcgccggcgggctgtacccctacgcggagtacctgaggcagccgcagtgcagcccgctggcggcggcgccctactacg

SEQ ID NO: 57963 - DNA, 619 bp, Glycine max
  Clone ID: PAT_MRT3847_23352C.1
ggctcgagcaaacctgttccttcttttttaatgttcacaaacatcctccaagcaaaatggaaccggcactccgaagaagacgaagatcacaaagacaatgagcaacaagaagaagaagaagaagaagatgaagcattgtcactctgcgatcttccgatcaacctcgaggacccaccgggaaaccaagaacactctcgccccaacgatgaagaattcaatttccggttatggcgtgctccctttaacaaagagcccgaaatgtgtgcagcggatgaagtcttcttcaagggccaaatcctcccgttgcgcgtctcgttcagctccgaggccgggttgttagccacggtgtcccaatctcaacaacattacggtaagcaattcgttaggtcagaatcgttggatcgcaattctagcgattatcgtggtagtagtaatagtagtagaagtagtagtctcagaagtcaaaactctttcactagcactagcactagctccacaaccacaaacacaacaatttccaaaagtaagcacaaaattcgaaccaatttcacacgcactccagtcccaacccgcattaagagcatagcttcacacacaacaagtagaaaatcacgtagat

SEQ ID NO: 57964 - DNA, 784 bp, Glycine max
  Clone ID: PAT_MRT3847_23353C.1
ggaaaactgaagcgttgttcatttgatttgatttgatcctttgggcgttgttcctcttccaaagagaatgaatgactctattcctccaccctgtcaaccataattgcctttcccttctttctcatcccactgttagttgtatactactactatcccactctctctcaccatcaacttttcaaccccacaccacccacccttttccaattctctttccgtccttccccacctcaattctagggttttcccattctttcttctttttttattacccctttttctctcctcttttaattcgttagttaggttaccctctcatcactctgcttttcgatctcctctctctctctctctctctctgatactcagtatatttcttctaaatcttcactctcttgtcctttccttttgtttttcttcctacaccacacgcacacacaattcttcctttctcttcttttgatgtcttaggaaccaaccaaccccccaatctgaattgatttcatcgttatttgtgtattcattgcgtgattgattttccgtcttcttcttcttcttcttcttcttctgtgtgtgcgtgtggcggagaatagtgatcaattgttaatggcataccaagcgatgcagggtccgagttcgggatcgagttcgagttcggggtttcagttattgaattctccgttcggagacaccacctacaccaaagtcttcgtcggaggattggcctgggagactcagagcgaaaccatgcgccggtacttcgaccagttcggcgagattctcg

SEQ ID NO: 57965 - DNA, 330 bp, Glycine max
  Clone ID: PAT_MRT3847_23354C.1
ggctcttgcttcacttttaattcgttaggttaggctcccatcactctgctttgctatctatcccccctctcttcttcctctgattccccgtatatttcttctaaatcttctctctcttgtcctttttctccctacacctcacgcacacacgcacaattcttcctttctcctcttttgatgtcttaggaaccatccaatctgaatttgtgtattcattgcgtgattgattttccttcttcctttttgttgttgctgtgtgtgcgtgtggcggagaatagtgatcgatcgttgttaatggcataccaagcgatccaggttccgagttcggga

SEQ ID NO: 57966 - DNA, 1204 bp, Glycine max
  Clone ID: PAT_MRT3847_23355C.1
gacgaaaggttgaaaattaattcaagaaaatgttgaaatgtgactccgtgctgaaagacggtaatataacactaaagaaccactgcaatcctctctaatggaatatactgatggttctaccctgcataatcggcaggttcttaaaatcatatttttacacccttgtcttctaatagaacccctgacaactactatgcacaaaaatcacattcaatgtgatggcccatccatcgtcacacaattcaccaacattgacaactatctacaaacccaatgctggacaagactacaaagaatcatattttgattcagacgtgattttcttttttacagaagtttattcctaaaatggctgctagaaacctattccagcacccattgatccaatactactgccactcttcttgagtacaggtagtattaggtataaatacactagtgtaaatgtccaaatggaaaagcagcccgcacattccagtttccttcgccatctggagcgactcagacacaacttggtgagcatgactatatatgaccaattaagtagcagatgctcagctagagttaggcttgtgagctatttgaaccagccttgtgagctcaatcatgttcaactctagaatgcaaaataattaacttgcaaggctagattggaagcccgccactcaagtagcagttccgctgctcttagtcctgctgcaaactatggataccttattcgccccctcacccagctgtttgatcaggaccgctaccttgcataaactgaggagaatgagcaggaacaataaattgtggttggccaggaactggtgcagcaattccactaggatatgaagcttgaatggcaggcatagatgaagttgttatggcattaacattagatccaccatagggcacaatctgatgacctggtactgtataaccctgtatagctgaataaccatgaccactaggaatagcctgacccacttgtccataaggataaacagttgtaacaatgcaccaggcactccatatatctgaagatactgttgccccatatatgggttgtacagactctattagacaagatggaagttgaaaaagtgagcagtgcacaaacaacacaaacattcttgcaaagacaatcaataaaactaattcaacctgtgggtagatgtactcaggtccatatgtcgtatacctgcaaagataaaacaac

SEQ ID NO: 57967 - DNA, 503 bp, Glycine max
  Clone ID: PAT_MRT3847_23356C.1
attttttttttatattaattaaaattaagaaaacaaacaaacttccctctctcactcactcactcggcaacgacgacggtcttggagttcccgtagctcatcaacgacagtcacatgtggcagatgacagggttcccgtcgcgccgaggcagagcagctacaatcaacaccgcgccaccactgcacacctcggagcgccaccacaaatccctcataacttcgaaaaaacctggtttggctaacctcctcacattgatgaggtgttcaaagagacacatattagaaaaaaggacaacacctaagtggataagagatcagaacaaacctatgaaggctccagtgatgggacacatgccattaaccctgcatcaagagttaaattgtgggctgatgatgttggaggcaagtctcaaggacgtctttatggagctggagacatgtcctcccattataggtctggtgtggaataactaacacaactgaagcgagcatcttgtagtcat

SEQ ID NO: 57968 - DNA, 525 bp, Glycine max
  Clone ID: PAT_MRT3847_23357C.1
ttcggcacgagatcaagttcagtgatttcggtttctgatggtggagttaggagtagtagagagatcataaggtataaaagctctagggttcatgaaattttcactctctatagcaggttttggaagattatctacagaactagacaacttcttttgaccaacaccgcagaagcacttctcgtgggtcttgtgttgggaactatttatatcaatatagggtttgataaggaagggattgagaaaaggtttggtctttttgccttcactctcacgtttctattgtcctccacaacggaaacccttcctattttcatcaacgagagaccgatcttgctgagagaaacttcgagtggggtttataggctctcgtcttatctcattgcaaacacgcttgttttcttgccctacttgttcgttgttgctgttatatactctatccccgtttattttttagtgggtctctgtgcttcgtggctttcttttgcttactttgttttggtcatttgggtcattgttctgatggcc

SEQ ID NO: 57969 - DNA, 144 bp, Glycine max
  Clone ID: PAT_MRT3847_23358C.1
tattcggctcgagaggctctgcattaggtgagcgtacacttctgtctagctttaatgttgccactcataggaccacatgagactggggtcttacgtgtgtacttgcaccctaggatcatgcttacacatgtcctactgcagctg

SEQ ID NO: 57970 - DNA, 546 bp, Glycine max
  Clone ID: PAT_MRT3847_23359C.1
acgcccctttggcactaccaggagcgctcccaagttgttaaggtgtgtaatagggactcccacgtttttggtgtggaccgcttctgcgtgttatagagggcccccccttaccctctcccctggaactaatccccaggcccctggtcatgaatgcttggcaggtatatgggagtgaaaatattgagcgagagcctagggggtgcggctgctgctgatgaaacagagccaataagttgtatagttttcctccgtgtgaagttttcatcaaagtgtcttcgcgccactgaggaaaaccaaaattcttgtgagaatgatttgtgaagtaccctttcaacgaggaaaataacaaattaaacattgttcatgtaattgatgaagtgaaactagaagggggacgagggaaatcttctcttgtttgggaaatcttctcttgttttgattacgaccgtggtgtggatgagttatttttgtaagaataaaatttaggtataacattttaagtatttcctgaggttttaaaattaaaattagaattttattttgata

SEQ ID NO: 57971 - DNA, 370 bp, Glycine max
  Clone ID: PAT_MRT3847_2335C.1
tgctcgagaacaattaaacttaatcaaaacattttacaatttatcaattatcaacagaactaggggttataatataataaatgctctataaaaccctactaatgccttagctatgaaaactaaactataagcactcaagatacattatttaatataagttcttccgttcactgaaaacacacatatacggatcctcactttgcaaggtcacctttggtgacgtctatactcttgatgttcatcatcatagtaacttaatatatgagacttttcctttgacttaaaaaacaagctgatacaaatgacaaatagtttatcatagaacctaactacctacctttacagggtcacattttaatgaatgtcttac

SEQ ID NO: 57972 - DNA, 377 bp, Glycine max
  Clone ID: PAT_MRT3847_23360C.1
ttttcttatttgtttattttctttattttggggtttccacagtatgacaattttgcggaaacccaattttctgcaagagcaagagtctttggcacagtcatggatggttcatccccttctgggggggcaacacaagactgcaacaactggtggtggtgaaaacaaatttgtcgcccatgttcaaaaggggtttgggttgatgatattaaaccttttttgacattttcttgcaattttctaataggggttggtgccaagaaacttttaatggtttttttggatgcttccttccctttggacacaacccactttttttggtcactcttcaactgttcttctgtctccacaaaagaatccatttttttaccattggttgg

SEQ ID NO: 57973 - DNA, 353 bp, Glycine max
  unsure (1)..(353): unsure at all n locations
  Clone ID: PAT_MRT3847_23361C.1
aagctnagatcctctagagcgcccgcttnttttttttttttttttttttttttngtgtttcacaaacatattaacctcctattttgagacgcttcacaaaacttgttttttctaccaaatcttactttcaatttctaaatcttataaccatcaaacattctttctaatactcacattataaacacactcactacaccaatttatttttataaactataaaaacattttaccttcccacttatacaaaaacacaagtgtcatttacatttacatgaatactcgtcttatatacaaactccaaatacactttaatatttctttaagttctcaatctaattttcactttttaaccc

SEQ ID NO: 57974 - DNA, 459 bp, Glycine max
  Clone ID: PAT_MRT3847_23362C.1
tggttggaacctttgggctgatttatgtgcttgcatggtcgtgagaagatgatagaaggggagagcgagaaagagagagagagagagagaaatcgagagaaacctgtaaatttcaaccctggaaagactggtgacggtcgttcttaaggactgtgagaatcctgctcatactgttaagtctgttgaataggttgagtgacatgaagagacggcggaactaacgaagaatgccgtgaactctgatgccgaatcgatcgcggaggagtggaacccatccctcgccgggcataagaacgcgaccggcgtctggagagtactgcggaggacttcgctccttaccgagtaaaaggaagaaataaaagggaatgagccgaacgtgaagtggaccaaagagcataggtagaaagccgaaccggagtccctaaatactcgcaacgacgccacgatagcgaacgacga

SEQ ID NO: 57975 - DNA, 270 bp, Glycine max
  Clone ID: PAT_MRT3847_23363C.1
tttttagtagttaactatttcaataattggttccggatgatagttaagttgaaagagacaatacatatacatagcttcaaaatagttcgagacaaatctaatttaaccaaaatggatcacatatactttaatattcgacaatccaccaagatcacatagctaccaaaggatcacttgctttcataacaacttgaagataaacgtggtttaataaaaaatttcaagtggagtggctttagcgttgactaatccaaagctttcagtcatatt

SEQ ID NO: 57976 - DNA, 144 bp, Glycine max
  Clone ID: PAT_MRT3847_23364C.1
cacttgattggtaaattttttttttatacggaaaactaggaatcctggtcagaagcgagggcggacacttaagaggaaacatgggttgacccaaaaaatatgatcagtacaagcaagagtgccagattttcctattagtgagaa

SEQ ID NO: 57977 - DNA, 390 bp, Glycine max
  Clone ID: PAT_MRT3847_23365C.1
ccacgcgtccgcccacgcgtccggccttaccagatccatcgactcgcttgggccgcccctgccgatgtgcccgttcgaaggtgcggtacctggcaagcgagccatttgattcgacatgaatacctggtgcgagtacgttttggaacttttgcttattggagattctggcgttgacaaatcatgcttgcttttgagatttgcagacgattgttatttggacaggtatatcagcacaattggggctgatttcaaaattaacacagtggagcacgatggcaagaccatactgacttgatattcgcgatactgctgagtgagagcgcttcaagacactcactagctcctactaccgccgagatcatggaatcattattgtctatgacgtgacag

SEQ ID NO: 57978 - DNA, 747 bp, Glycine max
  unsure (1)..(747): unsure at all n locations
  Clone ID: PAT_MRT3847_23366C.1
accagaatggcctttcactcccatggtcacatattttctttctcctccattttgttttgcatgtttgccatggcatcttctcagctaacttcaaattgctatgaatcaacatgccctcaagctctctctatcatcaaaacggcggtgattggtgcggttgcgaaagagcaccgcatgggagcctccttgctccgtcttcatttccatgactgctttgtcaatggatgtgatgcatctgttctgttggatgacacttcaacctttactggagagaagtcagcggctgcaaatgtgaattctctgagaggttttgaagtaatcgatgacatcaaaactaaagtggaggctgcttgtcccggagttgtttcttgtgcagatattctagctattgctgcccgtgattccgttgttacattgngaggtccatcatggaatgttgggttaggcagaagagattcaaccacggcaagtaaagatgctgccactacggatatcccatctccactaatggatctcagtgcccttatatcttctntttcaaataagggcttcaacaccaaggaaatggtagctctctcaggagctcatacaacaggggcaagccagtgtcagctattcagagggcangtttacaatgaaagcagccatgagtcaaacttgcaacatcactaaagtctactgtccagcactggccgagacagcaccctttccccaactgatgtcacccccaaatgtggatttgacaat

SEQ ID NO: 57979 - DNA, 369 bp, Glycine max
  Clone ID: PAT_MRT3847_23367C.1
gcacacgagaattcagtgggcatgtcaatggcaaaaaaacctgtgaaatactctctggtatgtttgtgagtgaactgaattgttctgttcggtaatacatactacatagtaaatatgaattagacaatatgcgctgaattcgagttagataagcaggttgacgcgtttactgagtcagtgttcaaaggaaaccctgcagcagtgtgtttcttagaagagaagagggacaaaaagtggttgcaaggagtagctgcagagttcaatctatctgtgacatgttacttaactcgcatcaccgagtcccatggaacaacctgtatctcgtttgactagatggttactcctgtagtgagataacctttgggacat

SEQ ID NO: 57980 - DNA, 800 bp, Glycine max
  Clone ID: PAT_MRT3847_23368C.1
tttttatctgtatagttagttaaaaccctggctagtatcagttagctctcgatactaatatggtgcattccatagatgaggagagagccattgtctcatccttctaccgaaaatactgcatccttctttcacacctgctttaacggaatcaatgcagtatcccacgcgtccgctcttgcatctgggggctggttaagcttggctcttttgtttgctattgctgccgcgacattttacacaggcgtgttgattaaaagatgaatggataaggattcgaatatcagaacctaccctgatatgggcgaacttgcgtttggaaagacgggaaggctaataatatcagggttaatatacacggagctcttcttggtttcggtagggttcttgattctcgaaggtgataacttgagtaacttatttcccactgtggagattcatacagctgacttagcaattggtgggaagaaactgtttgtgatattggttgcccttgtcttggacaacttgaggatactttcttacgtatctgcaagtagggtatttgcttctgctatcattattctgtcaatatcatggactgcaacatttgatggagttgggtttcatcaaaagggaactcttggtaattggaagggaaaccccacagctgttagcttatatgccttttgctattgggcacatcctgggttccccagtttgtacaattccatgagaaacaaacaccagttctctaatggactacttggtagctttctcttaagcactggctgttatgcatccatgggtataatttggtgcct

SEQ ID NO: 57981 - DNA, 876 bp, Glycine max
  Clone ID: PAT_MRT3847_23369C.1
cacgtaaagacttatttcataactctgaaatctttgcttaaacatgtcacccggcgtatattcagtaattgtgtatacattggacattattagcattgggcggtcggttcggtttggcattacagcgtacaactggtgtggcacgaaaatcgccttgtttgtaaacttacgactattataccacgtgcagcaggatgattttgtagaatttgataatattttttttataagtattggtttattccaatgttggatccacactatagcataaaaaagaaaaatataaaacaccagctttattaaagtcaaattatgagccgagtaaataaaacacgctatgtggaaaggagccagatacttgattctacaactcctcccaccacaactggtaaagactatgaaatgatactgacctcagggagctgcgggaacaatcttgcccgagcaggtaccaaacccaatagtgtaaccatttcccttgcaatatccagttaagataacttcatctccatcttcaagaaatttcttatttaacccattcactggtaccgcgttttgtccattccacgttaattctagcaagcatgcccgggactccggctcaagaccactaactgtcccagttccgaggagatcgcctggcctaaggttgcaaccgttgattgtatggtgagcaagttgttgggtcaatgtccaatataagtgctttagattagtccgtgacaccacacctgaatcttcatgccccgcaggttttatgtgagcctctagggaaatatcatagattctggatactttttcagtcaagtatggaagtggaggaggatcctgtttggggcttcgaagcaaaagttctaatgcttccaggtcacaatc

SEQ ID NO: 57982 - DNA, 691 bp, Glycine max
  Clone ID: PAT_MRT3847_2336C.1
ggcagatcttacggatgcaaattctgcaacacccctcttgccctcgctgatcacattctctctcggaacttcaactgcagtcaagggagagcataccttttcagcaaagttattttgttatggatgattttggtggtcctccccaccttcagggtccttcccccaccctcagggtgaacgtaacgcttgggcctcaggtggacagaatgatgatatctggactgcacaccgttgaagacatattttgttgcagctgtggacaacctcttggatggaaatatgttctgacacatgaaaagaatgaaatatacaaagaagggaagtttgtgcttgagaggtggacgatagttgacaatgaagaggaggaattgaattctgatgcacaagctggctctctaactggctctcaatctggctcaagtgacacagaaaacgcctagcaagtggcttctttttcatgaatttgaagtattgtagctagcaattatattatagtattgtaccttagtattttaggttgcaaatatattatacctttagtagatcaagatacaatttcacatagaaactccttagagcaactcaagtttagctcatttgcagcatttataaatcttaaatcttgtcatagcgtaccgaatctttgcatatatttatggagggcatataattcatcatattttatgagtcg

SEQ ID NO: 57983 - DNA, 220 bp, Glycine max
  Clone ID: PAT_MRT3847_23370C.1
gctttcttccatgcaccgacgaagctcggaattcgctcaagatgtgctgctgctgcttcttctgatggtgagactgaactactctggtgggtttatgtctcagttgagtgtatcatgaataaaggatgatactgggagtatatgcttatttattactttgctcatttaattcagacatccatcgtttctaagtatgtgatcttatggaagattcttgaag

SEQ ID NO: 57984 - DNA, 2636 bp, Glycine max
  Clone ID: PAT_MRT3847_23371C.1
tgtagaatttgggaaggggaatctgatgtctgaatccaagattcagttccttcatacatctcttctgtcctcacctgccaaactcttttgtaggaaacataaaccattatggtccggttcccaacttacccaagtttttttcaaaaccaactgataatattttttttataagtattggtttattccaatgttggatccacactacagcataaaaaaagaaaaagtataatactcataaaaaaccagctttattaaagtcatattatgcgccgagtaaattaaacaagcaggctcttgatacaactcctcccaccacaactggaaaagactatggaatgatactagcctcatggagctgcgggtacaatcttgcctgagcaagtaccaaacccaacagagtaaccatttcccttgcaatatccagttaagatgacttcgtctccatcttcaagaaatttccgatttaactcattcactgacactgtgttttgtccattccatgttaattctagcaagcatgcacgggactctggctcaggaccactaactgtcccagttccaaggagatcgcctggcctaaggttgcaaccgttgattgtatggtgagcaagttgttgggtcaatgtccaatataagtgctttagattagtccgtgacaccacacccgaatcttcatgcccagcaggttttatgtgagcctctagggaaatatcatagattttgggttctttctcagtcaagtatggaagtggagaaggatcctgttttggggcttcactggcaaaaggttctaatgcttccaaggtcacaatccaaggtgatattgttgtgccaaaactcttgccaagaaatggaccaagaggaatatattcccatgcctgaatatctcgagcactccagtcattcatcagaacaagtccaaagatgtgatctttagcattgttaatatccacaggttttcccaattcatttccaggtccaacaatagtagccatttccaactcaaagtctagctttaatgaagggccaaagtagggggtagagctgccaactggatgagcttgacctcttggccggacaatatctgttccggaaataacaacagaagatgcccgtccatggtaggcaacaggcaggcgataccagttatctagaacaggagtctgcggcccacgaaatatgatcccacagtttttagtgtgatgcagagacgtaaagaaatcggtgtagtccccaacagcaacagggagaagcaactccacactactcataggcacaagtgctttctgcctcaaaaccgcattgtccctcaaggttggctcagttgctgataaaagcttttgaagagtagcacgagcttccttccaggctggtcttccaagtgatacaaacttatttagattaggctggagaaaagcatcggagtttttgaggagaggaccgtcgaagagaccagcggaagatatttcggagaggtcgaggacgaagtcgccgatggcgacgccgggacgaggaggcgaagcggattggggcttgaagactccgtaagggaggttctgtatggggaagtgagaatctgggtggaccgaaacgaaagattgcagcacagccatggtaccgtagtagtgctgatgatgttttactgctcaagctgaggtcaatgctgacagcaccaccgtcaaagagagacactgaaccgagaaagaacaaagagagagtggtgcgcatcagcaagttacaagagtgtgtttttaaattacgggaatacctacttccgtcttaaaataaacattatagtatttttttataaaaaaaaaactaactaaaaatttgtatatatttatatttttaaaaactaattaaatcattataataaagagattctccctaaagcttcgccaacggccaccccaactctctgctttccagcttcttcctttcttttgctatttcgaggcacagatgactggaatgtcaaaggaagaagggtcagctggtcctagttggggtgcttcattttttatgcagacaagagaggatgtggctagagctgttgcagctgctgttaaccctccaatgtcatcaaaagatgataacactggtagccaacttcaaaggctgcagtatcatgttgcaaaaatgttaaaaggcttttctcaccctcctaatgttgaaaacacaaattataatcctgaaatcctgactagtctgaagcgtcaatgggctgcaaactttcagttgcagtacatggaccataggtcttggaagggaccttcacgactgtttgaaagcatggtggttgttggacttcctcctaattgtgatgttcaggcactgcaaaggaaatatgttgatagaaagtttgaaagctctggtaaattgagaagtgcactcggttatcagaatcatctcgtgtagaacccaatattgaaccctcagtcttatttgtttaccctccagaaaaacagctgcctcttaagtgcaaggatcttctttctttctgcttccctggaggcttaaaggggtatgaaaggaattccaggggattggaaattttctgcaaagctggatgcctgaatcgggcgtcccactcaggctgcttttgtgttctgccatgggtatggcagcacttgcac

SEQ ID NO: 57985 - DNA, 361 bp, Glycine max
  Clone ID: PAT_MRT3847_23372C.1
atgacgcgtgggcagccactcgggtatcgttgggatttgtaaaatggaaaaaatttcgatctttgaacaatgccccagatcgaagctccgaaagcaatgcatataagaatctaggacctcaagagagagagcactgtgaatacattgactgtgaggggaatattatctcacaagcactatggagattactatgacacaagagaagatactaaggatgccaagaggagatttgttatgagcacctataataaactgcatgctggcaagaaaaaagaagggattattggatcattcattcatattgggcggtggagctgccgtggatgctggaaggctcgaggcagagcatggcattcttaag

SEQ ID NO: 57986 - DNA, 521 bp, Glycine max
  Clone ID: PAT_MRT3847_23373C.1
tgtaggagtgccgccttgcttggggggggggggggggggggggggggggggggggggggggggcaatccggaaaaaggccactagggggcaggccccctaatagggtatgcggtgaaaggaatagggctacgataaataataccacaaatcggggctgttaggaagtggtaatgccaccccttggaggaaaaatcataaagaggtagataaccctgcagaccttgaaatatgcccacgacaaacctgtggttggatataggttataccgtatggaatttagcctagagggtgcccgttactggtgcctacggcatgtcgatggcgggtgcgtgcgtggcgatagcgccctgagggaccccattaaaccagtagtaccaggacccgtttgcaattccccataaagccgcacttatatttggggaagggctgttgtgacgtgttatgctgttggtaagagcgtaacctaaagctggttaggctgagggagagggcccgcaaagattgggcggtgcgagctaat

SEQ ID NO: 57987 - DNA, 239 bp, Glycine max
  unsure (1)..(239): unsure at all n locations
  Clone ID: PAT_MRT3847_23374C.1
tgcaattgaagttgaagttcttgcccttntctcttcaactccaaanacaaganatcagcnatccatggctnccctccgtctccantgtcggagctgtcaacagagntcttttgaacctgaatgggtctggacctggggtttcagntcccagttcatccttcttngggagcagnttgaagaaggttattggctcaagggtccccaagacaaagatttncnctggaagttnaagattgtng

SEQ ID NO: 57988 - DNA, 355 bp, Glycine max
  Clone ID: PAT_MRT3847_23375C.1
agctgagcacaaaaagacagggttgaccctaagaaagttgaaaaagcacccgcttctttacgctgggaccactccacccgctcttattattatgctgaatgacggtagcctcaacacgtgtttactttaaaacatggctggacgatgattacttcatgtctggggcgttcgcggcatatgtggctagggtgaacttaaagccgggggaggattaacatcgtaacggcgccctgtttgagatcttgatagggaatggcttttctggatgaataaagtacagggttcaagacattggccatcatttggggaggcctacttgctgacttttatactaagcaggttaacaaaaaggagg

SEQ ID NO: 57989 - DNA, 538 bp, Glycine max
  Clone ID: PAT_MRT3847_23376C.1
ctgcttggggggggggggggggggggggggggggggggggggaagggagcgaaagccggaggatggaggggcccatagtgtactacctacacagttctctttaaactttttaaggaacaatcgtgggagggccccagaaagaagttatagagtaaacgaggtaataagaatataaagaccaagtatcaaaggacacaaccaaaagaaaaagaaaaaagaaaaaaaaacgacggcagcagcggcaaggaaggaaccctaaaatataatttgagaagtccagtttagctaacgcaatagctgccggctagtcgttagacccgaatgcgacctagtaccctattgtgttggcaacaatggccaagaagtgcgcccattccatttactactggtccgctgataatacgatgcacgtcgaggcaaaattcgctaccccggcggctagttcttaccaattgccactgcacgcccctatgtgttcagcagcgtcctcctctagggaatccaatgctaaggcgaacgtccccgtaatgcgaaccca

SEQ ID NO: 57990 - DNA, 233 bp, Glycine max
  unsure (1)..(233): unsure at all n locations
  Clone ID: PAT_MRT3847_23377C.1
ccactacaaccacattctcccttcccaccaccacaacggggatttttataaaactgacgaccncaatccctccaactacttttcctaccaccctacctcacacatttctggtttgatcctatttacctttctacggtgtttcaaattcaccaccttcatatctttttcacccaccaagatttcaataggctaaaagcttctcttccttaattaaactctacttctctagatta

SEQ ID NO: 57991 - DNA, 839 bp, Glycine max
  Clone ID: PAT_MRT3847_23378C.1
cggaattcccgggtcgacccacgcgtccgcttgctcccggcactcttacgttacaccccgaaactcaaacccatcaacatctcgctctctctctctctgctatgaattagggttttgaaacagtgaatcttcaccacctcaggcgacaatgtgatatttgtaattttcattacaaaagaaggggacagctaatctttcagtagtatggcaactgagagtctgattagaatctcggaagctgggggtaaatggccttctcacaaggaagctgcagcttttggttcatcgtctcgtaacatggcgacggaggatttgggtatacttctgaagggccataggttccaaggtggtggaaaggatgcggcacccaatcgcagtggcagtgcacctcccagcattgaaggctcatttctggccatagaaaaccttttaccccagcataacaccgcccagaatgcaagctttgcaaatctaagcagcactacgcaaaattgcgagtctgaagaacaattgcgagctgatccagcttatttggcatattacaattccaatgtcaacctaaaccctagactttctcccccgcttacgtcctgggaaaatcgccatctaggacgacatattggcagttttagaaataattggagaatgtcttctgcagatgatagcggtaaaagttctgtacatttgactcaaaggactctttccacacacaaggaggagtctgaagatgattcagccccacagccatatgacgatgaattagttaaggcaagtggaatatggcgtagacctgatgcaacttcattggcatctcagcacaaaaatatggttgatttaat

SEQ ID NO: 57992 - DNA, 1925 bp, Glycine max
  Clone ID: PAT_MRT3847_23379C.1
aattcggcttcgaagcctagaatcaacaatgtggctgtaatggtaataccttgaatttgcggtctgaccattcttggtccctgtttggctggcagcctgacagcttcgttagtctgggcctctttgactggcatgttttgccccaacatcacaggccttactacagaccagtactgaaagtggtgtgaaccgtaatttcgtctaccattttcagataaaatgcgtccaaagtagtgcactgtcttcactgaccccccgggcattcagaaagataatagtcgacatgggattgtattatgcattccacactcttgccatgcgctaatcaaatcagcagctgaacaaatagaaatttctgcacggtccttgcaattgataataagatccaggaggaattatttattccagggggagtaataatggatcaaagaaatgttgtggatcaactatattttgtcggccatggagtactggaggaagtagccacttctgaacatgggactgcataaactgtttcacttctgcagcctaacagttcattagcagaaatatctattctttgctacattctttaaccatatactgaccgtgtttgttaactgagtacactcctgcgactttataaacaatcatttacaaatatcctagacatatacttttatgatggaaggaaagtattaaacaaccttctagagggaaaagaatcttttctggataagcagttggagtcagtaatcacatttcatattggaaagcaagaagctgagcttgcttttgaaggtcaatagtgcagctttcaatggggatatgtatcagctaaaagtttaattcgagcaggagctgatcccaacaaggcagattatgatggaaggtcacctttgcatcttgcagcatctagaggatatgaagatatcacaattttccttattcaagaacgtgtagatgtcaatattatagataacttcgggaacacacccttacttgaagcagttaagaatggacatgatcgggttgcttctttacttgttaaagaaggggcctctatgaagatcgaaaatgctggtagttttttgtgtactgcagttgcaaggggagattcagattatcttaaaagacttttatccaatggcatggatcctaacttaaaggattatgattaccgaagtcctcttcacgttgctgcagctgaaggtttatacttcatggcaaagttgctattagaagccggagctagtgtttttacacgagacagatggggaaataccccgcttgatgaagctcggatgtgtggaaataagaatctgatcaagctactggaagatgcaaaatcttctcaactgtcagaatttccatcccaagaatttacagataaaatgcatccaaagaagtgcacagtgttccctttccacccgtgggatccgaaagataatagaagacatggaattgtattatggattccacactctatcgaagagctaatcaaatcagcagcagaacaaatagaaatttctggcggttcttgtattttatcagaagatgctggtaaaattactgatgtggacatgatcaaggatggtcagaagctgtatttagtccatgaaacacattaggcctccatattatggctctttacaaccatataattaagtgccttgtaatgtgttgtgctttctacaaattagcacgtgatttgatcttgttaaccgttcaaaaactgttttatatatcctgtcaaaatacagacgggtgatgaagatcaatactgcttagtgttgataccgtgatttcaatactgcttagtgttggtcatccattttgctattcagtattggctcggaagatttctttgtttttcttgtctgagcattaatattaattaagagatagttaattgaaacaaaaaagaaaaaaaaattattgtgggc

SEQ ID NO: 57993 - DNA, 230 bp, Glycine max
  Clone ID: PAT_MRT3847_2337C.1
ctataaaacctctatcttcttgtcattcggtgtctattcccattatcttcctctaaaccctaaacaactctttctcttcttccgtcgctcgttgttctccctcgcgtagatcgacaatggcggacacagagacgtttgctctccaggctgagatcaaccagctcctcagtctcatcatcaacaccttctactcctaaaaggagattttacttcgtgaactcatcagcaac

SEQ ID NO: 57994 - DNA, 217 bp, Glycine max
  Clone ID: PAT_MRT3847_23380C.1
gtccgtggacgcgtgggtggtactgtaacttctattatgatgcctgttgctatggtttatgccgtagaatctgctaagcgtggtgctgttgtatatgaatacagtgacagtggtacaacatatgcacctgaaggcataatattggacagtgcagggttgcagcttgactttcctgctcaattgcctggtgttcttcacatggcaatgtgttctgctc

SEQ ID NO: 57995 - DNA, 201 bp, Glycine max
  unsure (1)..(201): unsure at all n locations
  Clone ID: PAT_MRT3847_23381C.1
ctggtgtcagggctggtgttggtggntatnattatctcttggagccactatggngggngggaatgatcacaagtaagcnttaaatactgtnnaattntgcctctatgcnttnagtattgncatttngtcncntaanttttnangggnggnaaancaagtttccctnnaccctaatggggttnccttttgcccaaaaaancc

SEQ ID NO: 57996 - DNA, 422 bp, Glycine max
  Clone ID: PAT_MRT3847_23382C.1
cttatcacttttcctcattgccgttcaaagcggctttatttgaaaaacacttgggcggtggtgcaaatgtttgcttcgataattttctctggagacaacaggctgactgagaaaacaatttttactcacagagattttgacgtcttggatgtttattatacaatagcaactctgtttagaaaatatctaccgcattacattacgtggaatctgtataccttgttgatctacattattccatcttttctcactgttgaaattaaatataagcgtgaactgagtaatattcatatttccggctcattttacgacggcagatatagattctggactgaacacgagaaaaatcttgctttgtcagaacaggaaaagacggtagtgattacaaatagaggcattcctgctgatgtgttttcaaagcg

SEQ ID NO: 57997 - DNA, 365 bp, Glycine max
  Clone ID: PAT_MRT3847_23383C.1
cgtgcgaggggggcaggaaggtctaaaaaatataatatttgcatccttggccccggggcaaatggttccctgataaccatttgttcaaaaaaaaaagttttctgtgggttacaatagataaaaaaaaaatacaatttttgatgtttaaaaaccttaaaaaaaatagtttaaccactggcccccgattcgccgggaccaataagtgggggcctactaatatgggctaaaccccccatttgggcttgagggggtgccaattccctaaccccaatttataaaggcttaacctccctaccttcccccctaaaaacccccaagaccccccttttccccaaaaaaattccttctttttaatccaaaaagcc

SEQ ID NO: 57998 - DNA, 878 bp, Glycine max
  Clone ID: PAT_MRT3847_23384C.1
cgtctgcgtacgctgtcctaagctgtgtgtgcgcacacattcgtgttttggtgatattacggaattggtttgatttatattgttaaacatgggcagaagacagaataaatatcaacaatacacatccgaggatctacctgaaagaggacccgtggagagcctgatctactggcgcgattccaagaaatccggtccagtgttcggaggagtactcgtcgttctactcgctcttacatatttctctctaatcagtgttgtagcttacgtttcactcatcacccttggcataactttagcgtttagaatttacaaaagtattgtacaagcagttcaaaagactggcgatggacatccattcaaagaatatctggaactcgatgtgtctctaccccaagaaaaagttaaacaaatcacagaagtggccgttgcacacatcaatgccgctattgtggaactcagaagattatttttggtcgaagatttagtagattccatcaaattcgcggttttgttatggacactcacttatgtgggagcgtggttcaacggaatgactcttattatccctgcttgggtcgcccttttccctcttccaaagcttttcgaagtaaacaagactcaaatcgatgctaatttggaaattgtacggccaaaattggctgaaattcccccaaagataaaggcagcaatacccatgggcaaaaaagccgaaaaaaaaaaggacccattgtttttaccacaagtcccttgcccaagcgaggaaaatcagactatattcctatacatatattaatttattggtggttctttattcccttaaacgttcttatgtaatgtttttaaatataattagggggcatatataagatgttcctttt

SEQ ID NO: 57999 - DNA, 399 bp, Glycine max
  Clone ID: PAT_MRT3847_23385C.1
tcattacccaaacctaacacttgaatttagcatttaacatgggggggtgcacgtcaagtggctgtcccaacatatctccatatgtcctcacctagaattttataaccaggagctggtgcatttaatgcacatgtcctagatacaccatcctgtgctgcagacaaacgcgcaacaatttgcattgattgtagctgcccactaatgtgtgtaccatgatgatcaataatcaatccaacacgatctggacattcaattggagttcggttatggttcgagcgcataccctatactatatgaggcagacatgtatacgcagaacctatggcaacaaattcgcttggtgagctcccgcattttctctagtactttcttaatgttatgccctaacttgtctactaa

SEQ ID NO: 58000 - DNA, 296 bp, Glycine max
  Clone ID: PAT_MRT3847_23386C.1
ttcgtccgatttctcaagatttcgaaattgctgggaatactgggatgccagctttacttgcttcacaggctactgccagatcttctgaaaatgcggaagcctctgcatgatctataagttgtgggctctttcgtttgatcgatagtctaactcaataaaggaaattaggcttgaccctcttgaggagaggctctgactatttggaaaattgcacacattattacaacaattaaaagaggtgtgaagtgtgcgttttttttatatgcacaagtgtctccacatttattatgactggg

SEQ ID NO: 58001 - DNA, 218 bp, Glycine max
  Clone ID: PAT_MRT3847_23387C.1
cccactcttgcggccacgcgcccgctgttttctttcagtgtgaagatagtctgcgttaacgggtctttcgaaacgggagagtgctaatggaacgtggggttcttgatattaatattaatatggctgcttggagtatgaggctgaccagggaagtaggtgcaaccttgtgagggggatatcaagctcgatttctcttgggttcagggataactcttttg

SEQ ID NO: 58002 - DNA, 515 bp, Glycine max
  Clone ID: PAT_MRT3847_23388C.1
ggtaccaccatgcttttgtattatgacaaacatcagatattctctatactaatcatgctcaagacaagggaaaaaaaaaacttttcaacgggatccatcatccatcaccagacccaaatctacttcatttgatttagaaaattcctgttaggcacatttgcttctgcacatcggtgcatcgtaaatgacctaagggagggagcttacctgtttcatacctgaaatgacctggcaaaatgagttacaaataagggtgattcagctgcagcattcaattaaagctacagaccaaaagtgcgctaaaagaaaatacataccacacgtcaccgtatttcaattatccacgttaactcaaaatattgcttgatttccaaaatcccagggatcatcaaaatggcatatgttagcatttcattcttcctttttttattgaactgcctaaatacaatacaaaactaacatctaataaaagaaatccatgtccctcaagcctcctgttcattacagctagaatt

SEQ ID NO: 58003 - DNA, 453 bp, Glycine max
  Clone ID: PAT_MRT3847_23389C.1
gccaatggttggagaacaagactcaacggtagagttgatttgtgagattcataatcataaattgaccaactcattagttgaacatccatgtcccaaatgattgaatacaactgaaaagacacttatgtcacgaagtcaatgttcgaaccaaaaaacatattgatgctccagttaaatgaatatgtcgctacactttccattcgaagtcatgtcggaacccaagacatctgaagtgctgatcagctgcgccaaagatacataccaaggttttgcgggcgatctcttaagatctctcgaagtatgcggattctccgttaaggtagtctcagaagaccatcgggatcttaaggaagaggaaactgaatgcgtcaggattttcattattgttttttcccatcactatgcaacttcttcatctcgtttggataaacttaccgagatcgtaaataagta

SEQ ID NO: 58004 - DNA, 344 bp, Glycine max
  Clone ID: PAT_MRT3847_2338C.1
gccggctgagaaaagccgacggaaggggaatgcggccctgttactgctgttgatccattagccacttctcctgtaatcatgaaaaaacctttgcgggaggaaatacctcccacatgagcaatcggtctcattgagattgaaagatgatcaagattttgataaagctgtaggatggcagctagaactgtgtgcttataatgtggcttctacataacctgggggaaaccctatcattggcaaaaacttcatgcatcaaccacctggagactaaccagccgagaataaggtttcaagcaactatacatatggaggtgactctagtctgatgggggaccggccttttg

SEQ ID NO: 58005 - DNA, 259 bp, Glycine max
  Clone ID: PAT_MRT3847_23390C.1
cttgagtatgaaaaaggacaggtactggagttgcaaaaaaagacagctgatttggaaacacatgttccagattgcagcctcaaaattgcaaagttagtggcacagctggagttggctgaagaacagcttaagatatcagatgatgaaattgcaagattagaagaggaacttaatagcaggtcattgggtactcgtgagttgcaaggtcagcttgaattatcacatgattttgtggctgcattagagaaccaacttgtct

SEQ ID NO: 58006 - DNA, 260 bp, Glycine max
  unsure (1)..(260): unsure at all n locations
  Clone ID: PAT_MRT3847_23391C.1
gaatcaaagaaaggggtggtggctgcttcgaaagcttaataatttgtttatttccagaacatcatagttttcgcagcagcaaactaacaaattactcatatcatataataagatggcccgttctctctngaanncnanacgtntgggccnctggcagctaaatccctnntnncgttcccgttgagcggngnncttcngtggngtccgcngtntcggganaaganttggntngggaaattgggggcgaggaangtnatcgg

SEQ ID NO: 58007 - DNA, 274 bp, Glycine max
  Clone ID: PAT_MRT3847_23392C.1
cacgcgtccgcggacgcgtgggcggacgcgtgggcggacgcgtgggcggacgcgtgggttctcatgaatattctttcaaaatatatggaaaagactttttccagattcattgaatactatacactgaagaataatagattagtaaatagaaccatggttgcggctacggctaaggtaagattaacaatggagttttaaaagtcaccgactgcggcgcatactacttcttcgtcggacaagaaggaagactacttcttcgactacttccgccctg

SEQ ID NO: 58008 - DNA, 335 bp, Glycine max
  Clone ID: PAT_MRT3847_23393C.1
aggcgtgcgaagacgtgtgagaggtaccagagcagggcattcactgtgtcggaaaaggaagacgagatatgagatgagtgtctgacgataacgacaaggtggaagagcgttgtcgatgtcgatagatagcactgaggctggtacgaactttgaacctgaactgaaacccgtcgatcgctatatgacatgtccgttactgttgcgagtgatcactaaaattgatagtcaccattctatgtaatactttggcgtgcgatgcaagtagctgaaggacgcggctcatatttacacctgtatggacactaatattcgagaactaactgatatcgtcatag

SEQ ID NO: 58009 - DNA, 343 bp, Glycine max
  Clone ID: PAT_MRT3847_23394C.1
gaatatgatggggacatgtgtctaaattattctgaactacatatcctcagtagtgcacaatgtattcctcaaatttgcagaacaccccagttgcatcaatcacagtgatgctttggctgttagctcctcaaaaattacatggcaaaaaaataataaactccgccccattgctacccaagcataaattcactatacatgagggcaaaaactcattgaaaaggagagagatgacccacggtagaaccttttattcttcattatttggaagagtttgctaccacacggtggtaagatattcaaaggacaaagttctgaattatggcaaagtaactctcacttcttt

SEQ ID NO: 58010 - DNA, 258 bp, Glycine max
  unsure (1)..(258): unsure at all n locations
  Clone ID: PAT_MRT3847_23395C.1
cacaaacaaaactttntttatcaattttatggatctatgcaaaacgatgcatagtcagccataccatgtcacgtcttccttgcttcctaaattgaaaactaacggctccctggatggacttcagagatagactatcaagactaggttggcaccatacaactttaaagtaattctgcgactatatatcaattaatacattatttccctagcttgcaacagtccgaatactattcttacatatgagtaatctcttttttt

SEQ ID NO: 58011 - DNA, 269 bp, Glycine max
  unsure (1)..(269): unsure at all n locations
  Clone ID: PAT_MRT3847_23396C.1
cnaaaacgttaccaacttcccattacactccacgcanatnacaaacntnaaaccacccacacgcttccacactccnncaaagccttgggaggaatccgttcaaagagaacncntaatttgncgtcgtcttncaacttcacaacttcctcagcaccccccaacaaacgttcccnttcacgaacacaacccggaacctnaacttgctcggtcccccatcagcttccagcaactnctccttaaacctcgaatccattgacacgtcacggtcc

SEQ ID NO: 58012 - DNA, 120 bp, Glycine max
  Clone ID: PAT_MRT3847_23397C.1
gtctaagaaggggaagccgaataaaccgaagaagcctaatgtgacggtcgcggaggccggggcaaaaaaagacgccggtgaaaagggagctttccgaatcgagagataggaccgtttggg

SEQ ID NO: 58013 - DNA, 872 bp, Glycine max
  Clone ID: PAT_MRT3847_23398C.1
tacggctgcgagaagacgacagaaggggagggaaagaagaagaagaagaaggaatctggcgtggaagtaaccaatcgagagtggtaacagaaatagcaataacaatttggttaacaaaaaccctaaggtggagaaagaaggggtttactctaaccggcaatcagattcggaagcctttgacttgtgttcactctgttattctcgcaatggaggttcagattccaaatcacactgttttcgacatgccttcacttctccaagctgtggtcgccgacactgttctcgccgctgctcaatctattgctttgattggatatctgcttactaatggcactagttcagtgtcaccaaatttgactgaagtggatggaaggtttcctttagaagacctttttgggaggaaacatgcttatctacaaaacaagaatagtgaaacagaggacgaggaggatggagatgaggatgatgaagatggacctgacgaggatgaggatggagatgacgaagaattctcaggtgaagaaggcgatgaaggaggggaccctgaagatgaggctaatggtgaaggaagtgatgatggggatgaggatgatgatggcgatgacaacggcgacgaggaagacgatgatgacggagaagatgaagaggaggatgaggaggaagatgaagaggagaccccacaaccacctcctactaagaagagaaagtgagaattaatattaacaaccttagtgattaggacaggtaaattagcaaccttttgagtagacctatcttgctttattttcatgtcaatgatgataattattatattaattcctcattgtttccatgacgttaccttctttcagccagttattatcttgtcccgg

SEQ ID NO: 58014 - DNA, 273 bp, Glycine max
  unsure (1)..(273): unsure at all n locations
  Clone ID: PAT_MRT3847_23399C.1
gcaccacatgganctgaggcttccaaagcaatggctgtccttgcagcatacactgctgctgcttgccttgacatgtcagacatgcttggaaaccccatcaacttgagtggtgccacataggcagctccatctgcttctagtcctgcctccttcaagactgtggctctgttctccataatgaaagctacaccagcacctccaaaaaaagctgctgctgctgctcctgccactgatgagcttgccaagaggcatggccctgacagaaagatcttc

SEQ ID NO: 58015 - DNA, 357 bp, Glycine max
  Clone ID: PAT_MRT3847_2339C.1
aagaaagaaaacaaagaagagaagtaaggtatataaggaagatacgtacaatttttgcaaattgttcaaaatctccttccaagaaacctcatcacacctaatacaagaactacatcacatccaactactcaagcaatttcgagatacaactctatcaatactcaacattgaattattaaatgactctcaatacttatccattacccaacagagtcctgatcagcttatccaagtttaatccaattccgtattctgcatagttaacttaccaagtgtcaacaaatatatagttgaattctaagtgagagttaaagaccattgcttcagccgaagttgcacctacctgctattcattgc

SEQ ID NO: 58016 - DNA, 301 bp, Glycine max
  Clone ID: PAT_MRT3847_233C.1
cgaacaatataacaatacataccttttaaacttttttcattcttataactgattgtaactctgacgtttgcaaacacgctccaggagacataataaacttaacatggcacgcatcgaacccgagagattacgcttaacctcacttatgggggttgggccattttaggaaggcctattcaaatggttgcctgtcaccaccgattatttcagaacacaggcccaagtgtgttctctccactgtaagccatatgtagaaagccagccttctccttgttgtccttataaattgcggacataatag

SEQ ID NO: 58017 - DNA, 354 bp, Glycine max
  Clone ID: PAT_MRT3847_23400C.1
agcagcaaaaataattctcttcacttgaattacccaccgggcaagcctgcaaaattctacattgaaaaggtggtggggccccccctaggaccctattgggattgcattggatggccccaacgttccaaaggaatatttatttttcttcaagggaaaattctacccgtaaggggaggaaagatatctgtgtacaaagaaactttggccttaatcaccctaaagagctgtggaaaaagatgtttcaatccccatggacttggaatacccctttttggcatttgccaacccgctttgggacatggtccacttctttttaaaccggtcccttaccccctgccaccgggatttccctgg

SEQ ID NO: 58018 - DNA, 303 bp, Glycine max
  unsure (1)..(303): unsure at all n locations
  Clone ID: PAT_MRT3847_23401C.1
gacaaannnaagacgcgctgttttactattctccctaaggagtctaatcttgtggtccggcagaagtttttaaattttgcgaggttcattatgaaagaaaagggacaagcttagttgtcaagttggaatcaacccatcctccatggaatggactggttttggccaataagtttctgagcaagggcaccgatattcttgtggtgcgattatgcttagttttgatggtttggtttccaagcaggttttgagcatgatggggaagtgattaacagactttgagggtggggataaaaaaatattgct

SEQ ID NO: 58019 - DNA, 153 bp, Glycine max
  Clone ID: PAT_MRT3847_23402C.1
acccacgcgtacgcccacgctctcaatctcattaattagtctattgaattatcaattgctcacttatcaaatgggaatgggtacactttatcgcacttcggctaaccaacctcatagccaacatactgactcttcttctacctttatcaatac

SEQ ID NO: 58020 - DNA, 1448 bp, Glycine max
  Clone ID: PAT_MRT3847_23403C.1
cccggaattcggctcgagctcgagccgaatcggctcgagtttttttgcaggaaatttgtgaatcaggtggtgactggttacctgccaagtgtgatattggttttatttttgtgcgcagttccacccgtgatgatattattttctgctgtggagggttctatttcccgcagtgcaaggaagaagagtgcatgttttaaagtcttgtacttcacaatctggaacgtgttttttgttaatgtatttactggttctgttatcagtcagctctcagtcttttctagcgtaacagatctgcctgcccaacttgccaaggcagtgccagcacaggctactttcttcacaacttacattttatcatctggctgggcaagtttggcagttgaagttatgcaaattttccctctactacgcaatcttttccagagattcatactcaggcttaaagaagatgcactggatggcagcctatcttttccgtaccatacagaagttccaagaatcttactgtttggattcctcgggttcacttgtgctattctggcacccctaatgttgcccttcttgttggtctactttttcattgcttaccttgtttatcgaaaccagattatcaacgtatacattacaaaatacgatagtgggggacagttctggcccattgttcacaacacaacggttttttcgttgctattttctcaacttatcgcactaggggtgtttggactcaaacgctcatcagttgcatctggattcaccattcctctgctgattggtacgcttctatttcaccagtattgtaggcaacggtttctcccagtatttaggagcaattcagcacagattcttattgacttggatcggagagatgggcacagtggaaggatggaagaaatttatgaacatttgcgttcagcctacaaccagtccagtttaatgccacataccacaagccaacccgaatgtgtcagtcttcacgaggacaaggatagtggtccatcttcatcagaagatatggagacaggcaatgaaaatgaaattagtcaaaaagatagaccacggcccattcaacgcacattgagtatgagttcagataaatccgtacttggtgtaaagcaatgaatactcagaattgtacattgtaataagaataagaatatcatgacgtgcactaaaggtgccggtgcatgaacaattgatccattatagatggagatgaaagtctcttgatatattgttcattaaatttttttagttgtaaatagtttttcaaatgattttcaattaaatgtgaatagacatgtaaggataacaatgccatccaagtaattttgcagtaaatgaggtcatttacataaatcaaacaacgttgtaatattgcatcttaagttatattgatctctgaatccttttttaaaaattaaaaaaaaaaactcgagactagttctctc

SEQ ID NO: 58021 - DNA, 913 bp, Glycine max
  unsure (1)..(913): unsure at all n locations
  Clone ID: PAT_MRT3847_23404C.1
cacgcggccgtgataccgggggtttcataatgctgtccttcctcttttaaaattatataatttttaaaattaaatactaatatactaagttagacatctaatttgaatcctccacaacaacaagccacttcatataacttttttttgaactactaatagcctaatagcgagttttggtatttaactagactgcatgttatttcatcaataagattagataatacttttaaaaaaacatgagaatgtatattcccttgacagtaaaattaaaaaaaaatcctaaacgttttctttttccctttactagtggtaacattgtgattggttcatcgtggtcgcatcactgttcacacatagccatagattccccttttggcagccacaaagcaacacccttttctttttctctctaccctccaacgtgctctcttccctcctccacttcatccaaatctttctcattttctctcccaaatcacactctcaattacaataacacacactcaacttgaagaattttccccaaaaatcccaagagctcgcgccatggtttccccggaaaacagcaattggctgttcgattacccgttgatcgagaaagacgttattcccgtcggcgactcctctttcgccgtctccgcttccaccttctcctggcccccacctcccgccaatgtcagtggcgaaattggtgcttcgcttggggattctgagggcctaaaaaatcctggcttgaagaaaaggtgcacaattctccccccacccacattttctttcttgttaaattaatattttaaaaatgatgaaagaagataaaacgtaaccaccgcgaacgcttggttgtttcagcttaactggaatntcgaatttgattcctgaatatgtctattcagcttgcgcgaggatcgttttg

SEQ ID NO: 58022 - DNA, 395 bp, Glycine max
  Clone ID: PAT_MRT3847_23405C.1
tgggtgacaaactcattgggcttgtgacttcaagagaagatattccagatctgctcaaggcaagtaaaattcctaaaatttattagtctgaaatgattttccactaatcatactttgccacagcttgatgacgtgatagatcttgtggtccccagaggcagtaataagcttgtctctcaaatcaagggtacaacaaagattcctgttcttggtcatgctgatggaatatgtcatgtatatgtagacaaaacagctaatattgatatggcaaagaagattattagggatgcaaagattgattaccctgcagcctgcaatgcaatggaaacacttcttggacacgtagatctgtcaaggaatgggggacttgatgaacttgttgctgaactccaacg

SEQ ID NO: 58023 - DNA, 454 bp, Glycine max
  Clone ID: PAT_MRT3847_23406C.1
cccttcccggacgcctggggggtgaacccatatttgagaaagccattgggactggaattcaatggcccccccgaaaaagtctggcacccaaaattctttagaaaaaacccaaaaaggggttggagaatggttaacccattacccaaactggaaattggggaagcttcttttattttttttacccccccccaggttcttgagatgatgaaaacatccattaaaatgtggctgggggacttccgaatcagatgggaccagactatttcatatggtccccaataagagacaagaatatttcccctgctgtatcatgggttactggggaggccactcccggggacgagttttgggatctggaggacgatgaggatgatgaagatattgaaaaggacgatgattaagatgaagaggacgatgaccattattatgattaccattattattaggaagagag

SEQ ID NO: 58024 - DNA, 486 bp, Glycine max
  Clone ID: PAT_MRT3847_23407C.1
gtcgacgccacgctgtccgaaaaaaaaaaaaaaaaaaaaaaaaaaaaaaaaaaaaaaaaaaaaaaaaaaaaaaaaaaaaaaaaaaaaaaagggaaaaacaaaaaaagggaaaacaaacgaaggtccgcctacttacgaggacaaacttttttttttgttgcggctaaagttttttcactggcttgtctgtgcaccacccttgtttttggtaggccccttggccttccccttctttttcccgttttgcctggcattccccttttatctggcaggctcgccttgtcgtttccagagtttccgccccgtgtcgctttttcccacttttcccccccctgaattgcattgggggcgccccctggcgcggctttttccgcgccgccggtgttggtgttacccttcggaaccccctttcattcgccttttccccctgcccccccttctttggtttccccccctttccttcttcccccttccgcgctctttccc

SEQ ID NO: 58025 - DNA, 129 bp, Glycine max
  Clone ID: PAT_MRT3847_23408C.1
ttgtttctttgattcctaccacaaaagagccttgacggcctagctctctaccttccacaggacctacgtataggggacattccttcaggaacgggtggccctcttatgctctattccccctcaatctgg

SEQ ID NO: 58026 - DNA, 254 bp, Glycine max
  Clone ID: PAT_MRT3847_23409C.1
gtaatttgcctataccgcgcacagagggggtcgaaggtcagatgcggaaacatcagcatgcgttaccagatatgaagaaatgctaagtcagctcgtgcttggtagagaccgatgctcaaagggagagaggatcagtgtgcgtgctgatcacagactgccagaatcataaacttttgcactattaggtgataggccgaacactctcctattagatgtgggactgccaggcagatgaaaccttcttgtgttcgact

SEQ ID NO: 58027 - DNA, 341 bp, Glycine max
  Clone ID: PAT_MRT3847_2340C.1
tccaggtccgtcaccgtagggggaaggggcgactgataacgccaatacaaccgactggtacctgtactaacctgagagcataaccaaagcgtgatgctgtctgaaggttaacgctgacataacttgcattgcctgctactgagcctgttggcagtagttagaagtatagactggtccaaggggtgtagtccagggttagtcacctgaatcttagaaagcatcacagccatcctcaaataactccagtggtaacatctactgcccagttgcccagccaaaggctccgtctggggcactacagcctccacaaacacgatgtagtgcgaagccagccaagtggc

SEQ ID NO: 58028 - DNA, 130 bp, Glycine max
  unsure (1)..(130): unsure at all n locations
  Clone ID: PAT_MRT3847_23410C.1
cnctnnnctangggtntnatatcattcctcttnccaattccnnggtaagcntgganctcgntcggagccttaacncatcttctnaatcttaaggaacccttgggacactaaagttccaattgaagaggaa

SEQ ID NO: 58029 - DNA, 612 bp, Glycine max
  Clone ID: PAT_MRT3847_23411C.1
ggcatgttgaatgaggaggcaccatcatatatccgtccccaacatgcaaagacacctgctgttggaggcagaagaaccaactggaaggggtttcccacatcagagagaattgctaaattgcaactagaagattgtggagaaagtggcaatgataatgatggattaatggggctgtcaataacatttgatcagtggttgagattggattctggcaccattgaaggagatcagaattcagagcaaattttgaagatccttgaagtacaccattctaaaatcagagagttagatgaattgaaaaatgccacggactggttaaaatcatatggcagaaagctcggacattatggactcttagggaaccatctaacagtggcttttatgatccagctcagagatcctctacgaaattatgagcctgttggtgttccaatgctggttctgactcaggtagaaagagtttgcattagtgcaacaccacaagactacagcgattttcttgatgaaaaggaaaagggaatggacaatgaggccctgctaaatgagacaagtagcaagagtatggaatatacgaatactgacaacgaagccactcaatttcgttttaaaatc

SEQ ID NO: 58030 - DNA, 557 bp, Glycine max
  unsure (1)..(557): unsure at all n locations
  Clone ID: PAT_MRT3847_23412C.1
gactgagatgagttagtgtgacggaacagatcatgaactctcctaattgtgaatgaatcacatgcgaaaacaatgagttgcatgggtttggaaaaagaaaattggaagttgaaccaaaaggagagtgtttagtggtggatgaacaagttatgcgtgctagttggcacaaatcatagatttgaatcttcactgctccaattgcttaacaccaagcttcaagatatccatggagattctnnnnnnatcgacatgaatgacttgatttcagccagactagagaggtaaccgatcaatcacaatgcgtgaaagctggcccaaacataacgtaacttttaccgggctcttctgatttggatacgacgccatatcatagattacttatgcagacacttccacattttcaggcttcagaaaccaccttacttcaagcaccaacctcttcagcctcaagagattctatatattttgccttggcttcacccacccttctcaacatgtcattatgcaactaaaatnnngtgttgagctctgcattactgcaacaaccatcatacaga

SEQ ID NO: 58031 - DNA, 416 bp, Glycine max
  Clone ID: PAT_MRT3847_23413C.1
caaaaacaaacggggggggggttttagggtccttttttaaaggggccccaatggggttaaacacaaaccgaccggggggggagggggcttttttccacccccattaaacataaaagtttttaaaatgtttggggaacccatccaacattacacaaggggcttaaacccccccacggaaacgggggacaaggggaagggttaatcccttctggatgttgaaaaaagggagggcccttccatcctgaagctgtttgccaaaaaaaataaccctttggtgggccggggggatcccttccttggcctaaattttggccttaacattggaaagggggcaaaacctctccacctggaggggaaaagtcttccccgaaaaagttttaacaaaattttgcttccccccccaaaaacccaccccc

SEQ ID NO: 58032 - DNA, 476 bp, Glycine max
  Clone ID: PAT_MRT3847_23414C.1
ttaggaaagacactgaatgccaaaggtttaaattaatagaagtgggtattacgccagatatgcagcagctcaaacaaagagagatctaccgaggcttggtttgtttttgttctaatcgcattgttaatcggtccttttttttcttgtaagggagaaccctgtgcattatgaacacctaacccatacaagacacctggatacttatccaaggagccactagagaaatgggccttcaatttcctgaatgcacaggaagggagctagctataggaaccggcctgatggtaaatcccaaccctggagacctccaacatctcggaaagtttgctcaagcctccatggaggctggagcaaaacttgatgaggtgttttatgggggacacagttgggaaatacatgtttatgaaattgaacaagcccacttgtgtatggggcaaatgctgactcgtgaagagcttcaacaaggcccctgaatc

SEQ ID NO: 58033 - DNA, 249 bp, Glycine max
  Clone ID: PAT_MRT3847_23415C.1
cacgggccgaaatatgaagaattcaaaggaatttttcaaaccaaatccagttgggttaccaaaaaaaaaatgttgccagggcaaggcggtacccttacgagagagaagggccccattggccatgggggcttacctgtgcttatttcaattgccggaatgtggttagggacaaaatttcaaaggcaagacttccgcaatttctttatttggaacaaaagttgtaaaaaaatgttttaaagaaaacaaact

SEQ ID NO: 58034 - DNA, 554 bp, Glycine max
  Clone ID: PAT_MRT3847_23416C.1
ctcgagccgcatgattccatcgtatcccatgcctgcaccccctgttgattctccagaatacaggatagcgcactgctgacctagggcgaggtgatggaaatagcggtaaatcgtcactgccgaggcgggcaagctccctcagccatggggcgtggtccttagcaggcagggaagctggaaacggtcccacgatgtaggcgtacttgaggtagtgggcgcccttgtccctgcgtatcctgacttctagaaacattgtttcgatttcgacgcacgcgcactgctgtgcgactgcgttgtgtgcatcaacatgcagtacgagaagacgctgaagcttgcgctcatcccgaccatcgtcttcttcctgctgtccctcgtctcggtcgccctaaccacgcattactggatcctcggagactggatcgtaccacgaggagtgcgattaataaccggcatcgatgagcgcacacgagcgcccgtaacggacttcactatcgtcgacttcatcgacaaaagacagactcaacgatagcggcaggatgtctgtgcctgacagc

SEQ ID NO: 58035 - DNA, 441 bp, Glycine max
  Clone ID: PAT_MRT3847_23417C.1
ttaattcgcacctttacgggaccattcaacccacaggcaacaccctctttctgaattaccttcaaacaacacaatcgctctcttcgatttctagggttttgctattgctttgcatccgttcccccttctcacaaaaacaacgcgttttctcttccccttcgtatctattctttgcgtttgtttttggttgattgaaggcattcacagcgtaattcgttgctgcattttaatcgatttatccaaccagttacgtgctcttctcttaatctctctctctctctctctctctctctctatatatatatatatatatatatatatatatatatatatatgtattttattttgtaatgattgtgtggtttctagatccaatgaacttttttccttttctttcttttttatttcgtttgtcttgttcgattgctttatttgattttc

SEQ ID NO: 58036 - DNA, 329 bp, Glycine max
  Clone ID: PAT_MRT3847_23418C.1
gctcacccaaatgacagcttctgcgtcggcggaggaactaatgtacgtgctcagagcacagacggttctttcgacacagccataggtgagtgaactataaccaccgctagattgaacttcaccatagatgatactgttggctcaaaggctgagaatagcagaagccaaaccctgagtgcttcatactaccatacagtcgattgctagaccaacacagatcgcggtgcttggggatctcaccagacttaaaccaatgagaacaccctcacactggggacccagcatgcattggatccactgactactgcgaaggcttgtgtcaacaactt

SEQ ID NO: 58037 - DNA, 463 bp, Glycine max
  Clone ID: PAT_MRT3847_23419C.1
ccaaattggggggaacgggggtttttatttctttaaaaatttacctaaaaaaaccaccgaacacggagaatgggaagggtgggaagccaatccttttaaaaaaggccttgaaaaaaactggggaaaacggggggaaacaaagggaaaaacccccggtttaaaaccagggggttaaggggggcggggaacaacaaaggaaaaccgagagaacaaaaccagggggcccccccccacccaacgggggaatcccgagaatgaaagccagggggggcgggcaaaaaaagcccgccaaaaaaggacccaaatacctttaaggaaaaaccggaaacacctaaccctaaacaaaaagggggcaaaaaaaatgctaaaaataaccccctttaaagaaaaaaaacccctggggggccacacggaaccacctttaaagacacaaaggtgtttaccattggtgggcgccaaaccc

SEQ ID NO: 58038 - DNA, 366 bp, Glycine max
  Clone ID: PAT_MRT3847_2341C.1
ggctcgagctcctagctcatcctatcagtatttccaggtttcattgttgagccaccattgaacacatgggttccatagaggtccttgcttatgtcaacatcacactttatgatggagttgtatgttgtctcatggatgccaggagactccattccaatcatggatggcttgaatagcactatatggcatcggaaccgttccgcgccaatcgtgatcacctgttcatcatgtagcttgttactcttttcaacagtctgacttgtctttgctggttccagctttttgctcattagcatatgagcaattgattgccacattttttcttaacatctacttacaatttcttttttcaaccattggtggtga

SEQ ID NO: 58039 - DNA, 316 bp, Glycine max
  Clone ID: PAT_MRT3847_23420C.1
ttttgtggggtttgatacatgaatctgcattgaagtccgaaaacagaccccaaaaattcaggatgatgacatatccaaaagggaaatcagacgggacatgtagttcaagtacaaacaaacaaaggggtgtggccaacacaatgcttgcaaatttttcacacttataagcctgggggcttgtcggctatgaatctaatgcactgcactgggagatctgtgtcggatcctatgatacggatgtaaacggtgaggcttgcactcatagccaaattgaattcctactacacctgataagcattagtgccaccaaacatta

SEQ ID NO: 58040 - DNA, 432 bp, Glycine max
  Clone ID: PAT_MRT3847_23421C.1
tacggctgcgagaagacgactgatagggtggtaaaaaattattaaacaaacgcttaattagtctgtttactcaagcgcatgtatcaaggaaatgttcttctttttgtagttttcaaataaggttccttttgctatttgtaggccctagtcactatcttctggtctcattaaatcgacggcactgaatggctccaaacatagtcaaagacaagcatccatacaagacagaaaaaagttatatataaaagtgcccacactttgtacttttgcatatacaacatgtacaactaagatttgaatttgggcattcattttcctaacgcaaggagatatgataatgcaccgaacatatacacgcagaaaaagagtatttcgagcaaaaatgaatacgtaaatactggaatcacgcagtcatgaataaaaacaatgaga

SEQ ID NO: 58041 - DNA, 298 bp, Glycine max
  Clone ID: PAT_MRT3847_23422C.1
ctcacataaaggaatatgattttgaaacttaacttttagaagtgacctgttgctcgactgcatataagtttgcaacgacttatagtatttttttgtttatctacattatattatttattttatctcatatttctctttttttgttgttgcaaaattatagtgagaagcttatgtaaaagtagcattagttactcttaattaaatgcatctgaataggtcttcaaggttgaaaattcttttgcagacagcgtatataatttaagctaataaaaaattttgataaattattgttgttgtt

SEQ ID NO: 58042 - DNA, 311 bp, Glycine max
  Clone ID: PAT_MRT3847_23423C.1
tgctcgaggtccatccaatctttacgttcctttctcgccaccgataacactccacacataaacacgggtgcatttcgcacgttagcaacctaccctgtcttatcacacgtcgatcgccgacgatggagaatatcttacacttgatcaacgaccacaatcttctttaggttcaagacctctaggaccataactcccctatctcggagccggatctttctgtatctgatccagcgcctggagtcttacttcctccaaatgcgctctcaggagcatacctacctggtgtcgcaccgggaggatttcgttcgcct

SEQ ID NO: 58043 - DNA, 682 bp, Glycine max
  Clone ID: PAT_MRT3847_23424C.1
cattgtgtttaaaaggttggatgctcatgttcaccagttgaagggtagcagctccaggtaaataattcttcataactagaatctatctcaaaaaaaattatgttggtcatgttggttttgctttcttaagttggtggaagttgtatccacttgaaataccacattattggtcacagttgtattattattgctaataacatgtagcatagtggcatggacctcacctttgttagaacctattctggaggatacattttcatttgtcttttaccttacgatttggtctttttacaactatcaaaagtttgataaagttattgggaaatgcagcattggagcacagagaattcacagagtctgcatttccttccgaaactcttgtgaggagcaaaacgttgaagggtaaggttcttgacaattccatatcaaaattcttatatattctatgcctataaatcttgcaaaatatcatgtggcctagttgtttttatggtttttttttctttcttaaaaagaaaattctccatattctgaaagaaaaaaaaaatgcttggtgttcaggtgtcttaaaaacttgcaacaggtgaaacaggagtattccttggtgaaaagcaagcttgaaactctcttcagggtaagggcatgaggatcttcgatctctagtactttctataaaatcatg

SEQ ID NO: 58044 - DNA, 384 bp, Glycine max
  unsure (1)..(384): unsure at all n locations
  Clone ID: PAT_MRT3847_23425C.1
cctcccctaaaannnnngggggacttttaaaccccttggcgtttttaaccaaagccggatgcaaaatccgattgaacttaacccaacgcaaaacaaataagacagggagaaaggcctttaacaaggtttgaaaaataacacgaaaaaaggggggaaatcaacggggggacctctggaacccggggcgagccccccgaccgcccaaccttttgggctcccaccggcggggatcggccacaaggaaggggcggccctccctgaccaggaaagccctgaccccctccttggactgctcgactccccacctcctgggaaccagcacaccagggccccgggtataccccacccgaagggcccaaaacctgggaaggggtgacccccccc

SEQ ID NO: 58045 - DNA, 424 bp, Glycine max
  Clone ID: PAT_MRT3847_23426C.1
gaacactcttgatgaggggtctattaacaccatctacaacagtaaagccaatatacctgacagagaaagcattatgtattaccatcagctcctaattttgtgttctaaagctgatcgatgacataagggcccgtagctggtacaatatccagaacgatgtctaacctccactctagctctactattacgtagaggcaccaagaagcgcaagacaaatacctacactagacccatgaagatcaagcacttgcacgataggggtacgcatggcattcaccaagtatatagagtctacgagtttggagatatttatatgctgcagattgattgcctcatctcctagttgggtgctaggactttcttagccattcacttgaagagtgaatatagaagtaagtgtggcttgacctatgtgtaccataag

SEQ ID NO: 58046 - DNA, 378 bp, Glycine max
  Clone ID: PAT_MRT3847_23427C.1
ggtccggaataagtcccgcggagtcgagcgcgcgtcgcccgtggtcgtccttttttttttttttttttttttttttttttttttttttttttttttctcttttctttttttttttggaaaaaacacttttgaggtcgtcccgggcccaagagcaagcgcattcgaaccacccaaccacattccgggacctgctacaagagctaaggcacacagaattgcggggtctccactaacggaaaggcccctgaagcctcaaccaccccaagcccctcattgtaagaaaccccaacccaccggggcacagaagccaacgggacggggaagaaaagcgggagcccctcaaaatgcgatgattccgagccccgttccttaggggcc

SEQ ID NO: 58047 - DNA, 870 bp, Glycine max
  Clone ID: PAT_MRT3847_23428C.1
cctcgctcgaattcgctcacgcaatatattcgttccgttcctactttctccgctcctcacttcgctctctcattctccattctcacttctcaaattgaatcgaacgaattcacaaaccctagttttcgaggatgggtcagatccagtactccgagaagtacttcgatgacacttacgaatatagacatgtggttcttcctcctgaagtcgcaaaactgcttcccaagaatcgtcttctctccgaaaatgagtggcgggcaattggggttcagcagagccgtggctgggttcattatgcaattcatcgccctgagccacacataatgctcttcaggaggcctttgaattatcagcagcagcaggaaaaccaggcccagcaaagcatgcttgtcaaatgaacactatctatgcaaatctgaaagtgggattacaatgttatataggttttaattttgttggtaatatggatgttatgaagaatgaagaaccctggtggaattctctttttgtggagaattttcatgtggtttcaactgtcattttaatgtgttgttgacatgatgatgtgtcatggatttttattggtgtacctctcgtgtactcttatgctcggtggattatataatagtcattatcggttaaattaaaaaaaaaaaaaaaactccagtggtgcaatgcgaccctgcgcagacattcacgatgttccttgaactcaaggtgtctttgatgagggcgctgctgtacaagaaaacgcaataagcccactaaatttgcatacaagaacagagttacctcctccaactttcaatgcaaaccaactcactcaactctttgcaagaaagggattaacacaatatgaaatggccaccc

SEQ ID NO: 58048 - DNA, 1338 bp, Glycine max
  Clone ID: PAT_MRT3847_23429C.1
acggctgcgagaagacgacagaagggggttcttttcatgcatgtgttgaatgcacatgctggtctccggtccggttagggcatttctgggaccttaaatcaccaatttctcacccaatcaattccaattaagctgagggtgtttctgatctatatgtgatgggtgctccgaagcagaaatggactgcagaagaggaacaagcacttaaagccggagttgtcaagcatggtgttggtaaatggcgcaccatactgaaggatccagagtttagtagtgtcttgtacctgcggtcaaatgtggatctcaaggataaatggagaaatctgagtgtgatggcaaatggatggagctctagggaaaaatctaggttatcagtcagaagggtgcatcaggtcccgagacaggatgagaactctatggctatcactgctgttgctccaagtgatgaagaaattgttgatgttaagcctcttcaagtttctagagatatggtgcatattcctggtccaaagaggtctaatttaagtttggataaacttataatggaagcgatcacttgcttgaaggagaatggtggttctaataagacagctattgcagctttcatagaggtaaatcgcaagtatagaattgcacctatagcagcatattctgacagaagaagaaactcatccgtgttatatttggaagggaggcagaaagcctctatgaaaattgacagggatgagaccaacatccttactagatctcagatagatttagagttagaaaagataaggtctatgactccacaagaggcagctgcatttgctgctcgagcagttgctgaagcagaagccgccattgcagaagcagaggaggcagcaaaggaagcagaggcagcagaagctgatgcggaggctgcacaagcttttgcagatgctacaacaaaatcagcgaaagggagaaaatccccaaagaggatccatgcttgatggaagtttgaagaattagactcgaggagagatgaacggtggaattgagtaggacagccagccagctaaatatcatttgctggtatagtctatagtttgcaatattggaggctcttgtgactatgcaagtttcacctttattaggatatatttttggatattgaaatatccttcttgtagatagaaccattgtttgaatctttattgtaatttctttatagctgttgttaccttagcgctctgtccatgtacttgttgtttatagaaagtagatgtttagatgaatgggaattcgttcaaaaaaaaaaaaaaaaaaaataaaataaaagcggccgctccacccgacccaagaataagaaagaga

SEQ ID NO: 58049 - DNA, 338 bp, Glycine max
  unsure (1)..(338): unsure at all n locations
  Clone ID: PAT_MRT3847_2342C.1
catcccaaaatgatcgggtccgtctcgtgatgaccgcctctcaactcgtctccgtgaggcccgacgagctccgctgccactttggggtgcagaagcagacctggcgccatgttaagggcctcaataactcctatactggttgcggtcaggtcaaagccgttgtccagagagatactgtgtgcgacctaacaccgctgttgtacagccctgggactctggtatcatgagagtnaccctccgggcccagcgggagtaccctgccgacgtccgatgcgaanaccgggcgctcttacggagtgcaacantgcgtccagatagtgatgttgacgatctcccgc

SEQ ID NO: 58050 - DNA, 287 bp, Glycine max
  unsure (1)..(287): unsure at all n locations
  Clone ID: PAT_MRT3847_23430C.1
ctcgagccgctcgagcggctcgagcggnctcgagagattaagttatcagtcaatacgtcaagccatcactttagtcggttctaaattgatcaagctttagtcgctnggtcataatatgcaccatgtactgatggtattgnacaagactagtgcaacttgtgcaatgttagaaagttgagcagatgtgtgattttagtcaagagaaactttagagcagatgtctaatgttttgtgggtagctcctgaggacaaggcgagtttatggtcacaacttcattatgtttcgt

SEQ ID NO: 58051 - DNA, 391 bp, Glycine max
  Clone ID: PAT_MRT3847_23431C.1
gctgcgcccaaaggaaaattgatttttttttacgcgggggccaaacagaaaattttttttggggccggcaggggaaaaagggaaatttttaacgggtcgggttacacctagaaattttctctttttagggtgggtttagagcatattgatattacggtcacaattgcgcacgggggaaaaatcggtaaccataaagtgtaaaacaagaagtgccaaccgagagaaaaaactcaaaatttggggggggggaaactgccccaaatccatcgggaaacctggcgcgccctctccattatagaatcgggaaacccccggggacaggtttaataaaaaaaacgcccccgcgcggcgagattttttatcagtgaaacgccccgggggggtttttttt

SEQ ID NO: 58052 - DNA, 133 bp, Glycine max
  Clone ID: PAT_MRT3847_23432C.1
gtacttgggcccatactcaagtgagctcccatcctatactactgttgaattcccaagtgactatggttggtacactgctgggcttgaggctgacccacacacttgcgacaaaaaccatgaattggtagttctc

SEQ ID NO: 58053 - DNA, 817 bp, Glycine max
  Clone ID: PAT_MRT3847_23433C.1
ggccggaattcccggctcgacccacgcgtccgatttggctcgggatgcaaacaaatctgggaccttaaatcaccaatccaatcccaatcaattcattttcctccaattccaattaagctgagagtgtttttgatctacacgcgatgggtgctccgaagcagaaatggactgcagaagaggaacaagcacttaaagctggagttgtcaagcacggtgttggtaaatggcgcaccatactgaaggatccagagtttagtggtgtcttatacctgcggtcaaatgtggatctcaaggataactggagaaatctgagcgtgatggcaaatggatggagctctagggaaaaatctaggttatcagtcagaagggtgcatcaggtcccgagacaggatgagaactccatggctatcactcctgttgttccaagtgacgaagagattgttgatgttaagcctcttcaagtttctagagatattgtgcatattcctggtccaaagaggtctaatttaagtttggataagcttataatggaagcaatcactagcttgaaggagaatggtggttctaataagacagctattgcagcttttatagaggaccaatattgggcactgccaggcttaaaaagtatgttgtctgcaaaattaaagtttttgacagcaagtggaaaactgatcaaggtaaatcgcaagtatagaattgcacctatagcagcatattctgacagaagaagaaactcatccgtgttatatttggaagggaggcagaaagcctctatgaaaattgacagggatgagaccaacatccttactagatc

SEQ ID NO: 58054 - DNA, 272 bp, Glycine max
  unsure (1)..(272): unsure at all n locations
  Clone ID: PAT_MRT3847_23434C.1
actagatcagcaacggatgctgactatttggatcgtaggacgtcgaatcgatacggaatcggtagatgacattcgcaacgcatatgagaacacttggaattgttcgattttccaggattaagttgtcgagaatatccatctggtccgtattgacaatttgttcctgatagcaatggcacagcaatccaannattactaatttgcaatcttgctgtttgatgatagatgaaactcttccaagtgctgtttttctttgtgaaatctttatattt

SEQ ID NO: 58055 - DNA, 528 bp, Glycine max
  unsure (1)..(528): unsure at all n locations
  Clone ID: PAT_MRT3847_23435C.1
gnnttgagggcgtacttttttgagattggtttatttttttgggaggctggttgaaccgagacaccctagcccttttaaaggggctttttagcccacataaagtttaaacaaaaattgctttcgggggaaaaaaactgaaaggttaagcttcactatttcaggcccaagggggctaaaaattgattgcttttactttggacgctggcggaggcccattttgggtttacaaattttggcaaacccaattagggtttggagtctttggaaaaacaccctttcaaaggggatcagccaaaaatttttaaccccattttgccgatgcaggggtttttgtttttaaaaaaacttttttttcatttgtgcccgaaatcacgaggccccaaccccaaagggttccaaaaggaagggtatgtattccaaatgtatctcctccaaaataagccctttcttaacggcgctgggggaacacttattccatcctcttaagaactttttgcattttcacaaagggggggttcttttccctcc

SEQ ID NO: 58056 - DNA, 397 bp, Glycine max
  Clone ID: PAT_MRT3847_23436C.1
attttattgaaaatgatctcattggaatgggttgcacactcattgaagacaagcttgactatggagtaccagctcgcatagagactctggaaagagctgggcttaaaatctgagttcttacaggggacacgattgaaacagcgatgaacatagcctatgcatgcaacttgatcaacactgagacgaaccaatacgttattagtccagaaactgatgaaattagagaagttgaaaacaggggtgaccaaatacaaattgcacggtgcattaaagaagtggcgataagagagctgaacacatgcctcgcggaagcacagaactcttttgaatcccttcgcggaccaaaactagcacttgtcatagatggaacatgtctgattgatgctttggatccaag

SEQ ID NO: 58057 - DNA, 167 bp, Glycine max
  Clone ID: PAT_MRT3847_23437C.1
cgacgtgtgagtgatacggtgaggatgcttgaggcgatgcggcggctggatgataagggtagtcaacctgatcatgtttcctacaccactgtggtttcggcacttgtgaaggtgggtgccatggaccgcgctcgtcaggttcttgctgagatgaccaggattggcgt

SEQ ID NO: 58058 - DNA, 222 bp, Glycine max
  unsure (1)..(222): unsure at all n locations
  Clone ID: PAT_MRT3847_23438C.1
anantcacatgcacgcgtacgtaagctcggnattcccgnntngnngnnctcactagtcggcggccgccgagtagtgagcncgtcgacccgggaaanntattccgganccggtacctgcaagcgtaccanctntcnctatagtanttcgncattagancttggcgtaatcnnggnctnngtgtttcctgtgtganattnttatccgcgnacaattccacacaa

SEQ ID NO: 58059 - DNA, 316 bp, Glycine max
  Clone ID: PAT_MRT3847_23439C.1
caccaatggaaatatggagactggcatgggttgggtacgcgctatcttggaacttcaactggacgataactggagcttcattaaaaccacaggaccatatgataacatgcttaacttagcacgctgcgagtgcataagaccacagaccggttatgcaatagtgttgaacacatttgatgccttacatcacaatatggatggctgctttctcaaccttttgggcacctgtgtattgcatccggcctttaaatagtctcttgaatgaggcccaggataatgacttgaatgcagtaagttccaacttatggaacgagga

SEQ ID NO: 58060 - DNA, 376 bp, Glycine max
  unsure (1)..(376): unsure at all n locations
  Clone ID: PAT_MRT3847_2343C.1
ttattctataatanatcataatcataaagaaccttttaaattctaagtaacaccnaccattntcctttttttttctcttttcttcctttccatttttattattacatctttatctttctctcccactcaaaatttttatttttctcaaaacaataacaattacctttaataacatacttaatctaattaacccccatcttacccctctttttacaatcctcatcattcttattctaatcccaattatctttctttacattcaaccaaaatccattttaatttcaccccttctacaaactattactttacataaaaacatgaccattaatcataccaaaaatctcaaaaaaaacctttttaattttcccctttttta

SEQ ID NO: 58061 - DNA, 241 bp, Glycine max
  Clone ID: PAT_MRT3847_23440C.1
cttcctcgttgtgttctgttctgtgtcgtgtgtacagctctttctgctctctctttcttctccaagcgattcattcaattttcaattcggttcgatcgcattcttcttctgcattctcgattcctccctgtctcaacaactattctattctgcatcttggactacctctctcaccagccagctagggtttctctccgacgttaggttttattgttcgatgctcggcgggatattgggggca

SEQ ID NO: 58062 - DNA, 186 bp, Glycine max
  Clone ID: PAT_MRT3847_23441C.1
tcttaccaagagctcttgcccgcactcgaccagatcgagatcaatagaagaggagcgagtttatgatattgctatgcagccctagctcatggctcctctgatcctgcatggcggagtctctcgcagagattcctacaagacacttattgctgtggagtatgccaggcgtccaatttgactgagccc

SEQ ID NO: 58063 - DNA, 403 bp, Glycine max
  Clone ID: PAT_MRT3847_23442C.1
agccttccgttgaaccttccgtgaaccatcaaagcccactagtattgattgatacacaaccactgacgggagcatactgaggacagagaagaatgtccactatcacattgcctaaaaccagaagactatgcctcacataagatctcagcactatctctacaccacctacaacagacccataatgactttattgataacagctgagctgcattcaactgtataatgaaaatacgtggtaggtattgtatatggtgctaaactaacatcttcttggctgagttctgaagaatataccatccatgcatgtctttggcatagtaatggtctgactttggatatggatattaccaaaacttattatggacacaaggtgaacttgatgcacgcatgacacatgcaatga

SEQ ID NO: 58064 - DNA, 268 bp, Glycine max
  Clone ID: PAT_MRT3847_23443C.1
ggccggaaaaaaaccagttgtttggaacctaaaaggagggaatgggtttcttaatggtcttcttcccaagtttttacaccctcaaaccttcccgtgcccggattgtttgttcatttaccggccctaaattcattggttgctttcccaccagggaaaaccaccattgcctttccttcatttgttgccaccgttgaagaattccatgcattccggtgttggcacccattgggaagaagaaatttgagaattttttcttctttgccgaact

SEQ ID NO: 58065 - DNA, 463 bp, Glycine max
  Clone ID: PAT_MRT3847_23444C.1
cgcaaaagaaaaatgtcttaaactatcaatttgaactaattatatggtttcaggctctagccacttgacagcactgcaaatatcaacatgtaaacatttgttttatacatgtataagaacacacctagagattcttaaaggtaaattaaaagtccaaatataactcaaaaacctattgaaaaatataatattagaaaattcctcaacggttggcatctcagttccccatccataaatattgctgcttgataccatgtctcaagattaagcaactcaagcattatcttttgagataagacctatctctgccaattgaatgttaccacttagcagtgatgctttgtcaggtggcaagaaggaaaacccatcaagaagcttcagacactttaagccccattttcccatcaaaaactcaataaggtgatgcccacttcggttatggtatgaggttataaaagttgac

SEQ ID NO: 58066 - DNA, 536 bp, Glycine max
  Clone ID: PAT_MRT3847_23445C.1
ttgggggggggggggggacatagctaagtattataagtatagggacggggccagggaagcgaatggcggaaaaaacgtacacatatgatggagtatataaagggagaaacaagcataaccggaactataaacgtactagtagcagtaggagatatcgaagggtggtgggtggtggcggtggcgataacaagcggcttgttaagggcgaatagggcgttgtaattataataacttcagggggcgctacttgcgttacttttgttgcatgccgtggccagcaggggcaggcggcagcctgtgcttggccgcgtacgcgtacttacttgggcggggagagtgtggctgaggccacaacaaaatggttgttatcgggacagggcgtgggctatgacgggtaaacaagggcagtttagatgtagtacttacgctggcctttggcgatcgagctatcccttggggctgggtagttagagtactgagcggttttattacgaggggcggaataggcgtgcaactagcggctgtaagaggctcaa

SEQ ID NO: 58067 - DNA, 184 bp, Glycine max
  Clone ID: PAT_MRT3847_23446C.1
agagtggtttcagtgagtgatcggtgttcacttgatcctgcataagtcgtcatcatgattattatcaataccggttgttggaagaaaatgccgttcagaaacatcgccatcggagggcctgaagaggctactcaccccgacacgttgaaggcggggttggctgagttcatctccaccttgatct

SEQ ID NO: 58068 - DNA, 254 bp, Glycine max
  unsure (1)..(254): unsure at all n locations
  Clone ID: PAT_MRT3847_23447C.1
acaatgtgtcctgctgctcactgctagacctcttattgctacgctatgtcatcttgnnncctgcatgacctcaggcacaagacccaagcattgcaattcccagatctgnncagaagacaccagaattactaaagcacataccacaaaaaaaaaaaaaaaactcgagggggggcccggtacccaattcgccctatagtgagtcgtattacgcgcgctcactggccgtcgttttacaacgtcgtgactgggaaaac

SEQ ID NO: 58069 - DNA, 314 bp, Glycine max
  Clone ID: PAT_MRT3847_23448C.1
aaaccaaattggaattcattttactgggaggggggaattggaacataaagggggagaacaaccaaacttttaagcaaaaggccaagtggttttaatttttctaggcaaaaatttttggggccccaacgtttggttcccgggatttccaataaccggggttccgataactaaactcaaaagccacgtggttaaaacattagaaaaaaatttggttttgaaaaaaaaagccttaaacactggaattggttttttccaaactggggggaacttctcgcccaaaaataaaaagcaggggctgacaatgtttttaaaga

SEQ ID NO: 58070 - DNA, 529 bp, Glycine max
  Clone ID: PAT_MRT3847_23449C.1
tagctcgctcctaggcagttctgtttaggtagcacgttcagatgccccctgggtggccgcagatcacgtgggccacgtgatccgccgagtgacgttaaataataaaacgaaacgaaacgaaaaccaaaccaaaccaaaccctccaccttctccgactccgccggattccgctttactccaccgcgacaaaaaaaaaatttgggtattctgaggagaggggggaaaaagtgagtagaaaaaagacatgaccgacgcagggctcgaacctgcaatctcctgattcgtagtcagacgccttgccaattgggccagccggcctgtaaatgaatataccttcttagcctctggttctataacggaagccgaatgcagagtagaataggtcaattgaggtatattcatggatgtcaacggagactctgctcaactggtcggttcatgatcgcgtcggtcaaatgcacagtaaattatgcgtcgtttaatttgtaaacacaagacatcatccaaggaaatatgctcatcggggaaa

SEQ ID NO: 58071 - DNA, 366 bp, Glycine max
  Clone ID: PAT_MRT3847_2344C.1
ctcgagcttgttgcagaaaaccctcatccatggtggggggttttattaggataggcgttggcaaacatacatccagaagaagatatagtattcaattgtgattcatgtgatggtattaagagaagtgcattatctgatttttatcattttttttttcaaccttttcgaaacaatacttttttaatatgaatttttattaattgcttttcttgatactccattaccttattgacattttcttaatttataaaaaattttatttaattttttttttatgtttttattttttttaatctttcttatctttttttatttattttttttctatttattcttttatattattagtcttttatcatttttttt

SEQ ID NO: 58072 - DNA, 376 bp, Glycine max
  Clone ID: PAT_MRT3847_23450C.1
ctaccgtttttttcgcctccgccgcagcacctcaggtgccccgtctccgaggaatcctcgccaccctcccgcaacacctactcctgggacgagcccttctcgccggcgtctacgaagctcctcctcatgtgcagctacagcgtccatatcttcccccgcccccactacaagttcctctgctacgtcgtctgcgacactctcattatcgtctcctaacgcgccatctcacttgcgtacctcttcactcgcctttagaaaacattcctgaatgtgaagaaccttaacgctcaattaccatactctctactaggtcctctaattccttatctttgttaccaccgactaggatccttataacatttatctattagtattt

SEQ ID NO: 58073 - DNA, 507 bp, Glycine max
  Clone ID: PAT_MRT3847_23451C.1
cacgcgtccggagatttctgcgtgtgatcggtgttcactagatcgtatcataagcggcagcagtgattgaagaagatgccgatcagaaacatctccgtcggaaggcctgaagaggcgagctcagcccccacacgttgaaggcggctttggctgagttcatctcaaccttcatcttcgaggtcgccggcatcaggctccgacatcgcctacaacaagctcaccgacaacggagctgtcacccctgccggcctcatctacgcctgcatcgtccatgcatgtcatcctctcaggcgccgtgtgcgtcggagccaacatctcagacgggcacaataaccccggctattgcgtgcatgcctgtcatttcttctgaatgagccttgcttgggagggaagagctcaaaagggagcggctccgacgatgaatcgtggggcttcctcctcctggacgtagaaaacgtctgcagtgtaccatccgtaggactctacgctggagatggaacagccaac

SEQ ID NO: 58074 - DNA, 468 bp, Glycine max
  Clone ID: PAT_MRT3847_23452C.1
gggtctctacaaaattctagtttggtcacctattatcacttccgatcgcgagttcgagattacaacttttcttcgtggttttgggtatgacccactacagatgactacttggttgttctagcctcctacaaccgaaattttccgcaagatgaacttgtaacccacttcgagtatttctcacttagagctaatacttggaaagcaactgacggtacaggtttctcttacaagcaatgctactattataatgacaaccaaatcggatgcttctccaacaatgctcttcattggttggcttttcgtttcgatgaatcgttgaatgttattgttgcctttgatttaacgaaaaaagtgttttggagatccctctgcccgttcttttggagttcggaaaccttaactttgtattttgagggtacttggggaattgttctgtctatgtgctgtggggctggaccgatcagtaga

SEQ ID NO: 58075 - DNA, 1764 bp, Glycine max
  unsure (1)..(1764): unsure at all n locations
  Clone ID: PAT_MRT3847_23453C.1
gcgaaatttaaggtcttttctttcctctttcctaatattctctatctggttgcctgtaagattgagaacatggatcgcagagttgtatcgttgaattgagtcttaggttttgcagtttccgggattctgtacaaggttccatttctgtgttgaacttgattgaagttgtcacgggaaatatggattctttgagcatcggagataacaccagtaattatttccatgctctgagccagcaatcattcccaggtccgttggttggcgggagtgttggaagtaaggaactgtacaaatggttagatgagaggattgcacactgcgaatcacctgacatggattataagaaaggtgaaaggttgagactccttctttccttgcttaaaatcggttgtcaacattatggaaagctacgttctccatttggcacggacaccatactaaaagaatatgatactcctgaatcagcagttgcaaaactttttgcatctgccaagacgagtggcactcaatatgggatgccaagccactgcttgcaaaatttgccttctgaacgacaaattagggcaatggctcttgaggttcaaaatcttcttgtctctggcaaaaaaaaggaggctttacagtgtgcacaagaaggacaattgtgtgaacctgcacttgttcttgcttcacaactgggtgaacagttctatgttgatacaatgaagcaaatggcacttcgccagctagttgcaggatcacctttgcgcacattatgccttctaattgctgggcaacaagctgaaatattctctactgatacctcaattagtgggcatcctggtgcttctgatatgtctcagcagtctccacactttggatccgatggtatgcttgatgattggggagggagaatctggctgttataactgcaaacagaaccaaaagtgatgaacttngttgatgaacttgtaattattcacctaggtgattgcttgtggaaggaaagaagtgagatagcgcaagactctgtgtaattggagcagatcactggaaatgtcctcgaacttatgctagtccagaggctatccagaggaccgagttatatgaatattcaaaggtggttggaaactctcagtttactttgcatccatttcagccatataagcttatatatgcatttatgctagctgaagtggggaaggttccagactcattgaagtactgccaagcactactgaaatccttgaaaactggccgtgctccagaagtagaatcatggaagcaattagcactatctcttgaggagaggattagaattcaccaacagggtggatatgctgcaaatttagctcctgcaaaattagttggcaaattgctcaacttttttgatagtactgcacatcgagttgttggtagtttaccaccgcctgctccttcgtcatcacaaggaactgttcatggaagtgaacaacaattcaaaaatatggcacccagagtatcctctagccaatcaacaatgtctttggctccatctgcttcaatggaacctattagtgagtggacagctgacaataatagaatggcaaagcctaatacaagtgtttctgagccagattttggtagaaccccacgacatgaaacgatgtcacctgatgcacaaggaaaagcacaggcctcgggagggcctctcgcttttcccgctccggtctgggcgtccgcccctctttctgaccgtctcccctgcgcgggttgctccgtcgtgcgcgactacccctctcgggc

SEQ ID NO: 58076 - DNA, 1289 bp, Glycine max
  Clone ID: PAT_MRT3847_23454C.1
tgaagtactgccaagcactactgaaatccttgaaaactggccgtgctccagaagtagagtcatggaagcagttagcactatctcttgaggagaggattagaattcaccaacagggtggatatgctgcaaatttagctcctgcaaaattagttggcaaattgctcaacttttttgatagcactgcacatcgagttgttggtggtttaccaccgcctgctccttcgtcatcagcaggaactgttcatggaagtgaaaaacaataccaaaatatggcacctagagtatcctctagccaatcaacaatgtcgttggctccatctgcttcgatggaacccataagtgagtggacagctgacaataatagaatgggaaagcctaataggagtgtttctgagccagattttggtagaaccccaagacaggaaacgacgtcacctgatgcacaagaaaaaccccaggcatcagggggtacatctcgcttttcccgatttggttttggctcacaacttttgcaaaagacagtagggctagtcttgaaacctcgctctggtcgacaggctaaattgggtgacaaaaataagttctattatgatgagaagctgaagagatgggtggaggaaggtgctgaagttccagctgaagaagctgctgctctgacaccgcctccaacaactgctgctttccagaatggttcaactgaatacaacttgagatctgcattgaaaactgaaagttcacctcctattgagggctctagcataagaacttctagccttgaacttagtcccgggatgccgctgataccacccagcgcaaatcaattctcagcccggggtcgtttgggtgttcgatcaaggtatgttgacaccttcaaccaaggtggtggaacctctgcaaacttgtttcggtccccttctgttccatccgtgaaaccggctgttgctgccaatgcgaagtttttcattccttctgctgcaccatcatcaaatgagcagacaatggaggctatagtggaaagcaagcaagaagatagtgcgacaaatgaagatccttcaacatctgccacaaatgagtggtggtcataccaatcccctaaacaagtatcatcaacaaccatacaaaggtttccaagtttgggtaacatctcaaaccagagagcaacagaaggaagtaactctcatttgcctcattcacgtcgaacatcttcatggagtgggaagtttaatgattcatttacccctccaaaaatgggtatgccctcgtcaagatttatgcctgatgaatcttta

SEQ ID NO: 58077 - DNA, 696 bp, Glycine max
  Clone ID: PAT_MRT3847_23455C.1
ggctcgagctcgagccgattcggctcgagggtacagacactatactgaaagaaaatgatactcctgagtcagcagttgcaaaacattttgcatctgccaagatgagtggcacagagttccctcaatatgggatgccaagcaactgcttgcaaaatttgccttctgaaggacacttgcgggcaatggctcttgaggttcaaaatcttcttgtctctgggaaaaagaaggaggctttacaatgtgcacaagaaggacaattgtggggacctgcacttgttctggcttcacaacttggtgaacagttctatgttgatacagtgaagcaaatggcacttcgccagctggtttcagggtcacctttgcgcacattatgccttctaattgctgggcaacaagctgaaatattctctactgatacctcaaatagtgggcatcctggtgcttctgatatgtctcagcagtctccacaggttggatccaatggtatgcttgatgattgggaggagaatctggctgtaataactgcaaacagaaccaaaggtgatgaacttgtaattattcaccttggtgattgcttgtggaaggaaagaagtgagattactgtcgcacacatttgctatttagttgctgaagcaaacttgagtcatactcagatagcggaagaatttgtctaattggagcagaacactggaaatg

SEQ ID NO: 58078 - DNA, 906 bp, Glycine max
  Clone ID: PAT_MRT3847_23456C.1
gactcgtcgaccgcaaaagagaaaaaaaaaaacaaaaatgctgagaatcgccgcaagcgcaaagagaattgttcaaacggcgtcgttggaggcgccaccgttggggattagggttctgccgcgtctctaccacgagagggtggtggaccactacgacaacccccgcaacgttggatccttcgacaagaacgaccccaccgtcggaacgggtcttgttggtgcacccgcgtgtggcgacgtcatgaagctccagattaaggttgacgacaaaacggggaagatcgtcgatgctcgcttcaaaaccttcggttgtggatccgctattgcttcttcctccgtcgctactgaatgggtgaagggaaagcaaatggaggaagttttgaccattaaaaacactgaaattgcaaagcatctttcacttccaccagtcaagcttcactgcagcatgcttgctgaggatgctataaaagcagctgttaaagattatgaagctaagcgtgcctcagcatctgctggtggacagactacaactggagagaaagctgccactgcttgattacttccatttctagaacgatgatgaaaacaaccaatagtatggttttctgacaggactcaatgaacactgtatgaacatcttgaggtcagacttctcttggttggagctagtcattgtgattggattgtattaatgtgaagtaaatacttgtgtcgctagctgtagtttgttatctgcatggtttatagaagtcaaaccatgtttttattaaaatatgtacacaatagaataaagctatgatatttacatggggaacttggaaccatgtaaatacctttcctgaagtaaacagcgactcatatttaccctataaaggtttggaccttatgtttatctgttattcaacc

SEQ ID NO: 58079 - DNA, 148 bp, Glycine max
  Clone ID: PAT_MRT3847_23457C.1
ggagtcgcaggagaagaacgcgattgttgtgaaagttatggggcgaagaggatccagaggaaaagtaacccaggaaagagtgaaatttttggatgatcagaaacgaaacatcatgaggaatgagaaaggtaatgggggagaaggagag

SEQ ID NO: 58080 - DNA, 518 bp, Glycine max
  Clone ID: PAT_MRT3847_23458C.1
agcgcttctaaatgaaatgtccaaaacaccctcatcacttagaaacccctcaagttgctctctctctcaaacccaccaccggaacacacctccgccacctccccaatcatcaaacgacgcaacctccctctcctccgccaccaccggaacacactccacactctgcaaaaccttctctttgtcgcatacaacggggatcgattaagatctgcaaggtggcagaccatcgtcagcgatctgtcacgcagccaccaaaatctagcaaagccgccgggcacgcaccaaaccttgacaactccgtcacacatgcaccaaaccctgacaactccgccgcgcacccgccaaaccctgacaactccgtcgtgcacccaccaaaccccgacaagcccaaggcacacctaccaaatcctgacgagcccgaggcacacccaccaaaccccagtttatgaatcgttgttggatgcgcgagttgggtttgattcggtcagtggggactgtggcgagttgggatccctgtg

SEQ ID NO: 58081 - DNA, 237 bp, Glycine max
  unsure (1)..(237): unsure at all n locations
  Clone ID: PAT_MRT3847_23459C.1
cgcacgcgtccgattcttcaacccttttattgccaacacgcaatcgcagcangcgggtagcttttataaaacttgagcctgccacaaccgtgggccctattacagcagtaacccttggtgcatatgtaggcacaaaacatcaatgcacaacaactacaacaacaagtgctaggaaacctagctgcctactctcagcagacagcggtatatgcaatacaaccaacatgctgcatagaa

SEQ ID NO: 58082 - DNA, 552 bp, Glycine max
  unsure (1)..(552): unsure at all n locations
  Clone ID: PAT_MRT3847_2345C.1
tcgatctatcgctagcaatgtaccagagtaccgtgcaccgtgcctaaactatgattttaaacctggtactggtgcggtttagcctcggcgtatgcactgtgcggattaataataataacttggtagttcaacttggtggtaccttatgattttgatcttaattaaacaccatttgtggtattatcaacctacgcgtaaatgttaacttgtaaagtaagctagtgggcaaccacaacctacggcttccatgtatactactggtgcgcatactagtgagccgccggttccaccgcctgtagctgctgccagagcacggtgttttggtttgaaacaatgggtgatgtactagtgggctgccgccccggcggtgactacttagagggccacttcggaggccccgggttaatgggcagttccggaacacaatgcaaagtagctagctgttaagctggggtaggggtgtgtgtgtgngggtatgtggtggtgactggtggcaggtagctaacggagagctaatgccggtgcggagagctagatgagtgagagtttact

SEQ ID NO: 58083 - DNA, 954 bp, Glycine max
  unsure (1)..(954): unsure at all n locations
  Clone ID: PAT_MRT3847_23460C.1
gactgtgcaaattgttagggtttgcaacctcaatttgctctgaagaatctccatctttccatcgacgatgaagaagaacgaggaacgcagcgataatcagagcatgaagaagaaacaaataatgatgaagaagaagaacgtttcgaggttgggcggaagtggcctttcgctcaacgctttcgccaacgcaaaattcaagaacaatcactataacccagccatcataaagaagcaaagggagttctataaaaatgctaagaatgtgaataagtttaagaagttggtaaagcagcaaaaccagcagaatgaaccctctttggctcagagacatatagagaatgtaaatgaaactgaagagaacaaggacgatagtgagaggaggaagaggaagaatagtgcccttagtttggaagagttgtacaagaagcagcatgaagagaaggagaaagaaataatggagagagaggctgtcctgagggtaaagaaggaagagagagaacaagctgaagctcggagaaaggctatgcgagaaaaaatgcttaagaagacacgaaaagggcagcctgttatgaaatacagaattgagcatctcttggagactattcaaggttcaactaaaaatgcagctggcagtaaatcctgagtcgtggagtagaaaaagggccaatcgtgacgtctattcggtgagccagcttgagtagaacagttactgaggaacgatgctctgcttaatgatatattgactttagcatatttgatgggtgcagtatactgttcatcacaattttgtttgtaccaaaattgatgctagtaatatttatgtagcagccgtgataatcactgtaagcagtgagtacattaagttgccatttgcgccaatatagaaacagataaatatgaaatgcggaatgtttatcatgcaaactttcttctatttnaaaaaaaannannnaa

SEQ ID NO: 58084 - DNA, 300 bp, Glycine max
  Clone ID: PAT_MRT3847_23461C.1
gaattgccggatcgacccacgcgtacgcccacgcgtctgatacctcagtattgtcgtcatagacctgtttatcaaacgtgcggagtgttaaattcctataccgaactcaaccccctggttaattgcaccttgccttttgccggagctctactgtgacatgctgaaactcttattccgctctctatactaacaagcctattgcgaacgtgcctcgtctattggtggcgtcgggaatgcgttaaactgcgacctcagtggaggaaactccactaacctctcctcctaagaagtgttggccga

SEQ ID NO: 58085 - DNA, 628 bp, Glycine max
  Clone ID: PAT_MRT3847_23462C.1
cattcctggagtttacacattaatagtatattttgtttgatttgttgctaaaagagtatctccattgccgtgtttgatgtttgacagtttgagaaatgccatggcattagcaaaaaactatatataagattggactttcgtaggtgaacttaatgtgaactaatccctataattatacttataatattcttattcattgctgcagtggtttgacacagacaaattacaaagaattgaatgtattgtacgagaagtacaagaatcaaggtttgtcactttactgaaggacaaaaaaaaagaaagaaatatatgtcaactatatttatgagctagtgaatttttaacacagaattctaagttgtctccaggatttgaaatcttggcatttccatgcaaccagtttgctggacaggaaccaggaaacaatgaagaaattcaggaagttgtttgcacaaggttcaaggctgaatttcctatctttgataaggtgatttctgataaccacgatgtcattcacaggtgtttccccattttttatttggaactctgttagttgttcacctcttatgtgtactaacctattcctgtctggaatgctgtaagtttgcctgcattggcactatttatg

SEQ ID NO: 58086 - DNA, 384 bp, Glycine max
  Clone ID: PAT_MRT3847_23463C.1
ggctcgaggaccgacctggatatcaggtgtaaaatttttgaaaaagaaacaaactgtattgacattatgggcatacatacgtgaatttgggagacgatgtaggcaaaatttccactgaaaactcataaccctactggtatgttggcgacttctgatgcaagtgtgactcacgagccctctaggaactatatcgactatgatttacctgactggatcattacacttagtaataagctatctcatattgaccttagctgaatttctgttaagagtcatatacccatgcctgtggcagtgcttcaacctctgaaagattcaggaagggatgacactgcattcactggagctatgccaaatggaatgccagaacatacccatgtgcag

SEQ ID NO: 58087 - DNA, 360 bp, Glycine max
  unsure (1)..(360): unsure at all n locations
  Clone ID: PAT_MRT3847_23464C.1
ccggcccggaacggcccgggttttttccattcgacgcgtctcacgttcttcgnaaaagaggaggaagcatcagagattcggggacctattataaggagcagacggagcgcgatcccatggacaccgacgacgacacttacaccgcctgtcctgacaagggcaacagtgacgactggcgcggacaccctactcgcggcggcaaggacattccgagagtcgataaagaccgtcctcaagccctcgacgacgtcgctgctcaccgggacattgacgctccaatggataggctaaccacggagaactgatggcccgatccacagacgtatggtcctgacggcacgggcacaacatgaacgattc

SEQ ID NO: 58088 - DNA, 791 bp, Glycine max
  unsure (1)..(791): unsure at all n locations
  Clone ID: PAT_MRT3847_23465C.1
ccacgcgtccggcagggtgttattggtgggtgtagaaagtagcagaaaatggctgtgatcccgtgtcactgttaccgtaccgtcggatcagacaaaccctacctctccggtcagagtctccgccgtcgcgctcctttccccgccgtctctgtttcatttcgacgccgaatatcatgcgtcgcctcttctgccatcgctcacaaagttgggctgaaagattttcttcacttagatgattttgataaggacactattctgaagatgctggaccgggcacttgaggtcaaggccttgctgaagtcaggggacaggtcgtttcgaccttttgaggggaagacaatggcaatgatatttacaaagccgtccatgagaacgcgtgtttcgttcgagactggctttacattgttaggtggccatgctatttatttaggacctgatgatatccaaatgggcaagcgagaggagactcgtgacattgctcgtgttttgtctcgctataatgacatcattatggctcgtgtttttgctcataaggacatacttgatcttgcaaaatatgcaactgtgccagtcatcaatgggttgacagactacaaccatccctgccagataatggctgatgcccttaccatggttgagcacattggtcggtttgaagttgagaaggcaaggaaagctggaatcagcaagattgagataactaatgatcccaaagaggctgttaaaggagctgatgntgtgtattcagatgtctgggccagcatgggccaaaaggaagaaagctgataccg

SEQ ID NO: 58089 - DNA, 1396 bp, Glycine max
  Clone ID: PAT_MRT3847_23466C.1
tgcactacggctgcgagaagacgacagaaggggaaaagtaaagagaattagcagggtgttattggtgggtgtagaaagtagcaggaaatggctgtgatcccgtgtcactgttaccgtaccgtcggatcagacaaaccctacctctccggtcagagtctccgccgtcgcgctcctttccccgccgtctctgtttcatttcgacgccgaatatcatgcgtcgcctcttctgccatcgctcacaaagttgggctgaaagattttcttcacttagatgattttgataaggacactattctgaagatgctggaccgggcacttgaggtcaaggccttgctgaagtcaggggacaggtcgtttcgaccttttgaggggaagacaatggcaatgatatttacaaagccgtccatgagaacgcgtgtttcgttcgagactggctttacattgttaggtggccatgctatttatttaggacctgatgatatccaaatgggcaagcgagaggagactcgtgacattgctcgtgttttgtctcgctataatgacatcattatggctcgtgtttttgctcataaggacatacttgatcttgcaaaatatgcaactgtgccagtcatcaatgggttgacagactacaaccatccctgccagataatggctgatgcccttaccatggttgagcacattggtcggtttgaaggtacaaaggttgtctatgttggagatggaaataatattgttcactcatggttgttgatggcatctgtaattccgtttcactttgtctgtgcgtgtcctaaaggatttgaacctgatgcaaaaacagttgagaaggcaaggaaagctggaatcagcaagattgagataactaatgatcccaaagaggctgttaaaggagctgatgttgtgtattcagatgtctgggccagcatgggccaaaaggaagaagctgaataccggcgccaagtttttaaaggatttcaggtgaaccaaaatcttatggatttggctggttcaaaggcatttttcatgcattgcttaccggcggaaagaggggtggaggtgactgacgaagttattgaagctccaaattcaatagtcttcccgcaagctgagaaccgaatgcatgcacagaatgccgtaatgcttcatgtacttgccaagtagatagctgaatgaatgatcatctgaggtttttgagcaatattagcgtgcactcgcaatagttggttttaggccttcagctagtgaatacactttgcaacagttagtttttggcattcagcagtatgtatgttcggtctagtaagttggatttttgagttgcttcggtattattactagcaattgaaaaacaggtaaatcgtataaagatgctagtattgggttttctttttcc

SEQ ID NO: 58090 - DNA, 1568 bp, Glycine max
  unsure (1)..(1568): unsure at all n locations
  Clone ID: PAT_MRT3847_23467C.1
aataccaagacagngacaaggcaagntccatttcgttgcgccgtgttttgtttctctctcgtttcagttctgtagtactgtagtagcacacaaagaaagaagaatatcatggggatactgcacgacgacgtagtgataatcagagagccagagaaagaaggtgaagcaaccgtcataaccgtcaattgccccgacaagaccggtctgggttgtgatttgtgtcgcatcattctcttcttcggtcttagcattgtccgaggagacgtttccaccgacggaaaatggtgctacatagtattctgggtggtggggaagcaaaggacgaggtggagtttgttgaagaagaggctaattgaggcgtgccctacttgttcttcagcttctggaattccctattaccgttcagaattgcagcctcctaaaccaccaaatgtattccttttgacattttgttgccacgaccgtaaaggccttttacacgatgttacagaggttcttagtgagctagagctcatcatacacaaagtgaaggtgtctactacacctgatggcaaagtggtagatctgtttttcatcacggatacaagggaacttctacatacaaagaagagaagagatgacacaattgaacagttggcagctatttgggggatcccttaattgccattgactttgagttggttggcccagaaaccgctgcttgttctcaagcatcttcattccttccaagtgcaatttcagaagatatgtttgatttggaattacctggttcatacgaagtggaacttccacatcagattctgtttctattacgatggacaattcgctgagtcctgctcacacgcttgtccaaattatatgtcaagatcacaaaggtcttctttatgacatcatgagaactctgaaggactacaatattcagatttcttatgggagattctcaccaaaacccagaggaaaatgcgagcttgacttgttcattgtgcaagcagatgggaaaaagatagttgaccccagcaagcagaagtctttgtcatcacgccttaggatggaactacttcgtccgctcagagtaactgttgtaagcaggggtcctgatacagagctgctggttgcaaaccctgtggagttgtcgggcaaaggacgacctcttgttttttatgatattactcttgctctcaaaatgcttggcccttgcatattttcggctgaagttggaagacatgtggttggagaccgcgagtgggaagtttatagaatcttgcttgatgaaggggagggtttatccattccaaggaataagattgagaaaggagtttggaagatgttgatgggttgggagtgatccatggctggtggcattgttcatcttggatgaacctgtgcccgtgtacagataacatggttataatgtagttatgatatgtaacttgtaattatgaaatgtatatggtgcagatgttggtctttgccacgctatatttttcagagctcttgtaattttaacctagtatagaaagaaggactagcaactagcaagtacaggaaaaaaaggagaaagactggca

SEQ ID NO: 58091 - DNA, 514 bp, Glycine max
  Clone ID: PAT_MRT3847_23469C.1
ggaggggaccctgggttttttctcaaccgtttttttagggggttaaaaaaaaaaaaaaaaaaaacctgggttttttctcaaccgttttttaaagagataagggggggagatcttccccctttttttaaaaataatacagggtgggcccccccccccaaaggctggcaaatcaagcttttccccaaatgcggggggaagaaatttacaagagaaatccacctgcctgagaacatttttggtcctttaattaaaaaaccggccctggttacctttataaattctcatttaaaaattttaagccttttatggggattagggtaacggggtcaacgggggggtaccagccgggcccctttggggggggggccttttgggtgttttgccccaacttgggagggttttatcctccaatccaacttaaattttgttaacctgctggatcaggggggggctattttctttgggtgccaccgggggcgggggggacgggggaatttgcacccggggcctcccc

SEQ ID NO: 58092 - DNA, 434 bp, Glycine max
  Clone ID: PAT_MRT3847_2346C.1
gaaaaacactatttattgtgccaagacaacaccatctgaatcctacaagagcaatatgacaagccgggccactgtttgttgcatggatcgatttcataaacattctatagctatatttccgaatttgaggaatggagcaggaaattaagaatcgctcgttcacttcagacttgccaagaaaaaactataaacgaaggcgtggacgaccttacactgcatacgaaacgagctgcattgcctgttcgcatataccagtcatagcggcttcaggtgcataaacctcattggggatgccaatatgctctacaagcgcataaatacaagctagacccttctggtagtagtgaccccctctgctcacaaagacgagcatccttgctgctatcaatatagactccttctgcttctatgccgagatattaccactgattgtg

SEQ ID NO: 58093 - DNA, 354 bp, Glycine max
  Clone ID: PAT_MRT3847_23470C.1
tacattaaaaccaataatctaaaagaggggcgctttgaaaacaggtaaaaaacaaaatattgacacaatttcataaattaaacaagttgagctcataaatggtcgaacaggcaatacaaaatgaattttttttaaacaaaattcactattatgagaaaacatatgctacgaaaattttattaataacagtacacagaaaaaaaataataccgaaactggtgctcatgacagacaaaaaaatcattacacctttctaaagagaaatatggccaaagaaaccatatatttcatcaaaacttggatatttttggtatgaaatactataatatttgccacacctgcttttcaaaactt

SEQ ID NO: 58094 - DNA, 384 bp, Glycine max
  Clone ID: PAT_MRT3847_23471C.1
tttatttaatttttctatttttttttggtaagaatagacaatttattgtatgtatattattttaacctataattattactttcggaaaggtaaaacaaaaaaaaagaccattgtgcagtaaaaaatggaaattgaaacaccgtctaattaattcccaacacattaataaacgaaaaaatggtgccctgcaggttttcacaggtccatccttcctgacataagggggaaaagaaaagaaccacctctaaaagtgaaaaccccacaggcatatattgaagattctttaggaattgttgcaagagaggggcaataacatttatttgtggagctgcaagcccccctctatatgggggagggagtgcaccttctctttttataagaaga

SEQ ID NO: 58095 - DNA, 693 bp, Glycine max
  Clone ID: PAT_MRT3847_23472C.1
gtagtaactcggaatgagagcctaacaattgctcagtttcctaagcattaatgactagttctaacaaaaggcttgaggttcaaacagaagatcaaactccacataaatggtgtgtttcactgggggaagaggctttcaagagatttttcagccagattaatccaacagtgcataaggtttttggtgatggatcacttttcagtccactgttgtttgggaagttctttgatccttctgatgccttccctctatgggagtttgagtcagatgtgttgttatctcatttaaggagttccagccaaaacactgtggattggtgtcagacaggtgaaggctatgtattaaaagcagaaataccaggtaagacaaccagtttttcattttactcttacttgtaagctgaatctatggtaagcaaattatgatacaatgaaactgccccatcatattgaagacctgaaaaaaaaaaggatctcagaattgaaggagctattgcttatactttcagcacctaaggagagcttttatcttgcatcgaaatttttctttaccaggttatagtaacaacaggtaataataacctatgaataaataatatatgcagactgtcatctaataagaaaccatcatgataagtttggttaaatttataataactactttaaaagtcataccaaaaatatgatttctgat

SEQ ID NO: 58096 - DNA, 395 bp, Glycine max
  unsure (1)..(395): unsure at all n locations
  Clone ID: PAT_MRT3847_23473C.1
agaagcngcggggggctcgagctagagcccttcgatcctttccattttgtacttcacacaactacnacaaaggcgggcgtactatcaaaactggtcgcacccatcccaanncancaaaaccacnacnatgaacagggtcccaaggtaaacaactatagcaacttttacaagcaaaccgactaataccgcaaccctgttcatactgctaatgtcacctattatacccaccataactactgctgccggttacactgatgacataaataaccaacatgataccaccaatacttaccgtgttaacactgttatacaccattctactgtttgctacaatggtaacactaataaacattatcgaactactgatgtctataatcatgacaccaatccacatc

SEQ ID NO: 58097 - DNA, 291 bp, Glycine max
  Clone ID: PAT_MRT3847_23474C.1
aatctcgattattctatgggttttctttcctgtactacttaagtaacacttgaatggtttctttagagtgtggggcagcctaacattgcattaccctccacacaaaccagtactggctcaaagagacacccagagacattcatgggcaatcccaaactatttttctaatccgccgatacaccataaccacccaaagctgtaaaactagagggcacatctcaagggaacaacatcaaattctgagcatgaaacacccataacaccagatcctaacacactcataactccttc

SEQ ID NO: 58098 - DNA, 227 bp, Glycine max
  Clone ID: PAT_MRT3847_23475C.1
cgccacgccccacgcatagcgaaagtcgggcaaataggtttctgaaatacagcttaccaatagcctttaacccatatgggtacggtcttatgactctcctgaaaaaacaccgcgagccttcaatactcacctttactgtctacgtggccagcatgccaatttcaatttccgcaacacaccttgcaacatggacactaccaatgctccttaccaatctcttaccccac

SEQ ID NO: 58099 - DNA, 349 bp, Glycine max
  Clone ID: PAT_MRT3847_23476C.1
gttattcaagaaaccatttacactggatgatgtgaattacgaccccattacatattcatatggataaacaaacttccaaggcaaaagccatttgtgtccatcacgaagcatatgagggtaattatctgcatacctgcgcacctcagtgactacagacttcttagactcgccgggtgagtatcttgtatgaatccacaccacattatcatagcttgaggacattgcggtgatgagctagaccgacccatacagtgtcattggcacaatgcctaaaaagtattgtgagattatttagcaggcttatacaaagtcccgatttggctcatgactctgtatatctttgacaggt

SEQ ID NO: 58100 - DNA, 456 bp, Glycine max
  Clone ID: PAT_MRT3847_23477C.1
cggtccggggaatccgggtggagccacacgcgcgcggataatatacatcgcaagggggaaaagggctgggggcacatttaaactggcactcctttcccgcacgggtggactgttaagagggagtcgggaaaaggggggatcggaaatatggcgagaagagttgcctgccgacagatcaacaaaggggcggcgcacaccagcgatgtgggcagccgcccgtccatagcagaatggtctggagcatgactacaacttgatgacaatgccaagggatcttgtcatgggggataagacgacaaccagggggcagatgacgacacatggactcaatgctggcctttaaaggactagacttttgggcaccattcctcagaccattacgcagcatagggcgcacccgcaagatggcaacggtgcggacaccagtgaattgtgatactagcaagcagagctttt

SEQ ID NO: 58101 - DNA, 692 bp, Glycine max
  Clone ID: PAT_MRT3847_23478C.1
gctcgctcttcactatcgtaacgcggatcatccttctcgtgtcgatacggatgtggatggattgcttggacggctacgattcattcagggtctgaagttccaggtggacgtgacatacatggagttcttgctgcgtgtaaagcgtgtggaggagcacgcgaaaggcaacggaacctgggatgcacctcacccttggctcaatctgttcgtgtccaagtcccacatcgttgattttgatcgtgaggtgttcaagaagattctcaaggacggagtcgatggacccattttagtctaccctctcttgcgaaacaagtgggatagtcgtcattcagtggtggtgccggacagtgacatgttctacatagtagccttgctccgattcactccaccacccccaaagggcccagcagctgaactcttggtggcgcaaaataatgagattattgagttctgcacaagcagaagccttgatttcaagctatactttcctcactaccagtcacgggaggattggatcaagcactttgggaatcaatgggccagatttgcggagcgaaaggccaattttgatcccatggctatccttgcaccaggacagaaaattttctccagaacctctcaacctcaacctccttctatcacataaccacatcatatatataacaatatacttgtactatccattgtgaaaa

SEQ ID NO: 58102 - DNA, 313 bp, Glycine max
  Clone ID: PAT_MRT3847_23479C.1
gttcgcggctctcttcaaatacgcgacacccgaactcgctgactgaaacgcgcacgcataagggttttgccatgatggcactgtccaaactcgtccgatcggcaatctctctcatctccagatccacgttcctcacctccgagcgatccagtctctaccgattcttcattgaccattccatctccgtcgcctccagaaattacaccaacatgacggggcacaatgacttcacggttaaggtcgcactggctttgtttggacgttcaggatactatgcctgtgcattgtacaatgcatctgctatagctaatgc

SEQ ID NO: 58103 - DNA, 116 bp, Glycine max
  Clone ID: PAT_MRT3847_2347C.1
cttttaggttcaattggctaattaaagtctaaaaatggataagtcgctgtgaaaagcttgggattaactcccgataacagaaactattccttgtccaaataacagaggggagacgt

SEQ ID NO: 58104 - DNA, 318 bp, Glycine max
  Clone ID: PAT_MRT3847_23480C.1
gggggagagcatagagtattctatgaaagttttggacacgctgcatgagtacaaggcgggagggctctatatgaccacccctaaatctcatactccacccatgtatcggatgcgaatctttgcacataatcatgttgtcaccaagtacacgttctggtactttgtatcttaactgaaaaagatgaagaagtcttcttgagaaatcgtctactgttcacaggtattcgaaatatctcccttgcaggcgaaaaacataagcatcaggctgcgctatgaatcacgcaaaagcacccacaacatgtactttgtataccggga

SEQ ID NO: 58105 - DNA, 924 bp, Glycine max
  Clone ID: PAT_MRT3847_23481C.1
gctcctgctccatggtagccttccattttctttcctttttttttggtatttctgtatgagatatccttttaccgcaggtcctatcaatttcttgtgcttatccttattcaacaaaaaaacaagagtaatctctaagcattattgcatatcagccaactaatcatttcagaacaaaaagcatgtagcttgcaagtccattctggccaagaagatcatcacaaaatgttctctgcatctattttttcaagtaattaaatttttaacaagtttgtcatgcttctgcaggttttctttgcccagctcatgcttgctgacatgaataaagaacttaaaggattaaggtttagaactgctgacatgaatgcagtttgatgcactggtcaccagaggactttgaaaaattgcaggaagcaatgaagcagacttatcagagagctatgaaagctgcaactgattttggttatcaaaaagaaagccctgaggctctggtacatggagcagtcatctctgcctttctaaccattgctcaagccatgactgatcaaggctctatataggggttcatatcgcaaagttttgaatgcatccaaatactgatgttaaccaattagcactatggttggaaatctgcattcactgaatagtccagatcattgttgatgctgcagtggaaattgtcaatgataggatgacacactattgccaaagcatatttccttgtaaaatatgtaaaaaaaaaatagacttagaaaagaaaaatatttggaggacaaattttagtttcacaacagaataggcatcctttagtattgccaagaaaaaggagaaattgtccttggcttattaaccctgcttgatgcctgttccaaactgaagaaatatttgaatattcagatttgaaataaaaggttagtgttcaatttg

SEQ ID NO: 58106 - DNA, 2615 bp, Glycine max
  Clone ID: PAT_MRT3847_23482C.1
cgcccctaccggatgcatgatgcggcctcgacactcgtcactcccccctctcccctccatttctgaaatacgaaataccttacaaaacacgcgatcccataaacaatctctaaactcccaattttttcctattctcctcatcattcatactctaaactcaatttcatataaaagtttcattcttttcgctgctctaatctcccctcttttatctcactccaaccacgagatgctcaaaacttccgcttttcaagtttgccactttcgttcgaattctcgagaaagcaaagtattttaaatttgtggagaggcttgtaatgctgaatgttgttgccaaccagtggagtaaggatgaattctgcaatggatgatatgaatttgattcagcaaacccagaggcatcacttggttgtgagggagattggcgaggagattgatttagaaataggagctggggaggatgacccgtcatttggtagcactactctgattggtgcaccgatgcgggaatcttctgtagaagaacatggtgagagcaagcagatggggatgatttctcagcttcctaatgatgctcaagatatgtccaagacccaacaagggaaaaggaagaaaaaggttgttaaaagatggagagaagaatgggcagacacctataagtgggcttatgttgatgtgaaggatggtacaccgaggattttctgctctgtctgcagggagtacggtcggaagcatagaagaaatccttatgggaatgagggcagtcgtaatatgcagatgagtgccctggaagaacacaacaacagtttgctttacaaagaggctcttcgtcttcaaatggcctccaaagataaaattgtggtcgacaagcctgtttatgtaaaagttgccatgtcaaaaacagcaggatcaattcttgaagctacactaaaaagggatcctcatgaggttgaattcattcaggcagtccaagaagcagttcaagcccttgaaagagtcatagcaaaaaattctcgttatattaacatcatggagcgcttattggaacctgaacgaatgattgtttttcgagtttcatgggtggatgataggggtgggacatgtgtgaatcggggctttagggtacagtttaaccagtcaatgggtccatgtaggggtggtattcgttttcatccatcaatgaatttaagtgttgccaagttccttggttttgaacagactttaaagaatgccttatcaccatacaaattaggaggagcagctggtggaagtgatttcgatccaaaaggaaaaagtgataatgagattatgcgattctgccaaagtttcatgagcgaaatgtatcgctacctggggcctgacaaggaccttccgtctgaggaaatgggtgttggtactcgagaaatggggtatctttttggacagtataggcgtctagcaggtcattttcagggaagctttacagggccaaggatattttggtctggctccagtcttcgacctgaagctactggctatgggctggttttctttgcccagctcatgcttgctgacatgaataaagaacttaaaggattaagatgtgctgtgagtggttctggaaagattgcaatgcatgtcttagagaagctaattgcttatggtgctcttcccatttcagtatcagattctagaggatatttggttgatgaggatggatttgactacatgaaaatatcatttttgagagacatcaaagctcaacaaagaagtttacgagactattcaaagacctatgctcggtccaaatattatgatgaagcaaaaccatggagtgaaaggtgtgatgttgcatttgcttgtacttcacagaatgaaattgatcaatctgatgccattaatttggttaattcaggttgtcgtatactagtagaaggttcaaacatgccttgtacccctgaggcagttcagattcttaggaaagctagtgttctcattgctcctgcaatggctgccggtgctggaggggttgtggctggagaacttgaactgaatcatgaatgcagtttgatgcactggtcaccggaggactttgaatctaaattgcaggaagctatgaagcagacttatcagagggctatgaaagctgcaactgactttggttatcaaaaagaaagtcctgaggctttggtacatggagcagtcatctctgcctttctaaccattgctcaagccatgactgatcaaggctctatatagaggttcatattgcatagttttgaatgcatccaaatactgatgttaaccaattagcactgcttggaaatctgcattcagtgaatagtccaaatcattgctgatgctacagtattgccaaagcatatttccttgtaaaaatatgtaagaaaatttagactcagaaaagaaaaatatttgaaggacaaattttagtttcacaacagaataggcatctttattattaccaagaaaaaggagaaattgtccttggcttattaaaccctgtttgatgcttgttccaaacttgagaaatatttggatattgagatttgaaataaaagattagtgttcagtttgaaaaaaaaaaaaaaaaaaaagaaaagacaagcgattattgg

SEQ ID NO: 58107 - DNA, 731 bp, Glycine max
  Clone ID: PAT_MRT3847_23483C.1
cccagggcctgctccccttgcgctgtccctgcctgggctggagccgccaggcccgtgtctctcgtgttcccaccctgaagggcaagctcaatggaatagcgctccgtgtgcctaggctcaatgtttcagttgttgaccttgttgtgaatgttgagaagaagggtcttactgctgaagatgtgaatgcagcattcagaaaggcagctgaggggccgctcaaaggtgtattggacgtgtgtgatgttccacttgtgtctatcgacttccgctgctctgatgtttcctctactattgactcctccttgactatggtcatgggagatgatatggttaaagtggttgcttggtatgacaatgaatggggttacagccaaagagtggtcgatttggcacatctagtagcaagcaagtggccaggggcacctaaagcggggagtggagacccattggaggatttctgcgagacaaaccctgctgatgaggaatgcaaagtttatgaatagaggagagctccttttctaacgtatcatgtgaaaaagaaggaaattgttcagacagtctatctgaggagagattttcaaagtttatatttatttgcagccaataataagttttggcgtgactgaatgaatatcacccatatattgattgatattgaatttctgaattcttgtaactgatttgcaattcttcgaatcttttaatcattgctcagtgttaagtggaaggct

SEQ ID NO: 58108 - DNA, 552 bp, Glycine max
  Clone ID: PAT_MRT3847_23484C.1
gattcaatcattaaactcccaaacttcgttttattcccactcaccactcactctctaacctcaattttttcaaattaaagtttcctcctttcactgctccaatctccccctctttgatctctcacttcaaccacgagatgctcaaaacttccgcttttcaagtttgccactttcgttcgaattctcgagaaagcaaagtattttaaatttgtggagaggcttgtaatgctgaatgttgttgccaaccagtggagtagggatgaattctgcaatggatgatatgaatttgattcagcaaacccagaggcatcacttggttgtgagggagattggcgaggagattgatttagaaataggagctggggaggatgacccgtcatttggtaacgctactctgattggtgcaccaatgcgggaatcttctgtagaagaacatggagagagcaagcagacggggatgatttctcagcttcctaatgatgctcaagatatgtccaagaccccacaggggaaaaggaggaaaaaggttgttaaaagatggagagaagaatg

SEQ ID NO: 58109 - DNA, 2256 bp, Glycine max
  Clone ID: PAT_MRT3847_23485C.1
cggctgcgagaagacgacagaagggggactgaaagaaggagacaaaaatagaggaggaaaaattagaattgttggcacacagtttccacctaactccaccgctcaattagttggttacaatatctgccaccaacctaaatgagtcgctcattgaaagctttcaacaggcaccttactctcctccctcttcatcaacgcacagcttcttcttcttctcatgccttcatagcttcctctcctctccctctttttccacatcttgtttcctaccccagcttctctttctctctgtttcgtccactctcttcatctgcacctgctacattgatggaggtggtcaaagcaattgccaagcacgaacctgcagctcctgaaagtgttgctatcagagctgatcagaagagttatagttacaagcaactcatcacatcggcacagaagatatctaatctcttgtgtggcagtgatgcacagacaggaaatctcggtggagctcgaataggaattgtagccaaaccttctgctgaatttgttgctggaatacttgggatttggcttagtggaggtgttgctgttccgcttgcaaccagctatccagaagtagagctcttgtatgtgattaataattcggatgtatctgcaatactgagtactgaggatcatactgaaataatgcaaagcgtagccaataaaagctcttctcagttttttcatcttccacctgttctcaacaagtcttctgagaaaagcagagataaacattcacagaatgggggaattcatacagataaaattttgttggataagtttggaagatcaagtgaagatccagcactgattttgtacactagtgggacaacgggtaaacctaagggagttgttcatacacacagaagcatcatttcccaggtacaaactttgacaaaagcttgggagtactcatctgctgaccagtttctgcattgtctaccactacatcatgttcatgggcttttcaatggtttaatggcccctctctatgcaggttccacggttgagtttttgccaaaatttagtgtgagaggagtttggcagagatggcgtgagtcatatccaaccgatggttctaaggctgaagaggctataactgtgttcactggagttccaactatctatgcccgattgatacaaggttatcatgcaatggatcctgagctacaagctgcttcagtatctgctgcaaagaacttgcgtcttatgatgtgtgggtcctctgcacttccactgcctgttatgcaagaatgggaagccatcactgggcatcgcttattggaacgatatggcatgactgaatttgttatggcattgtcgaatccattgaaaggtgagcgcaagcctggaaccgttggcaaaccatttcctggtatacaggtcaagattattgcagatgaagagagtgtgaatggaaatactggaatgggtgagctttgcattaaaagcccttcattgtttaaagaatattggaaacttcctgaggtaacgaaggaatcatttactgatgatggattctttaagactggagatgcagttactacagatgaagatggatatttcatcattctaggacgtactaatgctgatataatcaaggctggtggatataagctgtctgcattagaaattgaatcggttataatagagcatccagctgtctcagaatgttgcgttttaggcctaccagacaaagactatggagagattgttagtgcaatcgttgtgccagaggccgatgttaaacgaaaacaagatcaagaatcaaagcctgttctaagcctagaagaattatccaactgggccaaagacaaaattgcaccttacaagattccaactcagctaatcgtgtgggataaactccctcgcaatgccatggggaaggtaaataaaaaagagctgaagaagctgcttgtttcagaacagtgaacaccatttgatcatttattcatattcactaggcaaagttaatttattgaaaccagtttaagatggtggcaatctcaaataaaattgcaccaattattgagtgaaatagaaacctttatattatgacatttataagttgaataagttttagcatattattagggggaagataaaggagaaagtatagcataattttagcattttagctgtatgaaggcgattgattgaatgtgtttaataagaagtatttattgtattgaaaatgaaaaaatatttaatatttacttcctttagtaa

SEQ ID NO: 58110 - DNA, 934 bp, Glycine max
  Clone ID: PAT_MRT3847_23486C.1
ggaaattaagacttacattatcttaaacaaaaaaatattgatagttgacgagatttattttagaaatacatgcaatatacatgcaattgattttcgtcaaaattgacaaaggatgactttcttcttgtccatcttttgtggtgatttaaagtgaaattgctacatgatatcttgggatgtctctcttcttgtccatgtcgtttggaggatgagatagagccaagcggaagtgcaaatgatggaacagaaacgaccccacactatcattgataccaaagttatcacaaccacagacgcagcagcagcagccacagggttatagttatacctttctgcgttctcaagctgtttgtgcttgccgtgtttccatgtcgtttgagaattctgcttttttgaagttggaagagaaaccgcgtgtggaacaccttttctggaagatgatgatgacttactttgttgacgcctgtcaccctctatgttgtttcctctgttttgccgtgaccttgaaggtgttggactgggttcgctgttgcgtaacggcttcttctgttactctgtctttgtctgtgtcgtccacttactccccgatgctcgtgctttgctagctttgagtttgagtttgagcttgtctgtctcatcaaattcagagccttcaagcggcaccgttttggccattgagttcttcactcgaaatctaatcctttgccatggaaaccagctgctgctggttccactctcttgttttgtcttatgtttagatcgtgttggagttttactgtgaaatgatccgaagcaacatagagaaagggaggttttgggttttggatattctatttccatgccttttattttggtttcgaccgtggccatggaaaagaggagaatgtgaagagtaaatggagagtttgaatggtggaagtggattgggtctcgt

SEQ ID NO: 58111 - DNA, 247 bp, Glycine max
  Clone ID: PAT_MRT3847_23487C.1
ttcctcttttcaaattttcactaacttataactgtgaacggactccccgggggttggtaaaccacccgaatcccatttgtataacaaaaactccaactaatactaggctagaaagctattaaaacccacaaaatctcctttttctccctcaaaactttgcatagaccaaacaaatgtcataaagccggagcaaagacccaaatagaatctctactaataccctaaaaacttcataatttaaacccaa

SEQ ID NO: 58112 - DNA, 735 bp, Glycine max
  Clone ID: PAT_MRT3847_23488C.1
ttaggaatcatttactgatgatggattcttcaagactggagatgcagttactacagatgaagatggatatttcatcattctaggacgtaataatgctgatataatcaaggctggtggatataagctttctgcattagaaattgaatcggttataatagagcatccggctgtctcagaatgttgcgttttaggcctaccagacaaagactatggagagattgttggtgcaatcgttgtgccacaggctgatgttaaactgaaacgagatcaagaatcaaagcctgttctaagcctagaagaattatccacctgggccaaagacaaaattgcaccttacaagattccaactcaactaatcgtgtgggataaactccctcgcaatgccatggggaaggtaaataaaaaagagctgaagaagctgcttaccatttgagcatttattcactaggcaaagttaatttattgaaaaatcagttttagatggtggcaatctcaaataaaattgcaccaattatttagtgaaatagaaacctttatattctgacatttattaagctcaataagtttgagcatattattagggggaagataaaggagaaaatatagcataagtttggcattttagctgtatgatggtgatttgattgaatgtatttaatgagaaatatttattatattgaaaatgaaaaaatatttaatatttacttcctttagtaattaaaaatatttaatact

SEQ ID NO: 58113 - DNA, 1014 bp, Glycine max
  unsure (1)..(1014): unsure at all n locations
  Clone ID: PAT_MRT3847_23489C.1
aactgtttccgaatgctgctcccaatgaaatgaatttttttttaataataataattttgaccttaaatccttgtccttttgaggttaaatttgatggaatatactgttggggtgtctcactgctgcatacagaagtaaaggcatctgcacctgctacattgatggaggtggtcaaagcaattgccaagcacgaacctgcagctcctgaaagtgttgctatcagagctgatcagaagagttatagttacaagcaactcatcacatcggcacagaagatatctaatctcttgtgtggcagtgatgcacagacaggaaatctcgggggagctcgaataggaattgtagccaaaccttctgctgaatttgttgctggaatacttgggatttggcttagtggaggtgttgctgttccgcttgcaaccagctatccagaagtagagctcttgtatgtgattaataattcggatgtatctgcaatactgagtactgaggatcatactgaaataatgcaaagcgtagccaataaaagctcttctcagttttttcatcttccacctgttctcaacaagtcttctgagaaaagcagagataaacattcacagaatgtgggaattcatacagataaaattttgttggataagtttggaagatcaagtgaagatccagcactgattttgtacactagtgggacaacgggtaaacctaagggagttgttcatacacacagaagcatcatttcccaggtacaaactttgacaaaagcttgggagtactcatctgctgaccagtttctgcattgtctaccactacatcatatccttgaaagtttttgtgtatacattatttaatatttttgtaattatttaaaacatttgggacatctttattatgtcaatccttaacatatatgatatacatgttcatgggcttttcaatggtttaatggcccctctctatgcaggttccacggtaatatattctcttcacttctgcttgtcaagaaagtcccnaccc

SEQ ID NO: 58114 - DNA, 208 bp, Glycine max
  Clone ID: PAT_MRT3847_2348C.1
ccctcgagccgaatcggctcgagctctcattcttctccctaaaatcacctcatggccaccgccacatcccaaacccttcgattccaatctccgtcactccctctctcctcgaagctccccctctcctccgcgttctccgtctcgctccgtcctcgctaacgcggctcccgccctctcgtgcctagtcgtctccgtcgggctcgacgcg

SEQ ID NO: 58115 - DNA, 392 bp, Glycine max
  unsure (1)..(392): unsure at all n locations
  Clone ID: PAT_MRT3847_23490C.1
taatanntctcaatgattnntctttgtaaaaacttttacattatccatatattaaaattaaactctaaaaaaaaccaatacatctcattggttttaaaaaaaattagaactcccataaatgattgtctgctgtcagtgcaattcaaatgcaaaactgtggtttggttgggggacgaaatgagtgtgcaaataagcgcaaacagtcctcggcctcttcaccgtgcttcaagacacttcctttggttatacaacaaaacatcattttgtgcaaagtgcaaacccaatcacaagtaccacagctaatgttctcagaaaaaaacgagcgcacacgatcactcactcatcatatcgttaatatcttcgatatcactgaatccttctggtgccgaatt

SEQ ID NO: 58116 - DNA, 409 bp, Glycine max
  Clone ID: PAT_MRT3847_23491C.1
cccatttcaacactcaaagcacacaaaaacaaacctttttcacttcccctgcaaaacccagaattctcggacaaattctgacttctggggtgtgttcaaatttgcacctgaagcagaaagtctcattttttaaacatgagtgcaagtgacaacgcatggggtgaatctgacacaattgagatcacaggaaagatcatggtggaggccataatattcctcttcatggtggttgtctttgtccttgtgctccatctctatgcaaaatggttctggtggagcatggaggaaaacgccactccccagccccgtcaccgtcgtcggcgtcgtcggatgtttgtcttcgcccccggtcaagactcggtgatctatgagactcaccaggttgggcttgacccttcagtactcaagt

SEQ ID NO: 58117 - DNA, 274 bp, Glycine max
  Clone ID: PAT_MRT3847_23492C.1
ctcccgcttcttacgcatcgactgtagtccgagtcgccggaattgcaaccgatgacaaacttcttttcgccaacaccgaaggcgacgtgaagcacaccgagaccaagcaagacgagaccggctggccggagcccacctcggcgagctaccactgggtgggaaagaccgaggatggcaaggaagtcactgcagacctttctggtgctctgggaaagaccatcgaccgtgtcgatgtcatggctgaagtgccaggtttcatcaagaccatcgtcgc

SEQ ID NO: 58118 - DNA, 639 bp, Glycine max
  unsure (1)..(639): unsure at all n locations
  Clone ID: PAT_MRT3847_23493C.1
gaagtgaagatagtacttaagtaactctcctcaaaatagcatgtattacaaattggtaataaataaatagaaggaggcatatattacatattttcacttactcgaagtactattgcctcccatacattggtatatgataatcatgctgaacataacagagtagcatgtcacagatggtcaaaattatactttctcacttgcattacgagatgccagaggaaacaaattaagcaactctggctcagtataacctggtttagcccttggtgatggatgcaaataaaatctcctctctttgattgctttctcctcttcttcttctgctgtgttcactgactcttctttcttttcatcttccaaattaattttcaactgagagaacagtgttgaaggggtggtggggcttggaagaaggcttgaactccctgatccagggcttggaggaaaacttgcacctgttctataattaaaagtgggtttaacaatctcaagtnttggcttcatgtatttttttctctcatgaaagtttgatgtgttccttttcacagttgcaacctttgttgcatctccttcttttgctgcacttgcttctgagggacctgttaaacgttgtactacttccctgaatgcatctgagtt

SEQ ID NO: 58119 - DNA, 435 bp, Glycine max
  Clone ID: PAT_MRT3847_23494C.1
gcgagtggtctaagctccgcgctctatacgctggcaaggaagagattcttgaacgtcaccgtcaccgctacgaagtcaaccccgactacatcgagacgctcgaaaagggtggcttgagcttcgtcggcaaagacgacgctggtgtacgtatggaggttattgaaattaaggaccacccctggttcgttggtgtccaattccacccggaatacctctcccgcgtcttggacccaagcaggccttacttggacttcgacgctgcaagtgccggtatgcttgaagagatcactcgtgactatcagagtggtgcggcgaacggaattaatgctacaggactggtttctcattggaatttattcgctgtctaactcctaacgtgcttggtgcgcgtttttttctttttgttaattttgatgtcatatataactttttttg

SEQ ID NO: 58120 - DNA, 157 bp, Glycine max
  Clone ID: PAT_MRT3847_23495C.1
acgggaattattatactatagatgataatattatgcttctttaaagagatgactaaattcataattttactgaatatataataatagagtatagcatgattaatatgttatgatatatgttaggggtcgaatcaagtgacatatccaataacgatga

SEQ ID NO: 58121 - DNA, 597 bp, Glycine max
  Clone ID: PAT_MRT3847_23496C.1
ccacgcgtccgctccctcatcgatttctctagagtccagaccttggacttcttcaatggatatgcatcccctgttgagtctcccatttcaacaagtctgccttcgcataacttctacgagcggaggagtgtgaataggaacctttggagtcatgaaaatggaggggttgatgtgtctctaaaggatggcttgttctcaaagtcagggcacggaaatgcctcattggaccacagttatcacactatgggtcatgagttttctaatggagggggagatttaacaggggagtttgctggtttcatgcacaaaagtcattggcatggagcatctagaagtgccagcacaagtccattaagatcgcgcacgcaggacaacattaagatctttatgactcctaggaaactcattcactctcttcaagaagacctaaatgatgagatttcagattgctcggagaaaccaaatagaaggatcaagagtctatcatcaggcaatattaagttgagcccggcatcttattctaaatatgatcaaaatggtattgcagatcatgtcaactatgattctaaagagagtggaagcttgtgtggcgatggt

SEQ ID NO: 58122 - DNA, 619 bp, Glycine max
  Clone ID: PAT_MRT3847_23497C.1
cacattctcatctctaaccactttgcttcagctatggagtttcgttgccttccattggttttctctctcaatctgttactgatgacagctcatgctgccatacctccagaagtttactgggaaaggatgcttccaaataccccaatgcccaaagcaatcatagactttctaaaccttgatcaacttcctcttgggtatggtgctaagaaaactcaatccgaagatgatcaacctctttggtacggtgttaagaaaactcaatccgaagatcaacctctacctcctttttggtacggtgttaagaaaactcaatccgaagatcaacctctacctcctttttggtacggtgttaagaaaactcaatccgaagatctacctcctctttggtacggtgttaagaaaactcaatccgaagatctacctcctctttggtacggtgttaagaaaactcaatccgaagatctacctcctttttggtacggtgttaagaaaactcaatccgaagatctacctcctctttggtacggtgttaagaaaacctatgttgcaaaaagaagtctttcacaagaagatgaaacgatccttgttgctaatggtcatcaacatgacatcccaaaag

SEQ ID NO: 58123 - DNA, 1851 bp, Glycine max
  Clone ID: PAT_MRT3847_23498C.1
ctcgagccgtctctaaccactttgcttcagctatggagtttcgttgccttccattggttttctctctcaatctgatcctgatgacagctcatgctgccatacctccagaagtttactgggaaaggatgcttccaaataccccaatgcccaaagcaatcatagactttctaaaccttgatcaacttcctctttggtatggtgctaaggaaacccaatctacagatcaaatattcctgtatgatgctaagaaaacccaatcaacagatcaagttcctcctatcttttatggtgataagaaaacccaatcaacagatgaagttcctcctatcttttatggtgctaagaaaactcaatcaatagatggagttcctcctatcttttatggtgctaagaaaacccaatcaacagatgaagttcctccatacttttatggtgctaagaaaatccaatcaacagatgaagttcctcctatcttttatggtgctaagaaaacccaatcaacagatcaaattcctccttttttttcttatggtgctaagaaaacccaatcaacagatcaaattcctcctttttttttcttatggtgctaagaaaacccaatcaacagatcaagttcctccttttttttatggtgctaagaaaacccaatcaacagatcaagttcctatcttttatggtgctaagaaaactcaatcaacagatcaagttcctatcttttatggtgctaagaaaatccaatcaacagatcaaactcctctttttttatatggtgctaagaaaacccaatccgaagatcaagttcctattttttggtacggtattaagaaaactcaatccgaagatcaacctcctctttggtacggtgttaagaaaacctatgttgcaaaaagaagtctttcacaagaagatgaaacgatccttgttgctaatggtcatcaacatgacatcccaaaagcagaccaagttttctttgaagaaggattaaggcctggcacaaaattggatgctcacttcaagaaaagagaaaatgtaaccccattgttgcctcgccaaattgcacaacatataccgttgtcatcagcaaagataaaagaaatagttgagatgctttttgtgaacccagagccagagaatgttaagattctagaggaaaccattagtatgtgtgaagtgcctgcaataactggagaagaaagatattgtgcaacttcattagagtccatggtagattttgtcacttctaagcttgggaagaatgctcgagttatttctacagaagcagaaaaggaaagtaagtcccaaaaattctcggtgaaagatggagtgaagttgttagcagaagataaggtcattgtttgtcatcctatggattacccatatgttgtgtttatgtgtcatgagatatcaaatactactgcgcattttatgcctttggagggagaagatggaaccagagttaaagctgcagctgtatgccacaaagacacatcagaatgggatccaaaccatgtgtttttacaaatgcttaaaaccaagcctggagctgctccagtgtgtcacatcttccctgagggccaccttctctggtttgccaaataggttacttaagtctttatttgttagtgtgtccttaaataagtaggcatttccatattgcatctgatgtactatatcagcctacaatgtatttctctatgtttgaaattgtgatctaccttaatggcatcataatgtagtgattatgttgttgtgatgtattacatatgtattaatgtaaccatgttatgcgacttttcttttcaaaactacctttactgaacctacattttagtaataggtgtgtgttagttg

SEQ ID NO: 58124 - DNA, 252 bp, Glycine max
  unsure (1)..(252): unsure at all n locations
  Clone ID: PAT_MRT3847_23499C.1
tttggtcgtgcgcagtgtagatttttcaaccagagactgttcaacttcagcggcacaggtagcccctgatcccacgctgaatacaacctatttagnggcacattttnggaaaaacttgtccacaaacgggaagccggaacacctttgaacaaacttgccctttcgtctcccgaccactttcgcaacaacctctttcaaaacctttctcagcatcagggggcttttcanaacaaccaaaagctttttttcacc

SEQ ID NO: 58125 - DNA, 123 bp, Glycine max
  Clone ID: PAT_MRT3847_2349C.1
tcgaacttaatacacgcgcgcttgcacactcatagctctcgtatcgtcacgccctaagggaaggccacggccggcgcatcacacagtcgcgactgctaaaaccctgccgtcacccagcttaat

SEQ ID NO: 58126 - DNA, 169 bp, Glycine max
  Clone ID: PAT_MRT3847_234C.1
ctgtcgtcctttttttttttttttttttcttttttttctcttttaagtttttttcatggatttgtgtactgcttaattcacaaaaaggggaatcccctaaacatttttttggctgggcctatttctaggattttgacccctgaatgctacctttatagtcataagaggg

SEQ ID NO: 58127 - DNA, 1219 bp, Glycine max
  Clone ID: PAT_MRT3847_23500C.1
atccccatggtgctgggagctatgtaggtaatcgttcgttttggcaggcctcatttgatgaattttttggccttctcacaatgtattgcatgaataaatatcagagtatcatgcaatcattgcttgtacaagggatggaaaatgtgtctgtaattggatcagatgctgctaaagcaatcagtagggaaatgcctgttgaactcttgcgagcaagtcttcctcacaccaatgatcaccagaggaaattactactagattttggtcagcgctctgtgcctgtggttggatttaacagttatactgggagcagtagtggtcatgtgaactcagagactgtgctaagttgatagatgattggagagaagtcctcctaattataatggtttgtgttgaaggtttcatcaactgtacaactttgtatctgtacttgagtatatctggagcaaactgaagtggaagtgcaagttgcttctatggtagaggtttctgccccttttgtatatttatcatagtgccataacgatgtggtagcattatgatatatttgcaatcaggctctccatgtattatgatatattcagcattatctgttccctcatgtcttttcttttactcatgacaggggagcttattctattactgtgtctggtataaacttttagtggttagcctgtacaggtttaggcacatatttgattcccatgtttcctttctgttatatatacaagttgtggggttgcttgtattcaaatttactcctgataggtcaccgttctagtggaagtggcattgggtgggtggtgccataaactttaccgggaaacatgttgacaagttggaggtactgaaatacataggaacaaatgttgaataaattatgttgacgcgtatttttatctcatcactgttgaagaataagttatgttgaacttgttgcataatttatcttttgcacttgagttgtcaatttgtagatatgtgttcttatgttatcttgagaatatttggttttttccttccatgtttctctctgactttggcattgttttctttggaaatttgctgaggttcattgttcacttgctccttttcctatctggaaatgtatgaggagaatatgaaatcaagtggccactttgatgatggatggttgaaaatttgtgttgattccttttacatgaatttttgacaaatgaattgggcaggctgcttggtaccc

SEQ ID NO: 58128 - DNA, 363 bp, Glycine max
  Clone ID: PAT_MRT3847_23501C.1
attcccttcacccacctacctaacttcccattttcaatcatttctataccactatctcttacctttagaaagttaacaaaaatttttttcaccaaattaacccattttctttccttattatttcatatttttaccaaaatcttccttaaaaaatcacctctaattttttaaaattttccatctatctaatcttatatccatacaccaatcaatatctatactctatatttatatatccccaaaaacaaaaaaaaaaattttcttcctctctttaacatcaaaacttacctacacctccattccaacttcttacctcttcctatattttcacctaaattcaattaactttaccacctttttaca

SEQ ID NO: 58129 - DNA, 401 bp, Glycine max
  Clone ID: PAT_MRT3847_23502C.1
ggccgcccttttttttttttttttttttttttttttttttttttttttttttttttttttttttttttttttttggtttttttttttttccagggaaaaaaaggggaaatttccggccggggaatcctttttaaaaacaccttttttttttttgggaggggggttaaaccccaataattgtcccccgaaaccacccctttaaaattttggccccttcttttttccccggaattgttcagggggtttaaagggaacctccaaaaatcccgggggcaccatttttttttactgggagaatacttaaggaactagccttgggccctgattcacctttttaataaccttaaggggggggtgggccaaattcaccctgtgaaccattttttctttttttttaaaaa

SEQ ID NO: 58130 - DNA, 218 bp, Glycine max
  Clone ID: PAT_MRT3847_23503C.1
caaattatggcatcagttgtaatcttcatttcttctgatatttgataattttatgtgtccaaaattgatttaagttttttatttctttggataacttacaggaggtgttcgctgtctgtccatcttaaaccttatctttgctatcgtctttggtggtcttgccttgtttcttggttcaactctcttgacattgatgagcaactgctctaaacctctgt

SEQ ID NO: 58131 - DNA, 284 bp, Glycine max
  Clone ID: PAT_MRT3847_23504C.1
aaacttttgatcattgaagcagatttagaagaagcaggtaacgtttgttttattcgttgtttggttcctttgagacgaaggattcgatttgatctgaaatagtttgattcgaagaagaatgagtggcggtgagaaagaggctatggcagaagtgaaggagtggctggcgaagacgttcgaaagcgcgggtaaatccgttcctgaattcgaatacacgccgcgcagcgtcaaacatttgaaccatctcatgactcttttcaaagccaaagacgaatccgcgcgcc

SEQ ID NO: 58132 - DNA, 159 bp, Glycine max
  Clone ID: PAT_MRT3847_23505C.1
gcctgatcgagacacggattatatccccaggacactggggttcatgctcagatggaaacaaatatggtgaaatggtctgtggaacatgatggacctcctaccccgttgcatgatggacatgatacaatttgattgtaaaattgcccttccaaaaagcac

SEQ ID NO: 58133 - DNA, 212 bp, Glycine max
  Clone ID: PAT_MRT3847_23506C.1
gatgattgctacactttctctaccgatgaacctaaaccagtgagggggtttcggcttttggggcgcattatacactcagaccaaagcctagactcaaagccttatttagcttatcggacattctgactttgtcaaaccacatacccatggtcatttacactaaacgattgcagtttaggccaacctggctatatggaggtttgaatagggag

SEQ ID NO: 58134 - DNA, 435 bp, Glycine max
  Clone ID: PAT_MRT3847_23507C.1
ggtttatcatttacataaatacattaaagattaaaataaatggtttttcataatgttaggaattaaataactttttttaaaaaaatagggacagttgcaatttttactctagtcctgactttgcatctcactctttcgtggaggatgctactgtaattgatttacatataagtaatagttaatttttttgggtctggggcgttttgttctgcccaatcagaaaaaaaaaacttaaaaaataaccattaaagtaattagtaatatttataatgtcaaaacttaataaaaaaaaatcactctaatatcacaaacaaaatgtataccaagatgcttaaatcatctaaaattaaagaataacattagtcagtgtcactgtcacattaatttttgtttataaaattaaattttatagtttagtataattaatatttttaa

SEQ ID NO: 58135 - DNA, 309 bp, Glycine max
  Clone ID: PAT_MRT3847_23508C.1
ctcgagccgcaagctccgagttcttgcactcctcggaccaagtgctcgttttcacactcattcccagacaatttttgcacgcaccaaaatggcggcggacggccattccaatgttccttctcacagcacacagcacaaacatgacgactcgcacctgtggccaaatctatgccacacggataccaatagtctatgcatgatggttaattataggcacggtcgtcacaagcatgatgtgggacccaccacaaacgaacgggtcgatctttgcgcagcatcaggggtaccaacagcaactacaagtgatct

SEQ ID NO: 58136 - DNA, 224 bp, Glycine max
  Clone ID: PAT_MRT3847_23509C.1
ggcgcgacacacgcgtccgaatacacatccttccactcatacaagtcttttgctaggttatgctaaacttctacaggggcgtttcaaaactataggtgaattcacatcccaccatctctaagagctcagctgaactatccgaaacaaaaggaactgatttggaatacatatgtaatagaactacgagcaaagccaaatgttattccccggattcatcatatgat

SEQ ID NO: 58137 - DNA, 116 bp, Glycine max
  Clone ID: PAT_MRT3847_2350C.1
gccccccgacggaagctagtaatgcgggtggagactaccaccaaagactgtttttaggggctgaaagaaactgctgggaagcagggcgaagaggcaggaagacataacctatgcaa

SEQ ID NO: 58138 - DNA, 379 bp, Glycine max
  Clone ID: PAT_MRT3847_23510C.1
aaaagaacccgggggtaattttggatttggcaaataaaataacccattcccggcctgccttaaaacttgagtggggccttttccacctaaaaagcaaaggataacttgggcccttgacgcaacacaggccccacttaataatcataatttaacatctttccttccaaaatccaaggactttaatttttaaaaggaggaaaggagataaccggttcttcttattgaaatgaaaccaaaccccacaaccttgggctggattttggtggtggtggtggtccccaacttgattaaccatgaaccgttggattgaatcacttggacttgaagggaatggccctgattacaacctggtggtagagtgctgcaagagctgcaccga

SEQ ID NO: 58139 - DNA, 244 bp, Glycine max
  Clone ID: PAT_MRT3847_23511C.1
aaaaaaaaagattgcctctttgattcactgagtatagattaagtttgagaaacattgttatgatacttggagttgatattgttttgtgattttatttttttaatataatgaaggaattagcatttatgttatgttatgctaggcagaattaaaggaacatgaattctgatggttgttgtgcttattttttgtttttgctaggttttgatgacatggatagtatctttgctctcctgacgatttt

SEQ ID NO: 58140 - DNA, 256 bp, Glycine max
  Clone ID: PAT_MRT3847_23512C.1
tcattatggcatgctcatgcatgccctctacaatacactgtatggacctcatgatagtacaaaatgggaggaccactgctacgctatgatgagaacttattcatatgatttattcacattataccatctgatgtataaactagagaaacaactgcccgctgttgccactgaagatatagatgacaagctgctgcatctatatgcatatgaaaatccaagacaacctgtaagataagtcgattcatattatcacgaa

SEQ ID NO: 58141 - DNA, 1909 bp, Glycine max
  Clone ID: PAT_MRT3847_23513C.1
acggctgcgagaagacgacagaaggggattgaggtgaagaaactacaattctcactgaaagaaagttgctaactcttggcaccagttatcagcttaacatagttgataacaccaaaggcacaacaacattgagggaatgaggcttgtcatatcagctgtatgtgttattgtgctattttcttatgctgctgcgtatgatcctttggatccaaatggaaacataacgatcaaatgggatgttgtgtcatggacaccagatggctatgtagccgtggtaacaatgagcaatttccaaatgtttcggcacatcatgaatcctggatggaccttgggatggacatgggcaaagaaggaagttatatggtccatggtaggagctcaaaccacagaacaaggagactgttctaagttcaaaggcaatgtacctcactgctgcaagaaaactcccacagttgtagacttgctccctggtgtgccttacaaccagcaattctcaaactgttgcaagggtggagtggtggcagcatggggccaagacccttcatcagcagtttcatccttccaagtgagtattgggttagctggtacttcaaacaagacagttaaactccccaagaacttcactctcttgggtccaggaccaggctacacttgtggccctgccaaggttgttccttccaccgttttccttacacctgacaagcgccgcaagactcaagcactaatgacatggaatgttacttgcacatactcacaatttctggctagaaagaacccgggttgctgtgtatctttgtcatccttctacaatgagaccattacaccttgccccacttgtgcctgtggctgccagaacaagaggaactgtgtcaagagtaactctaaacgtatcaacatggtgggggattcacactccaaagaaagacaatgaaccattgctacaatgcactcatcatatgtgcccaataagggtacactggcacgtgaagctcaactataaggactattggcgagtcaaggttgccgtgacaaatttcaactacaggatgaattactccctctggactcttgctgttcagcatccaaatcttaacaatgtcacccaagttttcagctttgattacaagcctttacttccctatgagtccataaatgacactggtatgttctatggcatgaaatactttaatgatctcttaatggaagctggaccaactgggaatgttcaatcagaaattcttcttcagaagaaccaggatacattcacattcaagcaggggtgggcatttcctcgcaaggtctactttaatggtgaggaatgcatgctgccaccacctgatagctacccaatcctccctaattctgcccctgtgaacctattaaacttcccagcattcgttttgacaatgcttgtcatgataactgtttggtgaaatagtatgtaggcgagatacaattgttttctgtgaaattttgaagccaagttttcctacacacaccacaacgtacatcaggtatgaagaatcttacggaattgcttgaaaaaaaccaagcccgactcatgaatgtgtgtgttgtgattcacgagtgcttatcagatgctgaatagtgttggttaatttgaaaatcgagatgatactggataaatctgaagttatatgtgtgtgttgtggtgtatagggagctgtaatttgatgtattattccagtagattgaaaataaaccggatcataatactcacctcccctattcgtacgaagagttttgattagcccatttttgatgaagttctacctctttcttataaattttaaatttatcaagagcttcatcttttgtatttaataaatatacataacaataccttcatgcatcatcaataaaagtaacaagatattttttatgacct

SEQ ID NO: 58142 - DNA, 2009 bp, Glycine max
  Clone ID: PAT_MRT3847_23514C.1
cgataagacaacatcgatgatgctctgaacttagaatctatatatgcctccctgctttctctctcacataacactgtttatcgatgatgctctgaactctttatctatatatgcctctctgatgccgatgggtgcctccagttttccggcaagcttcaaacttcccttcgccggccccgattttgatcacttttccggtatgaatcgtttgcgacaccccctttgttgatttagaaatgctagatctattcgtcgcatcacacgttcgatccaaaacctggttccacaagaggaaaaaaaaccaccgacttcgttcccataaaccctagtgctatttccctcccaatttcgtaacactgattgtaatttgcaaattgtacagctagaattttgtttcttttctttgtttaattttttgtttttttttttgtatttcctttattttacaattctctttgctgggtttgcaaagtttgtacagttagggttgtagatggtgaggatcggagggtgtttttgaaggaattatcagattttgattctgggtttttgttggggtggtagagaacaaggatttgaaaaacaggatttttgttttttggagtgcctatgactgattgacggtaattgcgaccgcactcggtcacatttgtctgcaattttccttaatatcaaggaacacgataaaaccgcgatcacaatttaaaaccttggttgagaaagtgggggaaatgagcatgagtgtggcagaggatgatgaatctagtgaagaggttcatgttccgggtgagattgattggcaaatgcttgataaatccaagtttttcttccttggtgctgctcttttctctggggtttctgcagctctttaccctgttgttgtgttgaagactaggcagcaagtggctcagtcccaagtttcttgcatcaacactgcattttccttgattaggggtgagggttttagagcattgtaccgcgggttcgggacttctttgatgggcacaatccctgctagggctctttacatggctgcattagaggttaccaagagcaatgtgggcactgccactgttaggtttggtcttgctgaaccaactgctgctgcagttgccaatgcagctgctggcttgagtgcagccatggcagctcagcttgtgtggacccctgttgatgttgtgagccagaggttgatggttcaaggtgtttctgattccggaaatcccaaggcttcggctcttcggtacatcaacgggattgatgccttcaggaagatcttgagcagtgatggccttaggggcttgtataggggttttgggatctcaattttgacctatgccccttcaaatgcagtttggtgggcttcatattctgttgcacaaaggatggtttggggtggagttgggtactacttgtgcaagggaaatgatagtgcagctaatagtgcattgaagcctgatacaaagactgtgatggcagttcagggagtcagtgcagcagtggctggtggcatgtctgctttgatcaccatgccactggataccatcaagacaagactgcaagtcctggatggcaatgagaacggccgtcgcggaccgacagccatgcagacagtaaggagtctggttagggaaggtggctggatggcttgttatagaggattgggacctagatgggcttcaatgtcaatgtctgcaacaacaatgatcacaacttatgagttcctcaaacggctctccgcgaagaatcaagaggttttgacatgatgaagggacaggtttatgacagcaaaagaaaaaaaggataaacaaagagaagagaggaggttcttctttgcctgtttttctgttcttatcttttctccacttgtcaatgttgtttcttcacttttggcttgccacaatgactgtttgatcaatgtaagtcattgcaggttattacataaataaaaatttacttctaacaaaaaaaaaaaaaaaaaaaattaattcaagcggccgctctagagg

SEQ ID NO: 58143 - DNA, 316 bp, Glycine max
  unsure (1)..(316): unsure at all n locations
  Clone ID: PAT_MRT3847_23515C.1
aaaaaccaccccacccgtccaatcaactccaatttttagctccctccctcctttttctttacttctcttctcattctccttctcgccttctaatcactccctccagctccncanatctacattttccctcgttttctgcatctgcatttcatagattcagttctcatccaaaaattcacgttcaccaaatacccattccttcttcctgctaacaccgacaaacccaaaatcttaataccaccaccaccaccaccacctattctaaatcgcaatcacacacgcttcttcctctctacctcaccaacaccctcttctt

SEQ ID NO: 58144 - DNA, 711 bp, Glycine max
  Clone ID: PAT_MRT3847_23516C.1
ggctcgagctttatcgatgatgctctgaactttttatctatatatgcctctctgatgccgatgggtgcctccaattttgcggcaagcttcaaactttcaatcgctggcgccgattttgatcacttttccggtatgaatcgtctgcaacaccccctttgttaatttagaaatgctagatctattcatcgtgtcacacgttcgatccaaaacctggttccacaagaggaaaaaaataccactcacttcgttcccataaaccctgtgatatttcccttccaatttcgtaacactcgattgtaatttgcgaattgtacagctagaatttcgtttcttttcttttttgattttttttatatttcctttattttccaattttctttgctgggtttgcaaagtttgtacagttagggttgtagatggtgatggtctgagggtgtttttgtaggaaagttcagattttaattctgggtttttttggggggtggtagagaacaaggttttgaaaaacaggatttttgccgtaaagtcaaggtttttggagtgtctatgaccgtaattgtgaccacatcggtcacatttgtctgcaattttccttaatatcaaggaacacgataaaaaccgcgatcacaatttaaaaccttggttgagaaagtgggggaaatgagcatgagtgtggcagaggatgatgaatctagtgaagaggttcatgtt

SEQ ID NO: 58145 - DNA, 586 bp, Glycine max
  Clone ID: PAT_MRT3847_23517C.1
aaagaatggtttggggtggagttgggtactacttgtgcaagggaaatgatagtgcactgaagcttgatacaaagactgtgatggcagttcagggagtcagtgcagcagtggctggtggcatgtctgctttgatcaccatgccactggataccatcaagacaagactgcaggtcttggatggtgatgagaatggccgtcgtggacccacagctatgcagacagtgaggagtctggttagggaaggtggttggatggcttgttatagaggattgggacctagatgggcttctatgtcaatgtctgcaacaacaatgatcacaacttatgagctcctcaaacggctctctgcgaagaatcaagaggttttgacatgatgaaggataggtttatgacagcaaaaagaaaaaaataaaggttaaacaaagagaagaggaggttcttctttcctcccttatttgtctgttttttctgttcttttcttcacttgtcaatgttgtttcttcacgtatggcttgctacaatgactgtttgatcaatgtaagtcattgcaggttattatataaataaaaatttacttacttctaac

SEQ ID NO: 58146 - DNA, 389 bp, Glycine max
  Clone ID: PAT_MRT3847_23518C.1
ccggtcccggaaattcccggcgtcgacccacgcgtccgatcagatggcagcacttggagggaatgcgctatgagacagcaagccagaacagccctgagatcgatgcatgtagcatcgctagtgctgatgaagaacacagcgcaaaacagactgcacttgtggagcttcacaaggtggtaactggttaacagcgagtggttacaggcaccttggacaccattactttggaagcacaagatgttgggcacgagaaggtttatgaagccaatgatggggcagaagtgcatggatgaacgtcaaggacgagcaagagttcaagcttgctggagatgcacgctgttagtctagagctcaattagattgatgaaaagtgcataatgagacagcca

SEQ ID NO: 58147 - DNA, 196 bp, Glycine max
  Clone ID: PAT_MRT3847_23519C.1
aaataatgttaagagatgaaggataaatatataatgagaatggatgtttgagataataacatgctattccttgttgtgtttgtggtgattgtgagtactattggtggggtggagagtgcttattaatgtgtaaaaaaacaatccctgataattgaggcttataactttgcattatgtgcctcagttacacaagatg

SEQ ID NO: 58148 - DNA, 250 bp, Glycine max
  Clone ID: PAT_MRT3847_2351C.1
acagaaaggggagagagagtgacatggaatgagagggagcagacggttctattagaagattcaaagatgtgagactcctcctccccatcaatgcgtcttgaataacaacgatacaaggggccttaaacggtaatcactggacgttcatgggaatggtttttacgcatgtacgcaaacagggtttaacacttccatgagaatccgcagcaattccagcagtcaattttaccttctgtgatcgagaaataca

SEQ ID NO: 58149 - DNA, 158 bp, Glycine max
  Clone ID: PAT_MRT3847_23520C.1
tcggaattcggctcgaggggatggcaaggactgtgggctggaaacatgatcaatatgcttcgtatagttcccacacaggccatttgaccggggccattttaatggggcaaacgggcctttaacttccttgcttaaaaattggaaagccattgattccc

SEQ ID NO: 58150 - DNA, 291 bp, Glycine max
  unsure (1)..(291): unsure at all n locations
  Clone ID: PAT_MRT3847_23521C.1
anagagcggggaaggcgncgacagacaannnccgggaagagaaggaaagagccccccaaaaaaaggaccaaaacacgcaaggggcaagccaaaacagaccaaaaagaccaaacannncncaaccaacacaaacgagaagagccagggaaaatttttaccaccccagggggagccccccngngggccnccaaacccaacaaagcacccaccnncgggggggcagagcaccccaaggcanccccccagcnagagcagcnaaaccnnaagcaggaaccacggacanaccggcaa

SEQ ID NO: 58151 - DNA, 270 bp, Glycine max
  Clone ID: PAT_MRT3847_23522C.1
aaagaaccagattattaattgttcctcccctttttgttggtctcctcttactctttctgtccctctgatatataattaaggatacttgtcaagttcaagctgaggccagctccttggtggatattgttatctactctgattggagaaatgatgtgctcgtctggctccctagatgtcatgtttccaattacatcaaagcatccttttccatttccatgattcagttcctaatggtgaggaatcagtttctatataatgcttgataaagat

SEQ ID NO: 58152 - DNA, 1276 bp, Glycine max
  Clone ID: PAT_MRT3847_23523C.1
gaagagccatgacgtggcacgcacccgtacgtccgggcgcggctcgaggggagaaagaacaaagaaatgggaagttcattggtggaaatccaagttcccgggcagaagtttgtgaacggagttccgttccccgctgtggtgtctcctccacctgcaactgcaagtgcggttcctcttacggactccgtcaaaacccagaaagctttccttgaatcattgctactccaatcgggtgctgtccttttcaggggattcccactctccaccgcttctcacttcaacgacgtcgtcgaagcattcggctacgacgagcttccctacgtgggcggcgccgctccccgcaccaacgtggtgggtcgcgtcttcaccgccaatgagtccccacccgatcagaagatccctttccaccacgaaatggctcaggttcctcaatttccttcgaaactgttattcttctgcgaagtggaacccaggagtgggggtgaaacccccattgttcttagccacgtggtgtatcaaaggatgaaggacaagtaccctgagtttgtggagagactagagaagcatggtttgctttacaccagggttttaggggaagatgacaaccctaactctccaattggccgtggctggaaatctaccttcttgaccactgacaagaccctcgctcaacaaagggcggctaaactgggtatgaagttggaatggttggaagatggggtgaagacagtcatgggtccaattccgggcgttaaatatgatgagaggagacaacgaaagatatggtttaacagcatggtggctgcttacactggttgggaagatgaacgcaacgatcctgttaaggctgtgacctttggggatggtctaccattaccctttcacattgtctatgattgtctccacattctggaggacgaatctgttgccattccttggcaaaaaggagacattctcttaattgataattgggctgtcctccattcccgaagatcttttgatccacctcgcagggtcctagcttcccttgtcaagtgagccttgtaccaatttcaactaccttaaattaaattatgtttgtactataccaacttattagaaacaataactgcttcagcagtaatagcataaccatgaattgttaatcatttagaaacaagagatggaaataaataaagacgtgtcttattagatttagttctcaatttaacatctactgtattgtatgtaactatgtatccattctcttttggccattataataaacaggcaagtc

SEQ ID NO: 58153 - DNA, 313 bp, Glycine max
  Clone ID: PAT_MRT3847_23524C.1
ggtttatttttgtacatggctgagggggaaactgaatgaccatgtgaagccttacccaatgggagagattctgctgataaacttgcgagggggagcacacgctaatactgctctgaaaacaactcagcgaggaactgagttccaagccaggtgaaatgtccatggggaacacgccgaatgacctgataagatgatgcccttaaacaaacacgtgtcagtaccacatttaaggtgaatcaggcatgaccctttttgacagaaagaatttactagcttataagcataacaccgttgtatatggacagaatgatgc

SEQ ID NO: 58154 - DNA, 111 bp, Glycine max
  Clone ID: PAT_MRT3847_23525C.1
atcaatccagggttcccctttttctgtgaaggtgggatagctggattctgttgcatggccaaaggaggactatagggtcatttccagcaattgatagcatgatgcaagggc

SEQ ID NO: 58155 - DNA, 262 bp, Glycine max
  unsure (1)..(262): unsure at all n locations
  Clone ID: PAT_MRT3847_23526C.1
gcgttctaagctcggaaggggctcgagcttaatttaaacgacaaagtctccgggtttttaaaaaccaaagtggaatcaacaaatgcatatttaattcactgtggtaaccaaaccctaaaacaaantacaagatttaaacacgctaacaccgtgtttgaaaatctaacataagagaatagggcgcaatcattatgttttccaagatggaaggcatgtatgatcacctgactttcgagcggaacacttctttagttctatatcc

SEQ ID NO: 58156 - DNA, 2185 bp, Glycine max
  Clone ID: PAT_MRT3847_23527C.1
ctcgatgtggtgagataaagtcatggtggaaatcctctctagagaaatggttctgttgatcaagggcatatgcatatgctattccatatgtacctggtagtcttgtaagtcatggaaatccttcgattctctgtttcattatttcgacaaaagcatagtgagacacaatcaaataccggaagaaaaaaaaagttactaatagagtgcatcattagtatttttgttttttttactttgaattacttaactaataagttaaggtattggtttgtatttttctaaaataaaggatctatatcattcttatacgtgtcttttataatacttatttttgtgtgtagtaagtcgtagattccttttttcgttttcttcctcttcttttatcttgagcacacgctagtgtcttttccaaaactgcaacgtgtcgtggtgtattgaacccaacagcaacaattttcatcttatgagttactactttattagagtctagcaatcaataatttattcttcatcatcatcaacatcaaccaccacatgaaaactctcttttttttcttttttttcacacaccaccacacagtgtctcagactcaactcaacataaacactactgatcactgatcaccacaaacacttccaccacctcaacctaacatgtcatcgcagggttacctccaccgcataggcttcaccaggaagagagaaaggctcatcaacccaatggaccgaacctcaccactgccaccatcttcggttcagaaacaacaaggcatgtcagagtcacttccactacccttttctcctgatgaaactcgttgttgaaattctctcgaggctcccagtgaagtctctgttgcagttcaggtgcgtttgcaagtcatggatgtcccttatttatgatccttacttcatgaaaaagcaccttcacctgtcgtctcgaagcacccacttcacccatcacaggatcatattgagtgccacaaccgctgagtttcacctcaaatcatgttctctgagttccttgttcaacaacctttcaaccgtttgtgatgaacttaactaccctgtgaagaacaagtttcgccacgatgggattgttggctcttgtaatgggttgttatgttttgccataaagggtgattgtgtgcttctttggaacccctccatcagggtctccaaaaaatcaccacctttggggaataattggaggccagggtgtttcactgcctttggccttggctatgatcatgttaatgaggattacaaggtggtggctgtgttttgtgaccctagtgagtattttattgagtgtaaagtgaaggtgtatagcatggccaccaattcatggaggaagattcaggatttccctcatggtttctcaccctttcaaaattcaggaaaatttgtgagcggcactctcaattgggctgctaatcattctattggttcaagttccttgtgggttattgtttccttggatcttcataaggaaacatatagggaagttctgccacctgattatgaaaaggaggactgttccacccctggtttgggtgttttacaaggatgtctttgcatgaattatgattacaagaaaactcattttgttgtgtggatgatgaaggattatggagcgagagagtcttgggtgaaattggtgagcattccttatgtgcctaatcctgaaaatttttcgtactcagggccttattacatttcagagaatggtgaagtgctgttgatgtttgagtttgacttgattctgtataacccaagagataactcgtttaagtatcctaagattgagagtggtaagggctggtttgatgcagaggtctatgttgaaactctggtttcgccaatgaagcattaaggttgttgaatgttgatgtgccacgcgaagcaagtgtaaggaagaataagatgtgtaaaatatttttaagtcgtgtgattttatcgctggttcatgtatgttgggattaaatgtgtaatatgtatatgcagaagggaggggccaagcattgtatagatgttaatatttgatgaagctcagttatgtgttgttacttgtgtcgggttatgtatccatcactgatgtaaaaaaacactgcttcatctatttgttagtatatggaaattggtatatgctttcttgtattattgtgagaagcatatatttaatgac

SEQ ID NO: 58157 - DNA, 389 bp, Glycine max
  Clone ID: PAT_MRT3847_23528C.1
ggtactgacagtttaacgagtgagctcacacaacaagttttgaagaatgattggttgaaaacgaatgttttgtacaaatgttttcatctctcgtatacacatactggttgtagtttcaatagatactgatgcattatgctatacgaggatctgaacacgttcacgactgtgtctataatattcaaggaagacttttaatttatatttgacgaattggatgatggtaatgttttaactatcaataacgatgaatttgcggatattggcagagccatagctttaaaatttcagaaggaacaagttatgatttacttcgagaactaatgattgtaccattcacccaccgtacttagatgaaatagaatggtgaggacgtctatggaagaata

SEQ ID NO: 58158 - DNA, 238 bp, Glycine max
  Clone ID: PAT_MRT3847_23529C.1
acttgagctaaattcatatcatgaatatttcttaaatgccgcgggggaatttatccaatcaacattcatctacaacatacagcacaatttttggtccaaaaaatgaaccggatccaccaaatcctaccttcagcaacgccgttaccatccagcaagacccactacagtgacataaaatgcctactctacaatattcaggaacttctcacttccacaactgaaatgtacgatcactctc

SEQ ID NO: 58159 - DNA, 496 bp, Glycine max
  unsure (1)..(496): unsure at all n locations
  Clone ID: PAT_MRT3847_2352C.1
ataggaaaaagggacaaaatgccattaattggtatactgttctgtcaactccaaactgaaatttggtaacttataaaaacaaaaccaccacacatgtggaaggatgaaaactttggatgatgggggggtctttttttcttaccctgagtttttgcaaattaaaaaaaaaaaaatcatctattggttcctacttatcaactacttttatcaaagatgcctcgtanaccctgggagcctcaaatccatgaaaattcatcacagnggcagcaacgttggcaagtccaccagttggaacatttgtccgggaatttgacaccaggggccaatccataacctccaataacaattggcacaggctcaatagtatgggaaggaagaatctggattttnccatccttgcctagaagcgtgttttcaaatttatccctcttgaccatatgcttaagattcccgtgatcaactttaaacaacataatatccaccattttggtttatt

SEQ ID NO: 58160 - DNA, 313 bp, Glycine max
  Clone ID: PAT_MRT3847_23530C.1
gaataaattctttgaaactattcagtgagactcgtagagttcttttaggtaatcggattgctggtgcttttgaaatcagacaagcaaagatagataggatgctaggagaaaagagctagagaattgagaggcttaggcagggcactgattagagaaaaaggaaatagtttttttttttggtcagccagaaaaggaaatagttgataatagtattttgtcattcgttgcatttctcaatattattagcatattgcatctacattataggttcaataaagaatatatgatttaaaattaaaaaaaaaaaaaaaaa

SEQ ID NO: 58161 - DNA, 1108 bp, Glycine max
  Clone ID: PAT_MRT3847_23531C.1
ggctgaacattgttacatttgcatccctcaaaaattgtctaaattttttggcgaattttcaccgatagtccccttcctgtagcgtatgtttttgttcttaccaatgccctgtttcagtggctggtgcttgcggcggttgcttgggcccggtgggcttcgagtggggcgtcgagcccaagcctttcgatatggcggcggaagaaggagatggggaaggaagggctggtggtggccaaagagctgaagcttcatccggtccagcgtctcccgcttgctcaagtccgacctcgtcgtcgtcctggccgagttccagagacagaatcaattcttcctctgcgtcaagttgtatgatatagtccggaaagaaatatggtaccggccagacctgtttttttatagggacatgcttatgatgcttgcacgaaacaaaagggtagaagaagctaaaaaggtttggggtgatttgaaaacagaggaagttttatttgatcagcatacattcggagatattatcagagcttttctagataacgggttgccctcagaggcaatggacatatatgaagaaatgagacagtctcctgaacctcctctttcattgccttttcgcgtgatattaaaagggctcattccctatccagaattacgtgagaaagtaaaagatgacttcttagagattttcccaggtatgatcatctacgaccctccagaggatttgttcgaagataataaacagcacaatgatagagataactagaatagaattgcttaattccctggactcctacacaactatatgtgctttaacacattcaattcatgtggagatcaaggtgtttgcagcctattttgtatgctgaacctgcctggtgccatgcaatgttgagaccacagctgttgtatatataataatttcaaagtgcttcttttttgatctaagctgagttttccctaatttagattttttctaagctttgagtttttcctaatttagattttttttaagattaatttacatcttagcctaaacagtgtaaacgaatgttcatgatacatatggaggtagttgttcgatggaaaatacacaagtactcagattttttttttc

SEQ ID NO: 58162 - DNA, 422 bp, Glycine max
  unsure (1)..(422): unsure at all n locations
  Clone ID: PAT_MRT3847_23532C.1
aaaaacatatnnttcangatttttgataactcggtttntcggttcatttgtgtcaccgtgttcattgtttaagaacgccaaacatatatataaattcttttctacccactctattccatccattgctagaacattaaagcagagccttgaccgggtcaatatcaattcaaatttgcttcatagtgttcagaacgaaaatatgcttggttatcctatgaatgaattggcatacagagtttactaatctcttgtctagagcgcttttccataaataaaataaataagtttggtggtaatttcaactttcttctttctatcaatgttaccgtcttttgctaaacattgacctttcctattatccttacatttgaataaatttttgtgttccctttttaaattttcaagtcttccaattttgtttt

SEQ ID NO: 58163 - DNA, 519 bp, Glycine max
  Clone ID: PAT_MRT3847_23533C.1
tttgcgatatctgtgaagattaaaaaaggttgatagcaatggccgaaatatatacctctgaattttattttttttctgcttccgctgtctgtggtgcgagtgggctcacgtaactgggcccggtgggcttcaggtgtggcctcgagcccaagcctttcgatatggcggcgaaagaaggagatggggaaggaagggctggtggtggccaaagagctgaagaggctccggtcggacctggtcggctcgacctcttcatccagtccagcgtctcccgcttgctcaagtccgacctcgtcgccgtcctcgtcgagttccagggacagaaccaagtcttcctatgcaccaagttgtatgatatagtccggaaagaaatatggtatcggccagacatgtttttttatagggacatgcttatgatgcttgcgcgaaacaaaagggtggaagaagctaacagtgtttggggtgatttgaaagaggaggaagttttatttgatcagcatacgttcggagatataatta

SEQ ID NO: 58164 - DNA, 464 bp, Glycine max
  Clone ID: PAT_MRT3847_23534C.1
cagtgaatacatgaaaataattatagaattggaaaggcagcatgagatatgtctcaaggatcttgaggacaagcaattaacaacaaggctgacattccaagagatttcagcacctgatgaattgataaacccagttacttcaaacaaatctgggactaaggttgaccagacttgtgatcaagcccagcattctaatgctccgaaagaccttgtgtctgatcatgttgtcgaaggagagggtttcaatgatatagtggaaatcatgacaaggactggaactgggattggattatctgaagctcctgatgccaatgcctctgtagttgtaccatgcagtagcacagttgaactgcaaactcctctggtcaaacatgcttatgctaatgagatggacatagtggcttcaaaagatggaccagtatctggaaataagtgctataatgttgctgaaaatgaatatgata

SEQ ID NO: 58165 - DNA, 355 bp, Glycine max
  Clone ID: PAT_MRT3847_23535C.1
gaacccccaaaaaattttttttttccttaaaaaaaattgggggggggggggtgctttcttttttttttccccccccttcaatacatttggacttttgctatatggctttaccaaattttgcatttcctccgcggagaaaaaaaatactttttttactgaagccgcccgtgctttaaaaaccctttcctgaatatgccctggggtttccagcagggcccggcttaggtttttttttttttcccccccccccattttacttttaaaaagtttttttttccaagggtttttttttcaagcaaaattttccccccttttttggggaaaaaagccccccacacattaaaatttttttttt

SEQ ID NO: 58166 - DNA, 269 bp, Glycine max
  Clone ID: PAT_MRT3847_23536C.1
caaacaaaggaaatttttatcgatgatgaacatgcccaacaacagccaataaaacaaatacatatgcatacaccctactgcgatcacatgcctatcataaagactaggagacaatcaaggtttgatgagaactaccaggggagcaaccttcacatcggtaatccctaccgcaccactcatatctataggcctcacttgatatttttaagacttcacaatatcaaacaaactttccccaacccataacaccacgctttaaggccaaaaga

SEQ ID NO: 58167 - DNA, 394 bp, Glycine max
  unsure (1)..(394): unsure at all n locations
  Clone ID: PAT_MRT3847_23537C.1
gctcctcggcggtcggccgcccttcttcgtgggggcgcctttggntttccctttntttccttgtctttgtgtgttcttggtccccttcccgcnnggtttttccccccttccctgtntgcgcccttcttttntcctgtggccgggtcctagacgtcgcctttccggttnggggggctattcttttccgggggggtgtcctcttgttctctcctttngccgtccccccccctggggtctccttgtgtacttttcctttaattggcggccgcttgctngcttacctccccccccctgccttgncctcggcccggtgctcgggggccttccttcttttcccttgccggggttttttcacgcccggcctgggcctgccccgggctggccccactggata

SEQ ID NO: 58168 - DNA, 458 bp, Glycine max
  Clone ID: PAT_MRT3847_23538C.1
cccacgcgtccgggcagggtttgaaagctgctaccaaaaaggaaaaatatgacaatatttgtgagaagaaattatcaactaccattgagatgctttgcaagtcgtatcctgcggagtttgctacttactttcactattgccaatctttgacatttgatcaacacccagattatggatacctgaagcgcttgttccgtgatttgttcaaaagagaaggtattggctgtctgttttatcatattcttgatttcaaatactttttctgctagtggggaatatagcccattgtttcttaaagatgacacctcttttattggttgattgctctagatactaaatgcagaagtatgatattttaaatgaatgccatcaagtatgatattttaaatgaatcccatcaagtatttaacctttcttcttttttctcatgccatgccgcatttatgcccaaggatctt

SEQ ID NO: 58169 - DNA, 835 bp, Glycine max
  Clone ID: PAT_MRT3847_23539C.1
attcccggcgtcgacccacgcgtccggcaggctttggttcgatttgctttgtgcagagtgcaaaatcagtgaaatcaccatgcttcgtagcttgaccaaacttcgttgtttggccgttcaatcacgccaagttctatcacctccgtcttctcgccgtctccttcaccacttgccgccgccgcaatcgcttcactccgcttccaatttccgcatttctagtccttccttcattttctcgtggtgtcctccccacgcatctcagccttccccttctttggttcaagtgcgtcatgcttcgtccaaggagcgaaagcgaaagccagtgcctccaaccgtttccaaggttaagaaaaccaaaatgaaatcttattcgtctttcaagtccagattcagagcaatgaatgatgggaacatcagacgctggaaggagggaaagcgccacaatgctcatctcaagaaaatagagctacttgcgtttccttaggatgcacagttgtgaaatttgattggatgatgaggcaataattatggtatgcttgtacatgagtcaaagaaatcaaagcgtaggttgaggaaacctggtattgtcccagcggcttatgccaaagtaatgaagaagctcaatttttttgcttagccattgtcagttgttgctggttacaggatgaaaagagcaattttcttttttgcattttatctctgatcatttgttcactttcacattttagaatctgtagaacgagcaaattaccgggcaatttcttatttgtttctttggaacagttagaattgataatatttcgaggtcatgcctgttcaaagtggcatgttttag

SEQ ID NO: 58170 - DNA, 212 bp, Glycine max
  Clone ID: PAT_MRT3847_2353C.1
attcccgggcctgacccacagcgtccgatacggcctgtcgagagacgacatgaaggggagcggacgaagggtttcagtttcggggtgagacacttgcttcagtgaacagagatctcgcgaggtcgaatcagaacgacatcgatttagtgatgcactggcgaaggagcaggactgtgtcagctgggactcgaaacatcttcacccggacagac

SEQ ID NO: 58171 - DNA, 462 bp, Glycine max
  Clone ID: PAT_MRT3847_23540C.1
tacggctgcgagaagacgacagaagggatatgatcatttgattatttttacaaatcaacacaagatttcttaacatattttattcttactcacatgttatttatctcataattactcaaagctaaatattattagatttggacaaccatgtgtctcatccatcttagattatgatgcataacataagtataaattattgattgatattctaattagtttctgacaagtggacataattattatgttaaagcaatgttgtccacaattatagagagtatgttctatttcaccctagcgtccaacatgctatgtttaatgagcatccactcttgtgcataacacattgtcataaggtaaattcttgcgtctagtctcaaggactgagtattacgaaaaaggaaagtgcacatgaactattctattcaaaattcatttgtttctattatatttgaatagctaaca

SEQ ID NO: 58172 - DNA, 553 bp, Glycine max
  Clone ID: PAT_MRT3847_23541C.1
ggttgttttgtttgttttcgtgaaggccaaaatctttattgtttaacacatatgcggatctaatacagatttggctgcatcacagatgatgatgctttaatgcacctagattgaaacccagtggaacggaaattggtagcctatgatcttgctgtttgataggagtacagatagtttttttttgctccaattgcaaatggcccaatcgttgtgggcggctggatcgaaactgtaggtgctacaggcttgcattactgccccttggcgaagactgtagcctgaacaactgaactcaccgtgccgatcatatgaaagctaccgctcttacggatcttagagacttcgatgattgacggcaagatggtgattgcccagatcaaacagtatgagactgaccaccgtaggaaagcgggccaagttgcttgaccatgtgggaccggaacactaactttgagctcttcttgagactgctcgtggctcttgcttgacactccaaaaagcagtcgatgctcttggcttggatcacgtttggcttgcccacgcctattacgcc

SEQ ID NO: 58173 - DNA, 389 bp, Glycine max
  Clone ID: PAT_MRT3847_23542C.1
ctagcacgtgtagatccgcagctcactaccggtatcaaaggaatgatcaacttggtggccacagttggtatacctgaaaataacattgttaagcgttagtcctgtttatattaaaaaagaatacttcatgttgcgtgctagaacagacttttacaccatctgcttttaggactgtaaattatggaatgctgctcgcacagattcgatgactgagccattttttacaaacccgtactccgaagcatggagtaaggaattgctcaatcgtaccgtattgcagggtgatatcatgggcgtcactggacgaactgccactccaatgcaatatgttgaggttacaatagatgggtttatatcctgttaaaaatgttgtccgaacacctattttt

SEQ ID NO: 58174 - DNA, 384 bp, Glycine max
  Clone ID: PAT_MRT3847_23543C.1
cccgcgtccggtgaagttatgttgctacatttggttaaaaaaaaaaaaaaaaaaaaaaaaaaaaaaaaaaaaaaaaaaaaaaaaaaaaaaaaaagaaaaaacaaaaaaaggggggcgcggcttttcgggcgcaagccttccttccttcctgccggccgctgtgttgacatctttttttttttggccctgccctcgttgtttctcggcgcggcgggcctgtggcaaaccctgctggtttaccgcctgctggcgtcccgccctcacttgcccctttccgctgcccccctttcttcagtttggggtccttgcctgagtaggccggcacccctccctgcttcgcctcattggccaatgcgactttgccttgttgcgcgccccttgtcc

SEQ ID NO: 58175 - DNA, 1411 bp, Glycine max
  Clone ID: PAT_MRT3847_23544C.1
ggaattcggcacgaggtagcgcaacaaaagcgcgcacaaaccccggttaggctcgacgagaaagttgggttgtagcgtaccacaccgaaccaaaaatggatgtcgccgtctccggaaactctctcgccggaacttccacaccctataaccgtttgcaagaactaaaggccttcgacgaatccaaagctggagttaaaggcctggtcgactccggcatcaccaaactcccaaaaattttcgtccggccgccagaggacctcgccgccgccgacccagtatccggcaaccctgccggtgcccagttcacgatccccataattgacctcgacggccttaccggcgagcgctccggcgtggtggctggagtccggcgggcggcggagacggtggggttcttccaggtggtgaatcacggaattccggtgaaggtgctggaggagacgatggcggcggtgcatgagttccacgagctgccacaagagttgaaggctgagtactatagcagggagcagatgaagaaggtgaagtatgggagcaactttgatttgtatcagtcaaagtatgctaattggagggacactcttttctgtgtgatgggtcctgaccctcttgatcctcaagaactgcctccaatctggatgtagcaatggaatactctaggcaagttaagttgttggggagagttttatttgggttactatcagaagcacttggactcgaccctgaccatcttgaaggcatggattgtgcaaagggccactcaattttgtttcactattatccatcatgtcctgagcctgaactcactatgggcactaccaggcactctgatcctgatttcctcacaattctgcttcaagatcacattggagggctccaagttttgggcccttatggatgggttgatgttccccctgttcctggagctctagtagtaaacattggagatctgctacagctaatatccaatgacaaattcaaaagtgtggagcaccgtgtgcttgcaaaccgcatagggcctagagtatcagtggcatgttttttcactcttcatctctacccatcaacaagaatatatgggcccatcaaggaactattgtcagaagaaaaacccccggtttacagggaaacatcactgaaagatttcattgcttactatgataataagggacttgatgggaattcagctcttgaccattttatgatatcgcgttaaatatggaagtgtaagtctgattattcattggctttcacaatcagttattaagttgtcttaaattgcaatgatcatgcttcttatgagcaacatcaaccggttacagacataattttgaatgtaaatttgtgcacactttgacatacaaagtatcttctaaatgagaaatccaatccagctcaaactttcggctcc

SEQ ID NO: 58176 - DNA, 622 bp, Glycine max
  Clone ID: PAT_MRT3847_23545C.1
ggctcgcgtgtggcgcaacacccacgcacacacagcgacattaacttccacgagaaagttgggttgtagcgtagcacaccgaaccaaaaatggatgtcgccgtcgccggaaactccacaccctataaccgtttgcaagaactaaaggccttcgacgaatccaaagctggagttaaaggcctggtcgactccggcatcaccaaactcccaaaaattttcgtccggccgccggaggacctcgccgccgccgacccagtatccgacaaccctgccggtgcccagttcacgatccccgtaattgacctcgacggccttaccggcgagcgctccggcgtggtggctggagtccggcgggcggcggagacaatggggttcttccaggtggtgaatcacggaattccgctgaaggtgctggaggagacgatggcggcggtccatgagttccacgagctgccacaagagttgaaggctgagtattatagcaaggagcagatgaagaaggtgaagtatgggagcaactttgatttgtatcagtcaaagtatgctaattggagggacacttttttctgggtggagggggccgacccttttgttgatccttaagaactgggctgccgatttgg

SEQ ID NO: 58177 - DNA, 412 bp, Glycine max
  Clone ID: PAT_MRT3847_23546C.1
ggaggaggaaaacaaagatgcttcagctgctgccggtctcctcaagaaactaactgttggcgaggataaatcggaggacaaagagccgccggaaaaggccacggataccaatgtgaaaggtgagcaggatgtatagaagagaagccaagcctgaggatcataagatgaatcagctccaccagcatagaatatgatgtggctggtgaatgatttattctctcataggttgctggcatgtttataaaagattggtaacctagattggaacctcaggatatagaatggctggcatgaagtgatatgaagatgtgatggtctgtgtatctgttgagtcctgtttttgtactggtttttgcaagtatgcttggatggttttgtgattgtgggttttcatttttctcatgtttccttc

SEQ ID NO: 58178 - DNA, 811 bp, Glycine max
  Clone ID: PAT_MRT3847_23547C.1
aagtcccggcgcgaaccactcgtccgtacggctgcgagaagacgacagaaggggagatcgcacaacattattctttcgcaccttgcagaatcaattttctctctcaatcgtctttcatggctcgtaccaagcaaaccgctcgcaaatccaccggtgggaaggctcctaggaagcaactcgccaccaaggctgcaagaaaatctgcacctaccaccggtggagtcaagaagcctcatcgctatcgtcctggaactgttgctcttcgtgagatccgaaaataccaaaagagcacagagcttctgatccgcaagctcccctttcagcgtcttgttcgtgaaatcgcgcaagacttcaagactgatttgaggttccagagtcacgcggttcttgcgcttcaggaagctgcggaggcttacttggtgggtttgtttgaagacaccaacctttgtgcgatccacgccaagagagtgaccatcatgcccaaggacattcaactcgcacgccgcatccgtggagaacgtgcttaggcttataataatgataatagcatagttgtcgccttttcgttttgcaatacatttcttgtttcttagggttttagtgttattttccagtttgttatgttttgtatagaagatagatatatcaacagcaacagcttcttaccatttgtagtgtgcctaaacggaaatatttgaataattagattcactttggccaaatcaaaaaaataaaaaaataaaattaactttgccgattttgacgaaaaaaaaaaaaaaaaaaaaaaaaaaaaaaaaaaaaaaaagcccct

SEQ ID NO: 58179 - DNA, 927 bp, Glycine max
  Clone ID: PAT_MRT3847_23548C.1
tatagaaaaccctcgtattacacgcccatataaaaaacaaatcaactgttccatcttttccacatcgcatatcaattattcttcggcatcttcgaaaatcaattttctgtcttctctgcgtcttcttcctctatcaatcgttttccatggctcgtaccaagcaaaccgctcgcaaatccaccggtggaaaggctcctaggaagcaactcgccaccaaggtactattttttttattatttagggtttcgttttttttttctagttagggtttctcgatttcaattaccttttattcctaatttcccgaaggtttattgacaattgattcttcaattacgtaattatgtgattttggatattaataattgaataaacgcgtgatttctgtgtaggctgcaaggaaatctgcaccgacaaccggtggagtcaagaagcctcatcgctatcgccctggaactgttgctcttcgtgagatccgaaaataccaaaagagcacagagcttctgatccgcaagctcccctttcagcgtcttgttcgtgaaatcgcgcaagacttcaagcaaatcactgacattttttgttgatatcgttgccaatgtgaccgatatgattccagactgatttgaggttccagagtcacgcggttcttgcgcttcaggaagctgcggaggcttacttggtgggtttgtttgaagacaccaacctttgtgcgatccacgccaagagagtgaccatcatgcccaaggacattcaactcgcacgccgcatccgtggagaacgtgcttaggcttataataatgataatagcatagttgtcgccttttcgttttgcaatacatttcttgtttcttagggttttagtgttattttccagtttgttatgttttgtatagaagatagatatatcaacagcaacagcttcttacc

SEQ ID NO: 58180 - DNA, 1012 bp, Glycine max
  Clone ID: PAT_MRT3847_23549C.1
tttttattaagtgtttcgttttttttttctagttagggtttctcgatttcaattaccttttattcttaatttcccgaaggtttattgacaattgattcttcaattacgtaattatgtgattttggatattaataattcaataaacgcgtgatttctgtgtaggctacaaggaaatctgcaccgacaaccggtggagtcaagaagcctcatcgctatcgccctggaactgttgctcttcggtaatttgctcctttcagtaattgttttgttttttcttctccttcgcgttttgaattttcgcgaattattgttttttttttcgtggtttcagtgagatccgaaaataccaaaagagcacagagcttctgatccgcaagctcccctttcagcgtcttgttcgtgaaatcgcgcaagacttcaaggtatgttctaaattcaaaaccaaggttttaaatattggttgcggtcctgttgtggtttcattgagaccgttgatattgcagcaaatcactgacattttttgttgatatcgttgccaatgtgaccgatatgattccaggtcgtgaacagttaaaaccatgttcaaaaccctagtttttgacccatacctttttttaattattataattaagtttttgtcttttgtgcagactgatttgaggttccagagtcacgcggttcttgcgcttcaggaagctgcggaggcttacttggtgggtttgtttgaagacaccaacctttgtgcgatccacgccaagagagtgaccatcatgcccaaggacattcaactcgcacgccgcatccgtggagaacgtgcttaggcttataataatgataatagcatagttgtcgccttttcgttttgcaatacatttcttgtttcttagggttttagtgttattttccagtttgttatgttttgtatagaagatagatatatcaacagcaacagcttcttaccatttgtagtgtgcctaaacggaaatatttgaataattagattcactttgac

SEQ ID NO: 58181 - DNA, 482 bp, Glycine max
  unsure (1)..(482): unsure at all n locations
  Clone ID: PAT_MRT3847_2354C.1
gctcacatgttaattcagttcttcttctacctcattaagctggaatggtggtttggagacaattagggattttagtaactttgtttgctgttgttttcttgtttacttaagagggaggaagaagtgaagtaaattcttaacagataggtatgtgtttttggagagagcaacatacttaaatcaggagggtttctctttttctgtcttctgttgtattctggtgctttttgttgcctatttttagcacatagactgccacctctatagtacccatgaaattgaaatttaatggaacctaccaaaataatcttctctttttgatatgctttcagcttgaagtggtgtgttctgtcctttaattctaagtagtttttttaagagaaaaaacttttttttttcaaatctttctctttgaatttacacttatattttgatntatatttctaacaggttagctntgatggttgttgggggcgcaatat

SEQ ID NO: 58182 - DNA, 482 bp, Glycine max
  Clone ID: PAT_MRT3847_23550C.1
cggggcgacgagacgtcactatagcggagggcgcgctcttttttttttttttagcggataatctagacatctgcgagcctgcattacaacacaggataagggagacccttaacagcccaaacatggatcctaagaaaaatgagcactagctccataacatacaagctgaaaacacgtggaaaaggcgaagggatatttgtatacaatgaggcacgccaaaaatatacctgctaaggccacaccaaagacactttgaaatgccttcccgagacacatctgaaccctaaaatatctttaatccagcagtgtactgaagaggaagaatgaacaaaaaatcagaagtgattcccactcgatcatagggacaagccttatttatgagggcccgagaagatgttgggagagcaggaacagacatctcaggtgcacagagcgacgtagatgcaaaggacgatgacgaagaacgccagggctacatcagt

SEQ ID NO: 58183 - DNA, 564 bp, Glycine max
  Clone ID: PAT_MRT3847_23551C.1
tcttcttcaactttgagatggcatataatgacggctaattatctgtcactataggttttacctactatgtatagtgtgtaggtaaaagtcattaacttctacttacatttattaactgtaggtaaaagtctttaatatgtatctatcatcttcaactgtaggtaaaagttattaacttctacttacatttcctaactgtaggtaaaagtctttaatatgaacatcacttgagaccgcaagaaccttctttcctattaaccgatgccacaaaactgcactatttagaaacaaggccagaacctaggattagatatgttcaaacatgatgtaataacacttgatgtcttttggcagaacttcaatttcttctacagggacatctgacactgatttttttgccttctgttcaacatacttgcttgcttgaatattttcatggcgccggctgattccagattttaacacttgaatctctctcatttcatccttagttttgaaactttcattccatctgtttaacagccatttcaattgcactgatccttttctgcaagccttggaagc

SEQ ID NO: 58184 - DNA, 438 bp, Glycine max
  Clone ID: PAT_MRT3847_23552C.1
aacatggtgttcactttcgagtctcagaagtcagtgccagcaccctttctgacaaagacataccagcttgtggatgaccctcacactgaccacattgtgtcatggggtgaagatgaaaccacatttgttgtgtggaagccccctgagtttgccagagatcttcttcccaactatttcaaacacaacaacttctcaagctttgttaggcaactcaacacctatgtaagcatccttatcttttcttatgtacttctctacaatccctattcttcatctttgcttcatttcacttcattgagtttgaaggtaaagctctttccatttgagcaaattgaccaaatacttatgttagaagttaaatatgatggaacttaagttctttagtataactagagatctaacattcctttttgttccattatcttgaactacataagg

SEQ ID NO: 58185 - DNA, 198 bp, Glycine max
  Clone ID: PAT_MRT3847_23553C.1
cgatccggactccccggtccgatccacgcgttcgatatttttgtcggatttctcgccttcgaagcttctaagatgacttggtcctacattaaatggacagcttctcttctccctagcaattcgaattttggttgtagaccccattccattttaggcctttactcacaagatggtgccaatttggagagtttcaggaat

SEQ ID NO: 58186 - DNA, 341 bp, Glycine max
  unsure (1)..(341): unsure at all n locations
  Clone ID: PAT_MRT3847_23554C.1
ccacactgnntggcctctcaccaccattaccagcctnctccacccaccacccacagctgttgcagctgccacaactttttttcttttttttttgcacaccnncnnctttttgttcgccggggcacacctgttgctcacccccaccaccccgtcaccaccacgaagtgttttaagccttttcatcactcctctctcaaccccaaccacgccttattcccatcccctccgaggcgccctgccccaaatccttcttttatcataatctcgagctggcggcttaaaaccaccacctttttttttctcnccngccccgatcttatttccccatcctcctcactcct

SEQ ID NO: 58187 - DNA, 352 bp, Glycine max
  Clone ID: PAT_MRT3847_23555C.1
cctacttacattctccaccaccttctgatatttgctgacgccgacatggagggggggccggggagatgctatcgccagatcaagaacaagccataccccaaggccatgtactgccgtgaagtacctgaccccaagatcaggatctacgatgatggcatgaatagaaagggtgttgatgagaacccctactgtgtcaccttgtaaacttgagagaaggagaatgtctccattgatgctcataaggctgcctgtattgcctgcatcaagtacatgaccaattctgaaggaaaggatgcctaccaccttccggtcagggttcacccacttcatgttcatggtatcaacaagatgc

SEQ ID NO: 58188 - DNA, 132 bp, Glycine max
  unsure (1)..(132): unsure at all n locations
  Clone ID: PAT_MRT3847_23556C.1
gtntangcncgcnnacgtaagctnggaattnggctcgagnaggttgtggggncntcntctgttaantctgggcntgccancgggctttctgggcncngnccgctcnccttcgcncaanncctnnttnangtt

SEQ ID NO: 58189 - DNA, 263 bp, Glycine max
  Clone ID: PAT_MRT3847_23557C.1
tacggcttcgagacgacgacagacggggggaggcgagaagtgagagcctacgcgttctttgcgctcgcactcctccgcaacggcgtcgttttcctcttctctctactccgaagtgttccgttccgttctcgctttccgaaaaacgcgttcgcgtgcgtctctttaagcggcggttaccgttttcttccgctagggttttgcatttgccgcttctaagttcccagtgcttcttcttcttcgaatcgcgtttgctgcaataaaaa

SEQ ID NO: 58190 - DNA, 2248 bp, Glycine max
  Clone ID: PAT_MRT3847_23558C.1
gcgtcctgtgaagcaacagccgcccgcaacgcggcatgtctcccacatggtcctgaaggtggatcgagcagggcctggggcggttcatctgatttcgagccctatcccacggcctatcgccctcaatccgccttcccccgcgctagccccgctctcaccacctggactacccgcaaaggaagcatgaaatcatccgtctctgatctcagtgggaatacgtagatcttctccattgcttcctacaaattactttaggtgatttaatgatcccaactctcttcaactatcactactgtaggctcatgttttacatgaatatgatcatgaagatcacaaccatatcctggtttaatgtattaagccattcgcatcctagtggtatcattatacatttttcaccagttgtcctcccatcttaaaaccaaaatttcctagattactggatatcaaatgctattgtgctgatggaaagtgaactctggccaattcttatcatggatgctcgcagccttgggcaacgaacaaaaacatcatccctgttccagcgttctaccatacacaatgggcaccacagtatctagagttcgttcatctaagatataatggagcaatctacaaaatacaggtcaggcgccacaaagaaagagtctatttggcagatggattggaaaatttcaggaaacaattgggaatctatgaatcaacaaccattcagttttttgcttgtgatcatcactccccctttgacatacatttcataccaaccctggagcggcaaacttgtggcaggcagagacattcatccagaaagcatatgtggactattcagtttactcaggaaatggtcggtgctcctgaacctctgttatatttattaggtgttcacattgcccttatgcagcagcaacctaatacaatgactattattgtccctcagcatccacagcaaggacgagaggttgccaaatgcagaaattggagaaagaagggcaaaatgtagttttgaggtctcaatatgagaagtttaagccacgagctaatatttatgtggtggacactttgggtgaattaagactcttgtacacattaatgccaataactgtgattgggggttcattactccctggttggtctggccacaatatctcagaagctgcagcagctggctgtgctgttttgacaggtcaatgttgaataatgcaattctcaaatttcaacgtgtttaggttggaactcatagttgatttcaggttttcccgttgggcatttctcccacatggtactggaaatgcaacgatcaaatcctttgtcagttcttcagtttacttgtaggtttctggaaaactggagcttgaacacgctctcattgagctcttcaccaatgcaacacttcaaaggaatccaagagtccaagactatgagaaatgaagtttaatattgtcacaacaaattttcattcagactcgatccatttattggattcatttaccctgcgatataagcacacccatatttacaaccccatttcacagtaatggtggtttgatatattattttaacagcattctgttatgatcaagcacaaagttcctagaattcgaggtctagggcctccagagcaacaaaagggagaagggaaatagtttgtattattttctgcttatctgttgaattacattcttctatttataagctatctatgatcattctagaatttaattctaacagattttgccttcttctgagccttggaggaattgagaaattgagaaatgcactgcgtgattgccttggggacgaggtacagcttttctaacggcaattttctagaatccttgctgacgtggctgctgtaatttgggtgtatagtcatccaggtaccttggtctgatgattctcctttttgcccctgcttcttcttcttccttatgttgctctgttcttggtgttggttctgtgttcataacacattccatcaatctactcgttagctttctaatattctcggatattaccgaacatcaaaagcttgaagagtatagttgcaagattcttcttttattaagtgttgttacaaacttttactttgggtcggactttggcaagtatgtgtttcaaatcgttgaatttagctcgaggacaatcatctcccggccatacagtaggcttttgtaggtggctttgaatattgtgattcatactatggagttgttatttgcataatcatattatatcccgtcataatctc

SEQ ID NO: 58191 - DNA, 115 bp, Glycine max
  Clone ID: PAT_MRT3847_23559C.1
aaaatttggatcatcaatagtatctacaaaggtagaattagtttgggcctctaattgcaacctgtatgatgattgcctttcaataagtttcacgcagtttgctcatgtgaaagat

SEQ ID NO: 58192 - DNA, 297 bp, Glycine max
  Clone ID: PAT_MRT3847_2355C.1
aaacatgaaaaacccctttggtcctttctaaaacaaatttttagaggacaagtcaacattagacaagagttagccatgattcctttttaaaagggttggggggggcaattttttcgaaaggaaataaaatcaggccgcccacttaaaaaacaattgctttatcatggggacagggatgagctaaaaacatggttatataacgttttgatgatgacaatgataacaggaatgggctggtctaagcgttgggttctcattctgcaaaggggaaagtctttttttgagctctgagttttg

SEQ ID NO: 58193 - DNA, 439 bp, Glycine max
  Clone ID: PAT_MRT3847_23560C.1
gaatgctccgatcaccatgaaagaagccctaactttgccgagcattggcatcaattcgcaattcatcacgtttacgcacgtgacgatggaatcggataagtatatatgtgttcgtgaaaccgctccacagaatagcgtggttatcattgatatgaacatgccaaatcaacctttgaggaggcctatcaccgcggattccgctcttatgaatccgaattctagaattcttgctttgaaagcccaactgcaaggaactactcaagatcacctgcaaatatttaacattgagatgaaagcaaagatgaaatcatatcagatgcctgagcaggtagtcttttggaagtggattagccccaagatgttgggtctcgtaacacagacctctgtataccactggtcaattgaggtgactctgaactgtaagatgttgagagacagc

SEQ ID NO: 58194 - DNA, 384 bp, Glycine max
  Clone ID: PAT_MRT3847_23561C.1
tgggcatttctcccacatggtactggaaatgcaacgatcaaatcctttgtcagttcttcagtttacttgtaggtttctggaaaactggagcttgaacacgctctcattgagctcttcaccaatgcaacacttcaagtacgcggtagagctgctaaggaagctttttgttggttgtcctcctgtggcgttgttgaaaacatttggagtttgctaaattttcacatttttgtctgcagaggaatccaagagtccaagactatgagaaatgaagtttaatattgtcacaacaaattttcattcagactcgatccatttattggattcatttaccctgcgatataagcacacccatatttacaaccccattttacagtaatggtgggt

SEQ ID NO: 58195 - DNA, 762 bp, Glycine max
  Clone ID: PAT_MRT3847_23562C.1
acttagagttgtctcccaatcacttggcttgcagtatttgatacttacgttgtcgtgggatgggggcgctaaggaggcgttcaatgtgctcagaagcaccgttgaccggagttattttcctgatgggcagacgttttgcacccttgcgagtgctttgtgcagggagcgcaagattgatgagatgaaggagttgttgtatcttggcgtggggcggaatattgtgcctcctacgtcgatgtatgacaagtacatatcggctctgtgccgggctgggagagtggaagatggttatttggtacatggggaacttaagagtgttgctgccaagacgtcgtatgttaagatgattaagggttttgttaagtctggtaggggagatactgctgctcggcttcttgttgaaatgaatgggaagggtcatacgccgattcctcggttgtgtagatatgttatttgcagcttgcttgaaatggacaattcaagagggcgctttttcaatttactggagatgctgacccgttgtcaacattcttgtgagacttacaactttttccttgatggagctggacatgctatgaagcctgagttggctagggaagtatttgagttgatgcaaaggaatggcattacgcccaatatgtgttctcttattcttatgatgaatggttatttgatcagtgggagaatttctgatgctcttgatttttttaatgatgtacagcgccggggtttggcaactaagagttatatgttgccttgata

SEQ ID NO: 58196 - DNA, 203 bp, Glycine max
  Clone ID: PAT_MRT3847_23563C.1
gagggccaatttatatttctccttcattattgctttgttgaatcgatcccaagtcatggcatgacgacctcaagggggctggaaatattgcttccaacagaaaaattacgggcgtaagagtgaaccaaaaacgggctgccttcttttatgaaccttttaacaaaatagttctggtttgaataatttaattaaatggttattta

SEQ ID NO: 58197 - DNA, 1471 bp, Glycine max
  Clone ID: PAT_MRT3847_23564C.1
cgagatcttgacctttattcctattgtgagtcttgcttgctaccattccaattcaagtgtcatgtgggctatgtcccttctggccaaagagttgtgggtttaagcaaactctctcgagtggttgatgtatttgctaaacgactccaggagcctcagcgtcttgcagatgaggtttgttcagcattgcatcaagaaatattgccagcaggtgtagctattgtacttcagtgtacacacatcccctttccagacatagaatcaatctttcttgaatcgaaccaacaagtgtgggtgaagacacttgttttgtcaggttctgggatttttgaaaacaaaagtgaagatgcatggtctgatttcttttgccttctaagatttagaggtatcaaaatagaaaacattcatttgagaggatcatctgaccaatgctggtgtccatctttgactgctctttctgctaaagtttcctccaaaattgtaccagtcaatcccgcaatggtgactgcagtatcttcaatccttgattctctgggagaagattcattaaggaaggagcttgcagggacgcctagtcgatttgtgaaatggctattgaacttccaaagcattgacatggatgtgaagctgaatcgttccctttgtgatggaatagatactttaaacctcgatagggaggttaacttcaatgacagacaaatacattctgagttgaacttgccattttggtcacaatgtgagcatcatatacttccatttcatggtgttgttcacataggatacttcctttcagaaggatctaatcccattggaaaatcccttttacagtctgtagtacatttttatggtttcaaactccaggttcaggaaaggcttacaaggcaaatagcagaaaccattgcaccactattattaggtggacatgtaatagtagttgtagaggcaagtcacacatgtatgatttctagaggaattgagaagtttggaagtagtacagctaccattgctgtattaggtcgcttttccactgacctcgctgcaagggatgcattcttgcagtgtgttgcaagtgctacaacttctggggggcaatagttcctgttggtgctcacttgaaatgatttagttgttactccattcttgacattttttcaaggttttgctaccagcagtgcagcagcctagacactgataaattcagaagacatcctttcattccatcgaataataatttcactacatttcaaaatcactgtgattttgttctggtggcacaggcttaccctcatatattgtctcaagattgatagctagatcttcatatttcgtcttccttttcttttatgtgattacattgtatgtatcatttgtccagatttacatgctggcagattacaatggttactcattttcataatttgtgtatgtaaatgctttactgccaaaaaaattgagtgatacaattcttttaaaa

SEQ ID NO: 58198 - DNA, 359 bp, Glycine max
  Clone ID: PAT_MRT3847_23565C.1
gtctgagttttttttttttttttttttcaatactctctgggctatctggaaaagaaaaaatctatggattttttaaaataagaagcaacaactaacaaggatcaacctccttccccaacccgcgaaaacaatgtgcagtaacaaagaggagtggtcatggccaagttatacttctccatctccacttacccaacatgtattacaaatttctctatttcttttcgtctcatttttttattatcaatctaaacaacacatttttgccgtaatcttcaatttttatactttttttcttcatttatttagcttttaatccgaaaaaaagcattagtaattaaaatgtggcgatctattcataa

SEQ ID NO: 58199 - DNA, 251 bp, Glycine max
  Clone ID: PAT_MRT3847_23566C.1
gtacactcaaaacagaaagcagaaagcatagctcatccttgagttaacagatggcatcagcttcttccatggccctcccatccccatccttggctggcaaagccgtgatgctgggcccatcagccccagaagtgcgaagggtgagcatgaggaagaccgtcacggaacaggtctccgcaggaagcgcatcgtatggactagatcgagtcacgtacctgggcccaatctctggccagcctacgtccgtacct

SEQ ID NO: 58200 - DNA, 498 bp, Glycine max
  unsure (1)..(498): unsure at all n locations
  Clone ID: PAT_MRT3847_23567C.1
ttcggctcgaggaaaaagataggctggaagccatcaggacccaaagttcataaggattcatagcaaacagagattgtctaacctcagacatgaaaactgcttcatcaggccttgataaagctcatcactaatacgcagaatagtattaatcaccatgctttggggacaacaataatcattcttctgaaacaatattttaaggaaagagagggcttccttcttaagaatatcatcatccatacaccatataccatcaatattcaaaccagttattttttttatggcgacgaataattgtttgtgtttgtgttcttattcccatacttgacccaattctctcttgacttttgaaaccataatatcttttcttgggcaaaatcgtgttgtatatgttgtcccaaagctccttcttctcaaaaagaactaaagcatgatcatatgaagtatccagctgactatgggtcccttttaggtgggcctncaaaatccttttataac

SEQ ID NO: 58201 - DNA, 416 bp, Glycine max
  Clone ID: PAT_MRT3847_23568C.1
cttgtgtttacatttaagatatgaggtgcagttctcataacattgtattaatgcattgaacgtgggagatctgtctgcatatgaattcctcaaggtcatagtatagtgatgcttatgcatcataataatatagtctattctaggacttatcttctatgaagaacattggctcgtcatcttccacagattgcaagctcgtttatactagcagatgaacgtattaactatcattgatcagctacattactatcctgatgaactaccgccgctcttgtaacatgcaatctgatatctactccgtaacataatgtcgaattatgtcaattctcaaaagattctatacatttaacacatacatatgtacctaccttatctgcattgtttatgtactcgtcactgcaatgtacatacttatg

SEQ ID NO: 58202 - DNA, 449 bp, Glycine max
  Clone ID: PAT_MRT3847_23569C.1
cctgcctgcacgcgccccggacttactggccgcgacccacccactccgccgtcgcgtgggatacaaactgattatgatcctggttcagtactttgtttaatttacagggcaagctggggaacactcgaactattgctgccaccctcatatctggtctaagacgacccgggtagacctttctatttctctcatttgttgaaatctgttcttgtcactgatccgcctttgcgatcaaagtgatcttatttgacaaacactccgtcgttggtacaaatgacggcttggtcaatattctctggagacaacaggttctctgtggcgcacttacaattgaccgattagacatctggccgggatcaacaatagccctgagggagaaagacttcccacattacattatgtggcacttgtttaccttgctgatctacattctcccatcctttctgact

SEQ ID NO: 58203 - DNA, 151 bp, Glycine max
  unsure (1)..(151): unsure at all n locations
  Clone ID: PAT_MRT3847_2356C.1
caaatcttcaccatctccacttgatcaattatcctcttttgatgtggcaagatcaggtttgcagctcctccttccttgaagcacaaaatcatctcttgtaacatccaaaattatcacaaaaaacaacaaaaangggcggcngggtctaaaa

SEQ ID NO: 58204 - DNA, 291 bp, Glycine max
  unsure (1)..(291): unsure at all n locations
  Clone ID: PAT_MRT3847_23570C.1
gtngtngngtnnganttcggctcaacatanantgggctcccaagggtttnanctttctgggntgtgttnntatgcgtttcagcactgtcactggagtccttctgttgcagtgggaaggcaaantnatggcnttgttntgaacttctacaangatcatgaccctcaanctnaaganatcatcacanaacaagtcaancttctctacaancaccacaagaacactnctttctcctngctcagnaacatcttccatgactgtnntgttcanattgtgatgcttnactgttgcta

SEQ ID NO: 58205 - DNA, 298 bp, Glycine max
  Clone ID: PAT_MRT3847_23571C.1
ggaaaaactaaaacataaaaaattcccaacttaagatatccaggcctccaaacatttataaattatccttaaaaaaaaaaaaaaagcaaaaacaaagtgggactaaaggaacaaagaaagagggggggggaaaaaaaaaaagtgcactataactgtaacaaatggggaaagaaagttagctcatttggaactaatatatggggattaagaaatgtactttgagatgaaagaggttgaggtgcgaagggcaaaaaatgcaagaaaaagccagacccaaaggcaaaaaaggggggggagg

SEQ ID NO: 58206 - DNA, 717 bp, Glycine max
  unsure (1)..(717): unsure at all n locations
  Clone ID: PAT_MRT3847_23572C.1
caaaaaggctgctcctttttaatttgtgttggtttaagctaaaggcctcatcctcattcttttcttcttgttggataggataagatagctaactctaggtgcaactttgctttgctccttacctcattgcactctctctttgttttttccactccaaaattgattcagttcagataataacacacccctctatgcatatatatagatcagtcacaccgatctggctagctaactagctacttgtcatctatacgttttgcatgactctctctgactccatgtacagaaagtcagagatgaagagagagagagagagttttttgtttcccaacgtggttttggttggagtttatggtccttgtctttttttttctatttaatttattctcaaaatcttttcctcttttgttgatctaccttcctcatctgctgatgcatcttccatgatgtttgttttttcttgtttctctctctctctttgtatctcaggactttagatacaaacccttaattttcttggaaaaaattgttcctttgagaacatgcatgttagatcctagatttgctgcttttcttatcaccatatttcatgatgttttccatcaaaggatattgcattttctccctcagatctgacccagttatgagttatttcccttcagatttttcatttttgtataccttntattctgngaactttccatatttgggaagcta

SEQ ID NO: 58207 - DNA, 238 bp, Glycine max
  Clone ID: PAT_MRT3847_23573C.1
acgccgccgccgcaggacatcgtcgttcgcggactctgcatcgccgccgccgccttcggcgtcacctggcttgcgctgatcctgatcacgctgctttacaacggcatcgccggtctgaacctcgagattttcgtggcagatacgccgccgccgggctcgaccgaaggcggcctgcgcaacgccatcgtcggttcgatcatcatgaccgtgctcggcgtcggcatcggcgcgccgctcg

SEQ ID NO: 58208 - DNA, 295 bp, Glycine max
  unsure (1)..(295): unsure at all n locations
  Clone ID: PAT_MRT3847_23574C.1
ttgtcttttctttttctttctttttctttcttcttctatctttttcttngatgnnaataataaatcgttcagccacgtcgtcagctccttattcggctcgagaatannnttttatggcctatggggcgtgtaaataataccctatgatagttcgcattattttcccttagagtgggaaatggcaattcttaacattgtctttggtcataagtgtaaacaaaaaatttgaaaaaaaaatataaaataaagttattttattaaaataaaaatgaatgaaaaaatatttaaattgaaa

SEQ ID NO: 58209 - DNA, 312 bp, Glycine max
  Clone ID: PAT_MRT3847_23575C.1
aagaaacccaaacttttgaaataatattaatacaaaattgggcccacccctggtgttgaaaataaaggagagtttttttacttttgtttaacaaaaacaagccaaattttggggggcaaaaacaccatttttgtggagggcaaattgcataaatttttgtttcaaccaagtaaagaatatttggtaaattgatcacttttatctcaacagaactttcacgccttcttttattctggtcaacctttggacatcattaaagagagttgtctggatgcccagaggaacccttttcagggggaaaccgtattaaaa

SEQ ID NO: 58210 - DNA, 252 bp, Glycine max
  Clone ID: PAT_MRT3847_23576C.1
gagtgcgaactgacaatcttatataaaattctcgatacatgtagctatagacattcacattaatgttccgaaggccaaaaaaaatgtgaactctgaaaaaggatacatagaaaataaaataagcattcacaatcactcctttgctacagacaacctactttcgaagacattgatgaattccaaggtgaaaaatgcttctcatcaattctgtgcccgccacatccagagggatgccacacctcgagccgaatt

SEQ ID NO: 58211 - DNA, 489 bp, Glycine max
  Clone ID: PAT_MRT3847_23577C.1
gcttacacaagcttccaactaaagtgacaggcctaaagtctccaagaccttaagggggatgagtaagaaaagaggcattggtacctcttgacaaacatccatgactatgaaactcttgtatagctctaacaacatcctctttcatcacctcctaacacttcttgatgaaattgaagttgtagccattcgaatcaaacttttgtttccatcatactcctaaactgcctcttttattttgtgttcctagaaccaaaacgtgagtgagcctatcattgtcctctccattgatggtcttgaaattcactccatccaacaacacatgcatcctcctctccttcctctttcaagtccaaccaattaatgttgcttaccaactcctccattttgccttggacccgtcaaacttcaacttgctccacttcttaatctctacctttatagcaactttagtttctccttgaatacataagcttcttcctcacaaattcc

SEQ ID NO: 58212 - DNA, 346 bp, Glycine max
  Clone ID: PAT_MRT3847_23578C.1
aagcccaaaaggccccttttttttttggaaaaacccaaagggccctattaaacatttaaaaaccacaaatttttttaacatttgacccccagaaatttttagttttccccggggcaaaaaaaaggtggagaaaactggagggccaacgggtagcccaaggggtttcagttaatacagaccccccccaggaaaaaaaaaaagggggggtttactcaaaaaacttggaataataaaaagtttgggaaaaacccccattttccatttttttggaaaaatctgccatggggctaaaaaaaattttacggttttttggccacagggcccccccaacttccggggacggggg

SEQ ID NO: 58213 - DNA, 369 bp, Glycine max
  Clone ID: PAT_MRT3847_23579C.1
ttcggagtgtcttctaccagtcataggtcacctctggggtgcagaaaccgggagctacatgatctatattgttttgccagcctccttttggttaatttgggcaattggctttgctcttacgtattgttgtggatattctgcgttggattcttctcagagttgtgtgttttgttaagttttaaaggtgcgggtgtcgtgtgcacatctcctatccgtggtctgcagtcttatcctgtatttgaatatgcttatcctagcttgttgtcgaattggggggtggctctgcttgattcatgttatgtttatgcgtggggcgttcgcgttgctgctttatttgtggttttaaccagcttttgagctttatttctt

SEQ ID NO: 58214 - DNA, 794 bp, Glycine max
  Clone ID: PAT_MRT3847_2357C.1
acggctgcgagaagacgacagaaggggaccacttctctctttcaatccctttatctgttggatagagcttcttgccttgtgttctacgttctgcattcttctcagcccgtaatctagctcctgtttgcagaaacaaggacctgtcatcaagatggtgaagttcacaactcacaggcttcggcacataatggactgcaaacacaatattcgtaacatgtctgttattgcacacgtcaatcatggaaagtctaccctcactgattctcttgtggctgcttctggtaatatcatagcacaagagggtgaagctgagcgtggcaacactgtcaaatcctctggtatctctctctactatgcgatgccagagggtgatttgaagaatttcaaaggggaacgtgaagggaaggagttccttataaatctcattgactcaccagggcatgtggacttctcatctgaggtcacaaccgcacttcgcatcaccgatggagcacttgtggtggtggattgtgttgagggtgtctgtgtccagaccgaaactgtgctgagacaagcccttggagaaagggttaagcctgttttggctcttaacaagatggataagtgctttcttgagctcaatcttgatccagaggaggcatacctaacactccaaagggttgttgagagtgtgaatgtaatcatgggtaactatgaagatgctctacttggagatgttaaggtgtaccctgagaagggaacggttgccttttccgctggcttgcatggatggggctttacactcaccaactttg

SEQ ID NO: 58215 - DNA, 208 bp, Glycine max
  Clone ID: PAT_MRT3847_23580C.1
cccacgcatgccaacataatataaaattcctcttaatgcaatacacatttgcaacttgcgagtttcaattcaaccctcacaacattcaaacccaaaaaaaaaaaaacctcttcttcctttttttcacttctacccttctatgctttaatcttcttcatctcaacatacacacacaatttttccaatatctaccaacaattccttctaa

SEQ ID NO: 58216 - DNA, 763 bp, Glycine max
  Clone ID: PAT_MRT3847_23581C.1
gaaagaaagaaatctttacacattacttctgttggcagaaaaatgaatcagaaatttcattcttttctgataaattccaattaattccaatcaatcagtagttccttacatgtcaataccagaaagaagagaggctgtgggatcttatattgtgtaaactgatattcttaaggtgtcatcatctgcctaaatggagatcttatttggattttacggctccagaaaacaacaatagttagggaaggaatgaagttagcagcaacatcagttatcctggcgtggcatagtaataagttcatgtcatggtgattctattatatcattttcacagaacttccatgatccgttgtcttgccgcttcataacatacttaactttataagtgagataatagtttgggttcttttgctgtgaaccgtcaacgagttcagatgcttcctctaagagagcttcaatttctgccatgtcatctccatttccatctgatagaatgtcagctcgaataatggataacttgagcaaaagaaatctccagtaacaagatctttctttggcggcattggccaaacctttccactgtaaaggataacagcactgattaattcttttaattagttgcatgactttgtgttcgttatcatttcattctatcattatattcataataaactaagaaatctggagtatttcacagcataagctcattagacatgtcacttgtcaaaagcaaacaagaaaatttgagtagaggttcacttgctga

SEQ ID NO: 58217 - DNA, 695 bp, Glycine max
  Clone ID: PAT_MRT3847_23582C.1
cccattcctgccatcacttttccatctcgattgggatcaaaatctattgttgacttccatgctcgagctcctggatcccaacttcacaaccaaacagctgttcaagcacgagagacaggacttgcaaatgagtatacatatgatatttggggtgaccatttttctggacttcacttgttagttccaaaaaatgttgcttccatgaagtctagtcccgtggaaaataatttcgacagcttttttgtaagagggccacaaacccttgtgacaaattctcaagaaggctaataagttgaaaaacgtcattccaagttttcttgcctccactccgggcctatgttaataagaagaaaaaaaaggtcgggatactcacagctgcacacatgcacactcactatcatctagtagtgtaaacaattctgattttgtgactactttaacaaaattagtacatgaaaatcttagaacaattatgcgtagtaaagggaaagtgcttggtgtggttggtctgaactgaacttgatgtatatatagtaggtgttgacaataatggtgtggtgtcgttgtcataagatcatggaaaacgctgtttaggatagttttgactattgagtattgaaagaaaaacacccgatcttccatagaaactgtaaacgtgagatttttaggttgacgagagctcgtagcatttgctt

SEQ ID NO: 58218 - DNA, 267 bp, Glycine max
  Clone ID: PAT_MRT3847_23583C.1
gcactcgatggcgatcactggacttctagttcaaggggaggttggactgggctgagcagtctaaagtcatcacagtggcaggccaaggacatgaagaaaaacaatctggaatactcgagagccctgctgtactaccacttgtgtgacctctgccaaccaaggactgaatgggttagctacagcaaactctgactgaaagatcaaatcctgtgcagttcagctgatgctggtgaactatatctaatagcatgctggacatgatacgag

SEQ ID NO: 58219 - DNA, 1106 bp, Glycine max
  Clone ID: PAT_MRT3847_23584C.1
taatttaaatatttgacttcccccgtgcttgctattattcaaggcgagtcatttatgtgttttcatgctgactaggaatgtaagcctatgcatactatatgtctcacattttgaccacgcttcttggccactatccatcactgtttaccaactttacactctcaacctctcaacaaaagacgcatttttttttttttggtttggaagagagaagaatggagagaaaggttctgatattgtgctctgttgtggccttcttggggctgttgtcggctgcaactagcttcggtgcagaagcgacaaggattaaggtttctcaggttcattttgttacaccaaaccagtgcacgtatcctcgtagtccagctctgcctcttggtttaattgctgcagtggctcttgtgctatctcagataatcataaatgttggaactgggtgtgtttgctgcagaaaaaatttgcaaatccctgattccaattggaaggtggcactggcctgctttgttttatcctggttcacatttgtaattggttttctcctgttgctgactggcgccgcgctgaatgatcaacgcggtgaagagagtgtgtactttggctactactactgctatgttgtgaaacctggagtgttcgcggggggtgcgattttatcggttgcaagtgctgcatttggaattttgtattacatttctttaactgaaaaaaataatggtatccaatacccatatcctaatcaaggggtcatagccatggcacaaccacaaatcccatctcagactagtcaagaacctgtattcgtgcatgaagacacatacatcagacgacagttcacatgattgtgtggaggctgctttaatcaaaacatttcttctaatgtttactcttaggaagcagtgtttcttaggtcttgtatgtgcatatgcaccacttttgtgagggagttgttcattttgccatgtttataaatggatgttctagactatgaatcgttgccatgttttagatattagattcgatgcatgtggaaggtaggcttgaatatgatctttaaagtattacaaggtattatgcaaatactaaataatagactatgatttttttta

SEQ ID NO: 58220 - DNA, 501 bp, Glycine max
  unsure (1)..(501): unsure at all n locations
  Clone ID: PAT_MRT3847_23585C.1
aagcnggaatcggctcgaggcgcttctggggtacttgtggtaatctaccaagcacatatatttactcagctaaaaagctagttcatgagtcatcatttggaagttgaaactaaagcggtggctgcaaattgccaaatttcaatgcctcactattagttgcaatgcctgttctgcgccggaattattatataattgcgaatattatgagtgccgtggagtgctcataaatcatgattatcataaaagaaatacacatgctttgacttaatcaaccacaatattacttagatgctatttattataaagaactcgattgcaaagaagcatccacggcacgcatggtcaacagtgatgtttctacacgtcttgagggaaaatatgctgcaattgtggtgtgctagcttattggcaatggatgtcttttctcgtagaacagtatgctgacaatagaagattactacggttacttgtgttacaaataccacccctctaggtgcttac

SEQ ID NO: 58221 - DNA, 717 bp, Glycine max
  unsure (1)..(717): unsure at all n locations
  Clone ID: PAT_MRT3847_23586C.1
tttttgtcnnngtannnnaatcaatggtaaaaattattacagagattgaagaggaagaaacgataatggatgaacaacattctaattcttgatggttatcatgatgcgaaagtaggtaatgccgcgccattatatataccacaggaaattcaaagttatgaggcgnntattgaaaaataactactgtaagagctaaatgcagaaacgtacacacaaaacattgaacagcaccatgtattttatccatgactttggtttaatttccattaaaagagataaatgacctctacaaaatggaatcatcaactagctacactttgtactgcaccaacaatgtatggaagataaataacacagtacactgctgcacaaatcactcttaatagtatatatgcgatcagaaacatctccaaataatatatttttcccaagatattatcaattttcaggttcaggctaagtctcttgcaaacctgcaagtggctatattcctgtaataggaatattcagaaaaaaaaaagaacgaaaattcttgtctcaaccagaagatattttatagcagatgttgagttacttacttgaagatgatattatctccataagcttcatttgcaattcagtgtaatcagtgccagccatattcgaatgaattggatactctgatcgtatagtgtgtatgaatctgccatctcttctgattgaagtagtgctaacctg

SEQ ID NO: 58222 - DNA, 910 bp, Glycine max
  Clone ID: PAT_MRT3847_23587C.1
aattcggctcgagcaacaatcaacgtgaggttgcgtgacaggggaatgggttcgaacagggcggaggtacgaggttcacagagattacaggctctgattcaccatctccactcttctattccctctgactctaacgaacccaattcaaaattcaccgtttggaagaagagagcagcagttctgatctgcgtcttcgaaggcgccgatgggaatcttcgagtatttctcacccagcgggcttcctctctctcaacccactccggtgaggttgctttgccaggtggcaagagggaagaaggtgatgctgacgatgtacaaacagcgctgagagaggctaaggaggaaattggcttggacccttctcttgtttctgttatcactcttctccctccctttcatactaagtatggtgttacaataatacctgtggttggagtactgttcgacaaggatgcattttcacctgttttaaattcagctgaagttgaagcaatatttgatgttccattggagatgttcctcaagaacgataacagaagagccgaggaaagagagtggatgggggagaagcatcttgtacattattttgattatgaagatgggaataagaagtatgtgatatgggctataactgctgcaatcttaattcggtcggctactcttttacttcagcggccacctgcatttctagagcagaggcccaaaatatggggaggaatgactgaaaatgacatatgataatacaaggagtagttccaaataatgattttgtcttttaagattgtataataatttaacacatgaagctgcattttttagcaatgaagcatatatttgcttctatgttagatccaatgggatcttcattagaaggaatgaatactaacaataacacatttcgtgtgttcgg

SEQ ID NO: 58223 - DNA, 501 bp, Glycine max
  Clone ID: PAT_MRT3847_23588C.1
ctgccctcttaggcaggcctgggggagtctcgacgccctcataggcaggctcacagctgactatgaggaaagctgatgctccccagagactaacccttatgccagcctctcaatccaggtataccttagggagggcaggtagtgccaccatatggctcgaggtctagcttacactaagaaaatgatgaccacagaggaaaatgctgaagaatcatcaaactcttccatccacttgtcttgaatattctactctggaagatgagcttcacctaatattggataatgccgcatatatatatcaattcaattgcaggagctctgtacttttaaagcacagattatgcgacgttgcgttactatatattcagtaatccgatggcaccccagtacttttagagttcttagttaatctgtgaattacctgataatctgtaattaaactattagcagtaccaagagctcgggacacagcatctggtgcatgcctcaggggatcttata

SEQ ID NO: 58224 - DNA, 383 bp, Glycine max
  Clone ID: PAT_MRT3847_23589C.1
ttttaagggttttttcttagaccgtgggaggaaaaaaattttggttttttcattccaaaaattggaaattttattaaccaaattttggcaaccttggcccagcccatggtttttcccctaggataatgggaagaaaattagcggggattccgttcaatcatgtcatgaaaaagtgaaaggctgtttgagccacagggtccaatccacacaacgttttagcttgaacccggaagccagttgatagatacagagcaggagcaggattgcaacaaatgaaagctgatttttcaagcaacacaactccttcagcactggaactttattatttatacctttctaagagggttcatataggtataactggacaaggctacaaaaagctt

SEQ ID NO: 58225 - DNA, 286 bp, Glycine max
  Clone ID: PAT_MRT3847_2358C.1
atcaccttcacctcacttgcacatcacaatacaccgaataccatcaacacaacctttctctcaccaaaacaaacacactatgacccgttcccacaagtccactgaccgtgaccacgctggtctcgccaacggcactgccgtcccggaggacaacctccccaagtacttcggcaaggccggatacgccggcgagtctccgtccaagaccaagaagcatggcggtggcaagagcaactggtgtgctgtcggactctccgagctcgaaaactacgaactacacgccccc

SEQ ID NO: 58226 - DNA, 512 bp, Glycine max
  Clone ID: PAT_MRT3847_23590C.1
ctggggcttggtctttgaattttaaaaagaaaaatcttacatgtggcaaaattcaagtgttttatactttatagtttttcctcttttggtttagattttagtacagcttatggttcaataaacctatccaaaccccatgtgtgcacactcaaacaagaaaaaacgcaaaaatgtcaacagaaatcctaaatgcatgactgcactctactcctatatatctttgcttaagatatattatatatgcaacaatcacattaagtatcttcacattgaatagcagcagagtatatggcattctattaatgagactatataaattttagaataaggcagtttttgaaaaccaccttacaaagaatgagacaacggcaggtatcttcacataattatttttcttaattaatcagactaacatcataaaaaaactataaaagctacactctaagcagcaaaaagtcacagcaatattgacgtacacataaccctgccaatggagcaattgcaatcacaac

SEQ ID NO: 58227 - DNA, 113 bp, Glycine max
  Clone ID: PAT_MRT3847_23591C.1
ggctcgagcagcaacatagacctctggcgtaagcctcctacagcatacatgttagccggcatagtgaccgattttgcggatattcacgatgtcaatgcatgtacgacataact

SEQ ID NO: 58228 - DNA, 256 bp, Glycine max
  Clone ID: PAT_MRT3847_23592C.1
attacaggctattggacaatactgcaatcagctacaatctttgaaccttggatggtgtgataatgttggcgatagtggagtggctactttagcatatgggtgtcctgatcttaagataagagacttggtgtggctgtgtccggataacagatgacaagggtgaattgctttggcgactagatgcccccatgtgaggtccgtaggactgtacttctgcaagaacatgacagatggagcaatggatgtgttagctcac

SEQ ID NO: 58229 - DNA, 425 bp, Glycine max
  Clone ID: PAT_MRT3847_23593C.1
ggggggcgaaatggaaaaagggggggaaaaaaaaaaaaaaaaaatcttggacaccaaattgtaacccgtaggcgataaacctggcatcgataaactatcaaactaaccgctaggcaagcaaagttttttacaccttgagagccaaatactgccattgcatgtagcttttttcagcaattttttcatttaggatttacagaaccgaattgagatttcaagagaaaacctgaaatttgtgttaaatgttagtctcattttgatgaggactaaaaaatctttaacattagacatttaattaaggtaaaatgccacaatgcaattttttactcaacacaaactgaagctcaagcgaggtcccttaggttcaaaaaccgcaattttttttataacttgagctttatcagcttcaaactgttcatcttttt

SEQ ID NO: 58230 - DNA, 374 bp, Glycine max
  Clone ID: PAT_MRT3847_23594C.1
gttcccttcgttacgacagacatttggcattaaacgcagaaaaccaactgaaaaggtgaacgtcctaactcagtaactcagacctcatcttatagacacggcctatgttatacgcaaacaaacggggaaactccgatttccgagccaagaccctatttgccttacaagagaatcgaacatgcttaaacattgagaagaaccgctagtgtggttcgctttaacaacacttgcattgttgcacacagtatatgtacttgccttgcccgcgatttacttgttgctacagcatattctcatgagccgacacgaggtggtcttgaaagagaacctccaacttactgggaagctcattgctctggtgtcccagtggccca

SEQ ID NO: 58231 - DNA, 236 bp, Glycine max
  Clone ID: PAT_MRT3847_23595C.1
tcgttcacaggttgccgcaccttaaaacggggggctaaattcaaatgctactgggtttcaagaatctctcaatttcttcctacttctttgggtaccattttcttaagggaaagaacaccattttttgtgccggccaccacaccttctaactacttcctctcccactctttagtctacttgcttgaacacttttttatttgatctacgactctcacgccacactttaaacattcttc

SEQ ID NO: 58232 - DNA, 800 bp, Glycine max
  Clone ID: PAT_MRT3847_23596C.1
ggcacgaggagaaatgttatatgagtattgctccaagcatgatattccacataaacaaattggtaagcttatagtggctactcgatcttctgagattccaaagctaaatgatattttaaattgtgggattcaaaatggggttgatggtttgaagattgtggatggtgttgaggccatgaaaatggagcctgaattgcaatgcgtgaaagctatactatcacctctcactgggattgttgattcccattctttaatgctttctttagtgggggaagctgaaaatcaaggaacaaccttcacatacaattcgacagtcattggtggccatcttgaaggaagtgagatttgtcttcatgtgacagaaactgaccgtcttacagaatggaaagggacatcaattttgcaaccagaactactactaattcctaaacttgttgtgaactctacaggcttaagttcccctgtccttgcaaagagatttaatggcccaaaaagtggagttgttcctcctgcttactatgcacgtggttgctacttcacgttatctaatactaaaaactctcctttcagacgtttgatatatcctataccagaggatggtggcattggagtgcatgttactatagacttgaatggtcaggtcaaagtttggcccaaatgttgaatggattgacagtgttgatgatatctctagctttcagaataagtatgactatttcagtaaatgcaaatcgagctgagcgtttttatccagagataagaaagtactacccaaatctgaaggatggttctctggaacc

SEQ ID NO: 58233 - DNA, 443 bp, Glycine max
  Clone ID: PAT_MRT3847_23597C.1
gtgtatacgcgacctaacagttaatgttaaacgggcacaacacttaggatcccatccatcacatgtcataaagagaagtttagctgaaacagcatgaaaattggtttaagcaaatagaacgttcaatgaaatacacatttagtgcgccctttaattgttagggcctggcgcctacttcacacctattacggagctaggactatctaatcctgtggctagccccaacgagcatacaccggcgcattgaacaaacattgaacaggctgagagcgcgttgaagagtaaaggaaagcaaagactggcgataaccgtaatgttgcaccaaaattgagctgcacaaagccatctaatagccctgcatacacaggagaacaggctgaattgaaagacaaaacatcttcgttggatatggagcatgaatacccacaatagtggcgaactta

SEQ ID NO: 58234 - DNA, 352 bp, Glycine max
  Clone ID: PAT_MRT3847_23598C.1
cacatggcagatagcaagcgcatccgagagtcatataagcggcagcacaactcatcatggctctcttttccccatcctctgctgccaaggccgaccagctaaccccatcagccccgcaaggcaaaagggtctgcatgagctagaccgacacctatcacgcctcctacagtagcgcatgggtcaggccagaccgcgtgaagtacctgggcccattctctagcgagcccgagtgctacctcactggcgagctcccacgtgactacagctgaaacactgctgggctgtatgacgacccagaaaccctcgccagaaacccagagctcgtagtgatccactggaggaagcccatgct

SEQ ID NO: 58235 - DNA, 305 bp, Glycine max
  unsure (1)..(305): unsure at all n locations
  Clone ID: PAT_MRT3847_23599C.1
gttgtgagnncgcgtacgtnagctcggaattnggcncgagcnaantcnngcanttntggancganaagcnncggntntnntgncnnatnatnnggcnnnggnnannggaggatgtcnnnggnaagtnnanncnncnananncnnnggtgntgntacatnggttganggngaggangnngtatnnccannngnggganagtnnaangngnantggggttgaggnagntnntgancnaancggggggggtnganntntgagatgngnnanaaggaggatnnnggnngacanantggctnagaagacc

SEQ ID NO: 58236 - DNA, 283 bp, Glycine max
  unsure (1)..(283): unsure at all n locations
  Clone ID: PAT_MRT3847_2359C.1
aaactaaacatttatttttccattttttataacncaaccaaccattttcatcagcccgcatattttaaaaaaaacgtgggccccaaaaaacaataatattaacaaaactattccttccaataaaaatcttttaacccatattacaactatatccacaaccacatacaattccctatcattcacatcaacatcaacaacatcaacaacaacaaatatctacttacttattctactatctactctcactattcaatacaaaaacattatcattttcatttcaacc

SEQ ID NO: 58237 - DNA, 214 bp, Glycine max
  unsure (1)..(214): unsure at all n locations
  Clone ID: PAT_MRT3847_235C.1
tgtggaccaagaaggacctgcatctatacttacnacttgattctgtatggaatattggcatctgatcttagctaaaggtgctttccttgagcatgatattgaactctctgcaacttgcaaacgaggatgtataggataaagggttcaatggaaccgattgacacagtttgcttgagtcgtggacttccgttactttaaggtgtttgcttagaca

SEQ ID NO: 58238 - DNA, 360 bp, Glycine max
  Clone ID: PAT_MRT3847_23600C.1
attcccgggtcgacgcacgcgtacgctccgataagacaacacaacggaatgttatgaacaagaaggagcacatccacaagcgcgggcataacatctctaagcgcaaataccctcattaaactgctccatcacctatcctcataccaggcccattcaaccatagaagccctcacttagactccatttctctctctctatgtacctctctctatctatatctgtgtccattttgcctatcaagagacctactgatcagccataaagacataattgagacattgctcttatataaggaggctaatcatcttgctattaatgtaagggataggtcgtttaccacctcgttgacaaatactatgc

SEQ ID NO: 58239 - DNA, 441 bp, Glycine max
  Clone ID: PAT_MRT3847_23601C.1
ctatgaggctccaactgactgtgtcaatgaattattggtccggctgctcaactaacaaatgaaacagtacttcccaaccagaaaccccaaattgtccaattccaaccatgtactgggaaggaaattgccaggaaatgctgctaacaacttaagcgttttcctgattttttaatgaatggaattttaaataccaaatcaattctttacctatgataagggccatggagagaaccctttattgcctatatagaggctttgtatgaagaccagaagggacacataaagactccagtgaagcggttttaccataatctcgacaattaggggggcttttctggacgaaatactccccctcggaaaaattttattacaccttattaccaatgactattatcaagagcgtctatttgtctgcgccaaacataactcaggaagactttc

SEQ ID NO: 58240 - DNA, 402 bp, Glycine max
  Clone ID: PAT_MRT3847_23602C.1
cctctacatgctaacatgtggcaaagcttgcagctgtatgacaatgaatatctttgggaaggcaccaatcccacaatatatacatttctcttaaacctataaatagaatatcaagtgttgaaaatctgttgaaatccctggaggatcgcacactaagttaaaagagcaaacctttgccttgcaaagttatttttgttgtattcaagcttattgtgtatcctctctatgagagctttgaatattgtattcaattcaaactattgcttagaaagctaggaatggcttttgtgataaaaatacttgggttttgtttaatctcaggggagattaaggatgtgttaggagtggcctagaaaatactgtgtatccagaagtgaaagagtaaaatacttgtttgtaata

SEQ ID NO: 58241 - DNA, 443 bp, Glycine max
  Clone ID: PAT_MRT3847_23603C.1
gcacgcgtgcgcacgctcggagttcggctcgaggctttgaaagtgacttccacgctgtctactgttctattccatcctattctaaaatctttctctctctgtgtgtcataatactgtgactaggtcgagctcctgctttcaccggctaaatcagagctgcgacatgatcaaactctgtgcgcgaagccggtggtggacacaaccatggacattgcgattatccaggaccggcatcgagagaagactaatgctgtggggctgggcatagcagaccatcattgcctgacgggggctcgtggaccaccaacagctgtggcaactgctcatgtaacaggttccaggagattccctggtgcttgtctaaaaacaaccgggacaagcgccaattgcgggactggctctatgagcaagacgatgggcttgccagaaggcttaattattgg

SEQ ID NO: 58242 - DNA, 213 bp, Glycine max
  Clone ID: PAT_MRT3847_23604C.1
ccatttatcccatcaaagttacttacaacttctcaaatttttctaattttcttgctcccgatctgggctggtgtgtgcactgcgtcactttttgtgccatacaaaggtgcagcataagaagtaagaggaagattccaagagactgagatggcttgtgttttattttgggtgaggtgtgggcccaagtgtgaacctcaccttcattgtttgatc

SEQ ID NO: 58243 - DNA, 390 bp, Glycine max
  Clone ID: PAT_MRT3847_23605C.1
gtacaacatcggacgatgattacacattaccttgctcaaggctggcgaccatcgcgctactcggacgtagcgaattctaacctcttggctcgaaggatgaagaacgaatccaccttgaaatccaaatccaccataggcggtgaatgcgacacccgcagcatccacgatctattacaggatcgtgaacgcacagatttgtgacactgttggccacggaaagatatgagggccattcacaagctgcctcattacactaggaagctcgttggcagcacatgtcttgtcttatgactggtaccacgacatagggactatttgaaacacgtggattatatggttacaaggagctccacgatcacacagatgaccaacattgtgcataatgcttgt

SEQ ID NO: 58244 - DNA, 364 bp, Glycine max
  Clone ID: PAT_MRT3847_23606C.1
tacagtagctaccaacatcaccatttatgcaacccactgtctatcctcatctgatagcatagcatataatagactctgactcactccctatcattttcatcctgcttgaacaaccaaaaagagttccactctccgaaaagtgaaaacactttcatggagattaacttagattattccaagatgctctttttactcctccttggttccacttcattgatttttttcttcccacaattggcttctgctgccactcccaagctcaacactcaagaggtgaaggcattgaaggagatagggagcaagattgggaagaaagactgggactttggggtggatccttgcagtggaaaaggaaattggaatg

SEQ ID NO: 58245 - DNA, 378 bp, Glycine max
  Clone ID: PAT_MRT3847_23607C.1
ctgttgttggtttattcttttttatttttggcgcaagatttttttttttgggtgggaaaaaaaactccacaacgggagggggttattaagcagatctcatgcttgaatttccattgaagcctggaataagaatgcaaaaacactggggggcgaaatctgatgaagcgaaatccaaggggaatgacgtttaagacccacacccaatggggggggggtccgaactcttccctaatttttcaaaggctaaaaaacctgggggctgttaggctaagaatgttatccactgtaactgggccggacccatggggggatctatgggcggacccctgggcaaacgctgggccggaacccatggccggcccagcaatttaggtccgg

SEQ ID NO: 58246 - DNA, 464 bp, Glycine max
  Clone ID: PAT_MRT3847_23608C.1
tgccagagtcctgtcaccgcaccaaagagacaaagcctcgtcgccgctccgctgtccactggttacaggttcctcagccaacatactctatgctctaattcgctggtaggccttcttccacgacccgcgggcgtccgccttcctattgttggtgcctctgttgtggtcgtattcaactctgtgggcttaggtatagctggcactagggtggttcagatgtcgaggaaccaaacgcggtaaatgcaaccgctattgctcctgggcccattagaggtgtaactaagtaaagttaataattggagggggcgcgtgccgcggtggccttggcggtttcacatacccaacggtcgagtgcagcagcggcaacattaaatgcaatactggtggaaaaatagcccccaaaggtggaaacttccgccgctgactgatgtcgttcggcggaacataataaggagcggcctgca

SEQ ID NO: 58247 - DNA, 208 bp, Glycine max
  Clone ID: PAT_MRT3847_23609C.1
ttcactgcgatatcttcttctgaggctgaagaagaagacgccagcattctctttaatatcgtggggatgggggcgtgatatatgtgtagcggagtattcatatttctttaatgtttggggcttgtgatctttgggcaaaagggtacactggtgccaaggtctttatttccatttttattactatattttatacttttcaccctttttt

SEQ ID NO: 58248 - DNA, 427 bp, Glycine max
  Clone ID: PAT_MRT3847_2360C.1
cccacgcgttcgtccacgcgtacgaccacgcgtccgattcccagcaataaaaggatgcggctttcctcgccccgttccaaaacttttggaactttgcattaatggggttgaagggaatgctcacctaatccagtttctcaattctttaacccaaccaaatgtcccgtgttgatttggagcaagggaatgtgaatcatcgccattcggttgttggaagtgatgtgagtggtgaagggagcgtatgcttctctgatgctgatgatggttcttgctattcccgtttctactcaacaaatggtggttcatatgatgattacagctttgcttgtgtttctgatcctgaagttggaggtgttcctcattctgggagagcttcttcttcggcttctgagtgttctgtggacgcggaaactagaagtggcgttcc

SEQ ID NO: 58249 - DNA, 577 bp, Glycine max
  unsure (1)..(577): unsure at all n locations
  Clone ID: PAT_MRT3847_23610C.1
nganaanannnnnnnnnngtccntgtgtatatcatatcagtagcattatccgccctgctcgcctacgtattctggtaattgagctcgccgctctgggtaaaagaataaaatatctgatgagggcgcctgattcacttcatcacgaagagagaagtctttcgactgcaaagaaatttctctttaatgtggaatcattagagaaggagtcggatcaattggaagaagatgtcatgctgcttcgggagatgtattcacattgggaaaaggctgctacaacatggccactcacagatgtagggcatactggccaaattttccttgtgcattttacggatcatcgctgatgaggcatgggttgctcatatcatgatctatctactaatggagcctcctctttctcctttcttgaatgaagtgatcatcacactggatgatatgtggagtcttctgggtacagctgcatgcgcattgatctgctactaccctcttcttgctgtgattgtcggagccatgatgctggtgctcaaactacttntcattactatacattccatgaagtggggagcgacgctcatga

SEQ ID NO: 58250 - DNA, 210 bp, Glycine max
  Clone ID: PAT_MRT3847_23611C.1
taggcaaagtgttatactcattcttcacttgcttacaacattttgggcgagatataaatgaacacagcttgaaccaatattgtggtatgttaaatatactacttcatccattaattatttttatttttcatattttcttatattttatttttttctttatttttatttttttttattttttttttatttttattttttatttttttttat

SEQ ID NO: 58251 - DNA, 200 bp, Glycine max
  Clone ID: PAT_MRT3847_23612C.1
tgcattaaaactcatgtccataagcaatctagggtctatgtggaatttacattgaagtcaccctaatgatcattctgctatccaccaatatgtatattgtaaggaactgtatacaaggatcatacacttagcgcaattacaatatcaaagaacaaatctatcatctgtacactcatctcaacaacactattggaataatg

SEQ ID NO: 58252 - DNA, 1236 bp, Glycine max
  Clone ID: PAT_MRT3847_23613C.1
cccccccgtcgtcccacgcgtccgaccacgcgtcctcccacgcgtccatacagccaagtgaagaccacagaactgtacggctgcgagaagacgacagaaggggattactcattacatttcaaagtctcaacctgtggtgcgtctatatcgattcctttggtcattgccaagggataataaacaaatacaacaaagcaaactatcctcccaagtttagcaaagaaagttctaaatttgtcaccagttgccaatcaactctgaacaagggtgtctttttccttgagggttcacacattctcttcttgggagggttctgattccgaggttgaaaaatgtctgctgctgtgtcctccacaacctctcatttagaggaagagcttaaaaacaacaacaacaacaacaacaacgttggtggagaatcagaccagcccccttacaatgagggtgccaactctgatgttgctgaagaaactgagccagaggaagatgatgactccaagttggaatctaacaaagaactggatcttggccctcaattcaccctcaaggaacagcttgagaaagataaagatgatgtaagtttgagaaaatggaaggagcaacttctgggaagtgttgacatgtctgtcgttggaagtgaatgcaaagaccctgaagtaaagatattgagcctcattattacaagcccagacaagcctgacctcacccttccaattccatttactactgatgctaagaagagtcttttcatccttaaggaaggaagcaaatgccaaatgaaattcaccttcactgtctccaacaacatcgtttctggtctcaaatacacaaatgttgtttggaaaactggcgttagagtggacagcagaaaaaagatgttgggaacttttagtcccaagcaggaaccatatacatttgaattggaagaagaaactatcccttctggcatgttcgtcaggggaacctatgcagcaagaaccaagtttgtagatgacgatcgaaaatgctacttggatgtcagttactactttgaaattcagaagaacagaccaacacctcaatgagatttaaacttgagtaacttgttggaataattttcttccttttgcatcttgtgtatctttggaacagattgaaattcaacttgtttgtcaattccagttagcacgattttacacgtgcatgctagaaaaaaaaaaaaaaaaaaaaaaaaaaaaaagcggccgctctagagga

SEQ ID NO: 58253 - DNA, 581 bp, Glycine max
  Clone ID: PAT_MRT3847_23614C.1
ggctcgagggggaatcagaccagcccccttacaattatggtgccaactctgatgttgctgaagaaactgagccagaggaagatgatgactccaagttggaatctaacaaagatttggatcttggccctcaattcactctcaaggaacagcttgagaaagacaaagtaagattttcttttccttttatttttcaaatgtttcttcacaccctttggttttgcagctgccttttttttatgaaagcctttttcttttgcattcaaaggatgatgaaagtttgagaaaatggaaggagcaacttctgggaagtgttgacatgtctgtcgttggaagtgaatgcaaagaccctgaagtgaagatattgagcctcattattacaagcccagataagcctgacctcaccctgccaattccatttactactgatcctaagaagagtctgttcatccttaaggaatgaagcaaatgccaaatgaaatgcaccttcactgttctcaacaacatcgtttttgtctcaattcacatacgtgttttgaaaacttgcgttagagtggacagcaaaaaaaagatgttgggaactt

SEQ ID NO: 58254 - DNA, 290 bp, Glycine max
  Clone ID: PAT_MRT3847_23615C.1
ggtgtttttttttgaagcaaaaaattttctcgggtaaaaaaaacttgagaaactactgggccattcaaccaaagatggagtcacacggtattttgcagatgcctgtgaatgacagtccacattctcccttgcatggaaactcaaccgctttgacacctcggtatagagacgatcatctgggaaaactaataacctatacggttttccagatgccacaagtgcattgataactcttgcagtgagcctgaagtgaacaatgtcatgaatcatgccgggcacaaacaacaacc

SEQ ID NO: 58255 - DNA, 223 bp, Glycine max
  Clone ID: PAT_MRT3847_23616C.1
gagaagaaaagtcaaagacaatgtcagggatcattcacaagattgatgagacccttcatgtgggaggccacaagaaggaggatgcacacaaaggtgaacagcaacatggtggaaaactaaaaagggcagaaccatggtgaccccagtattgattccaaaggaggcctccattttggtgaccccaagccggacaaccaggaagaggattaccccaaaaaggggt

SEQ ID NO: 58256 - DNA, 598 bp, Glycine max
  Clone ID: PAT_MRT3847_23617C.1
ggattttgtatcatatatgacatttttctctccacaatatcattggatatgtggagtctttggccactaatgatggaagcactggcagattgggcaattgatttcttctcaaatattctggttcctttggacaattatatttcgaggggaactgcccatttccttatttgcaaagaacctgactatcaacagagtctatggaatatgatttcatccgttatgggagacaaaaatatggaggacaatgatattgagccagctccgaagctaattgaagttgtctttctgaactgcaaagggcaggttgatcaatgggttgagccttatctcagaattacagttgaacgtttgcatcgaactgaaaaatcacatttgaaatgtcttctcatgcaagtgattgcagatgctctttactacaatgcaccactgaccctcagcatattgcaaaagttaggtgttacatcagaaatcttcactctttggtttaatatgttgcaaggagtaaaaaagaatggtgtgcgtgctaattttaagagggaacatgacaagaaagtttgttgccttggttaacatcattacttgcacttccagctggtca

SEQ ID NO: 58257 - DNA, 1012 bp, Glycine max
  Clone ID: PAT_MRT3847_23618C.1
caaagttttaattacagcatatttttttcattttcttcgatcccttcactttgcaatttcatgtctaggctcatggaaccacttgttgtgggaagagtgataggagaagtggtcgacattttcagcccaagtgtaaaaatgaatgtgacatattccaccaagcaagttgccaatggtcatgagttaatgccttctactattatggccaagccacgcgttgagattggtggtgatgacatgaggactgcttataccttgatcatgactgacccagatgctccaagtcctagtgacccatgtctaagggaacatctccactggatggttacagatatccctggcaccacagatgtctcttttggaaaagagattgtaggctatgagagtccaaagccagtaataggaatccacaggtatgtgttcatcttgttcaagcagagaggaagacaaacagtgaggcctccttcttcaagagaccacttcaacacaaggaggttctcagaagagaatggccttggcctaccagttgctgcagtttacttcaatgctcaaagagagactgctgcaagaaggaggtgattcctgaagaagatgaagaagaaaaggttgcagcagtaaataaaattaactttattttaaccttaattgtctcataatgagatttgtttcctttggttttcttagggtttggcatggttgaacaataaggataagtgtgtttgattaaatctcttcctctcttgagtttttcctttggaggccacaagggaaattgtgaggtagatggtgttcaaaaggtagtagatattcttgatgtactttgtacttctagctattataggttatgggaagttggggaccaaactagtgttatgatcctttaaggatctatatatgatttgtgataggaattaagaacatagctttaccagagctgtgtggctttctagtagagtgtaatgatatgtgtgatgatataattaatgagaaagaggacatgtgttaaaaaccc

SEQ ID NO: 58258 - DNA, 387 bp, Glycine max
  Clone ID: PAT_MRT3847_23619C.1
attgtctattttgtgttgttacaggactttgtggattacgcaaccacttgacatgtgaacaaagaacatattataagaattcttttaaagatcacaaggctgaaaattacagccttttaggaccttaagagtaccccctaacttgtgcactccgaccgaaaaaatatattacgaaaaagctcatgtatccagagtttagaccctgggagtgggatgatatccttaataccaatttggcccgaaagaggtctgggtatggaggaaattaaagccacttgttgaaaaacgtttgtcttgagccacctgccctgcccgaaaatcataaacttgagtttctgataagcttctttcagtcttaatgaccacgtatgccaaaggatggggccc

SEQ ID NO: 58259 - DNA, 1645 bp, Glycine max
  Clone ID: PAT_MRT3847_2361C.1
acgacagaagggaattcagaattaataataataagaggaaaaagaagggtactcaaacaacactttggtgtagagcaagaactactataagtgtaggaggtgattggaagttgttcgaatccagaatccgaaaaaagggcaccaccgtgtcaacaagtagaagcagaagctgtttttgttcttcgccgctgacactaatcgtttcttcaatgccttacgagaaggaattcgccgctgcaaaaaaagcagccactctcgctgctcgtctctgcaagaaagtacagaaggctcttctgcaatccgatgtgcactcaaagtcagacaaaagtcctgtcacagtggctgattatggttcacaagcattggtcagctttatacttgagagagaacttccttctgaaccattttcattagtagctgaggaggattcaggtgatcttcgtaaggagagtggtcaggatacgctgaagcgcattacagaacttgtcaatgatacccttgctagtgaaggatcaaatagcttttctactttaacaacagatgatgtgcttgcggccattgacggtggtaaatctgaaggtggttcagttggacggcactgggttttggatccgatagatggtactaaagggtttgtaagaggagatcaatatgctatagcattagctttactacatgaaggcaaaattgtattgggtgtcttggcttgtccaaatccttccactggcatccattggctccaatcagcagctttcttcttcaaatgaagttggttgtctcttctttgctaaagttggtgatggaacatatatgcaagcactgggtggttctacacaaactagggtgcatgtctgtgatattgataacccagaggaagcatcattttttgaatcttttgaagcagcacactcctcacatgacttatctagctccattgcagaaaaactcggtgtcaaagcaccaccagtcagaattgatagccaagcaaaatatggagctttgtcaagaggagatggggctatatatttgcgtttccctcacaaaggataccgtgaaaaaatatgggatcatgctgctggcagcattgttgtgactgaagctggaggtatcgccatggatgctgcggggaaccctctggacttttcaaaaggaaagtttcttgatgttgtatctggtattatcgttacaaaccagaaattgaaggcatcgcttttgagagcagttaaagaagcactcaatgagaaagtttcatccttgtgatctccattaagcgaatgattctacaaatgagcttgctaactttgttgtcggctcgttatatggggccttcccctcaattgtgctatatttcattcgtgatctgataaagttgaataaatgatgggacttcctctgatacttcctttgtagcagcagatttgtgctctggtttttttgcagctgctattttcttctccttctatacctgtccttttctctccttttctattaataaacagagatgagagatcttattttaaacttgtttgataattaattcttctagattaacttgtcagaggtgatgtatttcaaaatttcaatatatattagtccaaaaataacctaaaatttagttatcaaatatcaggaaaataaggatgcc

SEQ ID NO: 58260 - DNA, 384 bp, Glycine max
  Clone ID: PAT_MRT3847_23620C.1
acggctgcgagaagacgacagaagggcttgcagtgcgtacaataatcaaaatcaagccaagcacaaaacatgcaaaaagtgcacaaacatatacaatgaaaaacaaaaacattaaaaaacccaaaaacagcctgtaccgtgaacaggtgttctcgctctccaaacctccaaacagcgattcaagcaagcaattgattggaagtggcggatgaacctgattgggccaagaatggctatacggtacatgttgagtgaaatttggttggacttgcaaagcctggcttgcctgagcataacacaactgaattggtgttggtcttacttgaatcatattggctgaaccatccaagaaggtcctgcatgcactgaattcggctgtattag

SEQ ID NO: 58261 - DNA, 482 bp, Glycine max
  Clone ID: PAT_MRT3847_23621C.1
tatgatcgttaaaaaattgtaacgtgattcactttttttttcttccttatactcgatcttctttcttgtatattacaatttttttctataaggaaaaggaaagaaaaaatagaatacaaacaaagcacaaaaaaatcacatgaatcatatctacaaaacgctgaaaaaaagaaagaaaaaataggaagcagcaaatttcaaccacccttcaaaagaaaactgcattttatcaaccttacatacccacgacagtagtagtgcaatagtacttactcacttttttaacagtcacagataccgttgttcaacctgccacgtcacccctctaaccacaagggcccaccatagccgtcaccgaaattgcacggcacggataaaaaacaaatccctaatgcgacatgtggatttcatagtcacccactccccacgactcagaccttctcccagacgcaaaccggttcatcgaacccaaaccggcagga

SEQ ID NO: 58262 - DNA, 411 bp, Glycine max
  Clone ID: PAT_MRT3847_23622C.1
gggagatggctgcgtgactcacaaaaataacactcctatttatgtacatcagtggcaaaacacaacctgatacatgctgtaccatgacaatacatcttacacactatcatcccatcatgagaaccccatctagcgggacagctctaaatgtgacagagctcgaggagaagcgacgcggaagccttactcgtttatggcttctaattgattgaacgctcctacccacgaacaccgattgcaataggtgtcacacagatgactactgaggggctcaccccaaagcagactttagggcctgcctacactagatgggactagcagcggctgattatgcccctcataacaggagatccctagtatcttcactgcatggactactggcatagtaggtagacctatcagggaaaacat

SEQ ID NO: 58263 - DNA, 391 bp, Glycine max
  Clone ID: PAT_MRT3847_23623C.1
ccaacccaaaagtggggaattacccaaaattttttgggaccccccaaagttttggaaatttggggcccctttaaaaaaaattccccgggggaaaaaagggccctaaaaaaaaaaaaggaagggttctttttttggccaaactaaaaaacctaaaaaggggttcccttgggcccaagtaaacaggggggggtgggaaaaaaacttttagggcctgggcctaaattcggggaacccaaaccggcggggttttaaacccaaacgggaacggggggtttttttaaactgggcatttccccaaaaaaaacctgggttttgcggtttgcaccccgggggagacaaaaaaacccttttttatttaaaaatttgggccccccaaatgggggccccccct

SEQ ID NO: 58264 - DNA, 266 bp, Glycine max
  unsure (1)..(266): unsure at all n locations
  Clone ID: PAT_MRT3847_23624C.1
cttgtgctccccaacccaccccctcatgccttgtcgccgactagacccgacccgttgagctcgccggaaatttgcccaaaagggtctccgaattggccaatgggccntcgatttccngacntnagagacccttcaaggtttcgcntttccttcttcgctttttcccccttttcgggacntcaatttctgaaacnattgnaantgagaaagatttccgnatanttngggtntnggnaaaaggaaggtggggcttcggcggaacggtt

SEQ ID NO: 58265 - DNA, 503 bp, Glycine max
  Clone ID: PAT_MRT3847_23625C.1
atggcagacctcacatccctcttctcctcaaatctccattctctcaactcaaaacctttctcttcctcactctccttcttccgaaatgtccattccaccctctctttcccttcttctaaaccctcccgtggcgttgtagccatggctggctctggcaagttctttgttggtggcaattggaagtgtgtaagtgtctcacccgaaattcttttgcttgttataccccttctgttttttattggtgaaaggggttgtctgttcattattagcatgtaatttaatgcctcgtgtagctgatttaatattttaatttacacataaacttctttttcatgagtgatccatgtttgaagttacattggttattgagtgcctataacaatccttttcctttacttggatttggaactgacatcaagggcctatcactatgagaccgtggatagagttaaaaagggaatgatttaaggccttacatgggtgcatcatgacaaaagatagca

SEQ ID NO: 58266 - DNA, 424 bp, Glycine max
  Clone ID: PAT_MRT3847_23626C.1
gggaaatactaccggggatttgagtgtccagactatttcgttgtaggttatggactggatttcgctgagactctatagaaatttgccttacattggtgttttgaagcctgaactttacaagtgatcttatatttcctagtgaaacctgtcacacgtggaatcttaaagcattaaacatggttctacaagtttgtctgccacacattcttccaagagtagcatatagaaactagaagaaaatgaataacagggccttgctgtgtgctttccatggctatcacgaaataaattgtttcagagctttacaatttcatttacactattatcttattaaagcaatgtgacagcgtgttacttgtactaattatcagacaaggaaatgtttgtcaatacaagatcaaatcaacgggcctcgttttttttg

SEQ ID NO: 58267 - DNA, 285 bp, Glycine max
  Clone ID: PAT_MRT3847_23627C.1
aaactatatcaaagctatatcaatccattgagtgttcttctattcattctaaagactcattacagtatctggtgaaatctcaacttgaatctacctttcagatttcagctacaacaactggacgggaaagagcttactagacattggggggactagtccctactgacagtttatttatgaaccaagaaaatcacaaaacaaaaggtgaatactacagggcgggagcacctttgtaagaagctttggggagttgtactttacaaaaatgccaccttatatcatcct

SEQ ID NO: 58268 - DNA, 348 bp, Glycine max
  Clone ID: PAT_MRT3847_23628C.1
aaaattgtataaataaaaatatctacaataaaaataacgggcataaaaggcacacccaaacaatctacaaacaggcttaatgaacaaaataacccacatggctacggatcaccgattgcatatcgctagacaactttactcgatgtacatgaagccgaacccgtataatattgtgcgacactgcgtttaacatcgctaacccctgtactaatgataggcgcgaacaaacaatggcatcctgcaactaacaccctatatcagaaactcacatgatctgcagactgggcattgctaagaacgaagacgagcgggctagaacatcttaggcctatctaaaacccatgtagg

SEQ ID NO: 58269 - DNA, 288 bp, Glycine max
  Clone ID: PAT_MRT3847_23629C.1
gtaggatactgctaaacagtaccatcgagaaaatgatgccatccataacactaggctaactctcacctgcgcatatgttctacagatttaagggctccgtcatcataagctcctttctcaatctgcacccaggcacaaaaaatatgtgttccaccctccaagcttagcgaatgctcctcgaatgcaacatcgtctttttctacacgccccccaactagtggaatcacagtttcaagctgggcctgatcaaatttgagcacatgcttggttacaagcgtttctattttc

SEQ ID NO: 58270 - DNA, 1536 bp, Glycine max
  Clone ID: PAT_MRT3847_2362C.1
gcaatagggaagtaactcccctttatcaatgcatcaatcgtgggagtatttcagttgctcacacagcacctttgtttgtgttgttgttggcaggggtcactgtctctgccttcttctcccgcacctgtactcttcgtctcatttcatcattcacactctctctccattcccagtaataaaaggatgcaactttcctcgccccgttccaaaacttttggaactttgcattaatggggttgaagggaatgctcacctaatccagtttctcaattctttaacccaaccaagtgctccccctcccttttttaaataaatttattttctttttttatatatatgtatgtacttttcttccggtacacaatccccaacgctccaaattttgaggcatttcatgttttctgtctcaacctctgagaaaacgttatttttgttgttgttgtctttgttttgctcttgtgggttgaaaaatgtccactttgcagatgtcccgtgttgatttggagcaagggaatgtgaatcatcgccattcggttgttggaagtgatgtgagtggtgaagggaacgtatgcttctctgatgctgatgatggttcttgctattcccgtttctactcaacaaatggtggttcatatgatgattacagctttgcttgtgtttctgatcctgaggttgggggtgttcctcattctgggagagcttcttcttcggcttctgagtgttctgtggaggcggaaactagaagtggggttcctgagatcaaggtgcatttggctaaagtggagaaggattgtaggatttgtcacatgggtttggagagtgatagtcatgagtctggtgcccccattcaattgggatgttcctgtaaggatgatttggctgctgctcacaagcactgtgctgaggcctggttcaagattaagggaaataggacatgtgaaatttgccattctgttgctcggaatgtttacggaggaaatgaggagtcgacggagcatttgagcgacgttaacaatgctactacagcagccacactctccacacctgctccttcagcagaacctcgaagattttggcacggccatcgcttcctgaatttcttgcttgcttgtatggtttttgcgtttgtcatatcatggctattccactttaatgtgccatcatcctagattttcctgaggcagtttcatttataatttaattctgagtaaggagaaaaagatgaaaagagaaaagagagggggaaaaatcccactctagaatccatggagatacttccttagagaatgaatccttctacaatttgaggccttattgagtttatataggtagttgtataacttcttttcgtccatgcagatagacatttctcctttttctgctgtgcattcgtcctaaattattgtgctttacaaagctctcttattctgtctttcagagtcaatgttatttctgggacaagttctagaatgtttattcaaatgtaaattatatatcatatattatattgtattgttacttcattgtcaaaaaaac

SEQ ID NO: 58271 - DNA, 183 bp, Glycine max
  Clone ID: PAT_MRT3847_23630C.1
ctttttcttccttttgcacatgccgattgaaaaggagtcatggaacctttaaggctggtattttggtgatatattattttatacactgtcaaattttttgagacgcctatggttatggaggaaaatcattgaagcagatttatcgatcaaacccacgatcctttattgaagcccaacgaatac

SEQ ID NO: 58272 - DNA, 329 bp, Glycine max
  Clone ID: PAT_MRT3847_23631C.1
ataaccaacttctcatattccccaataacatatcacaaggaggggaacaggagaacgacattacacacaaagcacatttcattaatatgaggaatccactccaaccaaccccgctgtaaaactctgagtggaccctgccctacttccagctaaggatttggtaaaaccctcacagaagcaatctcagctctgaccatttcagggcgaatatacttaactcctatatgacatgctggctttcacgagggacaaaggctatcatgcctgaggaaaaaacatgcatccgtatcaacaggtggaaagatcgtatacacatgttcgtggataca

SEQ ID NO: 58273 - DNA, 141 bp, Glycine max
  Clone ID: PAT_MRT3847_23632C.1
cccactcgtacaaaaaacgtgaaaccaattcatccattagtcatctttcattaatcaggcactcgggctttccattatggagagacgatatcccttccattaattgtctttaaaaacatgcctatcttccgcaccagatag

SEQ ID NO: 58274 - DNA, 909 bp, Glycine max
  Clone ID: PAT_MRT3847_23633C.1
atccagcatacaactacatacaaatatataataatagggaagagtctagaatatccgtctctagttagttaagtgcttactttctcctccgaaatagaggcatgcaaaagtaagatgagcggataatatcaaaccaacaaagtggaaacaacaagaataagggcacaattgaaatgacaaatatgaaaatttgaacccactttgaaccatgggaatatgacatgcaaaatgcagcactgaaagctaccatcatgtttgtgatggagataatttgtgccaccattccaattagtaaccttttagggagcaacttgaaacattcttcctctgcatagcttgaaattagtatagacaggaacattagtatggatgctgatgctgatatcagtgcaaatgctactgataatgaaaatgctaggaatgctggtttgtgcaaaaagttgggagtttgtgtttttttatggatgccaccaggtagcatgaatgttgcagtgaaaactcctgcggttatgagtgtagaaacaagcatgcagctaatagatgtgctctttgtccatgactctgcctttgtcaataattctttgtgctcctcagcaaatatttcacgtggagtttttcctttagcatttttcttctctacatctaatagcagcattaactctttcacctccttgaaccataataattcatgtgtcatctgaagagctgctccagaaattaagccaagtttatcaggaggtgtcaacttagcagcatagtgcaaaatgttgtttccttcatcgtcttcaaaagttgctatgaaatccttgaaggagcctagttcgtgttttagactatagatgctaaaatgccgatgtataacagcaatgggaattatgcttcggtttttgtcatccacttcccataata

SEQ ID NO: 58275 - DNA, 265 bp, Glycine max
  Clone ID: PAT_MRT3847_23634C.1
acacagcttcatcagcaatcttgacgtctatccattagtttggcattggacgaattgaaagaaacgattacatcataatatcaatcttcaaaacagaaagaaagaaataaaatcacaatggccgctatccagctcaatttcactctccgcacctcctccaactgcaaaaccgtgcacttgctcggttcctgggatggctatcagggtcagctcccactttccaaggatcccaagaagtccggtggctgggtcggatcattcaagt

SEQ ID NO: 58276 - DNA, 395 bp, Glycine max
  Clone ID: PAT_MRT3847_23635C.1
cagacaactcaaccacaacgacgccatgatgtctatcttcagccacttggagatcgcgcaagcccagaattggaggttttccttgggcacggggcccgtaaaaggagttaattcaaagcccaaaatggaagccacttcttcctccgccgccagaaaagatccgaatccatcatcaaccgctggatccaaacaaaacccgccccgtttgaggcccaggtttgcgccggagttggatgggttacactgctttgaatccatcgtaccctgttagctccaatttcaattcacgactcataaaaatcataggcaattcaattcaatttatttttactgaatagtttaatcagtagttgagaaagctatgtactgtacggacgccagagatcaaattgtgc

SEQ ID NO: 58277 - DNA, 127 bp, Glycine max
  Clone ID: PAT_MRT3847_23636C.1
tatttattcggcataaaaaccaccatttatttatcatgcttttcgcgattggagtttgcatgggccttctatttctctacaccccggaggggcactttattcttatttcaacgtaaaaaaagtttct

SEQ ID NO: 58278 - DNA, 331 bp, Glycine max
  unsure (1)..(331): unsure at all n locations
  Clone ID: PAT_MRT3847_23637C.1
tatacttccgaaacgacgtcgtaacgtgacggcgacgcgtatcaacttaaataatcgcgctccanaaccactctcccacgcatttaatcttcaaccaaaacaaacaacccacatcactctctacatatccaacactatagcgtaaaccactcttcaaaaacattacctaatctccaacgaaatctctctctccccccaagaacaattcaatatctataatcttcagttggccaaatccaaccctaataatatcatacaagaatacccacactcagatccccatactccaattcgcaagaacattgatcactcaatgcaactgaatacttat

SEQ ID NO: 58279 - DNA, 451 bp, Glycine max
  Clone ID: PAT_MRT3847_23638C.1
tggtcatatcatcacttaccccgatgagacatattcgttggagggaagttgctcctttgatattaaatctatctctagattgtaaaagggactctctacccaagcacagtttgttcgtggacaaaccttccactatgatatacttggcgctggttcacattctttagaagaatcatctgaaagggaggatcagtaggcaccgatatggattgatgccacattgagacccagaatatatcctcactaccttgaggcttatgctcagatggacacagatctgttcatgtcgtgtgtagatgatctagaaactcctgtgggatccatgttgggtcttaatatccctcagtctaatatggcgctttcgaagaacacagatggaggaaccattctgcgtagtgatctattggcaagtactgggacagacggcgactagtggatctgtgttgatttg

SEQ ID NO: 58280 - DNA, 138 bp, Glycine max
  unsure (1)..(138): unsure at all n locations
  Clone ID: PAT_MRT3847_23639C.1
ggnacagagctttcaagnantcccattgaactgaanaatggtgagtggantctnanagnngttgcctggattgggggtagnatcatgtccntgananacattccttcaggaacacaatggctccatagtaggattgag

SEQ ID NO: 58281 - DNA, 587 bp, Glycine max
  Clone ID: PAT_MRT3847_2363C.1
ctgaagcagtatctgcatgattaaatgaatcggggtattgcctggcatcaagtcataccctggaatgaaataagacagataaaccttcgtcttaaattccttggtagttacataatacaattttagatattcattgaaaaaaatgttgacttgaaccttttctgaatgccaggaggattgcacaagtaaaagagaaccaatgtcaaattgctgtagaagatgttatgtacttgctgattttttacaagttttctgagatcagggtccctatggttccaaagctttctagttgtctttataatggcaggctagagatattgccttctaaggactgggaactagagtctattcatagctcggaagttttggatatgataagggaacacataactactgtaactggcttgagagcaaaatctagtgtaactgagtgttgggcaacaacccaagttagacaattcttacttgcccgggtttacgttgcctccatattatatggttactttttgaagtcagtttcattgaagtaccacctagaacgaaatctctctttggccaatcatgatcttcaccttggtcataagact

SEQ ID NO: 58282 - DNA, 482 bp, Glycine max
  Clone ID: PAT_MRT3847_23640C.1
ggtttttgaagatggcggccctcaaggctctggtgtccggctgtgggcggcttctccgtgggctactagcgggcccggcagcgaccagctggtctcggcttccagctcgcgggttcagggaagtggtggagacccaagaagggaagacaactataattgaaggccgtatcacagcgactcccaaggagagtccaaatcctcctaacccctctggccagtgccccatctgccgttggaacctgaagcacaagtataactatgacgatgttctgctgcttagccagttcatccggcctcatggaggcatgctgccccgaaagatcacaggcctatgccaggaagaacaccgcaagatcgaggagtgtgtgaagatggcccaccgagcaggtctattaccaaatcacaggcctcggcttcctgaaggagttgttccgaagagcaaaccccaactcaaccggtacctgacgcgctgggctctggct

SEQ ID NO: 58283 - DNA, 214 bp, Glycine max
  Clone ID: PAT_MRT3847_23641C.1
acagccaaccacatactaaaaccgattactagttatcatttgagagtatcacaaatttatagcatatatacagacagaacatgttttttttgatccctcatgtaaagaacatgtgctctgtatgaacccattcaactacacacacaataggggggatgtgattaaataacccagaatactaaatacagatttgcctttgttggttggttcccac

SEQ ID NO: 58284 - DNA, 1703 bp, Glycine max
  Clone ID: PAT_MRT3847_23642C.1
caagatgtgaagaagctttctctttacgcttgtttactcactttgagtctgctgatttttcttccccatatcaaagcaagtcaagctaataaacttgatgagttgatcctatctaggagctcacataatcctcctgtgaccctttcttgggcagaggaagatgcattgaaaatgcattctgctgcttatgttgcgccccaagagggactaaggcaagctgacaagattgtcacactgcctggccagccacatggggtgaactttgaccaatattcaggccatgtcacagttgatccaaagactggaagatcacttttctattattttgttgagtctccacataactcttcagctaaacctttagtattgtggctcaatggaggaccaggttgttcctcattggggtatggggcatttgaggagctgggaccctttagagtcaactctgatggcaaaacactatttcataacaaatatgcttggaatgaagtggcaaatgtgctgttcttggaatcccctgctggagtgggcttttcctactcaaacactacctctgactatgatcgttcaggagataagtctactgcaaaagatgcctatgttttcctgatcaattggctagagaggtttccagagtacaaaacccgcgagttttacataactggagagagctatgctggccattatgtgcctcagcttgcatacactattttggtgaacaataaattcagtcaacaaagcattaacctcaaaggcattgctatagggaatgctttgattgatgatgttacaactatcaaggggatatttgattacttttggactcatgctttgaactcagatcaaacacatcatttgattaagaagtattgcgacttcacttcggaaaatatttcagcagcatgtattaatgcaacaataagttccatacttgagaaaggaagcatagactcctctaacatctatgctccactgtgttatgactcttctctgaaaaatggatctactggttctgtatatgattttgacccgtgttctgcctactatgtggaagcctatctaaataggccagaggtccaaaaagctcttcatgcaaaacccacaaattggacccattgcagcggctttgactggaaggacagcccaactaccatcctacccatcattgagtatctcattgctagccacattaaattgtggatatacagtggtgatacagatgcaacggtcccagtcacatcttccagatattcaatcaacaccctgaggctccctattcaggttgattggcatccatggtattctggaaatgaggttggaggatatgtggtgggatacaaagcagtgacgtttgttacagtaagaggagcaggacattttgttccaagctggcaaccagcccgatctttgaccatgatctcatcattcctctctggaaccctgcctcctgcttcaccatacgatggattctaagtatgaagttgatttaaaagttattgccttgagatgaaggttgtgcaatagctacttgttggactatagtaataacagttttattaataaggttccgtagcatctaaatgtactgctaagtttcataggggaagaatatttatcacactttgtattttttatgaaaggaatgtatcttatcttaacattttcttaataaaaatttcagtttgcataaaaactttttatat

SEQ ID NO: 58285 - DNA, 544 bp, Glycine max
  unsure (1)..(544): unsure at all n locations
  Clone ID: PAT_MRT3847_23643C.1
acgattccgttccaggaaggtttcccgtcatcactgtatgacgtcctccttctttggggggggggggggggggcaccagcagaagccaggggggaggtggggctatccacattcggctagactaacgtgagcagtataccatagaccttggaaacatgaacaaataggaaacgtagtattgaaagaatacntgcgtaattaatcaccggtaatagatatgccgatgttaaagatggaccatagaataccatccatgtacaaattattatcaacctccaccataacagctacccgccaggttggtgcaagaggcgaagttcttaaccgatcattagtggttaagcgtggtttagtaaaaagaagttgtcatgcagtgccgccaagatttgttgcggttgcaagtgggctgggtataggagtaagccgagtacagtgggttattgttaaccggatccgtggtttgcgtacacgtggtataaagagggctagattattatcaacttgcaatattaaagcgtacacgccaggttggtgccagaggaga

SEQ ID NO: 58286 - DNA, 273 bp, Glycine max
  Clone ID: PAT_MRT3847_23644C.1
tcgagaataacagaagaccaagaccatattatgtttgaagccttttttttgtgaatatatatattaggctgcttctagacaagctttgggtcacggggatgctagttgctagctatgggggaattcaagcactttgtaattggtaagttcaaggaaggtgtggcagttgacgacctcacttataggatgggaaagttggtctcagagattaatgctgtcaagttctttgtatggtgacaggacatttaaagcctatatgtgttgagacaagga

SEQ ID NO: 58287 - DNA, 440 bp, Glycine max
  Clone ID: PAT_MRT3847_23645C.1
cataattgaaaagtgttatcatggctctaactacttgttataaatctctgccactacaagttttcatccgagttgggttattatctttttggtctttcatcttttgtgaatatccgtttttagtttcataatttttttttcttttttagtcccaaaaaaaatattattttattttttgttttgaacatatgtagtattttttaggtactaaaaatgaaacaaaaaaaattgagggactataaacaaaaaaaaaattatagactaagaccagtcaaaagattaagaaggactaaaaacaatcgcaaaagacgaagcaagttaaataaatcctattgatactattttactaatattgtgttacaggaaactataaatgtacaatttatattataatacaaaaatattgatctttatttatattcttttgaaaatattcaaat

SEQ ID NO: 58288 - DNA, 1175 bp, Glycine max
  unsure (1)..(1175): unsure at all n locations
  Clone ID: PAT_MRT3847_23646C.1
cccacgcgtccgcccacgcgtctgaaaagctgaactaacacactcgtacactgcttccaattccgcccgctcttccattttttttttctttcaactactctgaagggttgtggattgtgatattctttacgaggaagaaaggaaccagaagtcaaagcatgagaagcaatcccacttccaatgccgaggttcttctgtcttttcttccttcctaaacccaatacaaggttgtcacttttattcccaccaactagagaagccaaagcaattcccatgaacaaaaccaacactttcaacaagaatcaagtattttgatttaaactcaaccccttcactcttctatttcttttgttcattcatacattcaaataataaataaaacaataaaagaaacaagaatttggttggatagagagagagggaataaaaaaaagatgaagatggggaaagtggtgatggtggttgcagtgatggtgttgttcaacatgtcttcttgttctgcttggtttggtggtaacaaacacaaaagtggaaggaactcgattctcccaagtgaagccacgtcatcacggtcaaggcttttgaaccctgctggctcctctattgtgctccctctttatggcaacgtttatcctgttgggttctataatgttactcttaatatcggtcagccagcaaggccttattttcttgatgtggacacgggtagtgatctcacatggctccaatgtgatgccccttgtactcattgctctgagacaccccatccactctacaggcccagcaatgactttgtaccctgcagggatcccctttgtgcatccttgcagccaactgaggactacaactgtgaacaccctgatcaatgtgactatgaaattaattatgcagatcagtactcgacctttggcgtgcttctcaatgatgtctaccttctcaacttcaccaatggagtccaacttaaagttcggatggcactcggatgtggatatgatcaagtattttcaccttcttcttaccaccccttagatggactgcttggccttggaaggggaaaggccagcttgatatcccagttgaatagtcagggcttggtacgaaatgtgattggacacctgttaagttcacagggaggagggtatatctttcttngacatgcatatgattctgctcga

SEQ ID NO: 58289 - DNA, 379 bp, Glycine max
  Clone ID: PAT_MRT3847_23647C.1
gaggcatagagttactctggaaggaagtgtcaatgggcagtgtgtgggtgtgctactttcctagctgcgccatctttccctgtcggcattgcatgctctacccagcgcaccttcttcaaccttctgcctcttttcaaagcggtcttctgcacgtacggtcttctgaaaccacccccagcactttcaccgcaagaaccactacaagggaaagtcttaggctcttgaacaactacatgatctgcattgatgtacgccaatacttcgactccgggggcctcccgtaagaccacatacgatccaccaaagagctgttgctacacggatggaatgactaggcaaacattgtctgaaggagagggcataaacagattcaggagct

SEQ ID NO: 58290 - DNA, 498 bp, Glycine max
  Clone ID: PAT_MRT3847_23648C.1
acggctgcgagaagacgacagaagggacaatattccattttgatatgtaaatgtaaatgtgagtttcttagaaaatgttttcgctatagttcttaattagatattatttttccatgtgctatgcaaaaatggtttaaggaaaagttcttgaagcatctcttcgtgtgcatatcacatcatgtcaataaacacaacttccaatattctatagtggtcactcttcattttgactgttatgttatcataaccaaatattttctcttcttttatattatttactttccccgcttatatcaagtaattaatatttgattaactttttttgtaattttataatccttcctttgttacagggaaggaattcaaatatacgtgattggggattcatcaaaacttcctgagtctctaaggagtactatagctaatgcagaaaagagtacaaaacataactcgagactccaacttattgtggcaatgaattacggtgggaaatacgat

SEQ ID NO: 58291 - DNA, 561 bp, Glycine max
  Clone ID: PAT_MRT3847_23649C.1
atgtgcattacatatacattataaattttaatgttatgtatgacaacattatttattttacaacgtaattggctcaaagaacttcttactcttacgtaacaaaatttaacatattaataatacaaaaatgattaatttaacatattaataattaaaaaattaaatattaaatttaatatatatttactattacaaaatttaatgtatattaaattgtgtaatagtaaatattttttatttttaaaaaaatatactaattaaataatctgtatgatttatatcaaaattaattgtcacaaaatttattattttaatttacatacacattaaatataaattagaaattttaatgttatatgtatatcaacattatttattttacaacgcaattggctcattagttcaattgattaaagagttgaactaataatttggaagtcacatatttaagttttgcttgaatcattaattcatcacaaatatttttcaaagaaaaaataaaaaaagacttcttccgtgagacaaaattgacaatatgataaaatgtttgggccctcactt

SEQ ID NO: 58292 - DNA, 1305 bp, Glycine max
  Clone ID: PAT_MRT3847_2364C.1
gaagagtccatattctacagacatgtagtgcctaggtgtgtttggaagatccagagatggcttcaaattggtcaagagaagaagatgacagaagcttgtaaaacacttgatcaattcatacatgcacgcatagcatctaagagagaggagctaagcaagtacaacgaaaatgaaatgggtgaagctcatcatgttgacttgttaacagctttgatgagagaaggaaaagcacatgacgataaatttctaagggatgctgtgttcaatctatttgtggctggaagagataccataacttcagctctcacgtggttcttttggcttgttgctacaaacccctcagttgaagccaagattctcgaagagatgaaagagaagcttgggaccaaagaaaagtcgcttggggttttaagcgtggaggaagtgaaaaggctggtttatctgcatggtgctatatgtgaagcgttgcgtctctttcctcctataccctttgagcgcaagcaagcaataagctctgacatgcttcctagtggtcatcgtgttaattccggtacaatgatattattttctttgtatgcaatgggaagatttgaagaaacatggggaaaagattgttttgagttcaaaccagagaggtggatctcagagaaaggaggtattgtttatgtaccatcttataaattcatagcttttaacgcaggacctaggacttgcttgggcaaagactcatccttcattcaaatgaagatggtggcaactgctattttgcacaagtatcgtgtccaagtggtggagggttttgttgctactccaagcctttcaattgttcttcttatgaaggatggtttaaaggtacagataacaaaaagggaattataattaatttgacctgagaatttcactcgatctccaaaagtacaaaaacatgcagaagattaagtgtcatttatgtctattaaacctaaagatgtatttattgttatttgttcgtgtttccttttcgtattaattgatcggtatcatgtatctttccttgccttctgtttgactgtaccgtgttagattttgtattagggttagactttaattaagtaatatattatgttatattatatatacataattatatataatgcatatattacataataatataaaaaaagtgtcattactaataggcttatttaggctgatagggaaagttttattctaaaactactagatattttataaacttattcatcatgtaaattcatcagtgtagattgatgaggcatgaaaatctataaattataagttgcgact

SEQ ID NO: 58293 - DNA, 285 bp, Glycine max
  unsure (1)..(285): unsure at all n locations
  Clone ID: PAT_MRT3847_23650C.1
cttgggggggnnccnnccaaaagaaagttcttaaaggattaacaaataaaccttttaattctaaaggcccacaaatccccttttaacctaaattttcacattttccgccttcccgggagggctttttacccttttaccaccatcaacccttaaatttaggccacactaccccccccccatcaaacctctaaatccccattccctcttttcccacatacctaccctcccccctccctcttcattcacttgaaattgcggaacaggcaacaacaaaaacttccccct

SEQ ID NO: 58294 - DNA, 389 bp, Glycine max
  Clone ID: PAT_MRT3847_23651C.1
ggagagggtgctgctgtacgaaccgatctgggaaccacctactctcgtgtcagaagcgtggcaacctgaccgatatgacatcattgtcatcgacctctggaacaatacgactccgtcatacctgccttatactgatacccagcggctgaatgctgatgcagatgataaccaggatcacatggacctcatcgacacctggttcgatgcctctaggttgataggtcgtagactcagtgactgctctgctcatagtgatctcaaagtgtggcctattaaggtcattgctggtgctgctgactagccaatgatcgctgttaactgcaagggtgaagcgtagcaatatgatgcggaaaaattatcttctatggagcatcataagatgcgagaga

SEQ ID NO: 58295 - DNA, 223 bp, Glycine max
  Clone ID: PAT_MRT3847_23652C.1
agctatgatgtcgcatgcaccccaattcggctcgaggcatggcaaacatagcaagtcttccatttttaatttccttcacctttagcagtgcagcttggtctggatctgctgagagagctccaactctctaaatcattcatcttcatgtttttctccaatcttacttaatgtacaatacatatcactgagatattaaggcatttggctttgttccttggaactc

SEQ ID NO: 58296 - DNA, 1705 bp, Glycine max
  Clone ID: PAT_MRT3847_23653C.1
ggctcgaggctgttttatgtcctctaatttatttttattttttatacccatggccttctgtccaatcgcaataaatccccgttacccttttatctcctcattctccctccggtcttcttactctcaacgatgtgggatcagagtgtgaaatgaaaccatgagtctcctctttccaactttgataatctcattggttattcttctcgtcactgttaaccaatgttgcgctctcagtagagacggtgttctgttactctccttcaagtacgctgtgttgaacgacccactctacgttcttgcaaactggaactacagtgatgagactccatgttcctggaacggagtttcttgttccaacgaaaaccgcgtcacgtcgttgttgcttcccaattctcagcttctaggttcggttccttccgatctgggttctattgaacaccttcaaattcttgacctttccaacaactcccttaacgggtctcttccttcgtctctctcccaagcctccgagcttcggttcctgaacctgtctaataaccttatcacaggtgatcctccggagtccttgtctcagcttcggaatcttgagtttcttaacctctccgacaatgccttggcgggaaaattgcctgaaagtttttccaacatgcaaaacctaactgttgcttcgttcaagaacaattacttgttcggctttcttcccagcgggttaagaacgttgcaggttttggatctgtcttcaaacctcttgaacggttctcttcccaaggatttcggcggtgataatatgcgttacttgaacatctcctacaacagattctccggcgaaatcccgacggagttcgcggcggagattccggggaacgccaccgttgatctctccttcaacaacttaaccggcgaggttccagactccactgcgttcacgaatcagaattcgaagtctttcaacggcaactttaatctgtgtggagaaataacaaagaatccttgtcctattccttcttcgccgtcgtcggagccaaaagcttctgctcctatttctcctcctgcaatcgccgcaataccgaagagtttcgatgattctcctttggcgccgacggggcagaaacagaggggtctcaaacaaggaacgatcataggaatcgtggtcggagacataatcggcgtgggaatcttggccatgctgtgtgtctacgtgtaccgtttgaagaaaaagaaggatgcggagagcacaaagaagaagaacgaagcggctataacaagaagcagaagcgagagttcctcgtcaacaacctcagaatccagaggcttcacgaggtggtcgtgtttgaggaagagaacggaagaggaagattcttccgagacaacaagctcttccgaaagtgaagtggagggagccacggcggcgacacatgataataataataataacaacacggggactctagttactgtggacggtgaacgacaactggaggtcgaaacgctgctgaaggcttccgcgtacatattgggtgccacggggtccagcataatgtacaaggcagttctggaagacggcacgtcgttagcggttaggagaatcggcgagagtggcgtggagcggttcaaggacttcgagaaccaagttcggcttattgctaaactggtgcaccctaatctggttcgcgttcgtggattctattggggacacgacgagaag

SEQ ID NO: 58297 - DNA, 270 bp, Glycine max
  Clone ID: PAT_MRT3847_23654C.1
atcggcgttcctcggggaattccccttccacattttcaagaaatacggaggcaacactgttcatatcctccactggaattatttgttttcttagtaggcctatcctgacgccactcgaaatgggatcggccttcctcgggggtaccgagcgcgaagtcgcttctcctgagtcggtccggcttacgccttgggttatccagggtcacagctgttcccggggtgactttgttacccgcccaaaattccacacaccttacgacccggaaccat

SEQ ID NO: 58298 - DNA, 272 bp, Glycine max
  Clone ID: PAT_MRT3847_23655C.1
ggagaacatcgaggaaaagataaagggtgaataattagcagctccttctagttccggtgtcggtgtgggtgtttgaggctggtgaaggatgtcaattgttccaatcagataaggtgatgccaaaggctccaaacccattcgcttcgtagggtcaacacgtggattttcctcacactccctggagctccggctatcatcacggcttggaattcggattcggattccgatcaaccgtgaacacacgtatggactggagggagattcctatagcg

SEQ ID NO: 58299 - DNA, 484 bp, Glycine max
  unsure (1)..(484): unsure at all n locations
  Clone ID: PAT_MRT3847_23656C.1
tcgcccacgcgtccgctaggtttactcttttgatttttaggtgggtagacctattgtatagaaattttgatgattgtatatattgtggctaaagccatcacagttgttacctttgctctggatgtcactgtgttattttgcaaactcccatattttggaaagagtttaccgaccgcatcttattatttctcacgtgacgacctaaaatgattgctggtatattttttaatgagcaaaatagtttagaggttatgagtgatcagaaagaaatgaatccgaatggagttgtgaactggccattcaggactctatagtgataattttccttatgaatttaattaccgtgaaatgaataacagtgcggaaaaaaaaagagaaaaaagaagaaaaaaaaaaaaaaaaatgnnnnnnnnnnnnnnnnnnnnnnnnnnnnnnnnnnnnnnnnnnnnnnnnnnnnnnnnnnnnnnnnnnnnnnnnnnnnnnn

SEQ ID NO: 58300 - DNA, 337 bp, Glycine max
  Clone ID: PAT_MRT3847_23657C.1
gggggaaaggggttaaaaaagggaaaaaaaaaaaaaagagattggaggaaaagggaaggatacataaaggaaattttataataatataaaaaaaagcgagaaataggggaaaagggggtggaaagagggagggaaccaattttaaaaaaaaaggccccttgaacccctgggggggaaacaccggggcccatgtgaaggaaggaacaatagtaaaaaagggtccatatgaaaggggcgtaaaaaaccggaaaaaaccggggggcatgagattaagggagaggaaaaaaatgccgggcaaaaaggcaaaaataatggggacgcgagggtcatatttggt

SEQ ID NO: 58301 - DNA, 211 bp, Glycine max
  Clone ID: PAT_MRT3847_23658C.1
gcgttcttcattgtgcattattcaatggccaccacagcagctctatccggtaccatggtgagcagctccttcatgaggaagcaacctatgacgaccaagagcctagagacattccccaacgctcttgttggtctgaaaggtcgacgatgcggtcgtgtaacttgcatggcctcgtacaaggtgcagctcatggccccggatggagtcgtgg

SEQ ID NO: 58302 - DNA, 491 bp, Glycine max
  Clone ID: PAT_MRT3847_23659C.1
cctttgtctttccgttccttttttgtttcctttttttttgttttgcttgttttccttctttgttttttttttgcttttgtttttttgggggaaaaaaaaacacaaaaagacttgctgcctttcttgggcgagctcgaccccctttgaattgccctgggccctgtggttttcggggccgatgctttttcccccacgggggtttgtggggccaaaagcccccccccggggatccctacccgaggagggggggggcgttcttggggaaattacgccgttgccccccgcgtctggaagcgccctggggggggatatggctcgcccttttcaggggggtaatgaggctggcctgggggcccccctttttggggccggggtggggggttacccgggggggctctttttggggggtggaaggggcgctgctttttctggggcccgggggcccccaaatgtaatatttataggggtttttttccccagggggggggggg

SEQ ID NO: 58303 - DNA, 585 bp, Glycine max
  Clone ID: PAT_MRT3847_2365C.1
gtttttagatctggtttctcttccttcacctacgacgtgttcctcagcttcagaggctcagacacacgccatggtttcaccggcaatctctacaaagctcttgccgacaggggaatctacactttcatcgacgatgaggagcttcagagcggaaaggaaataacaccaacgcttctgaaggcaattcaagagtccaggattgccatcaacgcgctctctataaactacgcttcttcctctttttgtttagatgaacttgcaaccatccttggctgcgccgagaggaaaacactcttggttttgccggttttttctcacgtgcgacaccgggaagatagttatggagaagcgttggttaagcacgaagaaaggttcgagcataacacggagaagttgcagaaatggaaaatgactttgtatcaagtagctctcttgtctggctatcatttcaaatatggagatggatatgagtatgagttcattgggaggattgttgagcgggtctgcatcaagattaatcttactcattacatggtgcggggtatttggtggacttgagcacaagtgccagagcatgaacttttg

SEQ ID NO: 58304 - DNA, 261 bp, Glycine max
  unsure (1)..(261): unsure at all n locations
  Clone ID: PAT_MRT3847_23660C.1
ccangtagtncatnggcttggctnaaatattcangccatgcatgtgtaagnatgaacnaattcanactgtgnaactgcgaatggcncattaaattcagttatagtgtgtntgatggtatctactaactncggatnnccgtagtaattctagagcnaatacgtgcaacaancnccgncttctggaagggatncatttattagatanaaggtcnacanaggctntgccgnttgctttgtatgantcatnataactcgtnggat

SEQ ID NO: 58305 - DNA, 312 bp, Glycine max
  Clone ID: PAT_MRT3847_23661C.1
atctatatcgtaactgtcacagatcctgacgagtgatgaaagcctcatctttactgtctcaatagatattgctatggcagatatcgctctgttataatggtggattgacattactatatgtcattctatacataatatagtgttatgaatcattagtattttctctagatatacttaacaatcctgttatatatatgctcctatatgataatttcactctacatccataccataagtgatttcaataaccaagtctttaagctttctacacaacattcatcatctattatgaaatcctgacacaatgtatac

SEQ ID NO: 58306 - DNA, 159 bp, Glycine max
  Clone ID: PAT_MRT3847_23662C.1
acgcgtacgcgcacacatcctacataacctgttcacaatttatgtctatcatgctccttacaagcaatgacaccggggttacaacggacgaagatcggcgctacgacgggcacatctgggactctgttcatcacgcaagcgacaattgctaccctaaca

SEQ ID NO: 58307 - DNA, 1515 bp, Glycine max
  Clone ID: PAT_MRT3847_23663C.1
gttttcagcagtgcttttttaacccccaccaattgaggatcagtgattcctttttgggcaatgattgaaccaagtgcggcatcaatcacccctgtttccccttctttaagttggccagccgaatcccgtaccaatcccaaaagtttttcagcctggcccgtgaacttaggaatagtggggtttactccctttgctagaaaagagaacaagtccttttatacaggggcttttttccgtttcgaggggtagaacccccccctgtattgaggaaagtttgtcttgaaatcttcaaatgagcttctccccaaaaccttttgcttttcagtgaaaacccccatatttcttttttacatttccggtatttctattaaatgttcaaagcaagtttttttttttttttttttttattttttttttttttttttttttttttttttttttttgaatgcaattgcagtcaataatgactatgattctttaagacttgctcttgttccagtgcatctgtatgttttgctgttcaattcctacaatctaaacagaacagtttatctttgccaatgccaatagtatcaaagtaacaaaaaacaagaaagaaaacaaggggtcaagtatcatgatctcatagatcgatccctcacatcattcaaagtatggtttattataaagcaataataagctctacacagagcagcattttggagtcatagatacatattcatcacttccacttcttgaatccaccatgcttgccgaacttgccatgctttccatgcttgccgaacttgccatgctttccatgcttgaacttaccgtgcccgtgctgcttgaattttccatgtggcatgtgagcaccatgtgcatattggccataggagccatgggagccatgagagacatggtgagcaccataagcagcagcagccgcagcagcacccccagcgagcattgctcccataccgccgtgcccatgagaacctggtgcatgtgatgaaccaggataaccagctggggggtaaccagcaggaggatagccttgatgtggagggtacccagctggaggataccaggatacccttgttgtggaggatacccagctggaggatatccttgttgtggagggtatgccccaggtggtggtgggtaagccccaggtgggtacccatgtccaccatgtgctgcaccagctaccccatgagcaaggtgtgaaaaaattcctttgtcagattcatcatgatgcttgtccttgccacctcccatctttcagaaaaccaagacccggtttgaatttgcagaatacgatgttgtaattgagaaaatacaacagaaactgagcaaaaagagagaaattggggatcttgtataaaatgtgactatgactcgttagattagataaggaacaagaacgagaacaaaaaaaacgcgtaacgcatccttacgcgtcattgacgcgggcaatagtcatttgcacagagtgccacgtggaagatgctaattgctctatgtattcctcgt

SEQ ID NO: 58308 - DNA, 436 bp, Glycine max
  Clone ID: PAT_MRT3847_23664C.1
aacccttgggctgatttatgtgcttgtttatgtgcttgcatggtgagaagatgatacgagggcgagcgagcagcgagaacggagccgtaaggggcattggaaggccgtaccgtcagcacatctctctgtatcatgttggtggatgcgcgcaggccccttgctgcactaaagaccccttgcctggttgtcgaactggatgtcgcgcggaaatgcccctctttccttgaccattaccttactaccctttagctcttcctgttctctaatcacttccttaagaaggagtctcactctgtctctctggactgtttcactactactgactagggcaaaaagagtccctaaccggagaaaaagagcgggaagaagcgccatacgtccgtcgtcagagtctctagtaccacccggggcgatatcgagtaacatcggaatcgga

SEQ ID NO: 58309 - DNA, 268 bp, Glycine max
  unsure (1)..(268): unsure at all n locations
  Clone ID: PAT_MRT3847_23665C.1
cagtttgagttatntgtnagcagcaagctgcgtcttcatatgngatttctgtgttggnttgatgattaaatcataatagaattctntgttcttgatacagcaaattaaaacggccaacagctatggatgaattantntcnttgatgagnntcctntgtattatcntnttcancctggacnggatcncganacatangggnngaattgtnaacctttgttttctgncngtnnnatgtttggcattnttttgtanaaggcccnngcgnnc

SEQ ID NO: 58310 - DNA, 213 bp, Glycine max
  Clone ID: PAT_MRT3847_23666C.1
ttcaaaattggaagggaatttggatttctattcaaaattcacttcaatttgaattagaatttgttgagcccaatttagagcccaaatttcacttattatgagttgagaattttagcttttggtcagcccactaattcaagatcaaattcaagattcttcactaagagtactttggtgtcatgaggcatgtaaagcatgaagggtgtacacaaa

SEQ ID NO: 58311 - DNA, 412 bp, Glycine max
  Clone ID: PAT_MRT3847_23667C.1
ttggtaatatatgaatgttttaaagtaatttttggaacatattaaatacattttaaaaataattttcagaaatgttaagatttacatattttagaaattaatttccaaaaatattaaatttttcaaaatttatttttaataataataggtaaatgttgttgaaattaaattctaaaatatattagttacattatgaaaattaattttcaaaagtaaaatattaaaattataaaacttctaaaagttaattccacactcatacaacatgaatccaataactgagttatatgccaaaaaattcagattacacacattgatcttattgcagagacacagaacatcattggtttactctttcatgagaatgaggcaccttattcccttcccttttagcattaattcaaatgctttg

SEQ ID NO: 58312 - DNA, 321 bp, Glycine max
  Clone ID: PAT_MRT3847_23668C.1
gtgacttgtatacaacgttagattaggccgcggtttatttaagaagaaaaaatgtgcctccaggtatgaaatatcaaggatgtgacggcagacaccgtgtacaaagccgcgttgaatgtcgccaccagcataataagagccagaatagtgtgtcttccggcgactatcaaggtcctcggagtgattacggcgttgggtctgattctggcgatcgcttttcttgcatagctatccgaggagatcctgatgaggttcacgcgtgacggcgaaacgacgacgtatgccggcgtcatgagagaagcctcaggaccctaggcagca

SEQ ID NO: 58313 - DNA, 1966 bp, Glycine max
  Clone ID: PAT_MRT3847_23669C.1
gggacaggggtggctccccccccatgctgctcccgcggcggttctggctcccgtccccctgatgctgccgccgtggccgttctctcacctgtggcctgcttagttacgtcgggttcaggctcggtgctctattgtccctaaattgctttgcatgggacttgatactacatggacaggaataccttttgcaaacgtctttggttcattcaacaaaactttccttccttcaatacctgtgaagcttgttgagtacaatccagtccacattctatcattctgagagatggagcgccagactggtgctagactgcttcttacagctggcgctaatgataccatagtgcctgtctacgatgatgaacccactagagctatagcgtatgtgcttgtgtcaatggattatcatatgcagatgttagaatatgatagacctaaagacagtggagacagttcaattacattgccactctttgattcaacagggctactttatcttaactcttttgatgagacaattactaatacctacagaagtctgggctcttttgaggagaacgtgttatccacttctgggtctcggagtttgccggctggggatccattctcatacacaaaggatttgcatgcaagggtttcttttactgatgatagctcccttggaaaagtgaaatatactgtaacttgctactatgcaaagagatttgaggctttaagaagaacttgttgcccttctgagttagattttgtgcggtcccttagtcgttgtaagaagtggggagctcagggaggaaagagcaatgttttctttgcaaaaaccctggacgatagatttatcatcaaacaggttacaaaaacagagcttgagtcgtttactaagtttgcaccagcttattttaagtatctatctgagtcaatcagtacagggagtccaacttgtcttgcaaagatcttgggcatttatcaggtaacatcaaagcacctcaaaggagggaaggaaacaaagatggatgttttggttatggaaaaccttctttacaggcgtaacattagacgactttatgacctcaaaggttcttcccgatcacggtacaatccagatacaagtgggagcaataaagtgctgctggatcagaatctcattgaagctatgccaacctctccaatatttgttgggaacaaggcaaagcggttgcttgagagggccgtgtggaatgacactgccttccttgcatcaatatatgtgatggactactcattgctggttggagtggatgaggaaaagcatgagctggttttaggtatcattgattttatgaggcagtatacatgggacaaacaccttgaaacttgggtgaagacctcaggcatccttggtggacccaagaacacttctccaactgttatatcaccacagcagtacaagaaacggtttaggaaagccatgagcttgtattttcttatggtgccagatcaatggtcccctccagagttacaccccagtgggtcccaatctgacatttgcgacgaaaatgcgtgaggcatgggacccatttcattgatgtggtcaaagtttgaatcttgtaaatgtcagtaccattccattggcacgggtctctccttccttccttatgtccattatatttgtctgctgcataatgcagctgctgttgatttgtgttaccacagattgttgaaagggtaactaagtgtacagtgattcccctctttatatatatatatatatatatatatatatatatatatatatatatacttagtgtacagctatatcttgtattaaatctcttgatctgtcgtaattttgatctaaagttcacaaccgctcgcatggtctgtcgtttgtgcgatttgaagttcacaacctattattgaattgcacaccgcgtttctttttctacgcatgtgaaaggcgttgataaattcttacctcactgttatatgaccc

SEQ ID NO: 58314 - DNA, 515 bp, Glycine max
  Clone ID: PAT_MRT3847_2366C.1
aatactttttttttacagaatggtagaaggaatacttaaagattacgcaactttcatgactgtctgttatgagaagaaaactacactaaagaacattaaagtaaaagaaagaaaagggtcaacatatggtatccacgaagtcgaaatggcatctggtaccatatggcgtatactgaaatgtttatagcgaaatgctggttagcaacaactttttcttcttcttttttttgtgtaaaggaaacattttgtttttactgaagcaacaacatctttttaagaaaatatttttctaccatatgtattagaataagtaataattatattctttttaaagaataatttttttaatatattaagaaaataaattaaaatcaatatttttttaaaatcttattagcaagttgaaaaaaaattaagataaaataaactaaaaactcaatatataagggtccttatttgctaaaaattatagtacacaaaataagtatttttttacgtttcttttaaaaaaagga

SEQ ID NO: 58315 - DNA, 708 bp, Glycine max
  unsure (1)..(708): unsure at all n locations
  Clone ID: PAT_MRT3847_23670C.1
nnnnnnnnnnnnngnnnnngnngacgcgtccggctgtgttgaatgatactgccttccttgcatcaatatatgtgatggactactcattgctggttggcgtggatgaggaaaagcatgagttggttttaggtatcattgattttatgaggcagtatacatgggacaaacaccttgaaacttgggtgaagacctcaggcatccttggtggacccaagaacacttctccaactgtgatatcaccacagcagtacaagaaacggtttaggaaagccatgagcttatattttcttatggtgccagatcaatggtcccctccagagttacaccccagtgggtcccaatctgacatttgtgacgaaaatgcgtgaggcatgggactcatttcattgatgtggtcaaagtttgaatcttgtaaatgttaccattccagcatacatcattgacacgggtctctccttccttatgcccttaatatttgtctcctgcataatgcagctgctgttgatttgtgtcccttaagcaatggaggtgcacctcctgttaccagagattgttgaaagggtaactaagtgtacagcgattctcctcctctttcttttttatacatttttttatatcatgtatttaatctcttgctttcataatctgtcgtaaatttgatttaaagttcacaacctattattgaattgcacaccgcgtttctttttc

SEQ ID NO: 58316 - DNA, 390 bp, Glycine max
  Clone ID: PAT_MRT3847_23671C.1
aaagatctgaaaaaccatgaacttgaaggcaggccggttgcttcattgcataattgaagttgttacttttacccgagtattatttgggtaccaataccaagataatgtattttcttcttaaaaaaaaaaaaaacttatagccaaactgccaaagtcatattctctcgtctctttctctatgggggtatctttggtgttagtagcttaattaggtgcaacaaaagaaacgaagtgttggtccccaatgaatgttaactacttgtttcacaggtttgcttaccgaattccacgtgtgcactctgatatttccctgcaagtattttcctcagcctatgaaaatcacaagtgcttgtcgtatcttattatgggtgaacgtgggtacacactttt

SEQ ID NO: 58317 - DNA, 385 bp, Glycine max
  Clone ID: PAT_MRT3847_23672C.1
atctataacatctctccatacgccggcatcatagcctggtagattcgagagtgtcttcctatctaacactgaagctcaacaatcctacttgcaaggatgcaccaggaacattttagacgtctactacgataccaaattcgccgagatagacagggttctgcatagtagagacgaagaacaccatcgaggtgagcagatgactgcactgagcgacattgtccttttctcgactgaacagattcggacactgcgcacacgtgtcacacctaccacaaggagcaccatctcttctgcagatggacctctctactgtgagagccgctacccgatctacgtccacatgcttgcgcacgtctgtgagatcacaccagcagacaaacctcac

SEQ ID NO: 58318 - DNA, 1045 bp, Glycine max
  unsure (1)..(1045): unsure at all n locations
  Clone ID: PAT_MRT3847_23673C.1
cggcattcggctcgagggaagacaaagtttacctaagagccaactttatcactatattgtatgtattacgaagatatggcgggaaacgtggggtggggtgtgatagaagaggagggatggaggaagggaccttggacttctgaggaggacagattgctcattctgtatgtcaagttcccatggtgagggcagatggaactctgctgctaggcttgcaggactgaaaagaaatggcaagagctgcaaattgagatgggtgaattacctgaggccacacctcaagaagggtcaaattacaaattcggctcgaggcataattcaagagctgcatgctaggtggggaaacaggtggtcaacaattgcaagaagcttgccaggaagaactgacaatgagataaagaattattggaggactcacttcaagaaaaagatgaaaactccatctgatgctgctgagaaggcgagaatccactcctcgaggagacagcattttcagcagcaacaacagcagttgaagcagcagcagcaacaattccaattcaacttggacatgaaagggatcataaacttgcttgaggaaaatgaccatagagtgccttctatatctcaagaggcacaagaaatggccagcatgtacccaaacacttcagaacaccagggctacttctactcaatattcaatgtcaatgacaatgacaataatgtctctgcacctgagtcctcaaatgaagaaattctatgggatggactgtggaacttggacgatgttctttgcaatttcaatgcagctagtgccacaagcaaagccagtttacacaatttagtttctcctttctgttaaaaggttttatttagccttgaaaacagttaggaagaatagtagtgtactaatgtcagtcacggcttgataaggctccaaaatcctgcagcttagagttaggattaattgtttcttaaaagtgtggagtctgggtagtaagtaatttctgaaggcgagttattgtgtaaccctttaataaagtatctcaattttgcttataanana

SEQ ID NO: 58319 - DNA, 258 bp, Glycine max
  Clone ID: PAT_MRT3847_23674C.1
gccggtgccccgaaggctccagaccatgaacatggacattctgaagtgctcttggaggatgtggaacatctgaaggtcaagcaggaaccaacagacatacagcttcagcctatggtgacacagctcagatatgaatctttttgcctccaccaatttcaagaacaagatggtgaaagtatacctgagaaccaggagttggcatcaaagcaagaaatcttaaaagaaatggaacatttgggggatagcagactccaaaga

SEQ ID NO: 58320 - DNA, 184 bp, Glycine max
  unsure (1)..(184): unsure at all n locations
  Clone ID: PAT_MRT3847_23675C.1
agtaattactttaataaaattggtgatgccagcaaccaaaattttggtgttgactgcgatgagcagnnngccattaggcctcattgnggttgattgacaagcatggccgggcttacccttgcaaaggaaaggaacacgaaaaaaacctaatcttatananccctnnaaaaccctnttcccctcc

SEQ ID NO: 58321 - DNA, 304 bp, Glycine max
  Clone ID: PAT_MRT3847_23676C.1
cacacccttcatttcctttgctccctctcattgtgctatatttccattacacaattactagtcctctttctttgttggtgacacacccttttgcttattaaacacatatcataacaaggtataccaaaatgtgcggctctaagaccaaagtgacgattggcttagaagtcatcgctgctggctgctactacaacaactgataagccttcagtggctagaatcaatggaaggccagtcctccaaccaacttgtaaccgtgttccaaaccttgagaggcggaattcaatcaagaaagtggcaccag

SEQ ID NO: 58322 - DNA, 292 bp, Glycine max
  Clone ID: PAT_MRT3847_23677C.1
aggagagaaacattacgtgaagataagaaataggacaacggttcaaaatgtgctaaaatgtggaagaaaaaaatagaagccttgctatgcttaatgactttttggcggttagggtggagggtgtaacggtactggtaaatcgtatgcattcataagtgcagatcgcgaaggccccacattaaatctggctctctctgacggttcaagctatacttatattaaatctgtgtttgaccctatcatagctccatgtgctcaacgattcaaatcactcatcattcttgttactgct

SEQ ID NO: 58323 - DNA, 561 bp, Glycine max
  Clone ID: PAT_MRT3847_23678C.1
tcgaattccactcctcttctcgaaatcatgtctacgactttggtgagctccgcgggtgggatgctttacagagtgtggtgggggaacaaaaagttttatttttgttgatagagggttttactcggttgaaacgtttctgcttctgctcgcccttaagattgcaggtaattagaggaaatagtgtggtcattattgagatgatgttgtcgagaatggaggctgggaagaagggtggtggagtgaatgacaatgagaaaaatgacatatattggtttcctgtgatcatttgaaggaatgtgtagtcgtgaatcaattgtgtttttgtttgctggaaagtggtcactctgagttttagatgctattgtccttgctgcgaagctattttatctggtcgtgattgtatttcaagaactcaaggtcaccttccccatgcttgaaagtaagaataaggaaatgtaagttgtttcacttgcttattgccattggttccaaataatatttctttgttaagatacaggctgaggatcttgcccgtctgcaatttcagaaaactcctatcta

SEQ ID NO: 58324 - DNA, 354 bp, Glycine max
  Clone ID: PAT_MRT3847_23679C.1
gattgaacttgtgtcttcagtggtgatcctacctatcatagcaggggtgtcacttgtgcacctagtactatttaataccaaaaaattgttaactctaaatgctacttctgattatttccaagtgtttgaccattaggcaaaaggaagagtaaaaaaaaacagatggtggggttgacttcccttggtctggggttgtgtttttgggcgtgtatagtgtattttgtatgtccgataatatatcaacttttagtttaattgggaagaggaaggatcttagaccatgttttctggctcaggaagaaagaaacaagagccgaaagacttgtccgcttgatgacaggagatcaaaagaac

SEQ ID NO: 58325 - DNA, 1760 bp, Glycine max
  Clone ID: PAT_MRT3847_2367C.1
ctcgagccgctcgagccgctcgagcggctcgagacggctgcgagagacgacagaaggggataggatagagatcaccaacaaaatatttgctttttgttttatttcattgcaaccatgtttggctatgcagcagcaataattgcagcaatcctcttcttccaatacttcttccataggagacgatgttgcaaacaccccattttgacagaataccctatcattggcatgctaccacaattactcttcaatttatggcgtgcccatgattattcaactcaggtgttgcaacgacatggtggcactggtgagttcattggaccttggtttaccaacatggactatttggtcacttgcgaccccatcaacgtccaccacatgctgagcaagaatttccacaactacgtcaagggacccgagtttcgtcacatttttcaggccttcggagacgggattttcgccgctgattctgaagcatggaagtacagcagggatctcttccattctctcttcaaacagaaaagcttcgaggtttttgtagcgaaaaccattcacaacaaggtgcataatggtcttcttccaatattggatcatgtacagcaacaaggaagagtggtggatcttcaagatgtcttcaatcgcttcaccttcgataacatatgttctatagttcttggaaatgaccctaattgtctttccattgatttttctgaagttgccattgagaaggcttttaatgaagtagaagagtccatattctacagacatgtactgcctaggtgtgtttggaagatccagagatggcttcaaattggtcaagagaagaagatgacagaagcatgtaaaacccttgatcaattcatacatgcatgcatagcatctaagagagagaagctaagcaagtacaaaaaatgaaatgggtgaagctcatcatgttgactttttaacagctttgatgagagaagaaacagcacatgacgataaatttctaagggatgctgtgttcaatctatttgtggctggaagagataccataacttcagctctcacgtggttcttttggcttgttgccacaaacccctcagttgaagccaagattcttgaagagatgaaagaaaaacttgggaccaaagaaaagacgctgggggttttaagcgtggaggaagtgaaaaggctggtttatctgcatggtgctatatgtgaagcattgaggctatttcctcctatacctttcgagaccaagcaagcaattaaagctgatatgcttcctagtggtcatcgtgttaattccggtacaaagatattatttattttgtatgcaatgggaagatctgaagaaacatggggaaaagattgtttggagttcaaaccagagaggtggatctcagagaaaggaggtattatttatgtaccatcttacaaattcattgcttttaatgcaggacctaggacttgcttagggaaagaaatatccttcattcaaatgaagatggtggcagctgctattttgcacaagtatcgtgttcgagtggtggatcatgttgctaccccaagcccttcaattgttcttcttatgaaggatggtttaaaggtacagatagcaaaaagagaaatttaatttgacgtgagaattcggatctcaaaattattacaaaaatgtgtagaagccaatgtgcgtgtctcgtatgcatgtattagataatctaacgatgtataaatgcatttggcttgagaaaataaataggaaataatccattttcttt

SEQ ID NO: 58326 - DNA, 268 bp, Glycine max
  Clone ID: PAT_MRT3847_23680C.1
gggaacacaatcataacaaattaattttattaccaaacgacaacagcattgggtgtttatttaaaattaagcgcccaaccataaagcacttggatgtttatagaatcctacacattttcacagacaacaaacacaggccaacaaccacaaatacatagttgggcgactataatccaaatacattaaacacaagagaaacttgtgcatacaccggtttttttaacaccgcattaatcatcaaaggtgcaatggggggcattctcccccc

SEQ ID NO: 58327 - DNA, 279 bp, Glycine max
  Clone ID: PAT_MRT3847_23681C.1
gtttacattgattgttgatggtgtatcatcacctaaagggaacgagagatggcgtgagttttttcaatccaaaaggggccttgggaagaacacacagggaggatccatgccattgggagagctatcgcaacaaactgtgacggacggcgcacctatagcgagtgctgcttcagaatgacctactgtgagcacatgaacgatctaaaagagaaacaccagcggatgtgcgacaagtccatgattaagaggagacttgtgtacgtaaacgaagagatgggg

SEQ ID NO: 58328 - DNA, 242 bp, Glycine max
  Clone ID: PAT_MRT3847_23682C.1
tactgctgcgagaaggacgacagaaggggaaggaggatggtgatacacagaagctgcaaacacctgcgagagcaaacggccacatacaggactacccggaccacgtgctagaggactcacaagcggggaagcatcacgggcttggagccaaacctctagagccggaccaggaactgaaaccaacagagatgtactccctagaacagctacccacgaatcaacccgaagaggaaaaaactgca

SEQ ID NO: 58329 - DNA, 406 bp, Glycine max
  Clone ID: PAT_MRT3847_23683C.1
gcataggttgcgttatatattgtactaattagcacaacaccatgaggatgaagattgttgtgatgctattgctacctttgatgtttgcactgttttcatgcacgagttctgcaaatacaactacatgccccatggacttgaattatgtgctgagaatcccatggaacacttctgcttgccacaacttccaacaaactttggcggctaaaaatggaaccgatgcaaacacttgttgcatatctctcttgtccctcttcggcataggacttgcacagcatctcaaggagacttctaaagtccaactcaaacttgcactgcttctcatcaaattcaataagttttctttttccacaactgtaactgttgacattagtggactccacattggtgaataacatctgtgaca

SEQ ID NO: 58330 - DNA, 321 bp, Glycine max
  Clone ID: PAT_MRT3847_23684C.1
ccaaaaagaaactggggttttatatccccttttaccaagggggtccccaggaggggggttttataacccaccccaaggaagggttacatgtttgaaagcctaaaaaaacggggttttcctccaaaccaaattttttttccaatacctttgttaaaccctccatgaacattggggtttcctacaaaaaccccaaagggccggaaattggaaaaaaacccaaattggggggggggaaagggaagccctttttaggcccttggtgttaaaaaaagatgggaaattttgccccccgatttagggctggataaaaaggggtccccc

SEQ ID NO: 58331 - DNA, 408 bp, Glycine max
  Clone ID: PAT_MRT3847_23685C.1
gacaaaaaataaaaaatccaggcaaaaaaattgaggggtgcatacaattttctgaaatgaacaattttagacgctgtctcaaaaagacgaaagcactattcagaagcggccaaacattacaacgttcccctgagcgaaaaaaaaaggactaacaaaatgtgcacgcacaggccactcttaaatttgcaaagatgcaagctcagcgttcataactttaaggtgtccaaactacaattcggtaggctaaacctagttcagttaatgacaagagctcttaaaatgaataaggtactatcttaactgaacactcccagaagcgacacgttaaaaacacctaaaggcccaactacgagctaattaacttgcacaaaggaaacaaacggatggtgtactctaattactgcacca

SEQ ID NO: 58332 - DNA, 448 bp, Glycine max
  Clone ID: PAT_MRT3847_23686C.1
caggttattatttgtacatattttccatgggttcaacccatgttcttgaaactatgtaaacactatattcgttggaaattaaaggtgcatgagctcaagccaaattcgcccaatatgtaacgagctcctgggggaactaattcaaaaacgaaatgaacaggattaaaccaaacccaaaaccagtttacccatcatgttttcaccgtgctacctgcttttgaagcatgtgaaaacaaaatccccgttaaaaagagaaaggccctttaaaacctacaaattatctcccccccgagggggaaaaatgaggggggtggcccttggggcctacccggaaattccaaagggtttaccccccagaaaaccttgtatacaagcatttaccccttctgtggcccccaaactaaaatcgggcacctcacccactcagtttgggggaccaattaaccct

SEQ ID NO: 58333 - DNA, 418 bp, Glycine max
  Clone ID: PAT_MRT3847_23687C.1
cagtacaagcataaggcatgtgctgccctgctggatccgtcgtcagcagcaccgcttgtttggccatccccattaaagttcatcagtgagctcaatcaggaagcaaaagccttactggaaaaggccttactagaagctaacagggagggggagaagaccatactaaaggagactgacatgcctccatccccactgcattcagagagtgaagatgataacattgcctctgaggtacaaaattttcctttcttgactgcttcagagtttagatttataagttttactttgatgcatttcaatgtttagtttggttaaagattatatactttggtagaagtcccaagaatgttctttgggacccatgaatgttatacaatactatttcatctgcaatgtagtctttggtaggttagtcact

SEQ ID NO: 58334 - DNA, 274 bp, Glycine max
  unsure (1)..(274): unsure at all n locations
  Clone ID: PAT_MRT3847_23688C.1
tctatgaaaatatgccttaccacagcatcctcgcaaacaaacacttaacgtgagatgcacagtggccccgtatactacacaacataacctcncccatcctatgtaaaccacaatctatatttacaccaggtgaaggaactactgaacggagtacaggggcttaggcaggttaaacgtactacttctnatctcagggcctacgaggagatcgatccattggactccaatgatcccaacacttataaattccttgcctaacagtgaacatataaat

SEQ ID NO: 58335 - DNA, 505 bp, Glycine max
  Clone ID: PAT_MRT3847_23689C.1
gaataatatggaatcatggatgtggtgtttccttctctgttcccatttgctcatcctttatttttcaccctctcattccttatgccacccccatgacacctctgccttgctccacttcaaaaactcctccattattgatgaagatccttattattattcaaagacgagaacatgggaaaatgggacagattgttgctcttgggctggagtcacctgccaccccatctctggtcacgtcactgagctcgacctcagctgcagtggcattgtcggttatatcgatccaaacagtacgcttttccatctttctcatcttcactcactcaaccttgctttcaattattttgatgaatctccattgtcatctctctttggtgggtttgtgagtctcacgcatctcaacttgtctaattctgaatttgaaggggatattccttcccaaatctctcgctaaacaaggaaactaaattctaacctccttcagatctacaccacccttctcttt

SEQ ID NO: 58336 - DNA, 254 bp, Glycine max
  Clone ID: PAT_MRT3847_2368C.1
agggagtttcgcctcctttctcaaactaaaacccaatcaatctccacaactcaacgaagaggtgttagagacagcaacactttgttgtctgccttgatcgagcacagcttcttcttggggctcgattttgcgctaaagtactctcactcacaacagacaccgtcgtcgtcgtcgtcgtcatcaatggcaccgaagcagaacaaggctgagaagaagatcacttactatgcgaagctgtgcgacctaatggagga

SEQ ID NO: 58337 - DNA, 246 bp, Glycine max
  Clone ID: PAT_MRT3847_23690C.1
gactccacatcagtgggtgggagatccaaaaaaagacagtggaaaagatggcgcggttgatcacagtggtgtagtgctcggaggctgtgctattatgcacagctggctgatcctcatgggtggaggaagcggctatcccgactcgagtggggtctgacttgtaggcggaggtgcttcttgtgatacgggagtgcctaccggctgctcaacatgttaggttcatgatcacgttcacgaaaatttacc

SEQ ID NO: 58338 - DNA, 513 bp, Glycine max
  Clone ID: PAT_MRT3847_23691C.1
ccacgcgtccgcggtcgcgtgggcggacgcgtgggcccacgcgtgcgggagagtacgtggaggagcagccatggcttcatcggtggccgccgcggcgagcacattcctgggcacccgcctggcggacccggcgccacagaacgggcgcatcgtggcccggttcgggttcgggttgggcggcaaggcgaagcctgctccgaagaaggtggcgaagacatcgacctcctctgaccggccgctgtggttccccggcgccgtggcgcccgactacctggacggctcgctggtcggcgactacgggttcgacccgttcggtctcgggaagcccgtggagtacctgcagttcgagttggactcgctggaccagaacctggccaagaatgaggccggcggcatcatcggcacccggttcgagtcctccgaagtcaagtccaccccgttgcagccctacagcgaggtgttcggcctccagcggttccgcgagtgcgagctcatccacggccgctgggccat

SEQ ID NO: 58339 - DNA, 536 bp, Glycine max
  unsure (1)..(536): unsure at all n locations
  Clone ID: PAT_MRT3847_23692C.1
ggaagatattgcagtagctaacaattataaatataaattattcagtcaaaagaaattcaaccataagcaatagccaatatagaatcattcaacaaaataattaaactaaggaaccaccaaaattattcaagctatctctcctgtccaaatgttaaatgccacggttctgaaaccacttacataatataagcaaatgcaggtagcttaatttcgatatggcaaaaccaaactttgaacataatcatgagagacaaatgcagagaaagacgataatccattgttgaaaccttccatgcggtctatactattatctctcttatcaaccagaacaaattctgcaccacctccatagtcttccagcaacaggacgtcgtcattttcagacttgcacaaaggtaccactggacaaggtggaaaatctagaacttgaagatgatgatagcttacattcagcaactgagtccaagactnttcagctccaaactctctcattagccaaacaacaagattggttcgcctgtgatcatgagaaagac

SEQ ID NO: 58340 - DNA, 788 bp, Glycine max
  Clone ID: PAT_MRT3847_23693C.1
ctttttttctttttttttttcttcttatttttatccatccaaataacacattttttctattatctttctcttttaattctgtccttctttatttcactcttagaacatccaacccaacaactctttttaggtactttataatgggtccatttcttttttattcttttcaatttaatcactttataaacattcaatctctccaatccaacacctctctctaagtgcttaaatagacccccaaaaagcttaaatccttacatttattaataaaatatatttttaaaagaaataagctttggtacttaaataagtaactattgttttttctgtttccagccatacacgtgactgcaatgggagtgttagataagcaccaatacttgttaagcattgtgccaatttagaaacacaatgcagttgcccttagtgtctgttttgaaaaaaaattcaatatatttttattatataggagtttatgttataaccgaaagcaaagcgtaaacgaaatgaaaaacctatgaattttataataaactaggtgtgggctcgtgctgttgcacgaattttaagaaaatcaaaattaaaaattttgttaagaaaaaagtggaaaaaaataatttttattgtcgagcacccaacagtccacacatgacaaggtgctggacaatttttataagtatatagattaaaatattttgaaaaaacttgggattcatctgatctagcttttttgttgcctctttcttggggcattcttgggggggcaattataaagtttaataattgtt

SEQ ID NO: 58341 - DNA, 3103 bp, Glycine max
  Clone ID: PAT_MRT3847_23694C.1
catgaaaaagacatgtacccattttcattacattacccaggaaagatagttacataagaagaagaaaaaaatttagtaaactttttttaaaaatttaaccattaaaaacatcaagcgctacatataaattgcgactcttaggcgtcaacactttacatcctccttgctacttgattgttgcatgatgtcttgtataagcaaagtcatgtcaagatgggaagacccccctttttcaaccgctttctttgccatctcacagagtttggttgccctttctcttctctctttgctttcttcttcatcattgtccatcaccatgcatattgccctctcaatgttcttcttcttcaccaacacaccagttttctcttcctctccccaattcattggaacttctgccccaacactcacaccaatcttcaacacttgagtaacgagcttttcatttaaaaattgatcagcaaatagaggccaggtaaccattggcactccaacacttatcccttcaagtgttgaattccaaccacaatgtgttaagaatcctccaatggcagggtgcgataatattagtacctgtggagcccaacctcgaattataaggcctctccctttggtcctttcctcaaacccttcttcactgatccatttttccaactcttggtacttacttccctccctaatgacccatacaaatggttttttactatcttctatggccaaggccagctccacaagttgtgaaggaatcaaattgcacaggcttccaaaacaaacataaaccacagacttgggttgctgcaaatctaaccacttcaagcaatgatgctcattaattgaggcccggttgcctctttgagccttatccaagccatctttgttacataatgaaacaggaccaatgcaccacaccttatcgtttctcaccttcttgtattccctcacatatgccttctccaactcttcaaaagtatttatgattaccccatatgactttatgtcagcatcaatcacctgctctccaaagtccttcaattcattagagagttcctgcaggtagctgcctcgttggtaacttgaattttgtcaggtatgccaggaatagtgaagtactcggattctgaagtgatgctttcacaaacctttgatgtgtgtatctggtacaggcaatggaggcagaagcaagaaaaaccgtggaatgaaatccttggaatatgatgcttttcagctacttgagcagtccaaggaatgcaaaagtccgagattatgcaacttggtttgggtgttagtgcttcaaagaactcctctgctggcttatggagcagcttgatggcgtggaatattttgtacaaatcgtttgaagctaccatgtccaaattctcacacccttcaggtagtcctgcttctttggagatctttcctcatagattcctctcctatatggacctaccatctctcttaacgaacacacacagagagcaaaatagtaaaaatgtcaaaggacaaagtttccggtgatccaagacgtgcagtgtgcacaggtatcaccatcttcctcctcttagccggcgtcactctcctcgtcctctggctggtctaccgtccccacaagccgcgcttcacggtcatcggcgccgccatctacggcctcaacaccagcacgccgccgctcatgtcaaccaccatgcagttctccgtcctcatcaagaacccgaacaggcgtgtctccatttactacgacaggttctccgcctttgtctcgtacaagaacctcgctatcaggcggcaggttctttttccaccactgtctaggtgacgacctcggtatcttttcgaacgcgtggaaacacgaggagaccttctgtaagccccacaacgtggaggcttcggacaagcttgttcctttgtttgttgcaggctcaaaaccgggcacagagcaggtggtctcgtgtcgtcagatggaaaatggagttgtactagccggattgggaggcctgatgaaacatcacgagaaagaacagaattgaatcgtgatgcattttttggggtggtgaatatggaaacaatcacaccacgccgtgccaatagtcttgcaatgtccatcatggggatcatgtggccttgagccattagaggaaacaatacgaagtgaggattaatgtttgtttggaaaaccatggctactacaagaggcaaatgaaatgtgtagtactacgtagtatacgtagtatctcactatgctgcttttctcgagtggcaacaactcgatttggtgcccttggattttgtgtttgttttaacatgtttctttttcctattcatagtttttccaagtcgccagtgctcaaaggttgtaggcctgctattatttattctaagtaaccagccacatgtatgcatcactgtgctttgaagatttgatatcttcggtactagaggctggccaggtggtgagattaggtgccacagacagcagcaaggactgaagaaacatgctgacgaaattggcggaaggcagaagcgagataatctgggccgcaaacaatatggtgtgacagaaatatatttgtcaggaattttcgccggatatttcagcccagtccgcgctcttcccaaggccccgccatcggggccgaggtgcaaaattggcagtgtcgtctcgcctagtcacaaaacgttggctttcggactcctgtggactgctttgggctctacgttaagtgcgatgttttgatgggtttgaagaaagggttggtgggtcaagttcctctcctcggagttacaccctgcgatgtcgatctatgattatcatttttataggaccatgaagctactacctctaccttgttttgttttgtttctgtcttcaattcagtgtaatgtaataatgtgcaatttgctgctactcttgcccttttttttattccttttctaaccagcaattatatatagccataggagtttgtattttttgttaaggggttggttttttgcaaattcagtgtgttagaaatggtaaaaagtcaaaggatttccaagttgcagtgtctaaggttatgttattaatttccaggaatcagaatggcaaaaggtcttcttctccggg

SEQ ID NO: 58342 - DNA, 352 bp, Glycine max
  Clone ID: PAT_MRT3847_23695C.1
gtttgttttttgttttttttttccctttttttccctgtaccatttattttttttttttttttttttttttttgggaaatgaggggggggcaataaatttccccaattttattttccttttttttacaatggggggaaccactcccctttaaaagcccgaattcccaataaccaatgaataaaattattaacccctctcttcctggggttccatttcccctttattaaaagagaaaggcggaaatccaaagggtttttaaaggcctaaaaatcccttttttagagggggggaaaggtggtttttttcccaaattccttcaaaggtttttccagtttttccggagccccttcct

SEQ ID NO: 58343 - DNA, 1021 bp, Glycine max
  Clone ID: PAT_MRT3847_23696C.1
gatctttcctcatagattcctctcctatgcgtacgtcccaccgctcttaacgaacacacacagagagcaaaatagtaaaaatgtcaaaggacaaagtttccggtgatccaagacgtgcagtgtgcacaggtatcaccatcttcctcctcttagccggcgtcactctcctcgtcctctggctggtctaccgtccccacaagccgcgcttcacggtcatcggcgccgccatctacggcctcaacaccagcacgccgccgctcatgtcaaccaccatgcagttctccgtcctcataaagaacccgaacaggcgtgtctccatttactacgacaggttctccgcctttgtctcgtacaggaaccaggccataacgccgcaggttctgctgccacccctgtaccaggagaagcgcagctcggtttcggtgtccccggtgatcggaggcacgccgctcccggtgtcggtggaggtttcgaacgggttggcgatggacgaggcttatggggtggtgggtctgaggctgatatttcagggcagagtgcggtggaaggctggggccatcaaaactgcgcactatgggctctacgttaagtgcgatgttttgatgggtttgaagaaagggttggtgggtcaagttcctctcctcggagttacaccctgcgatgtcgatctatgattatcatttttataggaccatgaagctactacctctaccttgttttgttttgtttctgtcttcaattcagtgtaatgtaataatgtgcaatttgctgctactcttgcccttttttttattccttttctaaccagcaattatatatagccataggagtttgtattttttgttaaggggttggttttttgcaaattcagtgtgttagaaatggtaaaaagtcaaaggatttccaagttgcagtgtttaaggttatgttattaatttgaaggaatcagaatggcaaaaggtttttttttccggaaaaaaaaaaaaaaaaaaaaaaaaaaaaaagcggccgctctagagga

SEQ ID NO: 58344 - DNA, 605 bp, Glycine max
  unsure (1)..(605): unsure at all n locations
  Clone ID: PAT_MRT3847_23697C.1
cggacgcgtgggcgtggatgtgtcgtatgtgtttgtgtgtgcttgtgtgtgtttgtgtgttttttttattcttgtttttggtaagcttttgtatttggatggtttgaattgtgattgttcaattgttgttgttacagataatgctgggacaaataaagcagcatctagcagcacttcattgaacactaagaggctggatgatgatactgagagtctagctcatgagaaggtaccaactgaacttaagaaggccataatgcaagctaggatggacaagaaacttactcagtctcagcttgctcaactgatcaatgagaagcctcaagtgatccaggagtacgagtcaggaaaggccattccaaaccagcagataattggcaagttggaaagagcccttggagctaaattgcgtggcaagaaataaggaacttaatgtcatgttgcgcgtttattttgctatgcatgtcactatgggagtgttttgtgtttgttagctaattgtgtatatttaagacagttaaaatggttgtgttgacatgtgcctttctcctgttcggataaataaagttgcattttcagtatannnannannnnnnnaannnnan

SEQ ID NO: 58345 - DNA, 1688 bp, Glycine max
  Clone ID: PAT_MRT3847_23698C.1
atttctcatttccaccatcatactattttcttgtcgttgagaagcttcgcgaacgaaagcaaagaaccctagaccgtcacagaaccattccatagccatgtctggtgttggccctctttctcaggattgggaacctgtcgtcctccgcaagaaggctcccaccgccgccgccaagaaggacgagaaagccgtcaacgccgcccgccgctctggcgccgaaatcgaaaccctaaaaaagtgttcgttccctaaaccctcattcaaaaaaatagtaatagtaaatcttcgaatagttgttcgtcgcgtgttgattgtcttacaattataagtttcttctaacgaattggtctgtttattgtctattttatttgaaatctctgatcttaacgtgttctgttgtgattattgtagctggctttgatgatttggtgttaagttgttaggaaaaaaaattgatattgatgaatatttagtttggaaaaaggctttgggaaaagttaataaaattgtttcttatagaatggttatggatgtgtcttatgtgtttgtgtttttttaatcgtttttattcttcttttgttgataagcttttttatttggatggtttgaactgtgattgttcaattgttcggccgctcgaggcggcagcactgagttctgcgacgcagatccgtcattctcatcttccatttcccacacaaatacagaaatatcattttccgagacaatcccatcttccatttccatcttcaatatttcttctcatcgagaagcttcgcgaacgaaaacaaagaaccctagacagatccattccatagccatgtcaggtgttggccctctatctcaggattgggaacccgtcgtcctccgcaagaaggctcccaccgccgccgccaagaaggacgagaaagccgtcaacgccgcccggcgctccggcgcggaaattgaaaccctaaaaaagtataatgctgggacaaataaagcagcatctagcagcacttcattgaacactaagaggctggatgatgatactgagaatctagctcatgagaaggtaccaactgaacttaagaaggctataatgcaagctaggatggacaagaaactcactcaggctcagcttgctcaactgatcaatgagaagcctcaagtgatccaggagtacgagtcagggaaggccattccaaaccagcagataattgggaagttggaaagggctcttggagcaaaattgcgtggcaagaaataaattaaactaatgctatggttttgcatgtagcttggtttacatatcactaactcactatgggagtgttatgtgtttgctcgctaattgtgtaatatgtaagacaattaaatggttgtgaggacctgtggctttcacctgtcacctgttcgactaaataaagttgcaattagtataaaaaaaaaaaaaaaaaacaaaaaaaaaaaaaaaaaaaaaaaaaaaaaaaaaaaaaaaaaaaaaaaaaaaaaaaatgctcctaaaaaaagggggggaaaaaaaaaaaaattttacccccctttttaacaaaaaaaaattgtcttcttttttgcagcatccaaatttacgtgcgcgggcttactacaccgtttttctggtaagaatcccccgaaaaacactaaatggccggcgccttacaaccttttttttgggagaatttttgaag

SEQ ID NO: 58346 - DNA, 411 bp, Glycine max
  Clone ID: PAT_MRT3847_23699C.1
tttctctatcagacttccaacttttgcccttcattcagcttgttctttttctcaaaaattaagtgaaacatccaaatgtctccacaaacgccaactatcccacttttcattgtcctcgcttcattagtcttatgtaatggctattacttagaggaatcattttataaaacaaatgctaaacactaccctgtgcatgatgggagattgatcaagacaaaacacgagcattttggtctaataacaagggctaatagagctagccatcttacttctaggcctcgtggaacagttagtgttgatgactttggagccaaagcagatggaagtgatgacagcgaggcatttgggaaggcatggaatgaagcatgttctagaggggctattctttgggtacccgaaaataggatctat

SEQ ID NO: 58347 - DNA, 167 bp, Glycine max
  Clone ID: PAT_MRT3847_2369C.1
gtgccttgatcggcattactcgtgcatcggcgacgggtgcgacatcgcttagattgttcacggctctattgatgccaacgacccgaactcctgcgatccagctgagatctctgccgtgtgaccccggctgtatgctgtgaactgatcaggacatactcataattggt

SEQ ID NO: 58348 - DNA, 176 bp, Glycine max
  Clone ID: PAT_MRT3847_236C.1
cccacgcgttcgtacacgcgtttgtccacgctttcgtccacgcttgcgcaccgagcttgggacggaactttttgataactagctgagtgaagacgacatctgccagccattccaactcacagagaggctattatcaattacctttccttgattgttccgtcttatactctctatag

SEQ ID NO: 58349 - DNA, 818 bp, Glycine max
  unsure (1)..(818): unsure at all n locations
  Clone ID: PAT_MRT3847_23700C.1
cgnacgcgtgggcgtgnatgtgtcgtatgtgtttgtgtgtgcttgtgtgtgtttgtgtgttttttttattcttgtttttggtaagcttttgtatttggatggtttgaattgtgattgttcaattgttgttgttacagaaaaagaccagcttcgcgaacaaaagcaaagaaccctagacagtcacagaaccattccatagaaatgtcaggtgttggccctctttctcaagattgggaacccgtcgtcctccgcaagaaggctcccactgccgccgccaagaaggatgagaaagccgtcaacgccgcccgccgctccggcgccgaaatcgaaaccctaaaaaaatataatgctgggacaaataaagcagcatctagcagcacttcattgaacactaagaggctggatgatgatactgagagtctagctcatgagaaggtaccaactgaacttaagaaggccataatgcaagctaggatggacaagaaacttactcagtctcagcttgctcaactgatcaatgagaagcctcaagtgatccaggagtacgagtcaggaaaggccattccaaaccagcagataattggcaagttggaaagagcccttggagctaaattgcgtggcaagaaataaggaacttaatgtcatgttgcgcgtttattttgctatgcatgtcactatgggagtgttttgtgtttgttagctaattgtgtatatttaagacagttaaaatggttgtgttgacatgtgcctttctcctgttcggataaataaagttgcattttcagtataaaaaaaaaaaaaaaaaaggcccctaaggt

SEQ ID NO: 58350 - DNA, 304 bp, Glycine max
  Clone ID: PAT_MRT3847_23701C.1
tcggtgacagctcgtcgtggaagacagaaggatcagttaccattggaagagagacaacagagtgggactttgtactgataagccgtttaaggtctattactgtgtgccatttttgttgaccgttaatatactgggagaggtggaagcactgaacattatcttgatactcgctttgttgacatctgctaaaactacaacattaaaccggtgcggggtatgccatgatatttttaattatatgaacacatagaggtgttataaatactagcactctgatcaggcttggtggagtggctgagaatta

SEQ ID NO: 58351 - DNA, 204 bp, Glycine max
  Clone ID: PAT_MRT3847_23702C.1
ttaacagtgaatttctcaatcaggcaaaaggatttacagataactttggtggataaaataaaacttggcgctccaaaaaggaaatggtaatggaacgtctctaatggagaaagatgggcaggaaatttaggaaataaagagatcctgacaacaactggccatttataaaagagcagggtttataataagtcattttttcttcct

SEQ ID NO: 58352 - DNA, 118 bp, Glycine max
  Clone ID: PAT_MRT3847_23703C.1
cccgcgtccgcgcagaggccgtgggggataggatttaaccatggtcatccttaaccctggttaaacatttaagtctggtcaagttctacaccttttctcatttccgcagtagcaacct

SEQ ID NO: 58353 - DNA, 195 bp, Glycine max
  unsure (1)..(195): unsure at all n locations
  Clone ID: PAT_MRT3847_23704C.1
tttttggtacaaaacgaactgcaaaaagaattcccacaaatagggatatatataaaaaggggaaaaaaatgnnaaaagaaaattccaaggaaaataatataaaaaaacatactcgcagtaacaccaacttcnctaaatgggacctttaagggggacctnnacaattnactagnnnacctaagaacccttaccctt

SEQ ID NO: 58354 - DNA, 393 bp, Glycine max
  Clone ID: PAT_MRT3847_23705C.1
tacccatgcgttcgtactgttgctatataccggcgaataatacaggccctaatcttaatcgaaggtagcccaccatattagtagagggattttaaaacagactccattcactttttgaacaaaccacaggattcttttattttaaaaaggaaaggaaagcttccaaggggaagggtttcgaaatatatccataaaacactaatcccctaaacgaaatgggaaaaaaaaaaaaaaggcgaaaacaacgccccaagaaagaacccatttccacccccccccaaagagataaaaacctacggggaaaccccttttttttaaaaaagtggccccaatttggcaccacaaaaaggtttggggggctttccgaatttgatccccccttttttttttttt

SEQ ID NO: 58355 - DNA, 654 bp, Glycine max
  Clone ID: PAT_MRT3847_23706C.1
acgaggccattcccccctaaaagcttgtttttgccttcttctttctcctcaacatagctgacaaaaacaaccacttcctctttcattgttctctccccccactttcactatacccccccttgctttactttgcatattttgcacccttttaacttctattatcactcacaattcttgttcttggtcttcttccttttctcatccttatacacttctttcttagattgttcttgtttggattatttcatggagggtcaaccagctaaaaggagacgtgtatactcacttgaaccaactaaagtggaacaagcagcgtttgcaagaaactacatgaattgtttggtgccagcattgatgaagatcaaggaaagatcaagcacttcagcagaacaacatagtgttcattcatgtgatgatgacaatattcagaatgttgtcaagtatgaagtggacatggcaatggtgcgctcagcccaagggtatgcatggagcaatgctttaagtgtgaagcttcaaaggaatagagtcaatgtagattgtgacaccactagctttggggaaggttcaccatcaagggtttgtggccaaaactatgaaatggtgccattgagtaatttctcttcaaaccctagtttgaagtctaataacaagtgc

SEQ ID NO: 58356 - DNA, 1658 bp, Glycine max
  Clone ID: PAT_MRT3847_23707C.1
gacacgtcccgtaggtgaagagggttgagttgagagttcagacttgagagagtgtcgtcgttgattccaattcatgacggaggaaagattaagaaagactcgttcattcgaaattacgaacggaggagtaagcactacacaatctccacgcccgaagccagtgacaggtctgttgcagctcatcattccgcactacaccgaaagtaatggagagagcttttgcaggaaattcttcgatcactgatcagaggtagaagatagattagtattagcaaatacttgcttcacatattttcatctaatgttccattagtagtgtctcgacagattatacagacttttgctcaagagttgggaagattggagcctgagatacaaaaagagagtgctcattactccctttcccaaattcagactcgtgtagtgtcatgaatatagcaagttatggtcattagagagaaacatgctgagttgtattaatcttagaaccggtgttcggaagcatgatgaatgattcatggtgttaaacttgattcagaagggatggttatatatggaggatgatgattgtgtcaatgctgaagatttgattattaaagtattattgtttgtaatcagatgtccgacgtgaagttctgaatttaaagtacaaggtttgctatgcaaggattttggatttgaagaggaagtttttggaagcagcattacgatattatgatatatctcaaattgagaaaaggcaaataggagacgaggagattaatgaggaagcacttgaacaagctttatctgctgctgttacatgcacaatattggcagctgcaggacctcaacgttcccgtgttcttgccactttgtacaaggatgagcggtgttcaaagttgaagatctatccaatactgcagaaggtgtatttggagagaattctcagaaaaccagaaattgatgcttttgcagaagaattgaaaccacatcagcaagctcttcttccagacaatttcactgtgctggaccgcgctatgattgagcacaatcttttgagtgctagcaaactctatactaatatcagctttgatgagctaggcacgctgttggggatcccacctcacaaggccgagaagatagcatcaagaatgatttatgaggataggatgaggggctctattgatcaggttgaggctgtgatacattttgacgatgacactgaagagttgcagcgatgggaccagcagattgtgggcttatgtcaagccctcaacgatgttttggatagcatggccaagaagggttttccggttcctgtttaacgtggatggttgacaatttctttgtttatacattcttagtaaagcatcttttttttcttttgttgattttttgtgaacttcattatacaaacgaaaccattaatttcctcatatatttggtccaaatttggtttaccccaagggcttgtttaattactgcttctgcttaacgagtttctgaagcacatctttgttgtgctttcatatactagattccaaatttaattaataacaagggcaaaaataattactgcttctgcttaacgagattctgaaacacattttggttgtgccttttggttctccacaggtatttacattctcgaaaattttattcgggaaaaaaaaaaa

SEQ ID NO: 58357 - DNA, 459 bp, Glycine max
  Clone ID: PAT_MRT3847_23708C.1
attaagctcaaattctcctctaaaccttctttatatgcttcagtgaatgacccagtggtggagcagaatcttctgtactagtattggctcctaaatttttccataccccttggagctagcccgattgcctcagagcctttcattatccttagtttcttacatgactcagtgaacattttccaagggacatcacccacaagcatccagtctccttccttatcttcatatgtaagaacatattcagagccatcaacaagatccctgaatgcactctcacttaatccatctttcccaggaagtgcacgagaattgcattgaccaatggtaaagcagctgaacattttctcaagagctgaagaaagttcaatatagttgctgtaggttttcagatcaacctttctgagatatggagcaccatccatgctgaccttaacgtaaagacaacctactcctgatttc

SEQ ID NO: 58358 - DNA, 464 bp, Glycine max
  Clone ID: PAT_MRT3847_23709C.1
gaaaaggcaaggttgttattgcagatgacattgtcagccctgccttttggctttatgtaatttaaaatagaaagggggaaggaggacaagacagaagctcaactttagaaaccatggacatcacccccctctttgagaggagctgcttgtgagccaggctacagtcttcctgtggcctctcacagtaaccctgcccctttcttacctcacaggggcaagagggactctaaagagggcgtaagcaatagatgcacctgcagccctccttgctcagcaggaaatcaatgtggagccccagagggacattttatctcagagagagcatgctggccacaggacccagtgcagccctgcttcctgcaccgtgggtctttcctgatagctgcaagcttgagattgcagcctcaggataggacacgttcagatgccttccagactacacacactatgcttagattcgagag

SEQ ID NO: 58359 - DNA, 680 bp, Glycine max
  Clone ID: PAT_MRT3847_2370C.1
gaagtagggagttgccatagtatttatgaggggaacgaaatcaaatactgaatacacatcaaaaattaaaaagccgtggcgggcgaacaccgattaatccatggaaatcgaacaagcatgccacgtgacatatactgtgactatatatgaaacaccatcatagcagcgttaattaatgtaaaacgaatcaccaaccaaccaacctgtagtagccacccagcatcagggagaagaggaacgtgaatttgtgtgcttagacaaagttgcagccagagcagcgcaaacaagaggttttggagtaggaattctaagacaattgagactaccaccagggattatagagcactccggttggggtctttgcatatcccttccaggaatacaattatccgagaaatcaaaccccacactgaatagccttgaacattcctggctcagcccagagaagaagttgtaagcaacagttagatttaataggcttctcaaagagcataccacatcggataactccccagaaagcttgttatgtgccaaattaagaacctctatgtcttgcaagcaactcatagtgtcaggcaaatggcccatgagtgagttgaagctcacatcaaaaacttgcatttcagtgaagatccctactccttgtggaatgcaacctgttaactggttgttaaggaaga

SEQ ID NO: 58360 - DNA, 917 bp, Glycine max
  Clone ID: PAT_MRT3847_23710C.1
cccggctctatttctgctcttgggggaaggaatcagaatgagtggcaccaacttagtcttaaacttcagctgaatctcagttgctgaggcttaggactaattgtgattgattggtgtgaaaaggaggaaaggaaagagtgactttttttttaatattttggatcctaaattttagaagctgcatttgatctttgtatttcggagctatcaagatgggagggcaatccagcaagatgtttagtgttgaatccccaacaccaattaaaatgggtactcattctctgtatgctgctgacttgagctcctatgaagctgcatgtgttaaagatccaaacttgcaatcctttgatgtgagcattcaggagcataccaatagggtgattagttccctagctcatggggttgaggttagatccttatcttttgattcactgagagaaatgactgatagtcttcttgagatgaaccaggaagtagtcaaagttattttggattgcaagaaagatatatggggcaactcagaattgttctccttggtgaatgattactttgataatagcctccacacattggagttctgtaactcacttgagaaatgcttgaggagggcacgcgaaaaccagatgatagtcaagtcagtggttacctactttgaggaagaggggcaaaatggggctgacggggtgacttatgtgaagacattgcaagagcttaagaagtttaaggatgccggggacccctttactgaagagttttatttgttgtttcaatcggtttacacgcaacaggcatcaatgttgcagaaattgcaaatcaggaagagaaagctcgataagaaattgaaatccctcaagacatggaggagggtgtcaaatgtcatttttgtggctgcttttgattctgtgttgattttctca

SEQ ID NO: 58361 - DNA, 134 bp, Glycine max
  Clone ID: PAT_MRT3847_23711C.1
tacggctgtgagaggacgacggagagggccctaagatccattctgtattaaaccacacctggctccctcgtgcattaagacgacaaccctgggttaggtttgtatcctcactctgtttcctctctctagctctg

SEQ ID NO: 58362 - DNA, 212 bp, Glycine max
  Clone ID: PAT_MRT3847_23712C.1
tgactattcagtttttgcaacaacaatggaacgctcaaattgtcaaagtctgatgtatttagaggaggaggggatggaacggaatctggttaatcagccgcacagaacaagatatattacgaatacaaatctgaatgcacgcacgccacaaaaaaaaaaacaaacaaaacaacccaccctccccatctaaccacaaaaaatcaccacacaat

SEQ ID NO: 58363 - DNA, 288 bp, Glycine max
  Clone ID: PAT_MRT3847_23713C.1
gccttgcgtgctattgttgacgctctcgagatattggatacgtgatgccccgataagcccagttgaaagacttaatgtggctacgactatattcatgtacattgttttcaagacaaaatctcaccaaatggctcatgctttgaaggtggttccagctgacaagcacaagtagtagccggcacatgtatatcctacatgttttcaataggaaaagcaaggagattgagactgcaatttacaataggcgcgatcagaaacgactgtgtacagtatatacgaagcaaccca

SEQ ID NO: 58364 - DNA, 128 bp, Glycine max
  unsure (1)..(128): unsure at all n locations
  Clone ID: PAT_MRT3847_23714C.1
gtcgctgccgcgtcgtagctcgnnnatcgctcgagtgcacgcattcgtgatatagcgtggcggtttaggccgaacgaagggaacgctgctgcgttttataaggatcataggagatctctgattgcccg

SEQ ID NO: 58365 - DNA, 250 bp, Glycine max
  unsure (1)..(250): unsure at all n locations
  Clone ID: PAT_MRT3847_23715C.1
accacttttacgttttttcaaaagcaagccatggcctgcttagtgtgcgggtttttcacataggaatggacatgtttatataacacgcttgggggttacactctaccaccctatctcttgctcaagattaagnaaacccgatgaagaccttctgcaacgcaggtgccttaactggtaccaaactacaaaagaggaacacacccactgtgcagctttgcccacggcgccatcgcatgaacatggtaatatt

SEQ ID NO: 58366 - DNA, 634 bp, Glycine max
  Clone ID: PAT_MRT3847_23716C.1
ctgatcaagagtggataggagtgaaacccaccctagatgcttatattatcaacgttggtgatattattcaggtttggagcaatgatgcatatgaaagtgtggaacacagagtggtggtcaactctgagaaagaaaggttttccattccattcttcttctatcctgcgcatgaaactgaggtcaagcctttggaggagctaataaatgagcaaaatccttcaaaatataggccatacaaatggggcaagtttattacccatagaaagaataccaatttcaagaatcaaaatgtggagaacattcaaatttatcattataagcttgcttaaaagatagtatagtggcagtaaaattttgcttatgtatattgggtataatgtgttgatgcagattgatccaagacactgcttctgatatgcacagcaattgtatttgctgctaaatttacttggaattgcattagtttttaaatttcctattttaacattttttgttccttgtgtatctttttgttaattagattcttgtggattgtgaagtgtaaactgtttcttcattattaagtagccttcttcatcatcatttgtttaatgaacaagttttacattactctatttatgaggttgatgtaaaa

SEQ ID NO: 58367 - DNA, 1541 bp, Glycine max
  unsure (1)..(1541): unsure at all n locations
  Clone ID: PAT_MRT3847_23717C.1
attttacaaaatcaatgatgtgccctgatatatggtgtggcaagctatacaccgaatttgatttatgagccacttttttcttgtcaaattcgaatagcatacacaattacacaggaagttgcccattcttttccccacgcgtccgatcatggccgacaataattctactactgatcattatgatatgggcatggaagatgctgaactgtctttggctgaggttaaagaaacttgaaaggcttctgagagaacaccgccttcaaggcaactcatacacgctaattgttggggactttcccaagttcggcaagatgcgaaatgaagccttatccanacccatgaatctcttctctcatgacatagtaaagcgagctgttatcctttatacccatcactgtctacaagcatgccgttggtacttttatctaagcatgagctctgttcccaatatctgaaaaattaatgagatatgcattttttttatcgctcatacctgacaatccattaggatcaagtcatatggacggcaagtcgagaatctctgtttgagatgatcttgtgtttctttccttctggagtgattctcttatacagtcttcagcagtgaacatgcaattgagagcatctactgcctgttgtccatcacctacagctacaacatctgctcccattttttcaagcattatggtagcaaccctttgaagtactggtgtatcttctgcaagcaaaatctttaggccctcaagagatttctttccatctactactgctttacttgagctggtgaccctatttgtgtccccacattcagaatcttcatcctgatcttctgttgaaatggatgatgattctttggtggatagtgatttaggttggttgtcttcagtggcagaactggagctgggactagaagattcttctttcctcaaattatgttcttccaaacattcattttcatttgttaatctaactaggcagttattcatatggtgtggtgatgatggatgagagttttctagcttctcaactggtttatctccattagcactaacgggattagaaccacttatttctgatatgtcagaatcatcagagctagcaccatcaaaatgagtggaatcaatctcaagaaactcatgcaaatcaccctctttcattgtggtccttggagctatcatgtttttcttttgtagctcaagatttctctcatttatgacagcttccaagatatgaatcatttttgctttgtaaaggggtttgttaaccataagtatatgccctttcctacggagctccatttttatggtattggaagtgtcatggtttaacatccatacaaactttgctctaccaaagtacctgtggaggaagttaaactgttccttccatatatctgtactcaagtcaagtagtccaatgtcaacaacaatgacaaaacccgggttcctcatatctcttatgttgagtagtttagacttcaattcctcttttgctggatagtgtgcctcaaagtcagtattattgaacctgaacttcctgca

SEQ ID NO: 58368 - DNA, 271 bp, Glycine max
  Clone ID: PAT_MRT3847_23718C.1
acaagtcctgtttgcactcaacttaacctcagcacaatacgctcagaaagattgcttttaacaactgccagacgccggagtacccgttttctgctatagtgggacagcctaagatgcagctttgccttctcctaatgtacttgaatcccaacattggaggtgtaatgcatatggtggccatacgaacggcgaaatctacaactgttacaacatcatgtagaattgcttcctgaaatcaacgctgttgctggtgacccctatcattcagacc

SEQ ID NO: 58369 - DNA, 532 bp, Glycine max
  Clone ID: PAT_MRT3847_23719C.1
atataaaagttgcttttataatcgaagaggaaacaagattaaattgtttccacttttaagttctaatgaaatcctgaatttctttaagaagccatttacttatgtagccactaagtatgtaaaaaaatgcttatttacatccatgactaaaagttcatcttggaaacttacaatttacaacaaaatcctcactctagaaccatatgcacagaacaatacaagatggaaagcacacttttgttgctttccttgaaaatgataacaccaggggttaaggcactggttcttcaacatgttgattcgtggtatagcactcattgcgagtagtggaaagataaccaaccaaagaaagaatcagtataggaaagaaagcgctataatcccagcctcttggttggcctatctgaaatattagctatcacaaagcctgcaaatacctgaactgagccaagaatgtacaacgccgaataatgccggccatggatcaccatgtcagccaacatagcaagaggaatggtgagtgacatgccca

SEQ ID NO: 58370 - DNA, 380 bp, Glycine max
  unsure (1)..(380): unsure at all n locations
  Clone ID: PAT_MRT3847_2371C.1
cggaanncccggggcgacccacgcgnccgcccacgcgcgcgaacaccacgagaagacgacagagggggcgagacaacanaaagaggcgagacccaaggcgagggcggaggaaacggcccacccaaaccccgaacaagacgacgccgagacccgagacgcgcncagacgaaccacaaaggaggaaagaacgggaccgaaacacacacagccaangccaaacaagccgagagcaccaaggacaccgccaccaagacaacaaaacccgccagaaaggcgaaagccgcgaaagaaccgaacaagccaaaacggcccccaagngcnnacnacaannncagggaagccaagnaaagaagcaacacaacgagncacaagacaaccga

SEQ ID NO: 58371 - DNA, 313 bp, Glycine max
  Clone ID: PAT_MRT3847_23720C.1
gccacgcgtgcaggagcgtacgttacctgaaaaaggcttgggtgtactttgccgagagactgtgaccttacgctaaagttcgatagcctggatagagcaacaccaactgactgaaactaaaatactaagctagcatcgaatactacaattctgcagaaaaaactatgctgtcttatatcctccctccgtaataagacatctggctgaacatgttactattgaattcgttgagggctacaaaatgaaaacccacaaggcatctgcagagcgatttacggtgaccggacaatgcaaaataacgcgtaggagagct

SEQ ID NO: 58372 - DNA, 248 bp, Glycine max
  Clone ID: PAT_MRT3847_23721C.1
ttatgcgtttgtttttttttttttttttgctgtttttttttttttaaaacagaaaggaagcatgattgtttatttcaggaaaaatcgaatttttgtttttacccattcatttttgcaaaactttggcattaatgatgtatggaagtgccccaaaaaaaacttattttattgccactaaaaaattgtactcccaaatttttttttcgggacccgtcaaggtaagattgggctcacatttaaaacaaaag

SEQ ID NO: 58373 - DNA, 504 bp, Glycine max
  Clone ID: PAT_MRT3847_23722C.1
ggaagcgtgcgtacggctgcgagaagacgacagaagggtatatatatatatatatatttaaaactaaaaaaatgaatttagaatgaaaatgaagaaaaaatagggtggggtgcaaaaaaatgagttagataggtatttggaggatgatattgaagatgaccactctgagtttgacattttgaattgatgaaaattgaaagcatataaatattatatttttttcttgtatagctagagatatattattagtcattcttgtatctactgtatcatctgaggctgcatttagtacaaattgttaatgacttgcaagttgaaataaatgaatcggaaaaaattgaatcaagtgtgtaatctcttatttcattttttatatttgtatgaaatatcaattaatttattgtgtttaaatttgtagagttgtttgattcgactttaaataccgttaatattgagactccaagtgttgaaacttaaagtgttgagactactagtgttgaaact

SEQ ID NO: 58374 - DNA, 302 bp, Glycine max
  Clone ID: PAT_MRT3847_23723C.1
gaaaggcggaagaggaaaagaggattaccgggtctccacgtttagcaataaccaaaccctctttactctcttttcttatacttctcttcgctagggttctagcttctttctatacacttcattctttctcgactgtacaatgatcaacgaccaggacacatttaaacgagccgatctcacttctgatctcaacgatgacaatacagcagaccttgttaatgctcttaagagcaagatacacagttgggctggacaacactcatatattctagagactatgacgaccaatgtacgatagcgtg

SEQ ID NO: 58375 - DNA, 280 bp, Glycine max
  Clone ID: PAT_MRT3847_23724C.1
ccccgaaattacttccaatttttttacaaaaatgaaccctttttgtcccaactcttttcctttcttacgaaagggggcccattttttatcacgggggcgtgacttgaaaagactttttttcccccatggggacagaaatgccttggccttttttcccccgattgggaatgggtgatacatgccctagggatttcaccaggattgaaaagctctcacgggactaatgaattccagggggaaaatgcccttcccaatgtgcccgaagtgccacctaaatttt

SEQ ID NO: 58376 - DNA, 1505 bp, Glycine max
  Clone ID: PAT_MRT3847_23725C.1
ctcgagcccatgcctccgcgtccggtttgagttgctgcacagaatggggaaaacggcttacaagaggctgaagggaagccagagcttcaggcaacgccttcttctctctactctctcctccactcccattctcatcgaggacattcgcgccgacgagacatggcccggcctccgcaaccacgaaatttctctcctccgactcttcgaaaccgtctgcgacgattgccacgtcgaaatcaacgaaaccggtaccaaattaaagtacaaaccgggaactattatgggtggcagacaacacagtccacacgattgcggcgtctcacggtccattggttactttctggagccactcattgtgttgtgtttgtttgccaaacagccccttactatcaggctcaaaggaattacaaatgattctaaagatccatctgttgataccttcaagtcaacgactttacctatattgaagcgctttggagttccatctgaaggcttggagattaaagtagagagtcgtggattacctcccaatggtggtggtgaagttcttttgtctgttcctgttgttcagagtctaacggcggttagttggattgatgagggttttgtgaggaaaattaggggaacttctttttcaacaagagtgtctgttcagtttgaatatggcatgattaaagctgcccgtggaatcatcaatccgctggtttctgatgtgcacattttctctgatcacagatcaggtcctgaggctggaaactctcctggatatgggatttctctggttgcggaaactacgtctggttgtttcatttctgtagacactgctgtttctcaagtgagggatgacgatacttctggccttgcagatgatgcgaaacgagacttaatgccgccagatgatattggtgtggggattgctagtgctttactaggggagatagctcaaagtggagtggtagattcaacacatcagggtttgttatttcttctatgtgctctatgccctcaagatgtttccaaggttcgtgtaggaaaactttcgcagcatggagttgaaactctcagaaacctaagggattttcttgatttgaagtttattatcaaaccagatccaaactcacagtcggtttttctaaagtgtattggttatggcatgaagaacctttctcgaaaggtatcataaagtggggtcaacagtctgatataattcaaaatacgagtctgacagaattgtaattttgaagcaactgctacttcagcacctggaaaagaactcaagcagcttcaatatatagtattatgccaatgataatggcctaccccgctccccctactcccaaatgaattacaggtgaagtttggtttcaattgtaacccattgctagcaatatatataattgagtgtttttcacatgattttacttccttttagcatttttctgatcctgaacaccaaaacacttttccattttgaagtactataaaagaaatccttgtgtataaaa

SEQ ID NO: 58377 - DNA, 1562 bp, Glycine max
  Clone ID: PAT_MRT3847_23726C.1
gtcgacccacgcgtacgccttattttgcggatcccatattgactcagagacccacaaagctttcctggtgctaccctttgaatggttggtagtatttggataaaaaatagtataagtgaaagaaaaaagtctgtagattagatcagaattgaatccaagtggtgcagaattcagagcagcatttggtgtccaaaagaagaggagtaataggagagaggtgataaaggtgtcaagaatggggatacctggtgttgatggagaattgaagaagattttgaacgctaacatggacgaagttggtgctagaaggcgtgcacgtgaggctttcaaggatattcagcttggaattgatcatatattgtttaagaccccatgtgatggaataaaaatggaagagtcatatgagaagaactcaaagggcctagaaatcttctgcaaaagttggcttcctagtgcatctaagccaaaagcagcagtgttttactgtcatggttatggagacacttgctcctttttctttgaaggaattgctagaaagctggcatcatctggatatgcagtttttgccatggattatccaggatttggtctctcagaaggactccattgctatattcatagttttgatggacttgttgatgatgtcattgagcattactcaaaaatcaaagaaaatccagagttccattctcttcccagcttcctatttggacagtccatgggtggagctgttgcattaaagatacacctgaaacagcctaaggcatgggatggtgccattcttgttgcgcctatgtgtaaaattgcagatgacatggttccaccaaaattcctcactcatatcctgattggtttagccaatgttttaccgaagcataagttagttccaaacaaggatttagcagaagcagcattcagagatttgaagaagagggaacagactgcttacaatgttgttgcttacaaggataaaccacgtttgaagagtgctgtagaaatgcttacagcttccagaagaaatagaacagcgattgaaagaagtacaaatttggttctctaccaatattcatccttcacggggaagctgacactgtgactgatccatcagtgagcaaagccttgtatgagaatgcaagctgttcagacaagaagcttcagctttacaaggatgcctatcatgcacttcttgagggtgagcctgatgaaataataactcaagtttttggtgacatcatatcttggctagatgagcacagcttgacacacaatcaatcttcctcttaataccgattaattatttttgctctctggattcaaaagatgaatattcattcagcttgttttcagcaatggaaaatagaaagttgctattgtttccataaaagtaactagagtatcaaattttgaacttgtctgttgtttgcaacttaagtcagttactagacataaccttgtttttatgtaaagaacctattttttttttcgataagctatgtaaataacatataatgtttatatctttacttaataaagaaaagaaaatatagtaggaacacagaaaa

SEQ ID NO: 58378 - DNA, 1608 bp, Glycine max
  Clone ID: PAT_MRT3847_23727C.1
aaaaaatagtataagtgaaagaaaaaagtaatctttttaatattctcttcccattaccagtcgacccacgcgtccggttgtttttttaatggggtgtgtcagagtctgtttcctatgattctgtctctaggtctgtagattagatcagaattgaatccaagtggtgcagaattcagagcagcatttggtgtccaaaagaagaggagtaataggagagaggtgataaaggtgtcaagaatggggatacctggtgttgatggagaattgaagaagattttgaacgctaacatggacgaagttggtgctagaaggcgtgcacgtgaggctttcaaggatattcagcttggaattgatcatatattgtttaagaccccatgtgatggaataaaaatggaagagtcatatgagaagagctcaaagggcctagaaatcttctgcaaaagttggcttcctagtgcatctaagccaaaagcagcagtgttttactgtcatggttatggagacacttgctcctttttctttgaaggaattgctagaaagctggcatcatctggatatgcagtttttgccatggattatccaggatttggtctctcagaaggactccattgctatattcccagttttgatggacttgttgatgatgtcattgagcattactcaaaaatcaaagaaaatccagagttccattctcttcccagcttcctatttggacagtccatgggtggagctgttgcattaaagatacacctgaaacagcctaaggcatgggatggtgccattcttgttgcgcctatgtgtaaaattgcagatgacatggttccaccaaaattcctcactcatatcctgattggtttagccaatgttttaccgaagcataagttagttccaaacaaggatttagcagaagcagcattcagagatttgaagaagagggaacagactgcttacaatgttgttgcttacaaggataaaccacgtttgaagagtgctgtagaaatgcttaaaactaccgaagaaatagaacagcgattgaaagaagtatattttgatcttctggcttatctaaactaggtggttggagttggtgaaaattttggtttctctaccaatattcatccttcacggggaagctgacactgtgactgatccatcagtgagcaaagccttgtatgagaatgcaagctgttcagacaagaagcttcagctttacaaggatgcctatcatgcacttcttgagggtgagcctgatgaaataataactcaagtttttggtgacatcatatcttggctagatgagcacagcttgacacacaatcaatcttcctcttaataccgattaattatttttgctctctggattcaaaagatgaatattcattcagcttgttttcagcaatggaaaatagaaagttgctattgtttccataaaagtaactagagtatcaaattttgaacttgtctgttgtttgcaacttaagtcagttactagacataaccttgtttttatgtaaagaacctattttttttttcgataagctatgtaaataacatataatgtttatatctttacttaataaagaaaagaaaatatagtgggaacacagt

SEQ ID NO: 58379 - DNA, 175 bp, Glycine max
  Clone ID: PAT_MRT3847_23728C.1
aggaattaggatagagaagcagccgtttaaaatgttggtatatgaaggtggtgaagagagaagaagaaggagaatggtgacggaccaggatatagcgaaaggggtggagtatatgatgcgtcaatcagaccaaaactacctaaatacggttaaaggtgtcgttaagcagatggag

SEQ ID NO: 58380 - DNA, 240 bp, Glycine max
  Clone ID: PAT_MRT3847_23729C.1
gcgtatgtttggactcatgtgcttgatcacaaaatcaaggacttctgctaatgccagtttcattgtaaaactatcaataataaatataaattataataattacatgcaatgctcacacaatatacttaaaaattataaaatggtttttcaaacggacacagcttcattgttacacagcttcaacttttgatttgataagaaactgtgaaccaatgctttcattggatcaattactggttc

SEQ ID NO: 58381 - DNA, 103 bp, Glycine max
  Clone ID: PAT_MRT3847_2372C.1
ctcaagccgagtcctctcgacgggagcacaaatctagcgcgatgcatctcagacgcaaagttgggcctcatgcacgctgtacgttaatacttctccatcctct

SEQ ID NO: 58382 - DNA, 284 bp, Glycine max
  Clone ID: PAT_MRT3847_23730C.1
agggacgaggaattgagttgatatcgaaagggaaacggtggtttaagtgacgatttgctgaataagtggagatggcaaacttcaatgtcatgcataaacaaacgatagctctcatagcagccaagatcagagatcctcactgagacgctttaatcggctttctcaatatcaatgaccaatccctttccctaaccggaaaacacagagctgccccttcattacatggctccgggacctttaggactccttacaggatgccatggtcaccatagaagatgttcaca

SEQ ID NO: 58383 - DNA, 276 bp, Glycine max
  Clone ID: PAT_MRT3847_23731C.1
gctgcaaaagcaattcaataaccatcagagggtgaaaagacatggagcagggcacaaaaacaaccatcaactaagggaagaatgaagcacactggaacatgacggattggagcagaaccccaaggcggatgaccgtgcaataagctaaaaccagcagctggtcaggctctggattgtaccttagacaaataaacaaaacacgctggatgggacgctaactgcaataggccgttatgtaggagggaactaccggatgactctgattgacacagaagg

SEQ ID NO: 58384 - DNA, 302 bp, Glycine max
  unsure (1)..(302): unsure at all n locations
  Clone ID: PAT_MRT3847_23732C.1
gccttgcgaatcctcacacgnaccgaaaacaccgcgggaacaacagcgaccaaaagccgaaacagccaaacaccaaacgcgnngaggaaaggcaagagacacaaaccgccgcgggagaggcccccgngcgccccccacaggccacagcggccacgcaggccgnngagccgacacagaacccgcagaacaacgaaaccagnccgaaggagcacgacggagcgcaggcacnccgcgagaacaccgacccgcgacggaacgaaccgacggaagcacaaaaaacgggcactcccccggcaaaaccc

SEQ ID NO: 58385 - DNA, 749 bp, Glycine max
  Clone ID: PAT_MRT3847_23733C.1
aaataaattgttcacagttaattaaaatgtgcataataataaaattgttcgaagtaataaaaatgttcacaatcctaaggcaattcatacacacgaccaataaagcacacagttaacatcgggatcaatgaattcgaaaactattttcatgtcagtggtgaacgacaaggtcttgtagaaatgtttccatccggcttcaatttttagtgtcttcctccaatgattgaacacgagtcgacattctgcaacatcttccaagtgcaaatgagtccaacctttgtctttcaaaaaataatgcatgacacttggaacgtccagactactacaggaaactttctgctcagtgagataaaccttgaaggtcacagaacctagcacataatgatgcaaggatactagatgattaccggtgagctggtaaaaattgcgcagtgttatccaccctgctacaatgactggttggttcaaatcttggttgtacacaatgttatgataattttcgtctttgtcaaccaaatgccatatactgtcgagtacgtccttccacttgacagcatataccttaccaacttcaccgaaaatggtctagaataaagccctctggtggagctacgacatcctgcatcatgttttccaattccttccattccccatgctcttcaattgttaattctacatgattaacatttaagcattaacatgcattcaagcacaaaacaaattaacattcaagtaactatttgttattt

SEQ ID NO: 58386 - DNA, 398 bp, Glycine max
  Clone ID: PAT_MRT3847_23734C.1
gggggggggaagcaacatttaaatttttgcccatttaacaatcattttaaacctcaaaatttttaaatttgaattaaaaatgatgaattggacttacccaacacacaacttccataataaggggggctaaaaaaaaaaaccgcttgagggttaaaaattaaaacccttcagttttgcccaaagccccattaagcagcaatttttaacattaaacacttattcaactcacacagcctttttaattattttagcccttacactttttgtagccttaacaacccccctttttttttttttgttattcacccccgatttcttattctttaaaaccaattaacttcccctccccttaaaaaaaccctccttaaccccctttccaaaaaaaaaacagccctttt

SEQ ID NO: 58387 - DNA, 1445 bp, Glycine max
  Clone ID: PAT_MRT3847_23735C.1
gacacacaacatttacatttctctctccagtatggctctcgagcccaatcggctcgaggagatcagcacaatttctctttctctctttttttgtgtgtccaaaatggctcctagttctactcacaacaatgggttctatgtgcttatgctagttgggatagtggttagcgctatggttgctatttgtgctgctagcttctaccaagactttgatccaacatgggttggtgaccgtgctaagatattcaatggtggccagcttctatcactttccctagacaaagtctccggctctggcttcaaatcaaagaaagaatacctatttgggaagattgatatgcagctcaagctcgttgccggcaactctgctggcactgtcactgcttactacttgtcatcccaagggccaacacatgatgagattgatttcgagtttttgggaaacctaagtggggacccttatattctccacacaaacatcttcacccaaggcaaaggcaacagggagcaacagttctatctcttggttcgaccccaccagaaacttccacacttactctatcatttggaagccccagcacatcatattcttggttgataacacaccaccataagggtattcaagaatgctgaacctcttggtgttccttttccaaagaaccagcccatgagaatctattctagcctctggaatgctgatgactgggccaccagaggaggattggtgaaaactgattggtccaaagcaccctttacagcatactaccgcaatttcaaagccactgagttctcactcaagtcttccatttcaaattctggtgctgaatatgaggcaaatgagcttgattcttatagcagaagaagactgagatgggttcagaagtacttcatgatctataactactgcagtgatctcaagcgattcccacaaggtcttcctgctgaatgtagacgctgaaggttccaagagatgaagagaatggccactttctgattggatttgaatcgtctatgtaaaatatgctatgtttattatgtcttagattctttattgacttctgtcttttttttcttcctttttttttagtttctattttatagttgctaatgtatatgtatattaaggggtcttaacaataaatcatattctttgttccattggatttgaatcgtctatgtaaaatatgctatgtttattatgtcttagattctttattgacttctgtcttttttttcttcctttttttttagtttctattttatagttgctaatgtatatgtatattaaggggtcttaacaataaatcatattctttgtaccacttttcttgtcaatatgggcagttagtctcatcctagctcgtccacccggtgaaattgatcatgttggaatcaatttctatctgttcatataataaaaaggtgtagtcaagtttaaaaaaaaa

SEQ ID NO: 58388 - DNA, 566 bp, Glycine max
  Clone ID: PAT_MRT3847_23736C.1
cgagttttttttttttttttttaattaaccaacaataagcctcaaagtagcacaaagggtactcccttgttttgtatgtacaaagaacaaaaactgcatgcacccttgtttacaaaatacaataaacatacaattaaccctcaaaatcccaacctagaatcacaaaccctcttgcatgaaagcaagaatcaggattgaccaagtaggccaattctctttttcatcatcatcaactccatcatgcactcaataaccactaacacaacctaattaagctgcatatatatgtgcacatatatatatatatatatatatatatatatatagaagaagcaagctagctagctagttcaattgacctcagggatgctctgaagtgcaggcctccatggtctttgaagtgattggaaccctccactactatggttcatcaactgggacaaaacctgctccaccctcaactccctcacgtccactttgctcaacaactcctctagctgcttcttcgggatcttgatcttcacctccgtcaccgttttggcagtggtggcggccttggtggtgac

SEQ ID NO: 58389 - DNA, 236 bp, Glycine max
  Clone ID: PAT_MRT3847_23737C.1
gggccgacccacgagtccagggtcattggccaaaattgatatgtgtccaaacggaaggatttgttcagtttgacaatcctcgaaaatctgagaggcgaatggacaaatgctgcattatgcaaatggaaaattagttaaaggagatggagcaatgaataaatgtgtcatagttgtggatataatttgcattgaaggagcagtacaattgtacttggtgggtgaagttgttaagaatt

SEQ ID NO: 58390 - DNA, 365 bp, Glycine max
  unsure (1)..(365): unsure at all n locations
  Clone ID: PAT_MRT3847_23738C.1
ccggaccggaacccccgggacgacccaagcgnacgcctccgctcgggccaaacaacaacaaccaccgggagcggggaagacaacaagccgggcacaccccacagccagccaaggccacaccggccaacaccgccgagccnaggaacgacaccggcacagccggacacaaccccgaagacgaaccgcaaaacacagaaaacaggcccaagcccccaacagaccaaaaacccgggcaagacaacccggacgacacagcggncaagcagganaccgagcaggaagacgacagcggcccccaaaaggccgcnggacacaaagaaggcgcaagaggggcacacaanaggcgcgccgggccacgccaaaag

SEQ ID NO: 58391 - DNA, 163 bp, Glycine max
  Clone ID: PAT_MRT3847_23739C.1
ataactggtgccctgttattgcggctatggttacatgttgatcatccattcctaaaccaggttgttggataccgtcatcttcaagtattactaaaaggacaaagctgcttctcctacgactttaatatagattcaccacctgcaaacggggtattcaaaacat

SEQ ID NO: 58392 - DNA, 124 bp, Glycine max
  Clone ID: PAT_MRT3847_2373C.1
ggttttgagaaaagagcactctatattcacatcagaatgaaaaactaactcaactccagagcatgattatcaaactaaaagacacactacaaaaccgagaggccaaaagaatcactaaagttga

SEQ ID NO: 58393 - DNA, 348 bp, Glycine max
  Clone ID: PAT_MRT3847_23740C.1
gggagagcaaaacaacttgggttttttggggggggccccatacaaagcccaaaatttcattcataattgggggaaaaattaaaaaaaaaaaggcccggccatacatggggcctatcctgggataaaaaaaaaaattggtccccatgggaattacagggccaattccccccaaaataaaactttccccatccattcttaataaaaaggaccttccccccccccaaataagaaaaaatggttccataaaaaaaaacaaaattttaaaaaaacttttccaagattaaccattaacaacctctggccctacatggaaatggcgacttttgggggggaaactttatacccccc

SEQ ID NO: 58394 - DNA, 415 bp, Glycine max
  Clone ID: PAT_MRT3847_23741C.1
tggcttggaacctttgggctgatttatgtgcttgattatgtgcttgtccctccgcgttctgctatcaccatcagtacaccgcaaaagctccccggcgcctggtccccggccgcaaccagaatacccctatccagccggaccagcagcatccgcgaaaaatccgcaatgcgaaaccggagaggtcaagtataaacgtcctcgtccgacgccaagcgcctcttcgccaacgcgcaccacgtatggaactgagaggcaacgatgagggcaaaaaaacatcgacaaaaccgagactatcatgcaagagcacggtatggaaccggaccgaggttaccgaacgttacaactcaaaaaacttactttaaggatatacccgcgcctaacacagacggtattgcatctctcaacaccttacatc

SEQ ID NO: 58395 - DNA, 490 bp, Glycine max
  Clone ID: PAT_MRT3847_23742C.1
ggctcgagaccaaatttattaaaatcttgttttcatgtttacttagaagcttgtttcatggggcgggctttgggggccaccttgacaccattggaggaaaaaatataagacccttcaagtggtcttttctgcatcattgattgtgccaaatgacctgtaatatgctaactccctccttcggtgctaataacaccaccacattttacaacatcaccttccgtttcatattcttcaccactatcttataaggcaccacctgcttcaaaatcacaattaccaccacctccaccaccatcaaggattgctccaccaccacctttcaagttctacaacacgccaccttcaagtttgacacagccacaacctactgagatctcagcgccacatgacttttcctatccctattactatgattacgctgccggagctgcttctctcttatttcatccacccttttttggtattcgtattgatcttaattgggtattct

SEQ ID NO: 58396 - DNA, 363 bp, Glycine max
  Clone ID: PAT_MRT3847_23743C.1
gcaaccataacgacaagacgacatttctataccaattcattaagacgacagaggtgtacggtttctagaagacaacagactgttactcctttcttaagactacagagggtaccggttgacacatgacgacagactggttacagatgcgataagacaacagattgttactgttgtgagaagactacaaacatgctctgatctctgaatacgaccaaactttacgccttctaaatgacgacagaaggatatttagttgattaatagccacatctatttttattattaatataaccacacgcttacagccaagacattgaatctttattttaactcgattatttttatacatacctttcaaattca

SEQ ID NO: 58397 - DNA, 160 bp, Glycine max
  Clone ID: PAT_MRT3847_23744C.1
gaattacgagattagataatatagagcggcagctgactagtgagatcgtcgaaatgggaattaattaaggacaggtacatgcaggcgtacaagatttaaatatagtgagtagtattagagattggagtaatcatggtaatagatgtttcatgtgtgaaat

SEQ ID NO: 58398 - DNA, 334 bp, Glycine max
  unsure (1)..(334): unsure at all n locations
  Clone ID: PAT_MRT3847_23745C.1
agaaaaatctggattaggagtttatgacatacataagacgagcgacctgctgctggtcttctacgtgtttgatgccgagcacgtccgctagactctttgaaagctaatgcatatttctccaaattatttttctccaagcggggggagatgggacaaggattttttttttcgngttctgaatggatgggagcttgccctgtcacaactatctgactttctcctatcaccttccttcacactcgccctactatagaaataaagggacgttctagaggtggcaatgggggttgccaatctcctcctcctaccctcagttatgcttgatgtgctcgaa

SEQ ID NO: 58399 - DNA, 596 bp, Glycine max
  Clone ID: PAT_MRT3847_23746C.1
attggggtaaaaaaccaatccgtctgtaactgtcacgtacacacgcagtgtgtctcgtctcggcttagcaggtatcgctgattcattcatggaaccctttcgatttcaattgatgccaaattccctgtgcttactcgtttgccgcttcaaatgacgattaaggataatcttattttctcaatctctgaatgtgatgtcctttgcaataagaccaaggttattaataacgttcttcatgtaatttaattttctacttatatttatttaggtttttactttctactttaatgaagcaaaatcttatagctctttgttgctaccttattctgcttcgccggttagaggccgtcgaagtcgatcaaggcccagtagaagtcgttccaggtgtagctttgcagaaacgcacgtttaatttgctgaataagttaccctatattagacatgcacacacataaaagctaagttgtgatagcaacactaaacacgttctttgtggtgatggagtgaagattctgctgatgtggagaatcctggaaataatttgtatgttacaggcttgtccacaaggataactgacagtgatcttcactagtatt

SEQ ID NO: 58400 - DNA, 105 bp, Glycine max
  Clone ID: PAT_MRT3847_23747C.1
tagacggtcgcaccatacgatccaatctaagctacgccataacgctacgacatagccctccaaaatcatcacacagatccacttcacagaacgtcgttatagaaa

SEQ ID NO: 58401 - DNA, 316 bp, Glycine max
  Clone ID: PAT_MRT3847_23748C.1
tgcacgcgttcgaacgagcgtaccactctgcgaacattccgtaccctggaataaacttagcgagccgatgtccactcaccgggagaccctgttacacaatctcccctagaagcgcgcagactcccatactgtcaacaggaactagattatgacccttttgtaaaggatcgtaactcaaggcacaggcaccctgctacaccaccacatcattgcttagtttgacggaatgcctgacgataacaggctgatgcttactgataaggcctttagagaagtcttgacatactcacacgacgccatagttgtgccaccatgg

SEQ ID NO: 58402 - DNA, 491 bp, Glycine max
  Clone ID: PAT_MRT3847_23749C.1
ctgtgattaggtattttttattttattttcccgttgatatcataagtattctcataacaaaatgaagctgcatacttaaaatccaaactcaaaaatattaattaagttgaaatattttgtactaattgattcacacttgaagattaagcatttttttatgtttactcaatgatggagcctagacaatatattgatatttcctttaaaaaaaaaaacaagtcaacatattgaaatatagacgtcaaatgaagggtaaattttttagagtaataataaacctgtatttcatttttgggtgtattggtgaaaagaaaaaagaaaaaagaggtacagaaaaaacaattaagaaagagagagaaagtgaaaaaaaaagtgataaatgatatgacaaggtatgagagagatcagaagaaaaatagaagtaaaaaattgaaataaaagataaagcaagtgtatatggtagatatttttcaattggaaaaatattcatg

SEQ ID NO: 58403 - DNA, 364 bp, Glycine max
  Clone ID: PAT_MRT3847_2374C.1
cagaagaccaccgaagggggtggggattttttaggcaaggcgggttgtcatgcccaccggcgcacagaagaaagaccaacgcagttcataaccattaataaaccaagtctcattcgttggctcattcgaatattgatccggcatctaatttgggtttgcatgctttcccaaacaagaagggatcaacaataccgtggtcagcgacgaacaccgcccactcatccaatactgctgcgacgtcgtctactatcaccaaccttggatcaccgtccatagcgatgaaccagcttttctcctaatcgcatgctgaaccacatggtgccacgcctcacttgcactgtcactttcagttgtcacaacgaca

SEQ ID NO: 58404 - DNA, 493 bp, Glycine max
  Clone ID: PAT_MRT3847_23750C.1
gggatgaagcaatgaactttttggactttggggtgaagcaatctcaagtaaggaatctagatttcactggcttcaaaaaattgatctgcaagcttgttgttatgtatccgaacttggtgtatgctcattctctcctcccacttgagtttcaaatttctcaacaatcatatcaaaattctacttcggttataattgcattaatttgtgatgtagctaatagtacattctttttcaagcatgtgctagtggtgactaatttcctttttacaatcctggcttcttagttccaattttctggatgcatatcttgtatcttcattgatacatttgcaatttttgctgatctttgtgatgtgtttatagaattttttcaagtttctatccattttatccttttgttgtagtattgttattggaactgagggctatcattgaaaagggtagtccaatgcatgattctcccaccattgtgcatagtgtttcaagaaacaca

SEQ ID NO: 58405 - DNA, 384 bp, Glycine max
  Clone ID: PAT_MRT3847_23751C.1
ggatgggaaaactttcgagaaagaattgctcgaggcgcatccactggcgacgcaggacttcgagaaaattccagcgactctttggaacttaggatgggggctcattatcgagggcaaactactagcgaggacagagcgtggtatgatgtactataggagggctctcatgctgcacagctcactggagagcataacacttggagtggacaattatattcaaaacaacttcatcactacttaagattttgaatcatatgacgaatcacgggcacaggctgatatgcagattacttatgtcgcatcatgccaaatgtatggtcaacaaaagcagcgaaaggcaccagaagctgcagatattgctttattgatacagaggaatgaggc

SEQ ID NO: 58406 - DNA, 290 bp, Glycine max
  Clone ID: PAT_MRT3847_23752C.1
aaaacacaaaaaggctttttgggtttcactgtctctcctggagaaaaaaatcttttccccccctcaaaccttcccttgtatataaaaaagggacgcaaaccaaaacgggggtacccggaaaaaaggacaaaatcttttaccgtccctgtgcccattaagaaccccgcctttggtgggggcttggccttatttcaatttgttcggcaccaaactctattttggagggaaacaagttcaccactgcgaaccatagggggggtgatgaaacaccaggcgtggtggttttcatg

SEQ ID NO: 58407 - DNA, 238 bp, Glycine max
  Clone ID: PAT_MRT3847_23753C.1
tgaaaaagtgtttcttaataacccagcaaaaatccatgcctctgattcctgaatacacaccctcccttcaatgccaacacaccaataccatcttgatgattacgattgcaatttgtttctgtttggtggggggatcttaaaaatttgagcttggatgatgcaatgtgggttggattaatgcagttataggtgtcctacatgtcagagtgagtgaccctcttggatcttccacacaaca

SEQ ID NO: 58408 - DNA, 1197 bp, Glycine max
  Clone ID: PAT_MRT3847_23754C.1
tactactctcgagccgaatcggctcgaggttcacttccccttccagaattctgcgtttcacacatctccctttttttatcaatcaatttttggcttctaggttttcagtgatttgttctaaagtttcagattttgttattatcccactacagttcacactctgtaacaatacgtggggaaagcctagtgcttgtggaaattcaacaacttttggagttttcttcattgattgaactttgtttcgtcgattggatcattcgggtggttttagagttgaaggggttaaaaatgatgctgcattttgtgcagccgtcaaagttgaaaactaagaagatggtgtttgaggatgtatatgcttcctgtgattctacaacgcttgagcatcttaaggaattaagctcaaaacgtaaagctattgaagattctattaatgagtgcaacttcgttactggtgctcttgctttggcaatgtctggagggttggttgcccgcctgcatcaggatattcacaaaatagagaattatctgccatttctggaaattttgattccctatgctgatgcaacaagtaccattaaccaaatccaaatttctcaatggaatgcggctcttaagatacgctggagtagtgccctgaccacatcttctttcttcaaaatcaagggccccaaattttttcaaattaacaatttgcgatttgagcttggtatgaccctttttctttgtggtggaatcctgcgagagagggctttagaagttttatcaaccgatttggttcaatctgccaccattttcagacaagctgctggcatttatcatcacctagcacaagaggttcttccccacttagagcctgaattgccaccagaaaaaccccctgaagctcttgctgcagtatcctccattatgagcctcatttgcttggctgaggcccaggcagtaaccataaggaaggctgaagagaaaggtacttcttcaagtctcctggcaaagttgcatcatggtgttacactttttcttgaagaagctattggaatttttcatacagttgttacacagtgcaaagacatttcatcacgcttgtcggaatttatgtatttctgcaagtgtttacatgagttgaaaggtcagcaatatcttgcagaaagcctgaaggcttgtggtcaaataggggctgctattggagttcttagttct

SEQ ID NO: 58409 - DNA, 1480 bp, Glycine max
  Clone ID: PAT_MRT3847_23755C.1
cgcatggagatcaaccgccccttcccggcctcccccgccgacatccgccgcttccactccgacgactacgtcgacttcctctcctccgtctcccccgagaccctcgccgattccgccttctctcgtcacctcaagcgcttcaacgtcggcgaggactgccccgtcttcgacggcctcttccccttctgccaggcctccgccggtggctcccttggcgccgccgtcaaactcaaccgcgctgacgccgacatcgccatcaattgggccggcggcctccatcatgccaagaagtctgaggcctctggattctgctacgtcaacgacattgtcctcggcatcctcgaacttctcaaggctcacaggcgtgtgctgtatgttgacattgatgttcaccatggtgatggtgttgaggaggccttttacaccactgatagagtgatgacagtgtctttccacaagtttggggactttttccctggcacagggcacgtcaaagacattggggtgggctcaggaaagaattatgcagtaaatgtcccattaaatgatggaatggatgatgagagtttccgtagtctgtttcgatccatcattcaaaaagtcatggaggtttatcaacctgaggcagttgttctacaatgtggagctgattcattgtctggtgacagattgggttgcttcaacttgtctgtgagaggtcatgcagattgccttcgttttcttagatcgttcaatgttcctttaatggtcttgggtgggggtggatatacaattcggaatgttgcccgttgttggtgttatgagcagtggcagtaggagtggagcctgataataagttgccttataatgaatattatgaatattttggcccagattatactctctatgtcgatccaagcaacatggagaacctaaacacatccaaggatttggaaaaattaaggaacacactactagaacagatttcccgacttccacatgctcccagtgtaccttttcagacaacaccacctaccttgcaacttccggaagaggcggaagagaacatggatagaagaccaaaacttcgcaaatgggatggtgaagattatgattctgatcccgaagaaggtggaaaggataattccaagttctcaaacatcactgcccatatgagggacattgcagatgaaatggaagaagagaagccagaagagcatccatcatcttgtagttgatagaacagagcaagttcttgcacagcatgtttgtattgtaatctttatcgtaaactatttttgtttatttaagtcattttcttttatttggtccctgacttacacttagtttcgttttagtctcatagtgaatttagtttattttgaatattttcatttgtgcatattttcatttggtcaaatggagacgtcactttaattttggttcatgtatatttcttttacatgtatgatgaggatattaaagaaagtgatgaaggggc

SEQ ID NO: 58410 - DNA, 1980 bp, Glycine max
  Clone ID: PAT_MRT3847_23756C.1
ttctttcgtccgggtatattggatctcgcactttagaaattagcgaaagagagacgtatgggaatggaagaggagagtagcatcatagaaggtggtgcttcgcttccatcgtcgggttcagacgccaagaagcgaagagtgacctacttctacgagcccaccatcggcgattactactacggtcaggggcacccaatgaagccgcaccgaatccgcatggcgcacaacctcatcgtccactactccctccaccgccgcatggagatcaaccgccccttcccggcctcccccgccgacatccgccgcttccactccgacgactacgtcgacttcctctcctccgtctcccccgagaccctcgccgattccgccttctctcgtcacctcaagcgcttcaacgtcggcgaggactgccccgtcttcgacggcctcttccccttctgccaggcctccgccggtggctcccttggcgccgccgtcaaactcaaccgcgctgacgccgacatcgccatcaattgggccggcggcctccatcatgccaagaagtctgaggcctctggattctgctacgtcaacgacattgtcctcggcatcctcgaacttctcaaggctcacaggcgtgtgctgtatgttgacattgatgttcaccatggtgatggtgttgaggaggccttttacaccactgatagagtgatgacagtgtctttccacaagtttggggactttttccctggcacagggcacgtcaaagacattggggtgggctcaggaaagaattatgcagtaaatgtcccattaaatgatggaatggatgatgagagtttccgtagtctgtttcgatccatcattcaaaaagtcatggaggtttatcaacctgaggcagttgttctacaatgtggagctgattcattgtctggtgacagattgggttgcttcaacttgtctgtgagaggtcatgcagattgccttcgttttcttagatcgttcaatgttcctttaatggtcttgggtgggggtggatatacaattcggaatgttgcccgttgttggtgttatgagacagcagtggcagtaggagtggagcctgataataagttgccttataatgaatattatgaatattttggcccagattatactctctatgtcgatccaagcaacatggagaacctaaacacatccaaggatttggaaaaattaaggaacacactactagaacagatttcccgacttccacatgctcccagtgtaccttttcagacaacaccacctaccttgcaacttccggaagaggcggaagagaacatggatagaagaccaaaacttcgcaaatgggatggtgaagattatgattctgatcccgaagaaggtggaaaggataattccaagttctcaaacatcactgcccatatgagggacattgcagatgaaatggaagaagagaagccagaagagcatccatcatcttgtagttgatagaacagagcaagttcttgcacagcatgtttgtattgtaatctttattccgtttatgggggagatcattgctaaacagtaccacatgcagcagttgagaatgcaaatataatcaatacattgtgcaaatgtaatatagtgtaaaacattgttttggtctccctcgtaaactatttttgtttaagtcattttcttttatttggtccctggcttacacttagtttcgttttagtctgtcatggtcaatttagttgattttgaatattttcatttgtgcatactttcatttggtcaaatggatacatcactttaatttggttcttgtatcttttacatgtatgatgaggatattaaagaaagtgatgaaggggcaaaatgttgttttcttgttactatttcatttttgaaagattcttatgtataatccaaatattttaattaaattgttagttaattaaaaaaaaaaaaaaaaatatagggcgcccgccgactagtgagcgcgtc

SEQ ID NO: 58411 - DNA, 2856 bp, Glycine max
  Clone ID: PAT_MRT3847_23757C.1
taacattttaaagtagataagccttccccgcccactagaaatagagagaaggtaaggagggtttggttttgggtactttacaaattacaataattagcgaaagagagaagacatagcacatagagtcatagagacatcatcatcgtatgggaatggaagaggagagtagcaacaacagcagcatcatagaaggtggtgcttcgctgccatcaacgggttcagacgccaagaagcgaagagtgacgtacttctacgagcccacgatcggcgattactactacggtcaggggcacccaatgaagccgcaccgaatccgcatggcgcacaacctcatcgtccactactccctccaccgccgcatggagatcaaccgtcccttcccggcctcccccgccgacatccgccgcttccactccgacgactacgtcgactttctctcctccgtctcccccgagaacctcgccgattccgccttctcccgccacctcaagcgcttcaacgtcggcgaggactgccccgtcttcgacggcctcttccccttctgccaggcctccgccggcggctccctcggcgccgccgtcaaactcaaccgcgccgacgccgacatcgccatcaattgggccggcggcctccaccacgccaagaagtccgaggcctctggattctgctacgtcaacgacattgtcctcggtatcctcgaactcctcaaagttcacaggcgcgtgctgtatgttgacattgatgttcaccatggtgatggtgttgaggaggccttttacaccactgatagagtgatgacagtgtctttccataagtttggggactttttccctggcacaggacacgtcaaggacattggggtgggatcaggaaagaattatgcagtcaatgtcccattaaatgacggaatggatgatgagagtttccgtagtctgtttcgaaccatcattcaaaaagtcatggaggtctatcaaccagaggcagttgttctacaatgtggagctgattcattgtctggggacaggttgggttgcttcaacttgtctgtgagaggtcatgcagattgccttcgttttcttagatcgttcaatgttcctttaatggtcttgggtgggggtggatatacaattcggaatgttgcccgttgttggtgttatgaggtctgcttctttctcttttagtctggattataatgtgacttggtacttgtttaatttacttatttggttacatgctttttctttgttttagacagcagtggcagtaggagtggagcctgagaataagttgccttataatgaatattatgaatattttggcccagattatactctctatgtcgatccaagcaacatggcgtaacctaaacacacccaagggtatggaaaaaataaggtgtttatactattaatttcatctggttgagttaaatcgatgattctcatttcaattttattatttctcttaattatatggaaaaataatggtcataaattgttaagacagtaattccttaaatgcattacattttgctgcatccatgtcacatcctttctacaaatgatgacgttttcagaaacttactagtagttgcatagacaagctatatttcataataactgaattgttattttcatattggttgtgaagacatattgtattgtctagatataaaatatttcctatgggtttctggaaattgtacctctgtctgtggcagaagccaggaggcccaggactgaaccttagtcagaatttatatttcccttgtctcatgtgtaaaatattcagagatttcctatcatttctctggattaagcagtgacttacatgggttttccccccattaaatttcaaggaacacactactagaacagatttctcaacttcccccatgctcccggtgtaccttttcagacaacacccacctaccttacaacttccggaagaggtcagtacttaataacagttgcagttattgttcctttgcaattctcttctttttgttgattttattatgtattcaggcagaagaggacatggatagaagacctaaacttcgcaaatgggatggtgaagattatgattctgatcctgatgaaggtggaaaggctaattccaagtttccaaacgtcactgcccatatgaggtaatgattatatattgttttgaagctgaatataaacccatttggtttgtaagttcctttttcagtggataaacgtgggttgttccttgagaccgatacctatgtgacacctgctagcttgatagatattcctagagtcagtttgaatggaagttttttctggtaatggagctcactatgctataacacaagtttcttcttagccgtttgaagtgaatttaataatcatttggctcctttttttaaagcagaaatgttctctttttgctgcaggggcatttcagatgaaatggaagaagagaaaccagaagtgcatccatcatcttgttgttgatagaacagagcaagttcttgcacagcatgtttgtattgttatctttattccgtttatgggggagatcattactaaacagtaccacatgcagctgttgagaatgcaaatataatcaatacattgtgcaaatgtaatatagtgtaaaacattgttttggtctctctcgtaaactatttttgtttaagtcattttcttttatttggtccctggcttacacttagtttcgttttagtctgtcatggtcaatttagttgattttgaatattctcatttgtgcatactttcatttggtcaaatggatacatccctttaatttggttcttgtaacttttccctgtatgatgaggatattaaagaaagtgaggaaggttcc

SEQ ID NO: 58412 - DNA, 465 bp, Glycine max
  unsure (1)..(465): unsure at all n locations
  Clone ID: PAT_MRT3847_23758C.1
ggttcccttttttttttttttttttttttttttttttttttttttttttttgtaaccttttatttaaaatttgcaactaggggaaattaaataacaaaaaaccgaacaagctggggaaaaaaaaaaaacaacatttgcttggggattaaaatgggggggggggggggctaaaaaccccctcgtggggaccccccatgaccacaacaaaaaaaggttcgctggcccatgtaacccccctgccctagccgcaccagggctggacccactttggacatggggggggggaattctggctccgggggccccaatttttttgaccaaaaattcccttgaacaggccatgcacaaatttttcccacccccccccgggggttcccaaatccctccctttttccgaactcaataattttggggggacccancccgggcctgccggtccctggccgccgggggccctaactgggg

SEQ ID NO: 58413 - DNA, 510 bp, Glycine max
  Clone ID: PAT_MRT3847_23759C.1
ttacggctgcgagagacgacagaagggtctctatcatagctgaagctgatcttcagaaactaaacaatgcattgaaaatactttctgaaactgagaagcagttaagaaattcgaagaatcaaacaacatggttcattgtagctctcctacagttaagctctgtagattgtcaatctgtggatgcaaatgataccaagttgagtcttagaggtgcatgcaatggaggtgagcttgatttttttcctttgtttattacattattttcaattccttttctccattggtgtttggcagaatggagtggttttgtcagctagaagattctagttttctttattccttaaataatatggatataaaaaatgttgatatctgcaatacattatctacagggcaaaggttggaacatgttactacaggcctttgtgataacaagtcatacagattagaaccagaggatcacaaaggaacattggattccatttggtataaagctacagagatgtgtca

SEQ ID NO: 58414 - DNA, 464 bp, Glycine max
  unsure (1)..(464): unsure at all n locations
  Clone ID: PAT_MRT3847_2375C.1
acaacaagggtcgactttggtctaatttcttgctgtctaggtgttagatgtanttcacagttcacgcgctatagggagtggatggatggtgttgtttttcatataacggcaaagaaagatagaggagctagctagctagcgagcttcaaaactcaaaagcactgacacatacaaacaaaaagatctggctctcataaaattgagataaaagtgcaccgtctccgaatcatgtttataatattatcttcattagatcttgatctcatttttcatctgaaactaaaagaatatatatgtgcctttaccctatttagctatatgcacacacaacttgtcacatatcatattttgttcatcaagtttataattccttatctttgaacttacttacatccaagtaaggtctaagctaactggagttgattaaatctagctagctagttttcgatctgcttaattttgtt

SEQ ID NO: 58415 - DNA, 548 bp, Glycine max
  unsure (1)..(548): unsure at all n locations
  Clone ID: PAT_MRT3847_23760C.1
acgagagcaaagtcatcattacagctcggaataaaggtttgcttcaaagtcatgggattgaaagcatatatgaagtagaaaggttcagtaagacagaagcttttcaattgcttattttgaaagcttttaattctataagtgttagtgctgattatgtgaccatctttaaccgtgtcgagacttatgctcttggtcatccgtggactttggaagtaatcggttccaacttgagtggaaaatcagtagaaaattgtgaatctgcattacttaagtacgaatcaataacaaatagagacatccgaaagatactagaagaaagctntaatgctttggagaaatgccagcaggagatgttaattcacattgcattgaaactcaaagaacttgaattgngagtggttgaagacgaactttgtaattattataaagtctgtcccaaaaaagatattanagttttgcttgataaatctcttataaagattaatgagcacggtcaggtgacattgcatccctctacacaggacatgattagagataaaattacacgt

SEQ ID NO: 58416 - DNA, 224 bp, Glycine max
  Clone ID: PAT_MRT3847_23761C.1
tcaagcgtagaccctttagtattccttattacccacccacctgggcggcaaattaccattttgtcactaacgctcaactaatgttcattcccgccaatactacataattactgcgaatcttataaaacaaaaaaaaaatgccggtcgctatataggatcccagcttacctacgcgtgcccacaacctaaaagatcttatatagtgtgacccaaatttaattcac

SEQ ID NO: 58417 - DNA, 302 bp, Glycine max
  unsure (1)..(302): unsure at all n locations
  Clone ID: PAT_MRT3847_23762C.1
tcgngcacncgcgnacgnacgcgncnncncgccgcncnatcncggnccaaannggctctcnttgggtngcnctggatcgggtgtcccacgntggnctccnctgggcgngcntgttgcaggnnggnngncnnntgctcatgccaccttcnctnnnnggagtgntgcatctnggncaatgggtgnggcntgtnggctccnggcatcgctacnnccaacngnatggagcaaacactgcngcnctnagcactgccanngncncccncgnccngcagctgnggctcnttntnangagacncncngnc

SEQ ID NO: 58418 - DNA, 421 bp, Glycine max
  Clone ID: PAT_MRT3847_23763C.1
ctctggggtgttacaaattaccaaagtttgcatcagcggcgtgcccacctcgggatctttcggtcgtgcccttttccctgccccaattcctatttgggaccacgaaaccggcaacgtagcccactggggtacattctttaaattcaacattttctcaccccacaaatcagactcagctgacgggcttgccttcttttttgcacccggcgggtctaagccccaatccgaccatggatttcttggtcttttcaacagtgccttaaaggacaagtctctcccaaccgtggcgattgagttcgatactttctcgaacaaaaaatgggatcctgcacaccgactcattggtaatggcgtcaacatcatcaatacggcaagcattattctccggggtttccaatctcctatagatgagactatagtg

SEQ ID NO: 58419 - DNA, 474 bp, Glycine max
  unsure (1)..(474): unsure at all n locations
  Clone ID: PAT_MRT3847_23764C.1
aacccgtgtgtttggatgagttggccacgcaaacccaacagctaattttcgttgcacttcgtttcctcttcctgtataacatttataacctgatgcattttcacaatattcaatttcacttcatcccttgtgtttcatcttcttatgtgtctattcattttcctcagaatttccggttttgttgaatatcacaaagcttcaatctcatggcctcgtttgatgaacaacaaggaaagcctttacccaagtttggggaatgggatgtgaatgatcctgcttcagctgaaggattcactgttatattcaacaaggccagagatgataagaaaattgcctcagcatcaggacgattcccttctcagcgaagatatgattctcgaaagcatggcaaggataaaaaaaagtgcaagagttcctnnctcttctcctnctnctcaaagaaaaaatggtcttgctttggcccttagacatgga

SEQ ID NO: 58420 - DNA, 875 bp, Glycine max
  Clone ID: PAT_MRT3847_23765C.1
ccacgcgtccgattcctgaagcggagcggtgcggtgtcttgtttctgcgaaccatctctttctcttccttccaagttgccaccgagcgctgagccacttcggttttttcactgttgttttagtatccaattccaaatgaatacccaatacgtcaagcaactgctccgtaatttctattctaccaaattttttctcaacagagaaaaaccacattggaactatatgcatagggtttttaaccagcttcaattgcaaaggtcaagagcagacaaggtagaagataagctaaaagaagagcaagaaacacaacagatttctttcaaatctgaagtgaagaaggcggatggaaatgatgggattagcaaatactcttctgatgatgaagattccttggatagtaagtggaagttggagctggcttggcttacaaaagcacttgaaccagctctgcaattttgtaggtgggctttgccaacaggaaatggaattggaaacaaacccccaccaagcaatcgatcccttacggaaataattgcctgcatccaacgaagcaagattggaatccaggattggagcttgagtgaccttacaattggcttgtatctgatctatcttcgtcaagcttctacacatccatttgaagatatcaaaggcattcagatattgtcagaatccattgttcaagatctcatatatcatattgagttggctaaaggtgcttatagggataacccttttagcctttcaagaaactgcatgctacgagaaagttatgtcaaaatttgttaaatactccagcgtaatgaggcctgcatacatttaggggggtgatacccgtaaaagcttgtaattttgggcattcgtggcacacatac

SEQ ID NO: 58421 - DNA, 209 bp, Glycine max
  unsure (1)..(209): unsure at all n locations
  Clone ID: PAT_MRT3847_23766C.1
tctcgagggggctcatgctaggagacacgttaacctacacaccaacactccgatgcagacatatgaaagggggggaaaaggagcataaatggcattgcgtcattgacgattcgtccctcacacacttnctctaactcttactcccactcccaataccaataacagtaaccgtttttacttcttcaatccctcactatcttacaccacgc

SEQ ID NO: 58422 - DNA, 2009 bp, Glycine max
  Clone ID: PAT_MRT3847_23767C.1
tcgggttaaagaagatgggtccctagtttctattgcctagtacttaagtttcattttttttttttttgttaatacaattttcttgctaggaaatagtatcaaaatattttcatctattacttttaaattttaattgaatgtgcagtgctccgtaatttctattctaccaaattttttctcaacagagaaaaaccacattggaactatacgcatagtgtttccaaccagcttcaattgcaaaggtcaagagcagacaaggtagaagataagctaaaagaagagcaagaaacacaacggatttctttcaaatcagaagtgaagaaggcggatggaaatgatgggattagcaaatactgttctgatgatgaagattcctcagatagtaagtggaagttggagctggcttggcttacaaaggcacttgaaccagctctgcaattttgtaggaaatgaaattggaaacaaacccccaccaagcattcgatcccttacggaaataattgcctgcatccaacgaagtaagattggaatccaggattggagcttgagtgaccttacaattggcttgtatctgatctatcttcgtcaagcttctactcatccatttgaagatatcaaaggcattccgatattgtcagaatccattgttcaagatctcatttatcatattgagttggctaaaggtgcttatagggataacccttgtagtatttcaaggaacagcatgctacgagaaagtaatgtcaaaaagtttgttaaaaactccagtgtaatgaggcctgcatactatataggggttgatacccgtaaaaagcttgtaattttgggcattcgaggcacacatactttttatgatcttatcactgatattctttcctcaagtgatggtgaagtcacctatgaaggctattcaacccactttggcactgctgaatctgcacgttggtttctccgtcatgagattgaaatcataagaaaatgcttggagaaacatgagggatttaagttaagacttgtgggtcattctctgggaggggctatagcttctttattggcaataatgatccatagaaaatcatcaaaggagctgggttttagtcctgacattgtatctgctgttggatatggaactccaccatgtgtatctagagaacttgctgaaagctgctctggctatgtatcaacagttgtgatgcaggatgatattatacctagattgagtgtagcttccctagcaaggctccgaaatgaaattgttcaaactgattggatgagtgtaattgagaaagaagactggaaaagtgttacggatttggttacaaatgcaaagcagtttgtgtcttcagtgcaagatgtagctcgcagacttgctgattatgcaaatttcaggagaaacaaaagtttagctgttggtactgctgataaggagttgccagttgccactgaagctcctctgccctccaaagctgcaaaggagaattcaggtgtcacgaaagttgcgggaactaaaactgcagtgatcgaggagttatttatacctgggactgtttactatcttaagaggaacttgggatcccaaattgatgctggaaaggattttttcaccctttacaagagggagcctggtgagcatttccagaaggtaatcttttcggggaattttatcacagaccacagatgtgatagccattattatgctttgagagatgtccttaaaggtgtgccatggtgtgggaaggaaggtatatttaaatagaaaatgttgttaattattttaatttaattttcccgtatcatttgattgtaataaaactgtacattgtgtaactgattttctgtgcttagggggtgccttacagttcttcagtctgtgcggaggtgttagcaatagcacagtagattagaagtttggcaatttaggctataaaatacataaaaaaattgtggatagtttggttctatcataaataaaaaaatgctgaattgttgtgtctgttaaaaacatctag

SEQ ID NO: 58423 - DNA, 407 bp, Glycine max
  unsure (1)..(407): unsure at all n locations
  Clone ID: PAT_MRT3847_23768C.1
ccnnnttnncgccgggcattcgtctctaaacggnaccattatnctaaaagccccgggggggccaaggggaaaaaaaaacaccggccgacacccccaaggtaaccaggggggggcgagccccaattcccaaaaacaaaggagcgaaagatcacctcgtccgcgggcacccacccacagaaaccctagaaaccaaaatttggatcacccaccccccccccccggaaaaccacccaagtaaggccccaaaggactggggtgggcgagccaaaacacaacacctcttgaaggcggagggcccccaaaattgccaaagggatggccccaggaacagttccaacctccctggccaggcgggggtaaaccccctctagaaacacgcccgtggggcgccaccccccccccccccc

SEQ ID NO: 58424 - DNA, 2036 bp, Glycine max
  Clone ID: PAT_MRT3847_23769C.1
cttcagcttcgcttcagttctatcaacaccttcgtcaagccccacaccgctgaattcgaactccacgataatcagtgggagcaacacagaagacgagagagaccaaagctatgacagtagtaacatgttgaaatttgaaatcccagatattttagatgtgaatgagttcatgtaatgtgatcagatagatcttcaatgattaaatcgaccaaaacgttgatcgattatatcacatgtcccccaattgtttttcttttctgggatagcttgattatggatccatgatgtaggttcatacctgtaacatttcttaattttcattattgattaaattttcaaaaaagaaacatcttctgcctcgcctcctttttcactctcacacaatcaaccaaaaacgaaggaaaaagaagaaccacctgcaacgacgtcgttctttgcaacttccagtttcttctctctgtctcgtttacctcgatcctgttcttgttcttgatgaatatgacaccagtatgcccctttgtcaaagcttctcgccctgatgataacaatgcctctaagaaatctggcgaaaactctatgaaacatcaggttgaatctgagagtaaagggaagaaagaggttaatgactcagctagtacctcaccaaagtgcccttttggatatgattcgcattcgtttaagattggtcctcttagctgtacggtgtgccaagcacttttatttgacaccagcaaatgtgtgccttgttctcatgttttctgcaaagcatgcatattgcgcttcaaggactgcccgttatgtggggctgatattgtgaagatcgagcctgatgctaatcttcaaggtgtagttgatcactttattgaaggtcatgcaaggatcaaaaggtctgttagttcagacaaaggagaagaagcaactgagagtaaaaaggtcatatatgaggatgtgtctttggaaagaggttctttcttggtgcaacaagccatgagggcattccgtgctcagaatttagaaagtgccaaatcaagactcaatctctgtgcagaggacattcgtgatcagttagaaaaagttggtaacacttcagagttatgttcacagctaggagcagtcttgggtatgcttggtgactgctgccgagcaatgggtgatgccagttctgcagttgcatattttgaagaaagtgttcaatttttgtcaaagtttccaaaagatgatttggagattacccatacactttctgtttcacttaacaaaaattggagatcttaaatattacgatggagaccttcaagctgcaagatcttactattttaaatctttgaatgttcgacgcgatgttgtcaaacacaattcaaatgttccatcccaggtgttagacgttgctgtctctcttgcaaaagttgcggatgtggacagaaatctaggggatgaaaagttagctactgatggatttcaagaagccatagacttactggaatcactcacgttgaaatctgaagctagtgggctcgagcaacggcggcaatcagtcctagacttccttagaagccaacttccagataaacaagaacaagctgaggcaccagtctgagataggtggtccacatgaagaaaggaaacacagattccgatgcaataaggggtttcggtatgccgtgggatgagtttgtaaaataagctcagcttaacaaaggcactactaatggaggaagaggagatttctgagtaatgaatattccaggcatttctggcactgcagtgtctgcctatgcctaagattctaaggcgcatcctctctgtattttcttgtgcaccactcttatattttttttttccgcctctttgattgttttcttggtgcatactgacaattgtgatccttgcatcattgtaactaaatatacttctctaataaactagaaacgaagtagcatgtagtatataggttgtgtagtttgctctacaacttgatggatacaattctatactgtgaaaagtgaaatttatagatatactcctctaatattccc

SEQ ID NO: 58425 - DNA, 429 bp, Glycine max
  unsure (1)..(429): unsure at all n locations
  Clone ID: PAT_MRT3847_2376C.1
cccacgcgttcgcccacgcgtccgcccacgcgtccggtaattccagttttctaccatgtggagcctgcagatgtacgacatcaaagagggagttacaaaaatgcatttaagaagcatgaaaaaagaaacaagactaaggtgcaaatctggagacatgctttaaaaaaatctgctaacattgtaggaattgagacatcaaagattcggtaagctctttatcccccaataaatattcaatattttctagctgttaatatttagtattttatatataggattaaatatgaatatagtccatgtaaggtcacagtttttttaattttggtcctatatatatattnctttatttttagtcttttgtaagttttttttttggtttggtttctataagttttttccttaattttaagttatagaagttcgtgaatt

SEQ ID NO: 58426 - DNA, 349 bp, Glycine max
  unsure (1)..(349): unsure at all n locations
  Clone ID: PAT_MRT3847_23770C.1
gaagactcctcaatcatccatagacatggccaccgtcacttctgcagcagtttctattccctcattcactggcctcaaggcaagcgcaggcaaagtgagtgccgccgcagttaaagtctcagctccccaagccacaaggttctgcggcatcaaggggcttccctcaaaagaaacgntggaagcgctgttgtgggcactggtggcaaacgcagtttaaactaaacaacccatggcccatgaaatggttccgggcactgatgagggtctctgggtttctcttcccaatctttctccgggggccccggggaaaaaaaccggtccaaaacaaccagggttcccccccaacatt

SEQ ID NO: 58427 - DNA, 558 bp, Glycine max
  Clone ID: PAT_MRT3847_23771C.1
gacggaaagactactctcttacatttcgttgtacaggaaattgtcagaaccgagggttctcatatttctggttctaatcatccccatgcctctgacaatggccaccaatatactctccaagatgaggttgacttcaagaagcttggtctgcaagttgtttcaggcttgagtggtgagctcaccaatgttaaaaaagcagctgctatggattcggacgtgctcagtagtgatgttgctaaactttccagaggaatcgaaaaagttgtgcaagttgtaaaatggaacaaggagttgcctttgaaagaaactaacaaaaaattttcggacgcaatgaaaggtttcttggagaggggagagcaagagctttcaacaatccagacccaagaaaaaaatgccctctcttcagttaaagaaataactcagtatttccatgaaaattcagcaaaagaaaaagctcacccatttagaattttcataattataaagaattgcctttcaatactaaataatatttacagaaaagttaataaagtggataagaaaactttagttagttcc

SEQ ID NO: 58428 - DNA, 208 bp, Glycine max
  Clone ID: PAT_MRT3847_23772C.1
cccaaaggtggcgctaaaaaaaatagccttggtaagggttaatgaccccccaaaatccaaattttggggcatgaagaaaaaacattgacccccccatggagaattagaacttccgggccccttgcacatttttaacatttcatgagagcatattgttacatttagaccaaaagggggggggataaaaaaaaatcgcgacgcgtatttt

SEQ ID NO: 58429 - DNA, 694 bp, Glycine max
  Clone ID: PAT_MRT3847_23773C.1
tcgagcttattaagggttcaatagatatgcttccctaccagtaaaaatcagatgactctcaaaggcttggtatcacttgtcatcaatttaattggcctagctgagggaacaaggaacaatgatgccccccctttaccttgttacatgctatctagccatatacaaaataacaagcaacaatcatctgaatcagcatcagcatccaattttaatgaggatagttggtgttgtgtgtgcttgtcaaggttaaaggccaaagatgaaatccgtgtccttccttgctcgcacaaattccataagatttgtgtaaataaatggcttaagggtcgccacaagacgtgtccactttgccgtttctcaatgggagccgaggagaagtctcatcgtgccgaaatgttcactgaagagatgttaatatggttttcttctttccatgtagctggtatgtaatgatctaagtttcaccagtgaatctatttgtagttttctacaagcagagccttgctttgctttcaagttttgtttaaggcttgtgaatctgatttcgtgcaagctgaaacaaattgttatggcttatcatgcctgctatatatgaatgaaaatgtcgatgttcataaggggaaatctagatttacattccacctttcttttaccttaatggaggatcgattctcttcaatatactatgtcttat

SEQ ID NO: 58430 - DNA, 399 bp, Glycine max
  unsure (1)..(399): unsure at all n locations
  Clone ID: PAT_MRT3847_23774C.1
gggtgtggtggggttngccaagatataaaccggaaaaagaacgacaaacagagaacccgagggagaggggccaaaccaaccagaggcagaacaaagtgaccaacacacgaccaatacgataaggaaaacaaaaccacacacaaacgcaggccagggaagaagaacccaccgccgaaaaagggcggagaaaacaaaataagaggcctaggtgagagggcgacaaaacacaggcgaacccgcgacagacaaagaggaccagtagcaggacaagagctaacaagaacgccaacacaaccagcgaaggcaggacgcccagcagccacgaggccagagggagacaggaaccagaagtgcggaaatcacgcgccgggcgatgaagggtgacagacatgaccacca

SEQ ID NO: 58431 - DNA, 703 bp, Glycine max
  Clone ID: PAT_MRT3847_23775C.1
tactccttcagtgcagtatcaacaccgaacatacaatggcccctctcgctctccgtgctcgcgctgcctccgtggcccgctctcaggtcaaggcccaggccagcctgaagcctgtgcagaagattgcccaggttgccggtgttgccgtgtcttccctggccctgaccctggctgcccacgccgacgccaccgtcaagctgggtgctgactccggcgccctggtgttcgtgcctgagaaggtgaccatcaaggccggcgagactattacctgggtgaacaacgctggcttcccccacaacgtcgtcttcgacgaggacgaggtccctgagggcgtgaacgccgacgccctcggcagggaggacctgctgaacgcccctggcgagaccttctccgccaagttcaccacccctggctcctactcttactactgcgctccccaccagggcgctggcatgaagggcactgtcatcgtgcagtaagctgcttacacagatttcgatgaacagcttcagcttttgctagctctgttcctcggttttggacgatgcctgctgcgtatggtgactacaccaacatgtgagcctggttgagttttgttggtgcactgttgctgcactgtatttcttgtacaccacacgtatataagcggatctcgtgaacctcatcacggacgagtgtatactatatgttgtaacatacatgc

SEQ ID NO: 58432 - DNA, 453 bp, Glycine max
  Clone ID: PAT_MRT3847_23776C.1
aaaaatgacacttttcattagtataacgtggattgatgaacatgtagtgcattgaaaccttaattaaaaccctctctgaccactactccgaactatatttaacgcgaagcatcttccatcaagaccttatgactgattctactaaaacaatactaaatttttccttgatgcgctcttctcacctacactcatacatcctaaaatgcataatcaccacccatagagatgtgaacacatgcaactgccacaattctaccagcaacttgagcacatagcccttccaccacatcatgacttattcaccctacctatctctttgcatcaaacacaaaaaggctcatgatctgcaactgtagcagactgaactgggcaaatgaaccgatattcttgcagaaatgtagagagacggattgcattcattttgctttcaccatatattctatgaacatcacc

SEQ ID NO: 58433 - DNA, 416 bp, Glycine max
  Clone ID: PAT_MRT3847_23777C.1
cagattttctacctctacagcctgttttgttatagaaaactcaataactgcaaccagccaaaaaaacagtttaggaaaccacacaaggccacaacaattatcacaagcatgtacaacaaatgcatcaccaacattgaaacacacaacagcaacattcaaacctaacaggaagacgaagacaaagagatgagggagacagtaattgatgcatcatgcagcagcatctgaatatagtcagcgccaaatcaaattaacagtatataaaaccaaatacaaaaaccaatttgaaaattttcaattggttcttagacaccgcagttgcatacatacagttaaagttgggttacatacaacggtataataagcgtatgaagtaagcaaatgaaaaagtgaagaataaccattaacgatgagtg

SEQ ID NO: 58434 - DNA, 470 bp, Glycine max
  Clone ID: PAT_MRT3847_23778C.1
ggcaggactatatagaagttgccacacagtgaattggtgacaagaaatggagcaacaacggcgttggcacgacgtgttctggttagggatatttgtgatccatttggttggtatgggtttggttcttggggttttaggcctcaacaggttcaagcaaaagaacaggcttgacattgataagtacacctaccggttcatggagaatgaggctggtttgacggaggattactggccgctttatgcagtggccggtggcctaggaaccgcccttggatggagttggttgctgctgttaggctcgcgcgccacccagatgatgaaggtgtctgtgcacatactcaccacttaccttgctgtgatcagtgttttgtgtttctgggcagagcagtttttctggggtgttgcctttgctattggggcagcccttcagttcttgtatgtgatttctgtcataaaaagactttcattta

SEQ ID NO: 58435 - DNA, 482 bp, Glycine max
  Clone ID: PAT_MRT3847_23779C.1
tctttgttggtggtgtgtttttgttttttctcttttgagacaaaatgtcacgttctaattctttaatatccttataattaatgggaaacctgcaaaataaaaacaaagtttcccgaaaagtccaaggagactccaaaacatcttacaaaaaaaaaaaaagggaaacctccttttacttctccacaggagaaaggagagaatgaaaaattttgagcacccactctatcaatacacgaggcctctccaacaattatacccctcaaaccgccccaaaggtctagccctaacgctcaatcccgtaacacatcaaattatattccttgcaaacataacaactaaactacaatttcccatttaaaacctaaatgaaacctttcatccagtctctttattaacaaaatgcaaccccaaccataaaatgatagcctaaatggaaaaaccaactaccaaacagtcataaaatacaaagcactcaaaaaccg

SEQ ID NO: 58436 - DNA, 387 bp, Glycine max
  Clone ID: PAT_MRT3847_2377C.1
gcaaaaaaaagggttggaatttctatttcattatagccgggttttcaaaaatcacccccatttttgaatatttcccgggtttttcccaatcaaattatcccaagccctaatttttgtttcaaatcataaggggccaaggttggggggtaactttaacctcaggaggggccaaacctcctttggaaaggatcctttgaatacattttaaacaggcacaatctcaaagtctggatgctgaaaacaattggggaaggagggtgttatatgggcaagggtgttgataaaaattttatatggggacccaactccaaaggtcaaggacttcaatttaggaaaagggaaacatgctggcttcacagggggtgacgctccacaaggaaccttaac

SEQ ID NO: 58437 - DNA, 364 bp, Glycine max
  Clone ID: PAT_MRT3847_23780C.1
tctgcctcgaccccgcttactgccacgatgcacacgagtcattcggctaccagtatctgtgcaccacattcaatcgccgtaatacttgtgtaacagcacgtcaagggataacgcatgagtggaaatgtcaatcaacagccagcgtatggccaccaattgttgtaccgccccgttgctaacgtttttcaacacgctcagcgccccttacaagtattccagcgttctacgctcaacttagatgtgccgaatcacgacacgacgaaacggacagcaagcatattcccctatacgctgccacattcgctcacctgttccgattcagctgcatcaccgagaactgtccccctttctcgcttcaggaagc

SEQ ID NO: 58438 - DNA, 134 bp, Glycine max
  Clone ID: PAT_MRT3847_23781C.1
aacaccgaacctgccactacacaatggggcccatgatactttctttttaccgggagttctttttcggcattaacaactaccgtatcacttgctgcttactgaaccgaacaaacgggcctcggaccactttcaat

SEQ ID NO: 58439 - DNA, 305 bp, Glycine max
  Clone ID: PAT_MRT3847_23782C.1
gatgagggtaatgaggaagatggttgtgaacggctcattcctcttcattggaagaatgcggccgatcttgcgggtggatgcttacctgatggcgactgctgaaaattttctatcatatggagtgaagtaacttgactacgctgtaaaaaatattgctaaatcacgatttgaagaaatttaagtttgccgaaatgattatgattgttgaataatatattctgacctggtaggcccatatggaactggtcatgataatgcagccttccgaacgaaggcgctatcggattgggaaatggctcactctc

SEQ ID NO: 58440 - DNA, 939 bp, Glycine max
  unsure (1)..(939): unsure at all n locations
  Clone ID: PAT_MRT3847_23783C.1
tgtttctcaggtccaagtccaaccagtacccaaacacatccctgatccaaattgagggagtgaacaccaaagaagaagtaggatggtatgctggcaagaaaatggcctatatctacaaggctaaggtgaaaaaggatggaagccattaccgctgcatatggggcaaggttacgaggcctcacggcaacagtggtgttgtccgtgcaaaattcaagtcaaaccttccacccagatcgatggtaataatctgacagggctgtttttattatgctggctttctttatggtatttgacttttttgagttttgatgcattccagggagctcgagtaagagtattcatgtatccaagtaatatatgaggtaatctcttttgttgatgttctctaactagttgttctgtctttctattctatgtaacattctttggaaatcctgtgctgtattccatgcgttatgtcagtggatgtactgcatcattgggtctccaaatgtgtatataacatacatgatgacgatccatttgttcattatccaaatgtgtgtaaataacatacacgatggttatccatttgttgattatccaaatgtgtatataacatgttgattattcatttgttgtacatttatgcttactttttcacttgtttttttctttttatagatcaacactctgtttgccaatgttgctagtttagtaaaactgtttttacctttacatgctatctaagagaagaaactaacaaataatggtaaatttaatattcatcttttgcttgtgtaagtgtttatttatgcttaaaaaattaattaggtcttgtgagagactgtttattgtttatgatataactgtttcaagtcctctattccttgatttttaatggttcttttttgtgaattttgaatggacgtcattggnttatactggtgtacattttct

SEQ ID NO: 58441 - DNA, 956 bp, Glycine max
  Clone ID: PAT_MRT3847_23784C.1
cttcttgttgccgtgttgataacttggtatatggttcctcgtctacttcgagtccatatatataacttgccaatattcttagactgtccgaaacatatatacttggtgttttttgttctaggaaagcctcgtataatattattgtgtcacaataataatgtctcactccattaattcagagttcaagtttgatcccaaggaaccctccatgcccatatcgtatccaataaagaccctcaaggagttggagtcacgctcctactttgagtcctttcattatccttttaacaaagcttcagttccaattgaaagtgggtattctgaacctttgccaaattgtagaagaatactagtgtgccatgatatggctggagggtacttagatgataaatgggtccagggagggactaatgctgaagcctatgccatatggcactggcatttgatagatgtgtttgtctacttctctcataatctcgtcactctccctcctccttcttggactaatacagctcatcgtcatggtgttaaggtgctggggacttttatcactgaaggggatgagggaacgactgtctgtaatgaactgctttcaacaaaggagtctgcccaaatgtatgcaaaacacttggcagagcttgctgttaatttaggctttgacgggtggctgttgaatatggaggtatcattgaagccggaacagatttctaacttaaaagagtttgtcaatcatctatcattaacaactcattcttcagtgcccggatcactggtgatatggtatgacagtgtcactattaacggtgatctatggtggcaaaatgaactaaatgagcataataagcctttctttgatatatgtgatgggatatttacaaattattcatggcaggaagactatccaaggcggtctgctgctgttgctggtgatcgaaagtttgatgtgtacatggggg

SEQ ID NO: 58442 - DNA, 1566 bp, Glycine max
  Clone ID: PAT_MRT3847_23785C.1
cagccatgctcatgtgggatctgcatctgtgttggttggtgatattgatgatgcattggactctgaaaaaaggtacttgaaaaggggtgtgaatgatcgggggagggttgctaatgatgttgagacagagcagattgtccttgatgaagaatcaggctcttgcaagggaaagatgagttcagttgtgcaaatgcgtggatcaataccacttttctggtcacaagaagcatccagatttagccccaagcctgatataattttgcagaggtatgatccaacataccaagcaacaaaattgcattttgaagacctagctaagagatatggcaatccaattattgttctgaatttgattaagacagttgagaagcggcctcgagaaatgatgttgaggcgtgaatttgcaaatgatgttgggtatctgaaccaaattctaccagtggagaaccatcttagatttattcactgggattttcacaagtttgcaaagagcaagtctgccaatgttttggaagttttaggagctgtagcaagtgaagcgctcgatttaactggtttttactacagtggtaaacccagcatcattaagagagccaacaagagcaatcaaacaagcacagggaggtgaatggttcagtgatccactcaccatcagagtttgatgcagcttcagtggcttttgagatccctctcctaacctatggttaagaggttagttgattttcagcccttgtgtttgttcttgtcttggttgagaatacacatgtattgcataataagacagaactctgaaaaaatgtctccattcattttcacctactacatcatatacatccttaatccttcaatgactagttgtagttgtaagcccctaatctttgtctgatttctgattaatcaaatgggaaaactagtttttgtttgcattttaatctatgtggtttgacagatttttttattgaattcagtgggactaattgttggagatgttgtgttctcaagttaaacgtatgtttttggattggttgaaaaaggttttgatggagtctctagtacataactatgtagaaattatgaacagatttttctatttactggtggtatttatcaagttgatttaagtgattatttaaaaaatttgattttttaatcttagaattaatttatgctaattctaatattcaaatagataaatgaccaggaaaattaataaaagttcaagaaaaacacaaatgaactataacggaagtttgtgaaatatttgagataacattaaagtttgaaaaaaatgcctagcagaaagaaagagtatttatggtggaaaaaaaatgcctagcagatagaatatttagtccatttattattttctttatttatattttttaatttccttctatccttcttccctgcatcccattttgggtggaggtctaccattttactcaaaaccatacaaaaaaaaaatcaattccagtggatatttaatttaattttataagtggtaataaaccgtgttctctaaaaatggggtgtatttagctgaaaagaagacaggaaagaagtaat

SEQ ID NO: 58443 - DNA, 454 bp, Glycine max
  Clone ID: PAT_MRT3847_23786C.1
aaaaaaaaaaaaaaaaaaaaaaaaaaaaaaataaaaaaaaaaaaaaaaaaaaaaggaaaaatgggaaaataaaaaaaaaaaaaaaaaaaaaaaaaaaaaaaaaaaaaaaaaaaaaaaaaaaaaaaaggccgacccttttaaaggatccaagttaccatacccttgcttccaaagaaaatccttttttacaggctcactaaaataaattcaactgtctaaaattttaaaacttatgtactggaaaaaccttgacgtaccaaaactaaatcacttttaaaaaaatccccttttccccaattgcctaaataccaaaaaggcccataccaatcccctttccaaaaatttccccatcctaaatggtaaatgtaaccccccttttatcggcccattaacccctgcggatttgggatttacccccaccttaaccgttacatttgcaaagcccttacgcccc

SEQ ID NO: 58444 - DNA, 293 bp, Glycine max
  Clone ID: PAT_MRT3847_23787C.1
acagtccgctttgcccgtgacgaccgatgatgatgcggcggacgagccatccgggacgtctcctgcggctgaagaagacagtgaccactgcggataggatgctccactgcttcagctgtcggaatgtccaatttgccaagaggaggacagcgtatgcagataggagacaccctgatcccgcagagggagtcttaaggatgctcatagaaagggcgcacagccgtgtagcaatgagaaaggagactataactcgtgagatatgacacaagttctatgaatctgggaattgctgg

SEQ ID NO: 58445 - DNA, 319 bp, Glycine max
  Clone ID: PAT_MRT3847_23788C.1
ggaaccaggaaaaataggaaaatgtggggaaaaaggtggactggcgagattttattaaaagggataattttttttttttcggggcgcagatttaaaagaagaggccttaaaacttttacgggggaaaaaaaaaaaagtggcattgggaaaaccgagttttttaaacagggtaaaaattttatcaatacgtttgtgaagcttaaaaaaacataaaacggggggggggggcattaagatgttcagggccttttttgtttggggggagtaaagagccttgttccccaattaaaattcaagctttttttggataaggggggga

SEQ ID NO: 58446 - DNA, 953 bp, Glycine max
  Clone ID: PAT_MRT3847_23789C.1
aactactacatttttgtcttcaccaacttatgatttatgaacaagcaaaaaataaaaaataaatcctcccttctagtgaagaggggactgttaatacactactaaatataatcgataaaagaattatcacaaagatattttttttttgaaaaaaaaaagcacgataggaatatattttacatgaccctgctcctaccggtatttcctatgcattccaggggtcatacaggagaagattgattgtttctttggtttggcgccaaagatgaatgacctcagaggaaccttggcccgagtctctgattgtcttagctggccattttgttgtctctttgaagccgagaacccaaatttatcattcaacttcaccagagccttttctatttcaagttggagagatgttacaccatctaaacccgtctgaagttcatcagcaaccttgttgttttcctgtttcatattcaaaatttcaccttggaacttggcagcttggtagcttgtgaacctgaagtcatcatcttcagcactgcttttcaattctgttgttatctcttcttggatgtcacacaaagatgagaatcgactttgcagttcttctttcagcaaggcacctttttccatccagactgttatttcactttggatctctgttaggtgtttgtaaattggtcttgaatctgattttattgaatactttatgctgctactaccctctgacgacttctctctttcctctaattttgataactcggtcagcaaatctttgatggtggtttcaaacttctgtatctcagagtaataagcactgaattttaaccagaaagttaggttctcctctaggatttcatccatgtttgaccggaatttttcttcaatgagtgaagtagattcaggtagttcaatttgtaaaagttcctctgtgaaatcttcatttccttccatgcttctctgct

SEQ ID NO: 58447 - DNA, 406 bp, Glycine max
  Clone ID: PAT_MRT3847_2378C.1
gggcacaccatcttgatgtctaccactgtgcatacaacattcactatctatggcaaaagtatccacaggctgttgttccaattggttatatctaatattttacatcctatattgatcatggagtgatcaacattaaaatctcatggcttgacggtctggaaaggacggatctggcggctccaagcaggcctatatagagtccaagagcccgacctggtcgagtgataaagcatgaagttaaagctgaagtggttgatgatgctgatgcagaacaggctgctaaggagaatctgctgaagcgtttcaatgagagggagagtgccatgaacgcaaagtacaaggttgagaaaaaagtgttagcttcacaaattgcttttggttatggtggtgaatcaacttctatgaa

SEQ ID NO: 58448 - DNA, 101 bp, Glycine max
  Clone ID: PAT_MRT3847_23790C.1
ggaacagtgcgtagagaataagctatgcagttcaatatcacatcacaattccttcatatcttctcaagcaccttcttccttatcattacctcttcactttc

SEQ ID NO: 58449 - DNA, 162 bp, Glycine max
  Clone ID: PAT_MRT3847_23791C.1
gccgggagaagacagccgacagaagggctagtgtgtcattgttcggaggtgtgactcggacttcgtgagatgcagccctatggtagcgtctgagagtgatatcacccgaaaatgtctagctacaagtcctaactgtacatacataagctctttcgattactg

SEQ ID NO: 58450 - DNA, 1973 bp, Glycine max
  Clone ID: PAT_MRT3847_23792C.1
agacgacagaaggggggagcacaaactgagctttggtttcgtattaccattttctggttctgacttggtcgcaacattatgcgagcgtctttctctcctacagttttggtcctaatcctacaattataaatatcctttgcttcttccaaacaccttcttcttcttcttcttcttcttcttctatccattctcttctccacacgcttcacaacttctcttcttctgaatctgcatctgcatcttctttctattgaactttttctctccctttaaattggtataacttaaatatccttgaagaaaatggaagttacaggtggctaagtcttggcaacgtctatggcctactctggtatctgggcaacgtgtgagggaggatacaacttaggcagtttaagaaacagtttgcagaaaacaagcaagaagaatcactgtgggagcaaaacaactgttatggaatttgaatcagactggacaaagcatagaaaatcatctgctcatactgctcaagtgattcgttctgcaacatcgttcatgccttggtcttgtagaatcccgattggtgaaggattttatgaatttctttagttatatgcttctcagtaacacattttcacattatttggttgatagatctcaaataaagttctctacatcctcataattgttggtttaaaaaatgcctggtttcactggtggaaagaagagatttatccagccaaatatgtgtttgttgatatatataaccctgagagacacagctggtgtgagattaagaatgctatgggtgttgtgtgtaaaggatggaggtcgtttattcaaagcaaagaattcactactgtgcgaaaattggctgggatgctagaggaatggctctatttcttaacaacagactgtgaaggaaaggaaagtcattgggaggttatggattgtctcggtcataaatgcggatctcttccaccaatgcctggtccaggaaaggctggggaccacatggcggctcttaatggaaagtcttcactcatgccggagtattccccccggcactggagagactgtccccattcaccccgttgcctccattctctgttgcatcaacagctggagcagattgtcagacatgaatgtgtctcgttatgacttcgcttgtgctgaagtcaatggtttggtttatgctgtgggaggctatggggtgaatggtgacagtctctccagtgctgaggtgtatgatccagataccgacaagtgggcactgatagagagccttcgccgcccaagatggggttgttttgcttgtggatttgagggtaagctctatgtgatgggtggaaggtcaagctttactattggaaactccaagtttgttgatatatataaccccgagagacatagctggtgtgagattaagaatggttgtgttatggtcactgctcatgcagtattaggaaagaagttgttctgcatagagtggaagaaccaacggaagctagctatattcagtccagaggacaattcatggaaaatggtaccagttccattgacaggaagctcaagtattggttttcgatttgggatactagatggtaagttgttgctattccctctggaagctgaaactgcttttcagacattgttgtatgatccaaatgcatctctggggtcagagtggcagacttgtgacataaggccatctggtttgtgcttatgttgtgtaacaatcaaggcatgaaaccttgtcttgtctgaagacagcagtgagtgtgagtgttcctcacattatactattatctgattttaactatgtttttgcttgtttgtggctgttagttacttggctcctagtgttatcatgccctttgctcaggacttgagggattaattcccttggtcttgtaattatcacctttgagtagtactatttttttttttcttttgtttaattagaggtatatgaagctttttattcaacatcc

SEQ ID NO: 58451 - DNA, 423 bp, Glycine max
  Clone ID: PAT_MRT3847_23793C.1
ctgctagagagactgcagaggggcaatcaatgctctaaactctctttatgactacgccgaacttgagccatcataaactgtattctatgaaactattgctaacctgtagaggaatgttaggcatgaccataggagggctacctcggcggacgcatagaaaaggcgctgtacgtgctctatgactcgaacaccccctcacatggaccacgtgctgtttagccacattatctgtcagttccgcgatattcagcgaatttttttcgctccttaagattcttctggccaagtgtctgcacatgaggtgacgtggatcccgataccaagcatattcagaaggatggggtgaattcggcaacaaaagcgatgctaacagggtggactattatgttaaatggtgctcaaataggggttctgaagaggtca

SEQ ID NO: 58452 - DNA, 628 bp, Glycine max
  Clone ID: PAT_MRT3847_23794C.1
gtgttatggtcacagctcatgcagtattaggaaagaagttgttttgcataaagtgaaagacccagcgaaagctagctatattcagtccagaggtcaattcatggaaaatggtaccagttccgttgacaggaagctctagcattgattttcgaattgggatactagatgaaaagttgttgctattccctctgaaagctgaaactgcttttcaaacattgctgtatgatccaaatgcaactctggggtcagagtggcaaacttgtgacataaggccatctggtttgtgcttgtgttgtgtaacaatcaaggcatgaaaccttgtcttatctggctctatggagtgatggatacatctatggaattctctgcattttatcaagaatgaagacagcagtgagtgtgagtgttcctcacgatcacatcatactattatctgattttaattttgtgttttagcttgtttgtggctgttagttacttggctcctagtgttatgagggactaattcccttggtcttgtgattgtctacttttgagtagcactatttcaaaccgtggtgggtgagttaattgtttattgttctcttttgggctttttgatataatataaatcaagcgatagctttag

SEQ ID NO: 58453 - DNA, 739 bp, Glycine max
  unsure (1)..(739): unsure at all n locations
  Clone ID: PAT_MRT3847_23795C.1
ggtccggnaattcccggngtcgactccacgcgtccgggtagcctgcaaccgagaagagagaggattttgggaagttgcagtacgggtaatttaatctaatcttgcaaaaacaccttctctcgcttcctttccatttacgactatctccttcaatgttgttattctgcgtgtattcctttgttccacgcttagatgcgagcactataagagacgatgcaaaattcgagcaccatgctgcaatcagatttttccatgtcgtcactgccacaacgacgccgcgaactcatctagcaaccccgcagatcgtcatgaacttgttagacgcgatgttaagcaagttatatgctctgtctgtgatactgaacaggaggttgccaaggtgtgttctagctgtggcgtcaatatgggagaatattattgcgagatttgcaaattctatgatgatgatacggataaaggacaattccattgtgatgaatgcggcatttgcaggtgcttgctattcagtgagtgtgcaaaacaatcactcatgtgtagagaactcaatgaagagtttctgccctatctgtttggagtaccaatttgattcaataaaaggcagcaccattttgaagtgtggacacacaatgcatatggagtgctatcgagagatggcaactcaaaatcagagtcggtgacctatatgctcggagacaataggcaatgatgtgaactggggaattttagatcgggagattgg

SEQ ID NO: 58454 - DNA, 672 bp, Glycine max
  Clone ID: PAT_MRT3847_23796C.1
gatactgattcagaggatgagtaccctaattctagggttctcatagctcccaatgggagcgtttactcacttggtgttcctcttcttgctgattttaagggtacaagcaaccccattttagaagaaagcacattagacgtgataagcccggtatccactgatcccctggtgtttgatgctgagcagagccttgagagtgagttatcttttattcacaaggctaaagaatctggtgttgtgtatcttcttggtcatggggatataagagcaaggaaggagtcgtggtttatcaagaagttagttataaactatttttatgcctttttgagaaagaactgccgaagggggatcacaactttaagtgtaccacactcacatttgatgcaggttagcatgacctacatggtttgaccatcaattttccaacccaaacaattgacaggtaatatggaattatagtttggtagcagtgagttggtcttggaactctcattttgcagtgctctttaattgcttgattgccaattttttggcacctcaaattgctgaatatctttccagctcataatctggaaattgtttcaaggttcatggttgtgagcttgcactgtagatataaggaattggcatacctttgtgtaaaaaagaaactgataaatgtagatttgtcat

SEQ ID NO: 58455 - DNA, 281 bp, Glycine max
  Clone ID: PAT_MRT3847_23797C.1
ttacttttcaaggcgaggttatggacacatctccattgtggtcacagtagatttgggataggcgagtaggtaagctcgttagacacatagatgtgtggcgagaatagtgtttgaacacttctgggtaagcttgccaaacgataaggaaagatctttttcatgttaaatggctgcgaaatgcctatgtgcctaccatgggccagactgaagattcacatttgatgctacgaatgatgaatgcttctgattgaattgacggtattgatctactggcgttcatt

SEQ ID NO: 58456 - DNA, 368 bp, Glycine max
  Clone ID: PAT_MRT3847_23798C.1
ccgttccaggaaggtttcccgtcatcactgtatgacgtcctccttctttgggggggggggggggcagggcgggcacagaggaaattgagtttagaagggcaatacggctaaaaggatagtattatagtaacaccgattgaaaacatagaattaaagaaaaaaggaggtgtagggggtatataggtaaggaaatagggaatgctaacaaaaggcacaaggcgagtaaagacaatggaggggagtagttaaagcagcaaagatatacaagtgcatacgagtgggtgcttggcagggggtacaggggaaaataaccagtacgtacgttaattattgttaaggtaattaccagttgcaacagccaagccaag

SEQ ID NO: 58457 - DNA, 1094 bp, Glycine max
  Clone ID: PAT_MRT3847_23799C.1
ggggcgtgcgtatcgagaagacgacagaaggggactgttaaataaacctaatctttgtttagcttgttttgcaccttgattactggagcctgcaaccgagaagagagaggattttgggaagttgcagtacggatgcgagcactataagagacgatgcaaaattcgagcaccatgctgcaatcagatttttccatgtcgtcactgccacaacgacgccgcgaactcatctagcaaccccgcagatcgtcatgaacttgttagacgcgatgttaagcaagttatatgctctgtctgtgatactgaacaggaggttgccaaggtgtgttctagctgtggcgtcaatatgggagaatattattgcgagatttgcaaattctatgatgatgatacggataaaggacaattccattgtgatgaatgcggcatttgcagggttggtggtcgtgataagttctttcactgtaagaaatgttgtgcttgctattcagtgagtgtgcaaaacaatcactcatgtgtagagaactcaatgaagagtttctgccctatctgtttggagtaccaatttgattcaataaaaggcagcaccattttgaagtgtggacacacaatgcatatggagtgctatcgagagatggcaactcaaaatcagtatcgctgtcctatatgcttgaagacaatagtcaatgatatgaactgggaatatttagatcgagagattgaaggcgttcatatgcctgaggagtacaagtttgaggtttcaattctatgcaatgattgtaactctaccagcacagtatcttttcacatatttggtcacaagtgtttacagtgcggttcgtataacacccgtaggatttcgaaacccaaacaagaaggtttgggtgttagtggaacctaattataaaatcatcccaaaatttctattctattctttacattttgttttaatcacttttgcttattttcccgatgtaatatcaaagggaaataaaaggatatacattattattttgccgatagtattggcttatgttgtgaaatatattgtggatgacttgtgttacgtgcatgcgatttgttctagcgccttgtct

SEQ ID NO: 58458 - DNA, 436 bp, Glycine max
  Clone ID: PAT_MRT3847_2379C.1
cctaaaatgggccattttggttcttaaaaaaaaaaacaaaaccctgcattgaaaactaaatttttgcgtattgttgggcgacaaccccaggagagcccccaaccgggctttaaataaggtccagaatttagttttagatgcttagcattttttcctaccaccaccaaatttttgtttaaagatgacctttttttcttaaaatgcccctgcattcccttttttgcttcctgatcttaaagaagcctgtttttgcccttgggaaatccaacccctcgggcggtttgaatttgaaaccttggatttcttgaccccaaaaccggggcccgtgtggtccggtttctttttttcaccacccaattttatttccacgggaaccctgaaagtgttttggaactgcaaaaaaggtttattggccccattccggaccggaaaacaa

SEQ ID NO: 58459 - DNA, 433 bp, Glycine max
  Clone ID: PAT_MRT3847_237C.1
gaactgggccccggcgacggctccatcttggtccatggacctatccgcctccccttgctgttccgtcgcaaatgatgcacactcggtgccagcccgctacgaccctcgacctgcttctgcatcattttccagaccagacctcgccagtctgattgcatgatcgtctctggcactctcaccaacaagagggctcccgctcttcgcaaggtgtatgaccaaatgcctgagacctagatggcttgtctcaatgtgaaaatgagctagtggatgaggatactaccattactcttactccgcaaatgaacgatgagacgggattgttcctgatgacatatataatccacgctgctctccaactgctgatgctctgctgtgtggactactccagctgctcatcatgatctatacgctgcaagacttcctccattggcgg

SEQ ID NO: 58460 - DNA, 569 bp, Glycine max
  Clone ID: PAT_MRT3847_23800C.1
cacaagtcatccacaatatatttcacaacataagccaatactatcggcaaaataataatgtatatccttttatttccctttgatattacatcgggaaaataagcaaaagtgattaaaacaaaatgtaaaggatagaatagaaattttgggatgattttataattaggttccactaacacccaaaccttcttgtttgggtttcgaaatcctacgggtgttatacgaaccgcactgtaaacacttgtgaccaaatatgtgaaaagatactgtgctggtagagttacaatcattgcatagaattgaaacctgtcaaatacccaaacaatagttacattgtatattaagagcagcagcacggttataaaccagaaacatttgagaataaataaattctgacaaatttcatcatacccccctctcccctcctaccaaaatgaataaataaaatggcataaaaataagagcctctctgaaacaagcattatcataacaaagtatatgactctccacctagaaagtatatgcagaaatcttggttctgcctccataagccacacgattactaccat

SEQ ID NO: 58461 - DNA, 378 bp, Glycine max
  Clone ID: PAT_MRT3847_23801C.1
atatatagatatattatcgtttaattaaaaggaagagtaaagcataaaaccaaaaaagggaaaaaagaaagtttgaaaaaaacccataaaaccaaaaggagcaaattaagcatcgagccaaaacccacgccaagacaaaaaggcttacaagaaggttaaagccaaaaaaaaaagagtactactcggaagggacatagggagaaacgagacaacttacagaaggctggtgccaggaacccaaaagtaatgatgaagaaatcaaaaggaggctaaaccaaaaaaaaaaagaacttgggagaaccgctggaggaagcaaaaacatcacgaagaggagcaaaatgaaaaatcatggtgggaaccctagccgacacaatcaga

SEQ ID NO: 58462 - DNA, 393 bp, Glycine max
  Clone ID: PAT_MRT3847_23802C.1
gcacattacatatgtcgtgctcatgctttaggattgatagcaataagcatcaattcaattcgtgtgaaaaaagattcaactttaaaagaagataagagatcaacttactccaaagagttgctcttcattcttactattcattttcttggaatctaataataaaattagtgacttattaccaccattaaatttcaagaaaataaatgataagaaagatgagtaattttaaaagaatactcttgaagtaagtttattcctcctcttaaaagaaatagtggtacctttttactatagtagtataaataacctacaaacactagtaggaaaaaaatagccgtattaacttgataattaattccacattcaaagcctttatctcaagcaataatttcc

SEQ ID NO: 58463 - DNA, 365 bp, Glycine max
  Clone ID: PAT_MRT3847_23803C.1
ggcaccttgatgaatggagcctgcaaccgagaagagagaggattttgggaagttgcagtacgggtaatttaatctaatcttgcaaaaacaccttctctcgcttcctttccatttacgactatctccttcaatgttgttattctgcgtgtattcctttgttccacgcttagatgcgagcactataagagacgatgcaaaattcgagcaccatgctgcaatcagatttttccatgtcgtcactgccacaacgacgccgcggtctttttctctcttacatttattcctattatgcaattgacgtctagcttctttttttcgtctctatcttcttcttctttttcctcgattaattttcgattgttttt

SEQ ID NO: 58464 - DNA, 374 bp, Glycine max
  Clone ID: PAT_MRT3847_23804C.1
ggaagaaaatgccttacatcacccaaccgaggagggggggaagaacatcaagttttttttaccttaaataaaacaacccccccagcaaataaggggtgaagaaaggaccacttgagaaaaacaaggcccaagatgatgtccagacgccgacccactgttcaactgaaaacactactttagcatgcattttctagccctgggacagcgagaagcccctgttcttacacagggagcttagggtcctgcccagtttgttggacttggacttagcacagcggcttctattcccggtggcacacgatagctccaccaccaccttttccggcctttgccagttggctctgcagcagctgctgctgctgctgctgaagcgg

SEQ ID NO: 58465 - DNA, 245 bp, Glycine max
  Clone ID: PAT_MRT3847_23805C.1
cgccaattgaaagggaatgatctctcaagattggaacgactgcatagggctgatttccctcccatagaacagattgaaaagtttcatggaatgcaaatgtggatgaatgctcgtgcttcaaatgatgaaatggatttactgttgagcattgatacgttgggttaacaaggagcacgtgaagctcttttaaacataattgtttatgatgataaacttgtgtaggctaacacacaagaattttttga

SEQ ID NO: 58466 - DNA, 428 bp, Glycine max
  Clone ID: PAT_MRT3847_23806C.1
gggggggcaatggattcatggaaaaaggcttttttacccaaaaggaaaacccccttggaaaaaaccccccaaaaaaatttccccggttttggttgggccaaaaacaaaacccaatcccttaatccccatccttttttttgggggggaaaaaaagggaaaatttacccctaaccttagtaccaggcccatgatggcaagcctctaaaccaagggggcttgaaaaaaatttggggggggggcttggggggaaaaatttgaccgggaaaaggaaaaggggaaaaacccaaggcggccccaaacagggggggttttatgaaaataaaaaggggcccctggggtttttaatcttgaaaaggaaaacaaccctgggggaaaaaaccttttgggaaaaaacaagcggaaagcattggggacttttttggcctggg

SEQ ID NO: 58467 - DNA, 186 bp, Glycine max
  Clone ID: PAT_MRT3847_23807C.1
cgatctcctgaaaatcagtaggctctgcatgatctgtaatggggggtctctttccttgtcgtttgttaatttaataatgaaatagtcatgacccttttgttagcatgctcttcctatctgaaaatttctacacctatttcaatagtcttaatgatttgtgaagtgtgttatattttaataaaatta

SEQ ID NO: 58468 - DNA, 474 bp, Glycine max
  unsure (1)..(474): unsure at all n locations
  Clone ID: PAT_MRT3847_23808C.1
ctcgagcctgagctttttctatccacgctcngagcactgtcgttgggggtagtcttaagcggaccgactgttcttcgtgggccacatcatccgaagccagcagtcgaacatgtattgactgtcgtagcacgcgttcttactgggccaaactaacttgacggcaactgaggtcttgtgcagactgtcccaaacagtctacagtcttttgattattcttcttgggaatctctcaagattttgaaattgctgggtatactcttatgccagctttttctggtccacaggctactgccagaacttctgaaaatgcggaatcctctgcatgatctggaatatgtgttactatcgcttgttcgcttgtttaatgcaatacaggaaattaggccatgaccctcttgttgagtatgctctgcctatttgaaaatttccacaccttttttaattgtcgtaatgatgtgtgaagtggtgttattt

SEQ ID NO: 58469 - DNA, 423 bp, Glycine max
  unsure (1)..(423): unsure at all n locations
  Clone ID: PAT_MRT3847_23809C.1
actgggccaatacgcacaccaagacaaagaaaaagaaggataaaaatggaggaagaaagaaattttcagtaacaataccaaaatccttaaattttggagggtaccatataaatgaactttctctagatcttaattatcataattaataaggttcgtctgagattttaaatctaattgaataacaaatagtcgccaataatatatacaccacaaaatataatgtgaaccttctcctcatccaacttaataacgttgccactcaaaaaattattagctagttaaagtataactacagaattatcatttatcttgtaatgatctaacaagaaccttatcttcattaatcttcacatcttgtaccttgtattgggtgcttgtcttcactaatcttcattgtctggactacgtanatgcatgaagtgc

SEQ ID NO: 58470 - DNA, 115 bp, Glycine max
  Clone ID: PAT_MRT3847_2380C.1
tgcgaattgggcacaaatcttagcataaaagaagatcattgcagctggtgattttaggttatttgaggatggagcatgtgagtggtggcaaggtcaaattaggaaggaaaatttg

SEQ ID NO: 58471 - DNA, 373 bp, Glycine max
  Clone ID: PAT_MRT3847_23810C.1
ctcgagccgattcggctcgaggtctgtctgtctctgactccattcccaccttcgcctgcgtcactcactcttcctttctttcacttccttttccttatcatatcattattctcttctttttcttttcttttcattcttcaacgcccacaacaccacaccactttctctgttctctccacatctccaacactcacatactctgaaaaaaaaaattaaaaaaaatataaaaaataaaaaaaagtttgtttttcttcaacaaaccatggagggacttccccatggttaccgtcccaacgttggcgtctgtctcatcaactccgatgatcagatttttgtggcttctaggttgaatgtcccaggagcatggcatatg

SEQ ID NO: 58472 - DNA, 634 bp, Glycine max
  Clone ID: PAT_MRT3847_23811C.1
caaaagattgtctgttggggtgctcggaattcccgggtcgacccacgcgtccgcgcgcgagaaggagagtggtgagggtggattgaagttggaagcggagaaagacgatggattggataactgtgctccgtctgtgagatacgctgttcgtaggcttattcgcggtgtttcttcgtccagagagtgtgcgcgacaaggttttgctttaggtttaactattttagctggcactgttcataacattaatgtcgcgtcatttctcaaacttgtagtcaatttgctggaagtaacttcatcaatgaagggtcaggaagcaaaagattgtctgttggggcgcttatttgcttatggtgctctggcaatatggataaaagcactccatacttaagagaatttatcagtgtacttatctctcttggaaataaaaagcggtacttgcaagagcctgccgtctcaataattttagacttggttgaaaagttacctgttgaagcattgatgaatcatgttcttgaagctcctgggctcaaggagtgggtttgaagctgctatagaagtaagaaatcctgatgccttgctccctgcttaaaaaggaagagaggagatttctattggatagctctgtatttgggaa

SEQ ID NO: 58473 - DNA, 322 bp, Glycine max
  Clone ID: PAT_MRT3847_23812C.1
aggacagctgttgtcttctttttttttcttccctttttgcgcggaataaaaaaggcagggggattggattagatttcacgcctttagttggggtcgtccaacggacaatcaaccattgcattgtttaacatcctataccatgtggactagaacgaaaaaaacaagaaccctgcgccaaataaatcactggatactctcgcctcggtagttagttcctccacgccacaattcaaaggggtaccgcacgggcctgaaccctgacccaccgtattcttgaccacaggctgccccacacccgggggggagggcagaaccaccggag

SEQ ID NO: 58474 - DNA, 410 bp, Glycine max
  Clone ID: PAT_MRT3847_23813C.1
ctcgagccgaactttactctcagacacgtttcagataaccatgaaccgagtaatgaagacaacatgaacatgataagaattaagaaaaccagcctcattcggtaatttgtagtggcaaaaagccttgatattgctcactatcccttctttattcagtcttcattatcacactcatcacgcactttctctaacatggcttcaaccgcttctgaggttagccaacaagtacaatccaataacagaacaagtttcacaagtgtgaaagcactaactaaatcaccagaactcactttcctcccaccctcatacacaaccaccaattcagatgatgaaatagtggcagacccagatgaagatgatccaattcccatcattgactattctctcttaattactggcacacttgatca

SEQ ID NO: 58475 - DNA, 129 bp, Glycine max
  unsure (1)..(129): unsure at all n locations
  Clone ID: PAT_MRT3847_23814C.1
tctttttatgatgggtaagtaggggattttaatcctgtaanttgttacttgcgccgtattattggatagatgccctggaaattgaacgattcctgcttggaacgatgccgaaccgtttcttgaataaaa

SEQ ID NO: 58476 - DNA, 458 bp, Glycine max
  Clone ID: PAT_MRT3847_23815C.1
gggcttcaagggaaacctgaccggatgaaaaacaacctaaatttacccttttaagggaaaaaattaaaggaaccttttaatccaggaaatccaattaccaaagttcctttcctggttaagttcaaaaaaaaaaacccaaaattgaaaataggacaaaaatatgtcaaaagggttttgggaaggccccacttggcactcaagggtgggaaaagcccgggatcttcaatggagggagcaggggcattggtgggggcacttccatggaaaccccctccgccttgggaaccacggccacggcccctaccaagggcggggttaaagaatgcttccccctcagcaggcttcaaaaactcggggaggcccaaaaacttcttggatttttcttccttttaaaaagccctttttggcttatttttataaaaacccagttaaaggaaaaggccaggaagggctttttt

SEQ ID NO: 58477 - DNA, 486 bp, Glycine max
  Clone ID: PAT_MRT3847_23816C.1
tttagagttcttgttctttcttaatcaagtatattcttcatcttgggagatcaaacccctgggttataaggagagtatccgtcatataggggttggcgttatggtgaacttcaagaacctcaccgccgaaattggagagaatatttctggacgagctcgagtaacgcgatcatgaatatgctgccttgtttggagaaagcgaatggcaacttcagtggccgtcctcaaacggactttgctggacgtgacgtccataagcaagcccatgattgacccccacaagattacgaactgggatcgaatatatttcgacaacctgaatatttggggaacgcctcactctgggacatttggtttcagtcaacaaattacctggaagcgaaagtgtggcagatgctcgacaatgttacctggtttggtccagcagcgggggatcactcagccttgattacgatggaatcgaatgaataaattctaaggtaggac

SEQ ID NO: 58478 - DNA, 221 bp, Glycine max
  Clone ID: PAT_MRT3847_23817C.1
gggatgggatgtcattgatgactgctgtggtgcctacctccttattcaactgtgcgctcgctcttgtccctttcactgtcacaagtggccggggccgctgccggtgttcatgttcctgacctgcaaatcttatgctcttcatgcatcctcagacttttatggagtggctaccatgtctagtcctccaatcattcatcctcgtcttcgtccacttccttctc

SEQ ID NO: 58479 - DNA, 709 bp, Glycine max
  unsure (1)..(709): unsure at all n locations
  Clone ID: PAT_MRT3847_23818C.1
cccacgcgtccgcccacgcgtccgtacggctgcgagaagacgacagaccggggtttcgctttttggttgcaaactgtagagccagaggagcgttcgagtgagcgagagaggttttcttctttccggttgttgtcgcggcggaaccctagctagtccggtggtgcgagaaagagtgtgtgagagagaaagacgatgagtgggaagggcggtggcagccacaacaatggcggcggcaaggcgctgtcggcgacgattccggcgtcatcgcggaagatggttcagagcttgaaggagattgtctccaatttccccgatcacgagatctacgccacgctcaaagactgtaacatggaccctaacgaagctgttagtcgtctcctctcacaagatccttttcatgaggtgaagagcaagcgagaaaagaaaaaagagattaaggaccctacagattccaggtctcgtgggagtgggacaaacaacacatctagtcgtggtggtggtagggctggcacagatcgttatggtggacgtgggtggtgccaaccaattcggcagcagtgattatggtctgcaggggaagcctgtatacaagaaggaaaatggggcacccacttttnggagggtccacatctttctgacctagtgtgctggggaaataatacgaacacgagactgccatcctacaggnatttttgtgggttctgaaaaa

SEQ ID NO: 58480 - DNA, 391 bp, Glycine max
  unsure (1)..(391): unsure at all n locations
  Clone ID: PAT_MRT3847_23819C.1
ctccattggtccttaaacactcaacaatcaacaacaagggcaaaccaattttttccccttggtttccggctttcaattggcggcggctccccttcaattccaaagagcaacctcaacaaaacgaagtgcagattcaaaaactcaatggcctcaaaccggataaccgtatagagtcagaaagagggctcattgagacatggaaccctaacaacaagccattccagtgtgccggtgttgccctctctcgctgcaccctcaaccgcaacgcccttcgtagaccttcctacaccaacggtccccaggaaatctacatccaacaaggtaangggtattttggcatgatatacccggggttgtcctagcacatttgaagagcctcaaacaactcaac

SEQ ID NO: 58481 - DNA, 753 bp, Glycine max
  unsure (1)..(753): unsure at all n locations
  Clone ID: PAT_MRT3847_2381C.1
ataactaaaggaatgacgtattcgttttttttttattgatttagttgtatagataaggcgtacactggaaatccacactagtttctcttaactatttagttattcaaatcaaatcctaaaacaaacatcatgaaaaaagaagttgcctgctagttattgtcaaacatcggcagattactcctacacattaattatattgggatgggagaccctttccaatctccaagacattccagaattgggtcaacaatctttgcttgacacatggctgtatatactttttcaaattcctcatcgggtgagagattcttttctccggtgagcaaccctatctctaactcctccctcacaaacttgtacagtggatatgacctacactcctttattctgtttggaattgctggattgccattctcataagctacccttgcattttcaacttcctttggcaagagagacttcaattcatcctcaaaagctcctatcttctcaaaaatcaacaagctcacattcttgtcattaatggcactgatgtgtgctttctcataaagtacttgctttannnnnnncatcnnnnggtacgtaacattnnnnnnatcatcaatgtnnnnaaatacgtactctctatcgacnacnnnaagcaaatctttctcacaaagtcgaaatgggttaatttcttctttgccttctgtaattaatgttttctgtgcaactctgcttacagtattcttganngtactcttgaaattttcc

SEQ ID NO: 58482 - DNA, 249 bp, Glycine max
  Clone ID: PAT_MRT3847_23820C.1
ctaaacaaaattccgtagtagaatcttggttataccatccctccaagaaagattctcaagaaagatggtataaccaagttactcaaaattaatatatgccacaacactaatattatagcttcatgtatccttattaatttaactgtgtagtcttaaaaaaaaaaaaaaaaaaaaaaaaaaaaaaaaaaaaaaaaaaaaaaaaaaaaaaaaaaaaaaaaaaaaaaaaaaaaaaaaaaaaaaaaaaaaaaa

SEQ ID NO: 58483 - DNA, 269 bp, Glycine max
  Clone ID: PAT_MRT3847_23821C.1
aaaaaaaaaaatatacccgtcctaaaacctaacagggaatcagagggggtaaaattttttacatgaagctttttttttgtgggggtttaatttaaaagaatgggaggggttttaaaaatccccaacccccatttcaaagcttttaatgaacaattaattttgtaatctacctagccaagatgagccccagccaaaaaaagcttggccaacttaaacaaatgaaagaaaagcccacccaaaaaagtgggaaccctgttgtgaaccaaagc

SEQ ID NO: 58484 - DNA, 246 bp, Glycine max
  unsure (1)..(246): unsure at all n locations
  Clone ID: PAT_MRT3847_23822C.1
tattgcanggtggtttntctcatgtcnggacaatntaaganaaagagnngacatgaaacatataaggtggngtggcancntcagaganttgtctagaanatntggntgtagnantggnggagatagnttaaagaagtgcacaggctagagatncagaacncanccacctctcaatatncaagttgtatattggcattggctagttggggcatgcatattgctgtntacttagctntactctatgga

SEQ ID NO: 58485 - DNA, 2576 bp, Glycine max
  Clone ID: PAT_MRT3847_23823C.1
caaactttttcggttgcgtgttttttcagtggtttttgaggaggaatcgctacttctcattcgggatagatcctgacctcgcattgcatgcctggaagcaaacatgatgttaagaatttaacatgacttaaaagagatgaggactgggaggcgccggtatttcctgttgctgtttgcgagcctgagccatggacttaggagtcactagtgagaggcttatttgtgagcatgattattggaattacattcagcataataatcacaaagctcatcctcacactggaatggttcctaactgtaatgtctcggccgcacttctagcctttgtgtttatccgaacctggaccaaactgcttcacaaggccggctttgtagccaagccatttaatcgccaggagaacaccatcatacagacatgtgcagttacgtactatagcattgctcgtccaggaggatttgcttcttatctgttgggattaaacaggacaacttatgagttgacaggagtggaaaacgagggtaacaacccaggtgctattaaagaacctggatttggttggatgactggcttcctttttgtggtttgttttgttggtctctttgtcttgattccactcagaaagatcatgatagttgacctcaaattaacttatccaagtggcttggcaacagcggttctcatcaatggtttccatacacagggtgacaaaatggccaagaagcaagtacgaggcttcacgaagtatttttgtaccagtttcttgtggggtttatttaagtggttcttctcagggatagaggactgtggattcgaacagttccctaccttcggattgcaagcttggaagcaaacattctacttcgattttagtatgacttttgtgggagcagggatgatttgctcccatcttgtgaactgttctttgctccttggagctgtgctctcttttggggtcatgtatccgctcattgatcggcttaaaggagactggttccctgacaatttagaagaaactaacatgaagggcttatacggttacaaggtttttgtttccattgctcttatcctgggtgatggcatatacaatttcaccaagattctaatttctacagtcctcaatgttaatgaaagaatgaggagcaagaataataaaaatgtagctgctgatcggcacgagaatcctaccgaggaccttaaacaaactgatgaatttctaagggagaccattcccctgcggattggagtcattggatacgttgttttcacaatgatttccataattataatcccacaaatgtttcctcagctgaagtggttctacgtggtggtagcttatatatttgctccatccctggcattctgtaacgctttcggaacgggcctcaccgacatgaacatggcacacaattacggcaaagtggcactctttgttatagcagctatgagcgggagagacaacggggtggtggcaggactcgtaggttgtggtctggttaaatctgtggtctccgtggcttgcactctgatgctcgatttcaaaactgcgtattacacctgcacttctcctaaagcaatgttcatatgccaattagtgggcactgcgttgggatgtgtaatagctcccctcagcttctttctgttctacaaggcatttgatgtgggaaacccgcatggggaattcaaagctccatatgcgttaatttacagaaacatggcaatcatcggggtccaaggtttctcagcattgccacagcattgtttgcagctatgctttgggttctttgcttttgccataggagtaaacatgataagagattttgcaccccaaaagattgggaaatggatgccattaccaatggtcatggccgtaccgtttctggttggagcatactttgcaatcgatatgttcataggtactgtggttgtgtttgcttggcagaagcttgactccaagaaggcagagttgatggttccagcagctgcctctggactaatttgtggggaaggactatggactctaccagctgcgattctagctcttgcaagaattaaacctcctatctgcatgaaattcgttcctacctagagcttcacccacaatagagcaaacaattctataggaattattagttagtgcacccttcccacccacattggagcacatcaaacattatccaaatgctttacagaagattcagtgtcaccccatacaatttgcaacataaaatttgacaaaaataacgtatgattttgaagttgctcttgcaggtacccctcccaccccaaaaaaaaaaaaaaataataatgaaagccaatcgagcagaggattaaacaacaaaaaataggcttgaacctcgagaaattcatgcaattgcaagtgtagtggaaaggcaccaacatacattgattcaaatttcagttcccaaaattctgcatattagagtatatgtatgaatgttaaaacaattttgtaagggctgctagcttttgctaacagcacctccctctttgctattaacagctatactctcttagttcagagttctataaatatctctttgtaactaacttgtgt

SEQ ID NO: 58486 - DNA, 1689 bp, Glycine max
  Clone ID: PAT_MRT3847_23824C.1
cctgccgcagatcatgatagttgacctcaaattaacttatccaagtggcttggcaacagcggttctcatcaatggtttccatacacagggtgacaaaatggccaagtacagtatacttctcttttattcatcagctttcatttgttgcaatttgtagatgcaagagttatatattatgatatatttttatcaacaaaaagactaattaataataatgtttttataatattgcaggaagcaagtacgaggcttcacgaagtatttttgtaccagtttcttgtggggtttatttaagtggttcttctcagggatagaggactgtggattcgaacagttccctaccttcggattgcaagcttggaagcaaacgtatgattttgagcatattaattaattgcttcaggaatggaggcttccatccaaactattactgatcttagtttttgaatttactttgcagattctacttcgattttagtatgacttttgtgggagcagggatgatttgctcccatcttgtgaactgttctttgctccttggagctgtgctctcttttggggtcatgtatccgctcattgatcggcttaaaggagactggttccctgacaatttagaagaaactaacatgaagggcttatacgggtacaaaggtttttgtttccattgctctcatcctcggtgatggcttatacaactttgtcaagattttagtttcctcaatccttagcgtacatgaaaaaattaagaaccgtaaaaatgcttcaagtgcggatcaacagagagataacgctgaagagcttaaacaaaaagaagttttcctgagggacaacatttcgatgtggatcggaaccggcggatacatagttttgtcggtgatttccataattgtaatccctttaatgtttcctcagctgaagtggttctacgtggtggtagcttatatatttgccccgtccctggcattctgcaatgctttcggagcgggtctcactgacataaacatggcatataattacgggaaggttgcactctttacgctggcagctgttacaggaaaagaaaatggtgtggtggctggacttgtgggttgtggtctcattaaatccgtgatctcagtgtcttgcattctgatgcaagatttcaaaactgcacattacacacgtacctctcctagagcaatgttcatatgccaagtaattggcattgcaatgggttgtgtgacagctcctctcagcttcttcctatactacaaggcatttgatgtgggaaacccgcatggagaattcaaagctccatatgcgttaatttatagaaacatggcaatcatcggggtccaaggtttctcagcattgccacagcattgtttgcagctatgctttgggttctttgcttttgccataggagtaaacatgataagagattttgcaccccaaaagattgggaaatggatgccattaccaatggtcatggccgtaccgtttctggttggagcatactttgcaatcgatatgttcataggtactgtggttgtgtttgcttggcagaagcttgactccaagaaggcagagttgatggttccagcagctgcctctggactaatttgtggggaaggactatggactctaccagctgcgattctagctcttgcaagattaaacctcctatctgcatgaaattcgttcctacct

SEQ ID NO: 58487 - DNA, 800 bp, Glycine max
  unsure (1)..(800): unsure at all n locations
  Clone ID: PAT_MRT3847_23825C.1
ccagcgtaaagagtgcaaccttcccataattatatgccatgtttatgtcagtgagacctgctccgaaagcattgcagaatgccagagatggagcaaatatataagctaccaccacgtagtaccatttcagctgaggaaacatgcgtggaattataattatggaaatcattgtgaaaacaacgtatccaatgactccaatccgcaggggaatggtctcccttagaaattcatcagtttgtttaaggtcctcggtaggattctcgtgccgatcagcagctactgttgcagtaagaaaacgacctcaacattagatatatatttttattattgaaaaataaaaaagaagcaaacttgagtgtttggatgtgactgctcttaccatttttattattcttgctcctcattctttcattaacattgaggactgtagaaattagaatcttggtgaaattgtatatgccatcacccaggataagagcaatggaaacaaaaaccttgtaaccgtataagcccttcatgttagtttcttctaaattgtcagggaaccagtctcctttaagccgatcaatgagcggatacatgaccccaaaagagagcacagctccaaggagcaaagaacagttcacaagatgggagcaaatcatccctgctccacanaagtcatactaaaatcgaagtagaatctgcaaagtaaattcaaaaactaagatcagtaatagtttggatggaaagctncattnctgnaagcattaataatatgctcanatcatacgtttgcttccaagcttgcatccgaagta

SEQ ID NO: 58488 - DNA, 1233 bp, Glycine max
  Clone ID: PAT_MRT3847_23826C.1
cggtccggaattcccgggtacgacccacgcgtccgggttcttgaggaagaagaaaaaaaggtgaaatatagagtgaagaagaagaaatagagggttttggtgtttgaatcgtgaaaatgttcagaaaccagtacgacacggacgtgacgacatggagcccggcggggaggctgttccaggtggagtacgcgatggaggcggtgaagcagggctcggcggcgatagggctccgatccaagacccacgtggtcctcgcatgcgtcaacaaggctaactccgaactctcatcgcaccagaagaagatcttcaaggtcgacaaccacatcggcgtcgccatcgccggcctcaccgccgacggccgcgtcctctcccgctacatgcgatccgagtgcatcaactataactacacctacgagtcaccgctccccgtagggagactcgtcgttcagctcgcggataaggctcaggtttgcacccagcggtcatggaaacgtccttatggagttggactcctggtagctggattagatgaatcaggagctcacctctattacaactgtcccagtggaaactattttgaatatcaggcttttgctattgggtctcgctctcaagctgcaaagacatatttggaacgcaggtttgagaattttgtgggctcttcacgagaagatctgatcaaagatgcacttattgcaactagggagtccttgcaaggtgaaaaactcaggagttctgtgtgcacaattgctgtggttggtgttggtgagccattccacattttggatcaggaaactgttcaacagttgattgatacttttgagattgtgagggaggaagaagctgctccagctgaagaagaagctcagccagcagccggacaggatgctcccacagatccaggtgctgctgctggtgctgcagatcaaggtggtggtggtgctgctgctgtagaccaaggtggttctcctatggacatttgataatttaaaattaagtactagaggtgttgaataccaatatttaaagacgagtaggtttcatgtgtcatgggacaagatatttctttgatggaatttttttccccttattcctgtttgttttttcaattcatccatgcctgctcattgtaaacgattttatagctgtttgatgaacttgaatgcatgatttacaaaaattattgaaattcaggcctgaaaaaaaaaaaaaaaaaaaaaaaaaaaacaaaaa

SEQ ID NO: 58489 - DNA, 309 bp, Glycine max
  Clone ID: PAT_MRT3847_23827C.1
caattcccaattcgacctacgcgtcacgactctgacaattcttccatcaaattttttgtaaaatttccaaatctattattagtactatgatctagtacaccttttaccccaatcaaaaccaacacaacgccacacaaaaaaaacactacatagtaaaaaaaacactctcacatacactgtacccctgtaccacatcattattgcttaatattttctttttaccttatcactatacccgcttaccctgtttactctgttataattactcttgctattgggtgcccttcgttttcatttttgagaagcttt

SEQ ID NO: 58490 - DNA, 1219 bp, Glycine max
  Clone ID: PAT_MRT3847_23828C.1
ggagagagagttcttgaggaagaagaaaaggaggctaaataaagagagtgaagaagaagagggggtttgggttttggtgtttgttgttgaatcgtgaaaatgttcagaaaccagtacgacacggacgtgaccacatggagccctgcggggaggctgttccaggtggagtacgctatggaggcggtgaagcagggctcggcggcgatagggctccgatcgaagacccacgtggtcctcgcatgcgtcaacaaggccaactccgaactctcctcgcaccagaagaagatcttcaaggtcgacaatcacatcggcgtcgccatcgctggcctcaccgccgatggccgcgtcctctcccgctacatgagatccgaatgcatcaactataattacacctacgagtcgccgctccccgtcggcagactagtcgttcagctcgccgataaggctcaggtttgcacacagcggtcttggaaacgtccttatggggttggactcctggtagctggattagatgaatcaggagctcacctctattacaactgtcccagtggaaactattttgaatatcaggcttttgctattgggtctcgctctcaagctgctaagacatatttggaacgcaggtttgagaatttcgtgggttcttcgagagaagatctgatcaaagatgcacttattgcaactagggagtccttgcaaggtgaaaaactcaggagttctgtgtgcacaattgctgtggttggagttggtgagcctttccacattttggatccagaaactgttcaacagttgattgatacttttgagattgtgagggaggaagaagccgctccagccgaagaagaagctcagccagcagccgaacaggatgctcccacagatcagggtgctgctgctgctgatcaaggtgctgctgctgctgtagaccaaggtggttctcctatggacatctaataatttaaaattaagtactagaggtgttgaataccgatatttaaagatgagtaggtttcatgtgtcatgggacaagatatctcttcaatggattttctttccttaaatctgtttgtttctgcaattcatccatgcctgatcattgtaaacgattttatagctgcttgatgaacttgaattcgtgatttacaatatttaattgaaattcaggctgaaaaaaatgttggacactctttagagactaatggttatacactcatagtgg

SEQ ID NO: 58491 - DNA, 1259 bp, Glycine max
  Clone ID: PAT_MRT3847_23829C.1
tttttgtgcacctagcatcccccttacttgtccaacactgaaggcatagggagagagagagttctcgaggaagaagaaaaagaggtgaaatatagagagtgaagaagaagaaatagagggttttggtgtttggtgtttgaatcgtgaaaatgttcagaaaccagtatgacacggacgtgacgacatggagcccggcggggaggctgttccaggtggagtacgcgatggaggcggtgaagcagggctcggctgcgatagggctccgatccaagacccacgtggtcctcgcatgcgtcaacaaggctaactccgaactttcatcgcaccagaagaagatcttcaaggtcgacaaccacatcggcgtcgccatcgccggcctcaccgccgacggccgcgtcctctcccgctacatgcgatccgagtgcatcaactataactacacctacgagtcaccgctccccgtagggagactcgtcgttcagctcgccgataaggctcaggtttgcacccagcggtcatggaaacggccttatggagttggactcctggtagctggattagatgaatcgggagctcacctctattacaactgtcccagtggaaactattttgaatatcaggcttttgctattgggtctcgctctcaagctgcaaagacatatttggaacgcaggtttgagaattttgtgggctcttcacgagaagatctgatcaaagatgcacttattgcaactagggagtccttgcaaggtgaaaaactcaggagttctgtgtgcacaattgctgtggttggtgttggtgagccattccacattttggatcaggaaactgttcaacagttgattgatacttttgagattgtgaaggaggaagaagctgctccagctgaagaagaagctcagccagcagccgaacaggatgctccaacagatccaggtgctgctgctgcagatcaaggtggtggtgctgctgctgtagaccaaggtggttctcctatggacatctgataatttaaaattaagcactagaggtgttgaataccaatatctaaagacgagtaggtttcatgtgccatgggacaagatatttctttgatggattttttttcttcttaatcctgtttgtttttgcaattcatccatgtctgatcattgtacacgattttatagctgtttgatgaacttgaatgcatgatttacaacaattaattgaaattcaggctgaaaaaaaaaaaaaaaaaactcgagactagttctctc

SEQ ID NO: 58492 - DNA, 435 bp, Glycine max
  unsure (1)..(435): unsure at all n locations
  Clone ID: PAT_MRT3847_2382C.1
aacctcttgggctgatttatgtgcttgcatggtcgtgagaagatgatagaaggggattgcgtgtcagcctcgagcacctcgactgtctttcgagagagtctgctgtggtggccgtagaagaagaccgtaagacgaagcctaatactgtgaactttattatcggacgttagaagaagtctgagactgatgatgactcgaaatcgtgagtaccccgggataagaggactctataggaggctactggagacgtatctggcgaggaacccaagggtcacgctcctaaaaccattggaggccgcgataaataaggacccttaacgaagtagggagcgtcgatcttcggctgcgccagatccccgtcctataggggaatcttccgtccttgcggacacggaaggtgcaacggagagtgcangagaaagctcgcctgcgggc

SEQ ID NO: 58493 - DNA, 378 bp, Glycine max
  Clone ID: PAT_MRT3847_23830C.1
tacaccggttagcaactgaggcgggatttgaactgaatttcttgtcccattttggtgggaaggtctttcccaatgagaaaactgaggacctagagtttttgattggtttggcccataagaaattattgaaagctttctgtgaagaaagcatcacttcaaagaagcaaaattttcagcaaaagatagcttggccacattgggactttttacatatcttggaagaaggactagaatatttttgtcagcaatgggcattaaggatcttgacggagtaattatgaacttcctcaggttgatctctttgcttgtttgttacattttaaccattccaattttcaagataccgatcctgaagattcaatgctttgattttagtta

SEQ ID NO: 58494 - DNA, 306 bp, Glycine max
  Clone ID: PAT_MRT3847_23831C.1
aatatatatcgattgcaaaactctagagaagacaaaaaacacacacacgcgcgacacgcggcgacacgctcttttatatccgtgccccctagcccattcactgtgccccatggtcctccgctttgtgtctgaaaacccacttgcggcccctcgttttacccttgcggaacatatccctccctgaatctaccgcactagcccggagggacccacaccgcgcgttttccaacagaggtgcacacacaatggcgcgtgtggcacgccctctatatccgcccattaccctcatagccagaggggcccccc

SEQ ID NO: 58495 - DNA, 393 bp, Glycine max
  Clone ID: PAT_MRT3847_23832C.1
agaatgcagtgaaagaagaattcttcttctacacaacaaaagaacacactccatgtcaaacaaaccatatcaaagagaaagtgcttgggtgacttacactttctgaaaattgtgggctgggaattcctgctgccaaggatctaaacagaggggttacttgaagaggggagctgaactccaatcttgatgaggcagaaacaatcccatcattgtttatctgttcctcaaaacacggtttataatttgtgaatcaagttccaaaactaaagttcaattcaaagacaactacccaaactgctaaacttgggattgcaaacatgatgctggtctggcaagttgtttgagttatgagagttttgagccaagactgcaagtggtgctcttggttgctga

SEQ ID NO: 58496 - DNA, 395 bp, Glycine max
  unsure (1)..(395): unsure at all n locations
  Clone ID: PAT_MRT3847_23833C.1
acgaggttcttcttcgtcgttatcttcttcttttgttgtttgtgtgtttgttttttctctcacctgaaaatgtcttgctgcagtggtaactgtggttgcagaaccacctgcaantacagcaacagctacagaagctacaagatatacccanacttaanctacaccaagtcaaccaccaccaagaccttaatcatgggaatggcaccagttaaagctcaattcaagagtactaaaatgggtgttcccactaagaacaatagctacaaatataaaactaactacacctacaacccctacacttacaagtaaagtattaaagaactaaaacttcaagcagaaataacccttanaaataataataaaaactatatataatttcaaaacttcaaaattat

SEQ ID NO: 58497 - DNA, 2178 bp, Glycine max
  Clone ID: PAT_MRT3847_23834C.1
gcacaatcatattggtacatacatgtcatgtatttataaaatccatgttacattaatttgttgatacatattgaattttacattttattatatcttcaactgcaaacattgcctcgccagggaataacaagacgattgaagaaagcaagtaaggaaattgaccaattcttggagcaaattatccaagaccacgaacataatcacgaccacctgaacggctgcgagaagacgacagaagggggtatcaagtcgatccacaataattcagaaatgttactgcaaacattagctatccctacaatactccttgtgatattcatatgggtggtacaaccaaagcaacgtcatgggaagattgcaccaggtcccaaggcgttgccaattattggtaacctccacatgctagggaaactcccgcaccgcacccttcaaacctttgcaagaaaatatggacccataatgtccttgaagctagggcaagtccaagccatagtggtttcctcccctgaaaccgctgaactattcctcaagacccatgacactgtttttgcaagcaggccaaagattcaagcctctgaatatctctctcatggcaccaagggcttggtgttttccgagtatagcgcctactggcgcaaagtgaggaaagtgtgcacccttcaacttctcagtgcttcaaaagttgacatgtttgctcctttgaggagacaagaattgggagtgttagtgaagtcactgagaaattcagcggcatcacgtgaagttgtggacctcagtgaggtgttgggggagcttatggagaacatagtgtataaaatggtattggggcgtgctagggatcatagattcgaattgaaaggacttgttcaccaggtgatggacttggttggagctttcaatcttgcagctcacatgccttactgcttcaattgggaacttccattaggcatgtccccagatgacttggacatgactgaaaaatttggcctcacaattccaagaagtaatcacttgctagctgtgccaatatgataattagaaagtgcaaaaagctccacacaataacaaggactttgtggacatattgctatcacttatgaatcaacccatcgatcttcagggccatcaaaatgtcattgatagaactaacatcaaggctattatattagatatgattatggcggcatttgacacgtcatccacaacggttgagtgggccatgtcagaactcttgaggcatcaaagtgtgatgaagagacttcaagatgagctagaaaatgtagtggggatgaacagacacgtggaggaaattgacttagaaaaactggcttacttgaatatggtggtgaaggagacgctacgattacacccggttgcaccgttgctcgtacctcgtgagagtcgagaagatgttactattgatggttatttcataaagaaaaaatcaaggatcatagtaaatgcatgggcaatagggagagatcctaaagtttggcataatcctttgatgtttgatccaaagagatttgagaattgcaatgttgacattcgtggaagtgactttcgagttataccatttggttccggtcgaagaggttgccccgggattcatatgggtctaactactgttaagcttgttctagctcaattggtgcattgttttaattgggtgcttccattggacatgtctcctgatgagttagacatgaatgagatatttggactcacaacgccaagaagtaagcatttgctagctacaccagtttatcgactagttgattaagttaagagatcgaggttaataatgcgcagtaaggtttatttacatatatttgtagtttgtttaaatttcaatgagtcatgtgaaattaaaattaacaatttttctaaaagtttttaatcaaatgcttttatctaatttacctttgaatgatacctctacaagctaagttttgaagagaaaaaacttaaaattaaatgtaaaaaatgatacttgtattgttaaaatagattattgttgcttaaaaaaaaaactggtccctgccttatagcttctttgtagcaattggatcaaacccagtgcactgattgcaatggtgtcacttggtacacaacaaaactgtaatattaaaaggttgaccagtacttctacttatttttcaactcatttctatgcgt

SEQ ID NO: 58498 - DNA, 259 bp, Glycine max
  Clone ID: PAT_MRT3847_23835C.1
aacactcatagcgcagagcacatagcatagctcatccttgagttaaaaaatggcagcagcttcttccatggctctctcatccccatccttggctggcaaggccgtcaagctgggcccatcagtcccagaagtgggaacggtgacacttaggaagaacgtcaccaatcatgtctcctcagggagcccatggtactgcgcagaccgcatcaagtacttgggctcattctctggcgagcccccgtcctacataagcggtgag

SEQ ID NO: 58499 - DNA, 245 bp, Glycine max
  Clone ID: PAT_MRT3847_23836C.1
gaaattccactcataatcaatgctcaaattttaggttaaaatatgaatcatggattcctgatttagctttccagcaggtgagcttcatgatctatcttatccttttgttatatatgcacatggtgaagggatagagaaagagattgagggtgttgtttttcgaggagccgtacttatttcttggttttttacaacgcactcagaatttagtatatcaaaaaaaaaaaaaaaaataaaaaaaaaaa

SEQ ID NO: 58500 - DNA, 588 bp, Glycine max
  Clone ID: PAT_MRT3847_23837C.1
aaaaaaaaaaaggaaaacctctggttttttaaaggcccccggcccccccccaaaaagggggggcataacccaggtttaaaaaaaactgggaccataacccaatttggggggaaaaaaaaggggccccccccttaattcattcaaaaaaaaatttccagccccccccaaaaaatttcccctgggaaaaaaaaaaaaaaaaaaaaaaaaaaaaacccaattcccttttttaacccccaggttaaaaaaacgggggttttaaattaaaaaccccccccccaaaaaaaaggggggggggaaaaagggggggcccccccttggtttccccggggaaaaacccccccccccaatttttaaaaaaaaaaaaccccccccccccccccccccccttggaggggaaaaaaaggaaaggggggggccccacccagggccaaaaccaagaggggtccccccggccacaaaacaggggggtaaggctttttttttggacctttgggacaatttttgggaaggaggcaagtttgggccttgaaaaaattgggaaaagctgacaaccccgggcgcctaccaaaaaagggggaaaggagggcc

SEQ ID NO: 58501 - DNA, 413 bp, Glycine max
  Clone ID: PAT_MRT3847_23838C.1
acaacaacaaaggtttttcccattgggggaaaacattttaagggatcaaacaagggcttttaaaatggttaaatcccaaagtttcaaaatttttatttacccaaaaatcccccttggggattccccccatttttttggggcccccttttttttttttaacgaaactaaaagtcttggaattttttattcccctaattaaacttggagtttccccttttttaccaagatttggcccagatttgcataacttataaaattttttgaaaacgggtttttgcccaatttttggggaacttgaaaaattttggggggatgccgtctccggtcaaaaaaatccccccccttgaaaaaaagggcctaaagaatttcgttccatgaatcaggaaccccaggtgggccccaaggaacacagg

SEQ ID NO: 58502 - DNA, 378 bp, Glycine max
  Clone ID: PAT_MRT3847_23839C.1
ttttgcctaaagaggcctccccaatcgcttaaggcagtctctgcatacactttgcggtttaaaagtgtaatgtccagagaaatagagaaaattgatggtagagcccttgcacagacctcgggggacaaatatcaaaataacatcgttatggatgtccacacatacgatgggagctctcctttacagcatcaactttatggcaatggaaagattggggttgatgcgcctccagcagggagacaaaaacaccttcttgactaacaggaaagtcatggtgcacacattttggcttctggacaggctctcaacaaggctgtaatacctaggaagatttgttacaaacttctgaaacgcccggctggatgcacttgggttgca

SEQ ID NO: 58503 - DNA, 550 bp, Glycine max
  Clone ID: PAT_MRT3847_2383C.1
cggacgcttgggccccccacatctatgcagcgccttcaatgtataaaacatgacttagataacaaagcacgctggcacttgtgaggagaatagcgggacccgttatggggccggtactgctgacagcagagcaagaagactgaagacggtcgatacagggaatgtctctgtggattttgtagaatgtttgctgtgtagaggaaggctgaccgaatatggtgatgcactgtctgagttatagtgtaagcgggctgtgctaatactttgaataccgcaggtgctgagacggatccgccgccttcaagaagatgagggaccaaactgaatagttgatcttcgcgtcgaggataacaactactattgaacctttggtgagattcctaagatgatttcactggcctgcattgcatgtattcaatgggcactcgttaaagcttgagcttgagatgactgagactattgtactgttgggcctctgtgagcaagactgatcatgcttattagctagattctatcgttgtctgaatgagcaaaataggtagtatgtttt

SEQ ID NO: 58504 - DNA, 309 bp, Glycine max
  Clone ID: PAT_MRT3847_23840C.1
ggctcgagcttttctttatgggtcgttatccatttgtaccctttccttaaaggtctaatgggtgggcagaacagaacaccaactcttattgtcatatggtctgtgctcttggcttctatcttttccttggtttgggtcagagttgacccttttgtgttgaaaacaaaggggcctgatgtcaagcaatgtggaatcagctgctgaatctacatctcatttctttactactatgaagcgtgaaacaaaaacctaggtgcagagatgaaaaatagcagagcaaaatttttgcagatgaaaaatataaaaata

SEQ ID NO: 58505 - DNA, 204 bp, Glycine max
  Clone ID: PAT_MRT3847_23841C.1
ctcgagcagacacggcacgggctcgagacgaatcgggccaagtcgaattcacgcacatcatcgcacgtaagacgcacacagctcatagaagttctcggctccgtccgagatgtgtcgtcgcgtatcacacacacttggcgcacggatgaggttgtgatgctgtgaatcacgcgtactgtgcctaatatggcggttaagaagcta

SEQ ID NO: 58506 - DNA, 1169 bp, Glycine max
  Clone ID: PAT_MRT3847_23842C.1
cccacgcgtccaattcggctcgagcaactactactactataggtacttactactttgcctagctcctctttctctctcttcccttttgcactgaacttcactctctcttctatatcaagggttgatcacataacctcaatatatttctaataataattgatatagtttgagttattgtttcgagacacacagaaagagagagagagagagaatgggtagagggagagttgagttgaagaggatagagaacaaaatcaaccgccaagtaactttctcaaaaagaaggaacggtttgctcaagaaagcttatgaactctcagttctctgtgatgctgaggttgccctcatcattttctcaagccgtggaaagctctatgaatttggaagtgttgggactaccaatactattgagcgataccaacgtagctcttttactcctcaagacgaacacgttgaatgtgaaactcagagctggtaccaagaagtttcaaagctaaaggcaaagtatgagtctcttcaaaggacccagaggcatttgcttggggaagatcttggaccattgaacataaaggagctgcagaatattgagaaacagcttgaaggggctttagcacaagcaagacaaaggaagacacaaatcatgattgaacaaatggaagagcttcgcagaagggagcgccatcttggagacatgaataagcaacttagactcaagcttgaagcagagggatttaatcttaaagctacggaaagcttgttgagctttacttcagctgctggaaacagtggctttcactttcagcagcctcctcaaaccaatcctattgattaccagcagccagaaccctttttgcaaatagggtaccatcaatatgttcaatctgaggcatctaatgttccaaagagcatggcttgtgagactaacttcatgcagggatggatcctttgatcaatcttattaattgaattaagtatatgatgatttaccttattgtctatatcctttttagattttttgtgttttggctgttgttaaatgtacctttgtcaccagaaaagttgcaaacttgtttagctctttctgtaattggatacaagtactacagacaatggttttactatatgttaaagcaatgctattgtttttaactttgatgctttgaacctat

SEQ ID NO: 58507 - DNA, 498 bp, Glycine max
  Clone ID: PAT_MRT3847_23843C.1
tacggctggacgacagaaggggatagcaaagaaacataacaatttatatatataaatagtgtattttgctttagatattttgagtaacatggcatccctcaaggctgacaaacccgttggcactcaactttttgggcagggtaaaaaggaagctgctcccaaagctagtgatggtgcatcatccaaatccaagggttcagcttccaaatctgctaccaagaaagttccagtacagaagccccaagaatccaagaaaaagggaaaaggaggcaaatcatctacaaagcactagccagaaagccttattaatttactgaaggaaagtgtggtttaattgtaagaataaaaagccacacaaatattggatacaataaaaattgtaccttgttttcctttgcagtcaaggtatcttggcttcctatgtgatcagcttgctctaggcttgatatatataatcaaaataatatttttgcattttaaaaaaaaaaaaaaaaaaga

SEQ ID NO: 58508 - DNA, 578 bp, Glycine max
  unsure (1)..(578): unsure at all n locations
  Clone ID: PAT_MRT3847_23844C.1
cccgcgtccgcctcaagccaaatccctttgttccatgnagagtattgatgaccaagttttctgtcttgtagaactcctgtgagcaaacagaagttaaaggtccatgtgctggctggtgaggatcggtcaaaggtggagggatttttaagtagacggggatctgagctagcattgaggcatctatgtgagaagtttggtgtgtcattatttgataagcttcctaagctgtgggattgccttactgaagtgcttaagcccagctcctctgaatctctacttgtcactaatgaaaagtcagctactctgtctattgagtctgttagcgatcctcaggccttgattaacaatatccaggtggtgcgttctgttgctcccatcttaaatgaggagttgaagccaaaactgttgacacttctcccatgcatttttaaatgtattcagcattctcatgttgcagttagattagctgcttcacgctgcatcacttccatggcacagtcaatgactgtggaaagttatggggagctgtgggtgaaaatgctatccctatgttggaagatgcatcatcagtttatgct

SEQ ID NO: 58509 - DNA, 192 bp, Glycine max
  Clone ID: PAT_MRT3847_23845C.1
cccacgcttccgtccaagcaccattacgccacctgccttacgcaatttacgggtccatctgtggtccaattcgagttcttcagcgacttcttcggatgaaacatccacttactgatgccagagatctcaagaagaagagcaattgaaatgactacgatcatattctgcataatgagcttatagcatagcatg

SEQ ID NO: 58510 - DNA, 305 bp, Glycine max
  Clone ID: PAT_MRT3847_23846C.1
acgcccctaaagaatagaatatgatgtaaaagtacaaataaatacagaggattttagacataaaatactctggtttcaccatgcatacttggcttactggaaaatagaaaggattacatgattggttcatagcaaccttattggccgctcgaccacgtgtgacctgtcttatcagtgagccaggaattgagtttcatatcatgcgttgaagaaaattaagggtttgacctatccacagggaagaagggtatgttataccctgaatcaacaccttgagacggatgttgagccaagcatcattctgt

SEQ ID NO: 58511 - DNA, 461 bp, Glycine max
  Clone ID: PAT_MRT3847_23847C.1
gttttgcaagaatcgcctttggtggaaaaaagaaacccgtgcgacataactggccccccctatttacagaacttgccacttttttttcacaattacattccgccgccaaaggccttatttggcaccaaacatgatttttccccaatcttggaaaacggcgcttgtcccacctctctgtttaacacacctttgcctcttcttcccccttttaagactataactcttacaacagcgatgaccaacctctcctgggggacccctagaggatgtcctcttttcccctccggtgtgctgcgcccaccatagagcacacggcctcaagcctgaaaaaccaactgcgaaacatcccgaccaacttcgctttcgaggaggacgtgatctccgggccccccacgagcaaccatgccttgaaccccaccatggcgcggagcctcttccccccgatccacacggacctgcgc

SEQ ID NO: 58512 - DNA, 672 bp, Glycine max
  Clone ID: PAT_MRT3847_23848C.1
ttgggagaaacttcgaccctcatccagaaaacacctgcttctggcgtcttaaaaatacgtcacactccttctcaaccctaaaatcagtgttctttgtttttttgcagaaaagattaggagatggcgaagcgcttgattccctgcttcaatcgcattctcatcgagaaaatcgtccctccctccaaaaccagcgccggcattctactcccggagaagacctcccagcttaattccggtaaggtgatagcggttggacctggatcacgtgacaaggcggggaacttgattccggtgtctgtgaaggaaggtgatcacgtgctcttgccggagtacggtggcacgcagatcaagctcgatgacaaagagttccatttgtttagggatgaggacattttgggtattctgcatgattgatgttgtgaatgtgatgcgtcctacaacatgcaaattgtgattgagttggaaaataatttgtcttagtttatgaatgcaacttgttacaaacatttgagggggacttgtttttaagaatttatatcctgtttttgtattctgaatatggcaatgggaaccgtgcttcttactttgctccgcagctcttgtgttacttgttgttgttgttttgcaattttctttaatttagtgttacgagtttaaaaaaaaaaaaaaaaa

SEQ ID NO: 58513 - DNA, 440 bp, Glycine max
  Clone ID: PAT_MRT3847_23849C.1
cccatgcgtccgcccacgcgttcgcccacgcgtgcggcgcactcgcgcttcatgaatcagcattaccaccgctccaacacaggggaaaatgagggagatccttcacgttcagggagggcaatgcgggatggggacgcttttgatttccaagatcagagaggagtaccctgacagaatgatgctcaccttctccgtttttccttcccccaaggtctctgatactgtggttgagccttataacgctactctttctgttcatcagttggtggagaatgctgatgagtgtatggtgcttgattatgaggcgctctacgatatctgcttcaggactcttaagttgaccactcctagctttggtgacttgaaccacttgatctctgcgaccatgagtggcgttacatgctggtttcgatttccctgtccactcaactttgatctga

SEQ ID NO: 58514 - DNA, 258 bp, Glycine max
  Clone ID: PAT_MRT3847_2384C.1
ggctcgagctcacagatcgttccattgaaatcaagggatctaaacttcaatggtcatacaagaggtatctaatggccagagcattagataaacactcctatcactatagaaccaggctgatagcattcatagaaccctggcggctactgctctaaagatgatagatccgtgaccagtaagtgctaaccattcacaaggtctacgatgggtcgccacgacaaaaccacttgctgagatatatgtttgacatacagataa

SEQ ID NO: 58515 - DNA, 692 bp, Glycine max
  Clone ID: PAT_MRT3847_23850C.1
gcactcttcataagctccgctccaacacaggggaaaatgagggagatccttcacgtgcagggagggcaatgcgggaaccagatcggttccaagttctgggaagtggtgtgcgacgagcacggcatagatccgacggggaagtacgtcggaaactcagatctgcaactcgagcgcgtgaacgtctactacaatgaagcctcgtgcgggcgcttcgtgccacgcgcggtgctgatggacctggagcccggaaccatggacagcgtgcggaccgggccgtacgggcagatcttccgccccgacaacttcgtgttcgggcagtccggcgccggcaacaactgggctaaggggcactacaccgagggcgccgagctcatcgactccgtcctcgacgtcgtgcgtaaggaggccgagaactgcgactgcctccaggggttccaggtctgccactcgctcggcggcggaacgggctccgggatggggacgcttcttatttccaagatcagagaggattggtggagaatgctgatgagtgtatggtgctggataatgaggcgctctacgatatctgcttcaggactctcaagttgaccactcctagctttggtgacttgaatcacttgatctccgcaccatgagtggtgttacatgctgtcttcgtttccctggtcaaactcactctgatctgagaaact

SEQ ID NO: 58516 - DNA, 1178 bp, Glycine max
  Clone ID: PAT_MRT3847_23851C.1
tgaattcggctcgagccactctgaagccatccgccacttctccaaaatcctcgagggccgccgcggcgcccctcagggcttcctcgcagagtgctacatgcacagagcctccgcaaaccgctccgccgggcgaatcgccgactcaatcgccgactgcaaccgaaccctcgccctggaccccaccagcatccaagccctcgaaacccgagcctcactcttcgaatccattcgctgcttcccagactccctccacgacctcgaacacctcaagctcctctacaacaccatcctccgcgaccgcaagctcgcgggccccacctggaagcagttgcgccaccacaacaacctgcgctacagagaaatcccaggaaagctctgcgccctcaccgtaaaaacacaagaactcaaacagaggatcgcttccggggacaccgggaacgtcgactactactcgctcatcggattgcggcgcggttgtgggcgttcggagctgcagagggctcatttgttgctgtgtctgaaacacaaacccgacaaggccacgtgtttcgtcgaacggtgcgagctggcggacgagcgcgacctcgactcggttaaggaaagggcgaaaatgtcggcgctgttgctctacaggctgctccagaagggttacacaaacgtgatgggaaccatcatggatgaggaagccgctgagaaacagaggaagaaggttctagaagctcaagtattgatgagtaatgagaatttggaagacaagaagtgcaacgtttcctcgccttcgacggcgaacccctctgtctatcagggagtgttttgccgcgatattgcggtggttgggaacttgctttcgcaatcggggttcaaccgctccattccggtgaagtacgaggcgttgagctgctgattcctcccccaaagaatctatgcttcgtcgcttcttgtacagatataagttcgacaattttgtcaccctttatttttctattttgctctacattttaatgctcatttctttagatgtacacagaatttagttttcaactttacttttaaaatttgcagctgcatgccgctaaactaaatcttgccaagttttaaagtatgttgggttatcgcggcaaagcttacttaagacaaattaaattgttttcattaaatttttatcagaaattccagtt

SEQ ID NO: 58517 - DNA, 1936 bp, Glycine max
  Clone ID: PAT_MRT3847_23852C.1
ggctcgagcggaggagttgaaatgaaattatccactgattgttgtggtttatctccgcactccgtcttcatcagtcagcatcaccaccgctccaacacaggggaaaatgagggagatccttcacgttcagggagggcaatgcgggaaccagatcggttcgaagttctgggaagtggtgtgcgacgagcacggcatagatccgacggggaagtacgtcggaaactcagatctacaactcgagcgcgtgaacgtgtactacaacgaagcttcctgcgggcggtttgtcccacgcgcagtgctgatggacctggagcccggaaccatggacagcgtgcggactgggccgtacgggcagatattccggcccgacaacttcgtgttcgggcagtccggcgcgggcaacaactgggccaaggggcactacacggagggcgccgagctcatcgactccgtccttgacgtcgtgcgcaaggaggccgagaactgcgactgcctccaggggttccaggtctgccactcgctcggcggaggaaccggctccgggatggggacgcttttgatttccaagatcagagaggagtaccctgacagaatgatgctcaccttctccgtttttccttcccccaaggtctctgatactgtggttgagccttataacgctactctttctgttcatcagttggtggagaatgctgatgagtgtatggtgcttgataatgaggcgctctacgatatctgcttcaggactctcaagttgaccactcctagctttggtgacttgaaccacttgatctctgcgaccatgagtggtgttacatgctgtcttcgattccctggtcaactcaactctgatctgaggaaattggccgtgaatctcattcccttccctcgtctgcacttcttcatggttggatttgcgcctctcacctctcgcggctctcagcaataccgcgcattgacagtgccagagctgacacagcaaatgtgggatgccaagaacatgatgtgtgctgcagatccaaggcacgggcgttacctcacggcatcagccatgttccgtggcaagatgagcaccaaggaggtggacgagcagatgataaacgtgcagaacaagaactcttcatattttgtcgagtggattcccaacaatgtcaagtcgagcgtgtgtgacattgctcctagagggctctccatggcgtccacattcattggaaactcgacctcgattcaggagatgttcaggagggtgagtgagcagttcacggccatgtttaggaggaaggctttcttgcattggtacaccggggaaggcatggacgagatggagttcacagaggcagagagcaacatgaacgaccttgtttcagagtaccagcagtaccaggatgccactgccgaggatgatggggagtatgaggacgaggaggacgatgatgttgaagcagaccacatgtgaagagactgaatgtgaaagatgcctgtgtcttacttatgctatgtgatgcgtaagtgtgtttgctctgctctccaacgtgaagaagattgtaattactaatagtgtatgtacggtttgcgggataaaactttgatgagcttggtgtggagaatggaaaaaatagggggttagtgggagtggagtttgggaacaatgttatgcggcacctatctgtttgttcttatattggcttgcttttatgttgttatattgagtcatgtttccgtaatatttgttgttcttatgcatgacttttgtctacgttggattcttggaatgtctttggagaaagccttgcctcatgtttttgtctatactgtgttgaggtcaaggtgtgatttaggatactgatcgaatctagttatcctttgagaaagtggaagattaaccccttgctctacatatatgcataacagagcaacaaagattccaatcaaaaaa

SEQ ID NO: 58518 - DNA, 1050 bp, Glycine max
  Clone ID: PAT_MRT3847_23853C.1
tctcgagctgggtgaacatctgactcgacacggaactcggcagtggttaacatcagcaacccttgagaagaatgcaggaactatagactctttagatgatacgatgatggtaattgaagcccctcggcaatcagacttaatgatagaactaataaagaaattgaagcctaaagtggtggtgactgggattgctcattttgaggctgttactagttcagcttttgtgcaccttttagatacaacacgagacattggatctcgtcttttcttggacatatcagatcactttgagctatctagccttcctgggtcaaatggggtcctgaagtatctttcaggaactcctctgccctctcatgcagcaattatatgtggactggtaaagaataaggtttatccggatttagaagtagcttttgtcatttcggaagaagaatccctcttgaacgccttgtccaaaactgttgaattactagaaggcaatactgcattaattagtcaatactattatggctgtatttttcatgagcttcttgcttttcagcttgccgaccggcatgcacctgccaagagaaattgtgagaatgtcaaatcagttgatatgataggatttgctagatcagccacatctgtccttagtaatgctgagttatctattgatggggtagagaatgagtccctaatccacatggacgttgatcaaatcttcttgcctgttccatctcctgttaaggcagctatttttgaaagttttgctagacaaaatatgtctgaatcagaaactgatgtcacagcaagcatcaaaggatttgtcaagagtaactatggttttccaactgatagcagcaccgaatttatatatgctgacaattcaaaggctcttttcaacaagctggtcctctgctgcatcaaagaaggcggcaccctttgttttccagccggattaaatgggaactatgtttcgtctgccagatttttgaaagctgacatagtgacagtacctaccgatgtcaatgtaggatttaagttcacagaaaagacactcactgg

SEQ ID NO: 58519 - DNA, 421 bp, Glycine max
  Clone ID: PAT_MRT3847_23854C.1
cagaccaaatacgcaccgaaaatcataattatgaaaaaataaaggaacaaggaacggaacgaattctaggaaatggctgcgtgcgatgaacacacacagggcatagcattaaaacgcaagtcctagccatcctctttgatggggcgacaggaaccactgggcactggtgcaaaccaccctacacacccctggcgcaggcacccgctcaacacagcttcagagtgataaccgcacttagaaaacttgtccatggggctctggctctttaatacagtcactgtcttagctgttacagcgatccaggaaagcccaccgataaacaggagatccttcgccaccaccagtgttaacaaagcaaacacgatcctcgggatcggcctactatactgctgacccacggagaaaggggcgaggacccaag

SEQ ID NO: 58520 - DNA, 468 bp, Glycine max
  Clone ID: PAT_MRT3847_23855C.1
acggctgcgagaagagacagaagggctcactaaggaacctacctatgaaattcagataacattagggcacgtcgtaaaggggcatgtgaagtgaaagcatttgagataaccattgcatttgtataatactaaatttgcattgtatgattatggagattgttgaagtaaaacttcaatgtgattaaaagaaacataaacaatacttaaaaaactatatcaaggttttctttatgctattatttatagcaactttaaacaattagaagatattaagaaaaaaacaattagaaggtacatttttttttactttgatcttggactttcaattcttccgtagtatatttggaaacatgtccaaaacacgttcagcaaagaaatttggattttcaagacaaaaataccaaagcaacatgggaaaattttctcgtaaacatcagttatgttgtatttaactctcacactctttgg

SEQ ID NO: 58521 - DNA, 2311 bp, Glycine max
  Clone ID: PAT_MRT3847_23856C.1
ctcaaaatcaaaattcaaaattcaaacaccctccatttccaccggttaaatattacatgcaacgggcgagtgcgttctgaggacaaagcgacggatcatacgtgaaccgtggagtctctctataaaaatctcgctcactaactattggtcttccaaaaccaattctatggtctcttcatcaagctccgctccaacacaggggaaaatgagggagatccttcacgtgcagggagggcaatgcgggaaccagatcggttccaagttctgggaagtggtgtgcgacgagcacggcatagatccgacggggaagtacgtcggaaactcagatctgcaactcgagcgcgtgaacgtctactacaatgaagcctcgtgcgggcgcttcgtgccacgcgcggtgctgatggacctggagcccggaaccatggacagcgtgcggaccgggccgtacgggcagatcttccgccccgacaacttcgtgttcgggcagtccggcgccggcaacaactgggctaaggggcactacaccgagggcgccgagctcatcgactccgtcctcgacgtcgtgcgtaaggaggccgagaactgcgactgcctccaggggttccaggtctgccactcgctcggcggcggaacgggctccgggatggggacgcttcttatttccaagatcagagaggagtatcctgacaggatgatgcttactttctccgtttttccttcgcccaaggtctccgacactgttgttgagccttataacgctactctctctgttcaccagttggtggagaatgctgatgagtgtatggtgctggataatgaggcgctctacgatatctgcttcaggactctcaagttgaccactcctagctttggtgacttgaatcacttgatctccgcaaccatgagtggtgttacatgctgtcttcgtttccctggtcaactcaactctgatctgaggaaactggccgtgaatctcatccctttccctcgtctgcacttcttcatggttggatttgcgcctctcacctctcgtggctctcagcagtaccgtgcattgacagttccagagctgacacagcaaatgtgggatgccaagaatatgatgtgtgccgctgatcccaggcacgggcgttacctcacggcatcagccatgttccgtggcaagatgagcacgaaggaggtggatgagcagatgataaacgtgcagaacaaaaactcttcgtactttgtcgagtggattcccaacaatgtcaagtcgagtgtgtgtgacattgctcctagagggctctccatggcgtccacattcattggaaactcgacctcgattcaggagatgttcaggagggtgagcgagcagttcacggccatgtttaggaggaaggctttcttgcattggtacactggtgaaggcatggacgagatggagttcacggaggcagagagcaacatgaatgaccttgtgtctgagtaccagcagtaccaggacgccactgctgaggacgaaggggagtacgaggatgaggaggaagaggatggtgaagcagacgaccatatgtgaagagactaaaatgtgaagatgcctgtgtcttacttatgctatgtgatgcgtaagtgtgtttgctctgcactccaacgtgaagaagattgtaattactaatagtgtatgtacggtttgcgggataatactttgatggtagtgagagtggagtttgggacctttgggtacatgttatgcggcacctatcggtttgttcttatattggcttgctttttatttttatttttgtccatctggtatattggatctcatgtttccgtaatatgttgttgttcttatgcatggcttttgtttacattgaattcttggaatgtcttgggggaaagtcgtgcctcatgtttatggctcaaaaaccttgcgctgcccatgttatcctttgagaaagtggaggattaattaatcccttgctttacttatatgcataacagagcaccaaagattccaatgcaattagaatgcagaaggaaactgctacccggtgagaattaagttttatcacgcatctaaccttgtccaaattgcaggacagatcaatatgccctcaatttgtaggggtagtagagtttttggagtgaaaatccgtttcaaattgtggtcgtccagggtggtgggtcttcgggttttatagtaattttgattcaatttcacgctattgacaacaggtgaaggactttcatagggtgtgttgttcggttttggaactggacttaccattgaaactgttgtcttgcatagtgtggccatctgagatgc

SEQ ID NO: 58522 - DNA, 108 bp, Glycine max
  Clone ID: PAT_MRT3847_23857C.1
aaatcctcatttttctgagcagccaaccactctctctctgcctttcgaaagtgctcagtttgcaaagaaaatctgattcatgtcgggccaggcgatggtgaccaacac

SEQ ID NO: 58523 - DNA, 659 bp, Glycine max
  Clone ID: PAT_MRT3847_23858C.1
ttggggggttttttttttttttttttttttgcgaagattgaactacaaataatctactattatattgatgtgctggagttatatactaaaaaaatttgcactccataaacgtctataaaccaaaccacaagcctaaatcagtgtcactaaaactgaaccagtacataagttaataaatttttgtaataaaggttatataaaattatgtatagtttagtttagtggcaaatttaattctgaaaaggcttgaaacctgtgatttagtcttagtttgtactaacatttatcccaaaaacatttttcctacaccaaaaaaacttattgaaaagttcatatcctacaccaaattaaaatataaatattttaatcaacagcagtgaattaattttaattcacataaatttaattataattaataactaattataataaattgcttgaaataattgactgttgatgtaattctacactagtttttcaatgaagtccaagttttagttgaatttctcaataagacctaagcaaaacacataagggatggatatccgtataatgctattagcactacaaagggttttgttgctttgtagaccatcaaagaaaatcaccactgctattaaaatgccatatttataaatagcaggattataggggatata

SEQ ID NO: 58524 - DNA, 457 bp, Glycine max
  Clone ID: PAT_MRT3847_23859C.1
gacagagaaaccaaagtttgatgtaagtcctttttcttttcatatttcgtgaatttcgaaattcacgtcaaatttcaattgcgtcatctcatttttccgcccaaaacaaatcctccctccgcgctcgtcaaggggagaaagagaaaagacaaaacgagcagagaaaatgacggaaagtgagggaaagtgtaagaaaatgggcaaagagaagagaggtagaagcttcatcgccttcaccggagctgcggcggtgcttggaattgcggcgaacctagctatcaccgcaatcaagtaccagaaggcaaaaaatgctaagaagaaagatcttgcaggttccaaggtgcgcgttaatctctctgcatctgagattcttaagctggctgagcaaatcattgctaactcaaacaaggcccataattctgttgcgtcggtgcctctcgacaagggtacatatgca

SEQ ID NO: 58525 - DNA, 112 bp, Glycine max
  Clone ID: PAT_MRT3847_2385C.1
acaggataatgccgaaccgatggcgcaagtatcaaagtttgggacacttcttcttcatacatctctccccagaccctccaactctaacatacaattccgtactcttctaaca

SEQ ID NO: 58526 - DNA, 169 bp, Glycine max
  Clone ID: PAT_MRT3847_23860C.1
tcctgatgcatatgaaagtttctgaaacataacccataacccatcctcctgaacctcaaaagtcatatatgtactttcacgtagtgagagacatgagtgagactaaataaatgcttcatgctgtattcaattattgcaagtctaaataaaataatcgaagtttatgtct

SEQ ID NO: 58527 - DNA, 213 bp, Glycine max
  unsure (1)..(213): unsure at all n locations
  Clone ID: PAT_MRT3847_23861C.1
gggtggtggacacgcagccctccatccgtgctgcatgaaaaacattccacgtgctgcttgtcttgcgtctaccatcatgatcacagacncattccttagctatgtatcnctttcctggtctccgacaggcgattatatctattatgtataagtacatatattatatatggatgtgtgtgtgtgcgtgcgcgtgagtgtgtgagcgcatctgca

SEQ ID NO: 58528 - DNA, 297 bp, Glycine max
  Clone ID: PAT_MRT3847_23862C.1
actatgagaagcgcctacagttgcatagtccacccgaaaagaaggagaactactaatgaagcctgtggacctaatgcgagcagttgttcctgttttccctccatcagtctccaaacttgtaagagagggatacttgaatggtgaaagaagtcctggccatttattctgtctcccttcagaattttttatgctttttgatgtagacaacgacggacttatatctttcaaagagcatatcttttttgtaactctgttagcatccaagaatcaagtttttctgcggcattaggagtttga

SEQ ID NO: 58529 - DNA, 326 bp, Glycine max
  Clone ID: PAT_MRT3847_23863C.1
ggagaacagcaaagattggggatggtatgtgaatctaatctcttgtaattttagacggaattttttaattttcctaaatatttttgttcatactgcacgccccttaaaaagactcaaatccctaaagaacattggtaaaaattaaaataatccccttaaagggttttaaacttgggcaatccggtccggtaaggcaccctggtcctttaacaagcccaaatccggaacccttgacaattgaacaaattaggtagaatttgccttggcctttccctttcaagagaaattatggttccttattcattgttaatcttgtttcatttcct

SEQ ID NO: 58530 - DNA, 416 bp, Glycine max
  Clone ID: PAT_MRT3847_23864C.1
ggcgaaacacgccacgaatccattcgcatctggtggcgggtttcacaaagaatctccgccacattaacacctttttcgggaaaacaaaacacgtgtgagacaactgcctttatttccaaaaagataaaactttgaggggggccattaatacaatctctccctcggatttagaatctatctacatctggtagaagctatatgagaggcatctcaaacttcaaaagaacaataccttcctattcctaccaaaactccgtgaacataggatagttcaccaccctaggtggctggggcgccgggtataaatattctgactagcatgggcagacaccatcctggaagaacctcttgcgctgcattctcttataaccgtcctggcaagtgatccatcaatccccaacccatcaaagagaagg

SEQ ID NO: 58531 - DNA, 333 bp, Glycine max
  Clone ID: PAT_MRT3847_23865C.1
cggccctgggggaatttttttttaaatatatttttttttttccggaaaaaataaaggatacgggtacccttcattttctacgaaggcccaaccttatcaaaaaatagaaaaattggtcggaaggacccggctaatccaaacttcgaaaacccaatgctatctcctcaagggtgaatagaaaattttggtggccggctccccaaaccaatagaggaccttgtaaggtttaaaaccattataaatttaagaacccgggcccaagagaaccccccaaaaggcgcccgccattaatccggcccccaaatggtcaacgggccttcccgggagaagacc

SEQ ID NO: 58532 - DNA, 291 bp, Glycine max
  Clone ID: PAT_MRT3847_23866C.1
aaaagaagaggaagcccttttttgttatgatctatgcccaaattgttaaaagggtttttttggggggccaggggaaatattttaaaaaagggggccccggagatgttgtttggaaagcactcaaagggggcgggggcccaccttccacaaaaggggggctcaagctaaagcttttcccccctttaatggggggggggggggttcccattgataaagggaaaaggcagctcacctcccatccaaatggggggttttttgagttttgcttaatacccaacaggtgaaggcaaa

SEQ ID NO: 58533 - DNA, 556 bp, Glycine max
  Clone ID: PAT_MRT3847_23867C.1
gagaaaaacacccacttttattggggcaccctttgatatagggggaaattggggaaaaaagggggtaaaaaaggggattggtagcatttttcggcgcccgaaaatgattaatggacaggggaacctttaactacaaggcctttttaagggggaaaattagccaagggacaccctttaggggtattcccccaccaattaaacatgatgttgtttttggtcaaagcaaaaaacagcaagattggcataaagggggttccagcattaaaaccaccaaacaacacataattggagggcttccaccatttttggggggatctaaatgctatggatcccgagaaaaagccaactagtttccaactagggaagttcacaggaggtggaggggggattattgatggagcacccaacaacacaggggtgggaattaaaggtatccatttttgctttggaaaagccttgggagcaagccaaactagaaagggggcaattgctccaccaaggaaaaacaagttcactttggcatattcaccgagggctccaaaaattctgggcgggc

SEQ ID NO: 58534 - DNA, 361 bp, Glycine max
  Clone ID: PAT_MRT3847_23868C.1
tgacatcttatcttctaaagaataggtgctataatgaactccattcttatttctattcctagtatttagatttttttcattatatatggtatttgcaagtttagaacatatattaactcatatatcgttttcggtcgtatctattttaatttcaattcatttgataaccttattatttgtcaaagaaatcataggattatctgattcgtccaaaaaaggcatgataataactttttttggattaccaggatggttagtaactcgtggggttttttcaggccattaaccgttaagggattaatttgaatcattattattcttttcatgaactttttccatttttataaatgttccttgcttc

SEQ ID NO: 58535 - DNA, 255 bp, Glycine max
  Clone ID: PAT_MRT3847_23869C.1
cagtgaagctgtgaaaattcccctctctccgattcttcacttcaaacaacccgtttccatggacttgtacggtcgggcccccgccagaaatggatccaacccgctgaaccagcccgaatggggcaccgacactgctctcgaaggtctgtttctctcttcttccccttctgttagggtttccttagtttggaagttaggaggttttgtttctctattctaattagggttttttttttatttttggtgtagaatcga

SEQ ID NO: 58536 - DNA, 567 bp, Glycine max
  unsure (1)..(567): unsure at all n locations
  Clone ID: PAT_MRT3847_2386C.1
gccgcacactctcttccttctcgcgtccattttcaactcattcctcgcaaccaccgaaccaaaaccaagaccctcactccctaatgaaacaagacccaatcgaaatatgcacttccctatgggtcaaaaccttctcctcttcaaccacctcatatccccaacctcaccggcttcctctccaacttcgacctctggctcctcgcttaccaacgctcctgcgcccacgccaccggcaccttccctccccgtaacgccgtccacgccaccgtcctccactccctcctctccctccgcaacgccgtcatccgcaaccgtttcgaatggaacgacaaaaccaaccctctcctccgcgcccccaacgacgccggcgtttccaagcccctctccaaacgcaaattccgcgccgctatccaatccggcaagccctgcttccaggaccgcgtcgttcaggagattctcttgatgattctcgaaccggttnttgaaccccggttctcccctaaatctcacgcgtttcgacccggtcgaaacgcccacacggttattcgaaccattcggagcaacttc

SEQ ID NO: 58537 - DNA, 938 bp, Glycine max
  Clone ID: PAT_MRT3847_23870C.1
agcaaataaaaaaaattgccagttcaatcaagataagtgggtgatccaaaacttaagcagatcatcctataaccacccctgcaatcctgcatcatgatcatgcattggaagaacacaaggcaaaccaaattgtacaacaaaaatcagtgtagctagtggtctttttaggtttgttaggagacaactaccacttgtctcccacaatttatactgcaattgaaatgtttcttttccctttttcctctgaaaagtgaaaagaatatcatcacacgcatgcaccactgcttttagttttgaagccactcagttgactggtctagagataaagagaatgattcggtcaaagatgctgtgccatcctgtagtttcctccatgaccaaaagtgctcatttgactgatgcttttttccaaaaattgtgttaaacaagaagtggggaaaaacaaaaggatgtcggatacattataagagaacctttttttttcctgaaacatgttggaaaaattcttcattaaacaatacctcgaccccaccttttttgaccatctgctttcacttggtgatagagaatgagctagtagttcattctatttctacaatggtatgatgtttattcgaatgatcgagtaaataatcattgacaacaatgagagtgcttcatctgatggtgtctcacatcagcttatgtgcaatgaatgatcaaagcagccatgagtatctgagaaggagatattgattaacaattggccaccttagttctcccttggcagtgaatcagatgcacagatatcccctcgacatagtgggcacaccctgtgtataataatataataaaagttaaagagatacacatttccaagcatctttagcacatgagttgcatgtaaagatattaacataatgatcatatgaatagagaggacaagatggtacatcggg

SEQ ID NO: 58538 - DNA, 303 bp, Glycine max
  Clone ID: PAT_MRT3847_23871C.1
acttcgctcccaaaatagatcactactgtcttaattattgtgtctttttcacatttatggttttttttttttaaatggattcttcatttccaacaaagtgctcctccctaaaactcatttcaacttgctctttgtcatttttcttgcaaggcctgggctggttttaggacagcatccttctgaagttgcctttgagttgaggagcgatgctctctcatcagagtccctgggctgcttggtccactaggatgctgagctgagctgctggcacttgctgatcctgaggcaggcctcctgttttga

SEQ ID NO: 58539 - DNA, 1183 bp, Glycine max
  Clone ID: PAT_MRT3847_23872C.1
caaagtttgaaacgtgtcaaaattaaaaagcgagagagattaaagaatagagttgttggtgtaacaggcgagggcagagggaagggttagggaacaattggagtgcacgaaagcgatgccaaaaaaaccaaacaatcattaacaacagccctaacccccccgacgtctttcaaaactgattcggagcaattaatgtaaaatctatggacatcaacgaggaatcttcattctctctccgtttttgtttgcatcattaatagacccaaatggacccgaacccgacagcctcgctggactccgacccggacccgcttcgcgtgaagaggaagaccctcgaggccgtgctcttgcagtgtcagagagctctcgaatcgattaacgctacttctgctactgcttcttcttctgcttctacttacgtggacgaagaggattacgacggtgaaggtgaagccactgcatcagctgatcccgatgccgacgagttatgtgatctgctgaaatctagagttgaatgtccggcctttcttcaacagttggagtgtgctcgggcttcagtttcacagaatatagatgaagaaggtaattcctgggatatggttagcgaaaatgatctctgggaaggtgaacgtgttgactcagaacaagaagattatgtccttgttagacaagaagatatagtggagggtatcgcgtgtttcatggccgcatatttgctatccttaaagcagactaaggatttgacccctatccaactccagagtgcgcttagcaagacaggtccagtgacaaagaaaaagggaaagctacgaaaggcttgggatgggagcaaagttatttataatgttgcatcatggggggctacggccatagggatatatcaaaaccctgttattctcagggctgcaactaaagcattctggacttcatgtcatgttatatcaaagcttctctgatttgcccgtgcagcttgcggcttgtagcaaagttgtgatgtagtaatttaactcttttccccctgcctgtgctgcaatttagcttggcgtcccatgccatgatcgtctttgatttaaaattcaatttctttgaagcacagatcaattgattttaacactgtttgacattgtaaatatcactactctaatgtttccgagtgcaaaaaaaaactcaagccttaaacata

SEQ ID NO: 58540 - DNA, 245 bp, Glycine max
  Clone ID: PAT_MRT3847_23873C.1
tttcttacatctgattgtttttaattctatttttttctctatctcaagtctcacagacagggtacattaactacaaatgttactactcagtattatcgtatcttgtaatctgaaaccaaaacacattacaatgcaacaacattcttatacccttttctccaccttcaccataaacttttttgccttcttctttcctacaacattctactttactcttacccaagccaaataaaggaacaagaaca

SEQ ID NO: 58541 - DNA, 1812 bp, Glycine max
  Clone ID: PAT_MRT3847_23874C.1
ccagcgtccggtgcgttcaaacgccgcctcgtgaaaaagggaaagataagaaaatagtactgatagtaataggcaaaggcagaggaaagggaacaattggagtgcacgaaaatcattagccacagccctaacccccccgacgccttccatcgcatcgcctcctaaaacaccacacatcaaaacgaccgtgtttcggagcaatcaatgtaaaatctatggacaataacgacgaatctttattctctctccgtcgttgtttgttgcatcattaatagtagatgccaatggatccgaatccgcaagcctccgtggagtccgacccggacccgcttcgcgtgaagaggaagacccttgaggccgtgctcttgcagtgtcagagagctctcgaattgattaacgctacttcttctactgctgctgacgtggacgaagaggattgcgagattgaaggtgaagccactgcttcagctgatcccgatgccgacgagttatgtgatctgctgaaatctagagttgaatgcccggcctttcttcaacagttggagtgtgctcaggcttcagtttcacagaatatagatgaagaaggtaattcctgggatatggttagcaaaaatgatctctgggaaggtgaacgtgctgactcagagcaagaagattatgtccttgttagacaagaagatatagtggagggcattgcatgtttcatggctgcatatttgctatccttaaagcagactaaggatttgacccctatccaactccagagtgcacttagcaagacattctcagtgaaaaagaaaaagggaaagctacgaaaggcttgggatgggagcaaagttatttataatgttgcatcgtggggggctacggccatagggatatatcaaaaccctgttattctcggggctgcaactaaagcattctggacttcatgtcatgttatatcaaagcttctctgatttgcccgtgcagcttgcggcttgtagcaaagttgtgatgtagtaatttaactcttgttcccctgcttgtgctgcaatttagcttggcgtcccatgccatgatcgtctttgatttaaaattcaatttctttgcaccacagatcaattgattttaacactgtttgacattgtaaatattactactcaaatgattccgagtgcaattcaaaactcaagccttaaacataaatgtagtactaatgattcatcaaggccaagtttaacactgataattgattatgacccgataagacctaagtgcaacatttattattgaccaaggtacaataaggtctaagtataatactaacgatagagtaagaccgaatacgattcatgtgtaacacttatgattaaccaagatccaatgaagtccatgtgcaaccttaatgattgactaaggaacaataaggttaggtgtagtattaatgattgaacaatgtccaataagacccaaatataatactgacgattgattaagacccaataagactcatgtgtaatactggtaattaaataataagactcaagtataaccctgataatcgactaagaccaaataaatcctaagtgtaatactaataattaaccaaggctcaatatgtccaaatgtaacatttaggattgactaaaccccaataaggactcagtgcgacattgatgattgaccatgaccaataaagcctaagtgtaatactgatgattgatcaaaatccaatatgacctaggtgtagtgttaatggttgaccacgatccaataaggtataagtgtactactgatgattgactaagctcaataaaaccggacgcgtgg

SEQ ID NO: 58542 - DNA, 422 bp, Glycine max
  unsure (1)..(422): unsure at all n locations
  Clone ID: PAT_MRT3847_23875C.1
gtagcttggatcctctaaatcggccgctgtagttaaggcctttaaaatctcncnnccggcccccaaaagctaacctgaatttattcgctttgaaagcaatttttgatgtaacaagagacttaagactgaaaagaggttgatttttttctctcaacattaccctaccctggataaggtttttttttaaagggggggacnggggttaaaacagcctaacaacaataacaagggacccaagggggttgaagggggagcattaattgaatcgggatgttaacacataaaactttccgaaaagccccctaccttcagaaaataaccccaggcacatccgcgacaaattttgaacaatctgcacaaaaggtgacccaccttgcccccttatatacccctctattgtcacttccctggctaacccaaag

SEQ ID NO: 58543 - DNA, 222 bp, Glycine max
  Clone ID: PAT_MRT3847_23876C.1
gaaactggacattcacctaggacacatggcgttcaaaacatcactctgcactccccctcttcatggatcaacagtacctcctatcctacctcactatgcagttttggctctaaactcatgcctgtcgcatgggacccagatgctagttgtctgcacggttgtagcccccctcctcccttcccatcgctcccgcaacccgctctttatttggttaactcaact

SEQ ID NO: 58544 - DNA, 366 bp, Glycine max
  Clone ID: PAT_MRT3847_23877C.1
ccaactcgtccgggggttttgccggtttcatatggggtggggggtccaattgggtggtgggccaaggttaatgtaatgggaaatgactttggtaataataagttaataagcaatgggttaaatattaatgcagggatggagccatttgcattagaaccaaacaggcttttaagggggtttaacccaattattaaacttttttatcctaactccagggccacattaaatttaatgggctttgttgggcagtccttgattaacgcaggtggaataatggagcaaacatttttgcctggaaaggactccattgaaatgtcatcaattgtttacaagaatggggttttaactgaccaagcattaccagtt

SEQ ID NO: 58545 - DNA, 142 bp, Glycine max
  Clone ID: PAT_MRT3847_23878C.1
gtaatgtcagaattcggttggatgaagaagaaggactagctagtggaagtggagtctctttagtggtgcggtcgagattctcggcggcgtagtcgtgcggatcgtcgtcgggaatgttatcttcggtaaggatgatccattc

SEQ ID NO: 58546 - DNA, 906 bp, Glycine max
  Clone ID: PAT_MRT3847_23879C.1
cccacgcgtccgctcaaaattgctcctatttcttcttctcacagctcagcctagttagctctgctatcactcacaaagtcatcatcacagctccacactcaagtgaccaaaaaagcttcaattttcgcatacaattcacatacccatttgactttttcttctttccctcttctccattctccgcattttcaagatccattcagcactttgtgttgctgaaatagcagaattgctgaagttataagcaatggaagaagagaatgccatagagcttctccagagatacaggagggacagaagagtgcttcttgattttatactttcagggagcttaatcaagaaagttgtaatgccacctggtgcagttacactggatgatgtggatctagatcaagtcagtgttgattatgtcctcaactgtgccaaaaagagtacattgcttgaactttcagaagcaattagagattatcatgatcatactgggttaccccaaatgagtgatacaggttcagttggtgagttttatttggtcactgatcctgggtcttcaggttctcctcccaggaggccaccaccaactgttccaactgcagtgcctcctgtcgctgtttccactcctcctgtttttccaccatccccaattgtttctaatgtatcgagatcggagtcttttgactctactcaagaaaaggagctacctgtggatgatattgaagcctttgaggatgatgatgatgtcccggtggttgaaggtttcagagctaaaaggcctcttaatgatgcttctgatctcgcagtgaaatcgccttctttccccccaggcatctcagatgatgatcttcgtgaaactgcatatgagaccctcttggcttgtgctggacccccagggggtctgattgtcccatc

SEQ ID NO: 58547 - DNA, 476 bp, Glycine max
  Clone ID: PAT_MRT3847_2387C.1
agcaagtacagctcacgacttcttctttggtttgtattctgatcctttttccaatcattactaacccatatagtgggaattctaaaacaggtcctaggcgtcccaaaatacacataaactgaatcaacattatcaataaaatcctatcattataaatataccccatttataaacttatttataatcatttacaacctaataaatctctattataatgacttcattaatttatttattcatccaacttattattacctcccaaaatatacttactatattaacttcttttctatatctttaattattcataataatctatttattactatcaactataactatatttcatttaaattattaatttacacttaacatttattacaatccatccctcttataccaattaatactataaacttcaatcaatccctatctttaataataaatcaaaaacatcatatctcattaattattta

SEQ ID NO: 58548 - DNA, 1400 bp, Glycine max
  Clone ID: PAT_MRT3847_23880C.1
ccgcgtgcggcctcgggtctaccccagtcctcgcctccaaacccttcctccactccttcttcctccctctcctccctaagctcccttcctccaccgctgtcgtcgctccctccaccgtcgacgaccaattcgagttcatctacctctcctggctgagtttgggatcagcctggaggcaggcggggccaccaacgttggggaggaagaagtagagagggtcaatgaagagggtgaggaggctcgtaacaaggaacacctggttccaataggccacgatgtcgctatcggggttcaggatctggtaatgccataggatctggaacgagtgctcctcctctctcgctgtcactgccttcgatcaagaccgaagtcgtcggaactggcggaacttcaacgccgatgtcgataatattctatttatcttccatggcagattccaaggggacagattccgtgattgagagaggacgagaacgagaacaatggcaacggggtttggatggctagctttagcgaggtttggatggctacatgaagcaaaatgttcaatgtccagaagcaaattatccaacatttttttatgcaatgcccatgtcgcgtacaaaagtgttctttgaggaaacctgtttagcatcaaaagatgctatgccttttgatttactaaagaagaagctcttttcgagattaaatacaatggggatcagaattaagaaaacttatgaagaggaatggtcttatatcccagttggtggatccctaccgaacacagaacaaaagaaccttgcatttggtgcagctgccagcatggtgcatccagctacagggtactccgttgtgagatctttgtcagaagctccaaaatatgcttcagtaattgctactattttgaaagatggtcatgccaaggacatcattactcaagaaagaagaaaggagaatctatctatgcaagcttggaatacactttggcctcaagaacggaaacggcagagagcattctttctttttggattagccctaattctgcagctggacattgagggcattcgaacattctttcgtactttcttctgcttacctgattggatgtggcagggatttcttggctcctccctctcatctacagatcttgtattatttgcattctacatgttcataatagcaccaaataacttaagaatgggtctagtcagacatctactttcggatcctactggtgcaactatgataaagacttacttaacgatatagtacgtttctataacttatttattccccaccctaggtaccctgtattgggacacgggttagattactataggagcctcaatagtagttcgtagattcttgtatagacatacatattttattaaaaccagagatatgttcttatgattttt

SEQ ID NO: 58549 - DNA, 291 bp, Glycine max
  Clone ID: PAT_MRT3847_23881C.1
ctttcgtgtccgcttacgaattctgctcgcaaaagatgcatcgaacaaaattacattgcgatattagtggaaaagctcgctggactcactgaataatgccacaccggaagcaaccaagtgattgacggatccgaccacaggagggagaaggcgacatacactgagaagcaaatgaagaagaccgtttacggctacaacagcggctggtgccgctcggaattccaacaagcgtagttccgaacagggacgctgtgacggcaacgatggtatatgtgcgaggagctcgagcta

SEQ ID NO: 58550 - DNA, 340 bp, Glycine max
  Clone ID: PAT_MRT3847_23882C.1
tttcaaattccataaactgttactctgaatatcaatcataagcaaaatgtatcaatcttgggaaattttgaccatttgttgagataaaaattccgtaactgaatgtttgttacagaaattgttcgtctttgagtttaatctcgcaatttttaaggttaatcaaatggcaatctggttaagcatttgtactgactctgaagctataatttacagtaaattcacttgaaaaaagaatcaaattacttgattcatttgaaatttagatcaatatgttgcttaattgattaaagctgattatagctgattaaataactgctgatgttctagatcttcaaaaaaa

SEQ ID NO: 58551 - DNA, 926 bp, Glycine max
  unsure (1)..(926): unsure at all n locations
  Clone ID: PAT_MRT3847_23883C.1
ggctcgagaagaattcctggtgtttcaacttgaatcctcaaattattggtggagcctcatagaaggagggtgccagttgtggatctgagtgcattaataaagcattcagcgctgcaggaacatctcaatctggcctgatgaaagaaaagcgtggaacagttagaaaggtccattctggtagcaccaagagagactacattcttcaacacaagtcatttcacaaagaaaaaagttatcgtacttatggattaaaagggtcttcaagacgaggaaaagtgaatggcttgagtggtttggtcttggataaaaaacttaaatctgtgtcagaatcttctaccataaacttaaagagtgcatccttacagataagtaaggcaatgggcattgatactacgcaagacagtattagtgttaacttttcatgtaatgctgggacttctacatccactgcatttagcctggtgaattcttctgattctgtttgtagatcaaccaatacttcatttgcaataaatgcagcacatactatacccgtattcagttgtccagcttcattatcagctaccaatacagatctttctctctcattgtcttcaaaaatcaagccttctacggaatctgtctgcagcaataatgaggcacctaatagtagttatatgggaatactgtataataataataataataataagtccccaaggcagtggataccccacgatggaaaggatgagatgattttaaaactgcttccaagggttcgggagctgcaaaaccagcttcaagaatggacagagtgggctaatcagaaagtcatgcaagctgctcgtcgtctgagtaaagaaaaggctgagcttcagacactaaggcaagagaaagaggaagttgaacgtctaanaaaagagaagcaatctctagaggaaaatacc

SEQ ID NO: 58552 - DNA, 494 bp, Glycine max
  Clone ID: PAT_MRT3847_23884C.1
gattttcaacattaattataagacattgttaactaatttacacatgttaagaaagttaattaatttaattattaaaattatatttgtctataattatataatattttttcaaaactactcttaaataattaatgtatggagagaaaataataatagtgaagtttaaatttttaaaactaaatccttccattcttcaatcttcttaagaaacaaaaacaaccaatttataatatttattatttatgaactaaaataatcaaggatattttggttataaaatactcatccggtctcaaatataagaagaaaaactaattcactaaaaaaagttactagttaatcacatttaattgtataaatatcaatcaaaaattaattttcccaacttaccctcaatgaaacttggtatctaaaataaaaaacagtcattgaaaataaaactttaatataaattaaggttattttagagataataacattaaataagataaaat

SEQ ID NO: 58553 - DNA, 230 bp, Glycine max
  unsure (1)..(230): unsure at all n locations
  Clone ID: PAT_MRT3847_23885C.1
accaagacaactaccgccaccgtgtnntaggggtatcaagagatacatttctttaacatataagtgtacgcgacacaggtcctatatctattaatacaaaaaatgtacaaacctgacccggtcaataaccgtcaaaccctcacaaattccacacagaataccaaaacacggctcacccaacctacatataacgctccgtccaccccttctaacaccatggtagtcaccat

SEQ ID NO: 58554 - DNA, 429 bp, Glycine max
  Clone ID: PAT_MRT3847_23886C.1
aaaaacaagaatgaaatacacgcactatgactatgatttagagcgacatgcagttccaggggagacatttgtacaagagggaccaccaattaggagcatcactccatatgcaaaaatgtaccccaataacatattcactagaattgcgaagtacacactgggtacctgactatgctccgtgagcactagggccgaagtagaagacccaaacaccactcaagctctaattccaagatgctcactaccactacgcaaagccgaattgaacagaccatgggccagagatcttacctaggtggttcaagagctaccaaagatggtacattcaccaggtttgaacttatagcacactcactactcctattgagcctactgcaggcaattaacaaagggttccagcgccttcacaaagggttgtctgtccttgaa

SEQ ID NO: 58555 - DNA, 201 bp, Glycine max
  unsure (1)..(201): unsure at all n locations
  Clone ID: PAT_MRT3847_23887C.1
attcgcggccggtaacagcggacgccaaagcgggaatagaacaacttccccanggaggaccgggagggccgacaagagcagaagaagaggaaaagaaggaacgagcagcggaagaaaccacaagcagaccgaaaaacaaagggncncccggcaccaaagcagccacagagccgacggaagcagggacaccnaagacacacc

SEQ ID NO: 58556 - DNA, 736 bp, Glycine max
  Clone ID: PAT_MRT3847_23888C.1
tctgtttattcttcacctccaccaccaccaccaccaccttgggggaacttcctccaccccctccccaatctacaccttctcccacaccttacctgccaccaccatccccatctcctcccccgccaccgccaccggtataccattctccaccgccggcatcaccgcctccgtgcgaaactccaccttcagtttctccgcctccaccacctgccccagtatacgaagggccattaccacctatcgttggactcccatacgcgtcgcctccaccaccacccttttattgattcttttgaccgacacgcttttattattaattgcgtccctttcttctctaataccctcctccgatggaaggaatgttacgcgactctctcttgtcgcttattatgaattactacaagtactcacaagagaacgtacgacaaggttttgttctttattttatcgtcaagagaaacagaggaggttgaagcaaagccagggtaagaggagaaagatagtctccctccatattgatttcaattgttatgaataaataaaaagggagggcagagaaattaagagtaggttgaagagaaaattttatgtatagggatgaatccgagaccttaagttatggctatggctgcaaaggcagtagcagttccactttctgctgctgcttatttttattgttattgtctctcttatatcatactatttttttatataaattttatttctttttcctttc

SEQ ID NO: 58557 - DNA, 113 bp, Glycine max
  Clone ID: PAT_MRT3847_23889C.1
ggaattaggatcgagtagatttccatttactctctctcagtttccaggaatcttgagctatgggaaagtcttacccaagcgtgggcgctgattacaagagagccgttggagaa

SEQ ID NO: 58558 - DNA, 567 bp, Glycine max
  Clone ID: PAT_MRT3847_2388C.1
aaaaaaaaacaacgataggggcaggctaataagggaaaacccccgactaaaacgggaaaaggctaaggcccctataaaaatacaaaacacaaaattacccaggcccatgggcccccccccaatcgggtaaccccctcccctccccctttttaacaaactaaaacaagtcatcccagccaaaaattttgggggggctaacacaaaagggcttctccaaaagcagaattcccccaccttatttgccaaaccagcaaaaccaaaaaaaggggaaatctttcctaaaaaaaaaaatttcctggcaaaaggaaggcagggattcaggcaaaccgggggtgaaaaaaaacagctttttcaccattaaaggcaaaaattttatatcccaccaacaaaaaaaggaattaggggggggacactaatctaatcccaagccctaggcccaccttgaccaaaccctccaccaaaatggccacaaaatccaccaccagttccgccaccaaaggaatcgggtgcttaataaaacaagccctttttcctaaaatctcggccccaaaacgggatccccccgac

SEQ ID NO: 58559 - DNA, 259 bp, Glycine max
  Clone ID: PAT_MRT3847_23890C.1
tatttctgccacggatcaactgtggagagtgagagaatagagaatagaagatgacgccactcttcatgacgaacttgtctaagaggggctacttctgctctggtcattgtagtatacgtaagcacatgatgcagacctgtagtacgttgtaacgccctatgcatgcaccaccagaggatcctcttcaacgaaaactaccctgcgatttcattctctttcgacatgaccttttttaactttcttaaaaacacagtctact

SEQ ID NO: 58560 - DNA, 2071 bp, Glycine max
  Clone ID: PAT_MRT3847_23891C.1
cgcgaaaaagacaaaggggtttgtattgacactaataatatccgatcatctagaacgcaggcgttgagttgagaatggaaggagggaaacgaggcacgattctggtcaccaacgacgacggtatcgatgctcctggcttaagagcattggttcactccctcgtcaacgccaaccttttcaacgttctagtgtgcgctcctgatagcgagaaatcagctgttagccacagcatcacttggctccatccagtagctgttaagcaagtacagatcgagggaaccaccgcatttgctgtttctgggactcccgctgattgtgcttctctagggatttccaaagctctctttcccacagtacctgatctggtggtcagtggcataaacaagggtagcaactgcggttatcacattgtttactcaggcactgtagctggagctcgagaggccttcttcaatgatatactttctatctccatttcatatgactgggttaaaggaaagagtaagctacaagacttcacccttgctgctcaagtatgcttacctatcataagcgctctactggttgagacaaagaatcaaagctaccctagaaaatgttttttgaatatagacgtgccaaacaatgttcctaaccataagggttacaagctaactaagcagggtaaaagtatcatcaagactgggtggaggcaagtcacatctgagacagaaggaccaaaaatgtcatctgatatgaccaatacagataaagaaacatcaaagaattttgactcatcatctgcatcaccagaacatcttttgtttgcgagagaggtaataggttctgtacttgatgaagatgatacggactacaaatgtttgcgggaaggatatattactgttactcctcttgctgctctcactcatgtggaggtagattgtcaggcctattttaagaattggctacaaagtgtccccgaactcccctcgtcatcatctttataatgctattcctccggttcactggaagtgatgccaactcaatctgttgctaaatcaattattttgatcctgagcaatttggttgctccggtatgcatgccatttctccattattatcatcgggcaataaagacatctcaacagtgttatataattgaatgagagcttaatttctggaatctaacaagtaataacatgccactcatttttagattaatatagtagcaattcttagtcaagaatatagtgctttgctttgtcatgcaatcaattataactatttcttggtcgtcgtatgtgtctttgggaaaagggttacaagctaactaagcagggtaaaagtatcatcaagattggatggaggcaagccacatctgagacagaaggaccaaaaatgtcatctgatatgaccaatacagatacagaaacatcaaagaattttgactcatcatctgtatcaccagaacatcttttgtttgcgagagaggtaaaaggttccgtacttgatggagatgatacggactacagatgtttgcaggaaggatatattactgttactcctcttgctggtctttctcatgcggaggtagattgtcaggcctattttaagaattggctacaaagtgtccctgaactcccctcgtcatcatctttataatacgtaagtcctatcacgtatttgtagtttatataacagccttgattgcaattcaccactggcagtatttggttttacacttatagcattcttgctagttaagaatgattattcttctgagatgaatggaaaatttaagtaaattataatttcatgtttttaattgccaaattttaaaaatcccgtgattattcttttgtacgcttataaaccagtacctctggcaccaatccctttttattcccaagtttcatgatagcaaatttcacacataaattgtacgcaaattgaagttgaatttgtttttatccgttatatttaattttatactgaacagagcaattcacatgatgcgatcaatagaacatgcattagctgccaaaaaaaaaaaaaaaaaaaggacggcccgcccctagtagactaggcgagc

SEQ ID NO: 58561 - DNA, 290 bp, Glycine max
  Clone ID: PAT_MRT3847_23892C.1
gttttctaagctcttcttctaacacttcatattcatcatcctcacactttcttccacatttaataccgtaactcactctcccctccctcaaaaaactctctctttctcttccctctccctctgtcccctcacggtcacgcattctaccaaccaaataaacttcaaattccctctatttctcttcattctttcttcccataaacttttctctctttttatttcccacttccaacccttttcatcagtcaacactttcacccgattcctcatcacctaaagaaaaagaaaaa

SEQ ID NO: 58562 - DNA, 152 bp, Glycine max
  Clone ID: PAT_MRT3847_23893C.1
catttacatcgaaagacacaggatactatcattgaacagcttcaattcctattcctgatagcttgcggggctcacgattgatgtcttgttcattactgtctcactttttcatctaaaccagacattgacttatatggtatctttcccaaatt

SEQ ID NO: 58563 - DNA, 230 bp, Glycine max
  Clone ID: PAT_MRT3847_23894C.1
ccacgcgtccggttataaactataaaaaatgaaaccgctatccctgcattttatctcattgcacaccaacggatcgctacggctaatgaatactgttctgggtgccgcagagtatacaaccttaccttcagcacacccgtcccgtgtactcaccagcagaaccattgcctgaaaggacgccggtataataaaccacatcagactgaaccactcactgcaaagtaaatgtt

SEQ ID NO: 58564 - DNA, 173 bp, Glycine max
  Clone ID: PAT_MRT3847_23895C.1
caaaagatcaacgaaagggggttaattcttaaggtttttaatctctctcatcacacttgaatcatttaaggtcctcctaaaagaattttcctctataagttgggtatctggaatgtctacttcactgtagaggttacatatcatcatcatcttggatttgcactcattctcct

SEQ ID NO: 58565 - DNA, 241 bp, Glycine max
  Clone ID: PAT_MRT3847_23896C.1
cgcgacccggccttaattgcccgaccgacccacgccggccgtctatttttagaactgaaccgtctgcaaacagcgagagtcaatcttgttgtgtcctcccccttaaatcaacacgctgcctgctatgcttgcacaacggcacaagatcccatcttctcaaacatcgattcagccatacctcagacactctagctagaactgctacacgatctgttgtacagtgagctgttcactctaccaa

SEQ ID NO: 58566 - DNA, 349 bp, Glycine max
  unsure (1)..(349): unsure at all n locations
  Clone ID: PAT_MRT3847_23897C.1
aacgtccaattcttcacaatccttaaactgtttctctcaaaataatactaaattaaaaaaacaaaattacttaagattatctaattactcatcagtaaatanctatacctctactataccaaacttatataataagaaaaaagagaacataaatttnaagactacagatttaaagcttaatcttcccagattccaatggcctaaagaaaaaccaaatctgttctctgtaagctcaccaaaacttaataagaagccactctttcctttacttcctactaaaaacaaaatttactcatcgaaccagagaactgttgtttctaacaccacaaaaaatttgactcatgccata

SEQ ID NO: 58567 - DNA, 385 bp, Glycine max
  unsure (1)..(385): unsure at all n locations
  Clone ID: PAT_MRT3847_23898C.1
aattcctgtgtcgacgagcaatanagtcggcggccgccctaaaaaaaaagggtggatttttaaaacgagagattggtatgaatgccatgatgcaaagtttaataaaaccaggaataaaatacaatttgctcatgtcaacactggagtttcctggttcacagataaacagaactcttactcctcgatccattcacttatcaaatttacagatagatttctcagaatccaccataccaaagctcctcaagggagctgtccgcaccataagtgacatgggcaaatgtggtacccctgagtaatgttggctgtagaatctgaaaaaatatggcgagcaggtacacacgtatagaccagccaaaaacatgaaaattttgctttattctac

SEQ ID NO: 58568 - DNA, 459 bp, Glycine max
  Clone ID: PAT_MRT3847_23899C.1
gccacccaagaaaaaatatggggttaaaggaagtgtcctttacataaagctaaagtcatgggttgcctaatcttgccaaaataactaaggataaaatcttctcatccaaggggggattgtgcctttacaattccctcagcaccatgttcaccagtcaatttgcgggggggaccacccaatggcccacccataatctttatttcggctgatattttgggaaccacaagcttcttttttttaagaagggccggaaaggcttcactattgccgggagatccaagagctatcctgtaagagccatcggggagaacctctattataactccaacagattccttctccagccctgggggacgcgaccaatatatttgggatgaactaaggccctttcgttattcccaccttaaactggagacatcatggccttaccccctcggcgtggagttgtacggtctcctc

SEQ ID NO: 58569 - DNA, 213 bp, Glycine max
  Clone ID: PAT_MRT3847_2389C.1
atggatgtcataaatctgagcccagtgttcgttgatgtcgcaattttgttcatgttccgtcacgtgccaccaagctcaaagaacccagagaaaaatgtctttttcgttgttgtaactctccgtaaacctcttgggcaagttgaggatgatgggtattgccccaaacaagatattgttggaagggtcggcactgtcgtcacagatgcaccgtag

SEQ ID NO: 58570 - DNA, 735 bp, Glycine max
  Clone ID: PAT_MRT3847_238C.1
ccggcttgacccagcgttcggtccttctttggttcacatgccacaatggggaaatcaaattccacccaggcaaagaaaccagaggacgttgaccttcttaaattcgacattgccttcttcgcttccgagctcggcttggccactatatcaaccacactcagggttcaacgatgtcgatttccgcaaaatcaagccgaacaagcccccaaagaagaagcaacaaacgcccgaaaaactcacaccccaaaattcccagaatccaaagatcaaaactttcggcaaaaacaacggaccccacgagaagcgcaacgccaatcccgaaccgaaaccgaaaccccctgttctatcactggagaacggtgcccacagggaaaaggggttcaacaacaagtttaggaaccttccaaagcttcctttaatgaaggcaagtggtttgggagtgtggtttgaggacatgggtgagttggaagtgaaggtgattggggaagggaagaaggtggaggtgaaggatgggggagagtggaaaaggggtttgttggggaaaaaagagggaattgggggataggttggatggcacagtttggttcaggattatgagtcatcaagagggcagagtagtgatattaagatgttgggtttcaacacagaggtctggggactgctgctgataaagtttctgcttttgctgtgcttgtgggggataatccaattgcaaatttgcggtcctcttgatgc

SEQ ID NO: 58571 - DNA, 382 bp, Glycine max
  Clone ID: PAT_MRT3847_23900C.1
caatgcaaaactaaaaaaaaaaaacttttttaaaaaaaaaaaaaaaaaaatatgcggtgtaatataaacaaaaggagagtcataaatcaaacagaaccaccaccaataccatacaaaatactcccgcccctccctttattaacctaacccccccgcaaattaatttttccctctcaccactaggagttccactttcccttttaatagactaaatactacctttttttaaaaaggaaaccctgtccttttccttaaaacttttttaaccccccccttttcacaccctttttgacagaaaccctaaacgtgttaattccggttttcttaatatggtagcaaccccccattaacagccccttaacataccttccctttttttttg

SEQ ID NO: 58572 - DNA, 306 bp, Glycine max
  Clone ID: PAT_MRT3847_23901C.1
gtcatcaacccgcgccttgccggtctgtttatacgtggcggacgcgtagcgcgttcggtacctgcactctaaaaggcgtcacggtgccggaagaccactcgccttttatgatcgacgaatatccgattatcgctgccatcgtcaacttcctggaaggggcgaccgagatgaacggtcttgaagaacttcaaatctaggaaagcgaccgtctattggacgttatcaatggcctgaagtataatggccgtggattgtgataagggcaagactgctgctcgtttatgcgtggtacgcccttgatatgta

SEQ ID NO: 58573 - DNA, 186 bp, Glycine max
  Clone ID: PAT_MRT3847_23902C.1
taaaaaacaccacaaaaagttgtcatcacaacttaatcaatctaagcgcgcagtggattttctatcccaaactatcattattaaacatttccaacaatttcaaatgatcttaattatcgaactaaccatacctacaactataagacttactaatcaaataattcttttaccaaataagaaaattta

SEQ ID NO: 58574 - DNA, 162 bp, Glycine max
  unsure (1)..(162): unsure at all n locations
  Clone ID: PAT_MRT3847_23903C.1
attacngcacgcgtagtaagctcggaattcggctcgagcggctcgaggtaaaactcccanttttaannccntttctccgncgncgcatngttgctgncatacaccgctgancncgnncatgtngcacctccttcctncanttatcagtttntctccactgtg

SEQ ID NO: 58575 - DNA, 799 bp, Glycine max
  Clone ID: PAT_MRT3847_23904C.1
agtgttgcaatagccaaaaaacattaaccagtcatgtgcagtctttgcagctaccaccatatcacacaaaaacacaacacacccaaaaacacagagtgagacagtattctcaatttctatatataacaacaatttttgctaaaatatgaaacagacaccttcctgaagaagcaaccgaacaagtttaaattttacaaccccatccatcatcatcataacactatagccaaatgaaacaatttaaacactgttttaattatttttgtttctcttgaaaagaaagataaataactggataaattggattacagagctaagattgcgatcgatgtttctcaatcttcttttcgagctcgtccttctttgcgcccacaaccttgtcgacttccttccctttcttacacaacacgaacgtcggcatcgcctccacattaaactccttcgccacatccggcaattcgtcgacgtcgatcttgacgaagtcaacgtcggtgaacttttcggacatggcgtgaatcgctggctctatgaatttgcaagggccgcaccacgacgccgagaaatctatcacaacgagcttattggtttctttgagctcgttgaagtggagctgccagcgcgccgaagagtggaaagactggaccctagaagcagaactctccggcgaagacgtcgccgccgttgcggcaccgccagttaaggcagaaagtatagcgcccattgctttgcggtggtgatcgtggtattccttctggtgccgaattcctgcagcccgggggatccactagttctagagcgg

SEQ ID NO: 58576 - DNA, 291 bp, Glycine max
  Clone ID: PAT_MRT3847_23905C.1
tttttaatcttaagtaaccacttttatgaataaaaaggagatggggcatggaaagataggggcacttttcaaaaacacttgtttcagctcaataaaactgttgtccaaaacatgggcttattattacaatattgtttacacgggtgcgaacccaatgaacaaccaaccttttggtgactcaactaacaccggggcaattaattccaagaccttatccttttcctaatcaactaaccctattagccaccagctcaatacacccaaatttttccaccttgtgcccccatgatt

SEQ ID NO: 58577 - DNA, 275 bp, Glycine max
  Clone ID: PAT_MRT3847_23906C.1
ttgggaagtgcaagatgatgataatgagcatgaaacgatgtattaaagaacaagtcggtggagtaggagaagctgctaactgtacgtgtgctttactgcatcgtttcatgctcattatcattatcttgggaagtgcaagatggaaacgggttatggtgcgcaacaccctataaatggactggaggaagccaaatgtaacgatgtgcgaatctcctccaaggccagtgaaggttacctttgctgagccggcgactcactggaccgatgccatgccc

SEQ ID NO: 58578 - DNA, 1914 bp, Glycine max
  Clone ID: PAT_MRT3847_23907C.1
caatttttattagtagcatggcactacagtgaaccaaacccattatatgtatcacacattccaaccctccttcccggatttcccgctcgagcccctccactccaaaaaaatactactaaagagatgagttttgcaggttttctttctcttcaatcaatgtctgctacctgcggcttcttcttcttctccttcacccttctcttctccttcttctccttcctcgtcttcatctccaggatgaagccctggtgtaactgcgatctttgcaagagctacttgacggtgagttggctgaaaaagttccccaatctctgcgactggtacactcatctcttgcgtaaatccccaaccggcaccatccacgttcacgtgctggggaacaccatcacctcgaatccccacaacgtggagcacattctcaagacgaatttccaaaactaccccaagggaaaacccttctccaccatcctcggcgatcttttgggaagaggaatcttcaacgtcgacggcgaatcgtggaagttccagcgcaagatggcgagtctcgaactcggcagcgtggcgattcggacgtacgcgatggaattagtcaacgaggagatccacgcgcgactgatcccgatcatggaatcaaccgcgcgtggcgaattaaactccgtctgcgttttggatttgcaagatatactacgaagattctcgttcgacaacatatgcaaattctcgttcgggctcgacccgggttgtctcctaccgaatctcccagtctcggacctcgccgtcgcgtttgacctggcctcaaagctctccgccgaacgcgccatgaacgcgtcgccgtttatttggaaactaaaacgactcctcaacataggatccgagaagaaactgagagaaacaattaacgtcgtaaacgacgtcgcaaaagagatgataaagcagagaagagaaatggggttcaagacgcggaacgaccttctctcgcggttcatgggatcaatagacgacgacgtttatttaagagacattgtggtgagttttctattagcgggtcgtgacaccatcgctgccgggttaacgggcttttttatgttgttatcgaaaagcccggaggtggaggagttgattagggaggaggtgggccgggtgatgggcccgggccaggagtttccttcgtttgagcaaatccgcgaaatgcattacctgaacgcggcgattcacgacagcatgaggctgttcccaccgattcagttcgattcgaagttcgccacggaggatgacgtgttgccagatggcactttcgtgagaaagggcagtagggtaacttaccacccttacgcgatgggccgaatggaaaatatttgggggcccgattgtcttgacttcaggcccgaaaggtggctgcgtgatggggtgttcgtgccagagtgtccctttaagtaccctgtttttcaggctggtgtaagggtgtgtttggggaaggacttggctttgatggagatgaagtccgttgtggttgcgttggttcgcaggtttgatattcgggtcgcccaaccggatcaggagccccggttcgcgcccggtctaaccgctactttgagaggggggtttccggttcgggtttgtgaaaggaaatgaatagataaaggagttcacaacatgaatgtgaatggaatcatgaaatgaatgagtgaatgaaggaacagttttcgtgtaaataatataatgttgcagttaaatcgaacgtttttctttttttttctcctcttttaaacaggcgtctttttgaatttgcgtttatgtttattattgcccagtgaagtaaatactaaagccattgcaaattttggattttggaaaaaagaaaaaaaaaaccccccgaaaaaaaaaaaaaaagggcggccaccaactagtgagcac

SEQ ID NO: 58579 - DNA, 800 bp, Glycine max
  Clone ID: PAT_MRT3847_23908C.1
gggttaacgggcttttttatgttgttgtctaaaagcccggaggtggaggagttgataaagagaaggcgggccgggtggtgggcccgggccaggagtttccttcgtttgaacaaatccgcgaaatgcattacctgaacgcggcgattcacgagagcatgaggctgttcccaccgattcagttcgattcgaagttcgccacggaggatgacgtgttgccagatggcacttttgtgagaaagggtagtagggtaacttaccacccttacgcgatgggccgaatggagaacatttgggggcccgattgtctcgagttcaggcccgaaagatggctgcgtgatggagtgttcgtgccagcgtgtccttttaagtaccctgtttttcaggctggggtaagggtgtgtttggggaaggacttggctttgatggagatgaagtccgttgtgcttgcgttggttcggaggtttgatattcgggtcgttcaatcgggccaggagccccggttcgagcccggtttaaccgctactttgagaggcgggttgccggttcgggttcgggtttgtgaaaggaaatgaatagcaagtatgtggttgataaagtcataaagccataaaggagttcacaactagaatgaaatcatgaaatcaatgaggggatggaagaaccgttttcgtgtaaataataatgttgcagttgaattgaaagttttctttttccccctcttttaagctggtttcttgctgaatttgcgtttatatttattattacccggtgaagtaaatactaaatactataagcgttgc

SEQ ID NO: 58580 - DNA, 629 bp, Glycine max
  unsure (1)..(629): unsure at all n locations
  Clone ID: PAT_MRT3847_23909C.1
tatgaaacgtcgcatgggcacgncgtnnnacgtaagnncttggaatnccttctagaagacgnngccgccctntnntttttttatttatttattttattttattttatttattttattttttttttattttttttttttatttttttttttttttttttttttttttttttttttttttttttttttgggaacccgggggccaacccggaaaacccggaccggacccgggaggggaacaaattttcccaaaagggagggaaaaaaaagggggggaaaaaaagggaaaaaagggttcccggggaaaaaaggtaacccgccaaaaatcccaaaaaaaaaaaaagcggaaaaaaaaaagggaaaacccgggggggccaaaggggggaccaaaccaaaaaaaagggggggggcccaacggccccttttcaaggagaaaaaccgggggggccagtggaaaaaaaaaaccccccaacccccgggaaaagggggtttgcaaaagggccccaaggggggtttttttttaaaccagggaaaagggaaaaaggggatggccctcaacccccggccccgaaaaaagaggaaaaaagcgccccaccctggttggccccaaaaggaaaaaacccggtgggggg

SEQ ID NO: 58581 - DNA, 958 bp, Glycine max
  Clone ID: PAT_MRT3847_2390C.1
ttttgttgttttttaacataaaaaaagaataaacacactgataccaacttaaggagattacatatacacatcctcctcacggatgcttataaaattacagctctcaaattctacctaattgaggtggcagctaactctattagctgcatctttctctacctataatattgctttgcatttaataatacattggcagcagcaaccatcaagcaacaaatccatgccaactccactgcgtgaaaagataataataaacccttgcataataatagaaggtccaaggactaatttggatttgagtgtccagaaagcaaagttaactcaatttcaagctaatttggtctctgaaacacagcatccccaaattttctgtttcttttaacatttcgtactttgcatttgtatatcaatgttgacaaggatgcttcttgatcagattgagaaccctgattaggttcagctaactactctttattgccctcatacacaccatctctcttttatttcctgtcttgcattattttgagcttcagcaaatgtaacactatccttacacattgaacacattactatatatgctctacatcagcggtaacatagataaatctcaattcagactaaaaatctagaaatgaagaccctttctgttcaccgaagaaagcaaccgcttaaaaagaagagacaatgcaaccatttcatttttttttttgccattgcctcacaactaaaggtatacatacaacagaacagaaagacagggcagatgaaaaagttgcttctctacccctctttggttggttacatgattctaacagcctatatatatttcggagtttggacttcgactcctgtcaaagctttactttacggttaaggttgaggacggagaagcattaattacagaagatggaggaaggcaatgtctttgcccttctgtcgtcttctcgcagccctcgag

SEQ ID NO: 58582 - DNA, 253 bp, Glycine max
  unsure (1)..(253): unsure at all n locations
  Clone ID: PAT_MRT3847_23910C.1
cggacgcgtgggtacggctgcgagaagacgacagaagggatatattttctgagtgaaacaaatttcctgtggatttgatattcggttcttatcattttatattacttgtacgacttggtacatttgccgattagcatcgcagaagagcgaacatatgtgcataaggtttcacaagagtatttggtaaaaattattaaaaataaaaagaactcatattacatccaaaanaannnnnnnnnnnnnnnncccnana

SEQ ID NO: 58583 - DNA, 205 bp, Glycine max
  Clone ID: PAT_MRT3847_23911C.1
atatctttttaatattactccaacctcctcttcatcccccgttcttcttttctttctctcttcttttttttcgccccaaattacaaaatctactaaagaatagataacctccgtcattcccaaacctcttagacccctatcccccaccaaaatctattaaatctctcctctcaatcaaatattcccttaccatcccactataatt

SEQ ID NO: 58584 - DNA, 329 bp, Glycine max
  Clone ID: PAT_MRT3847_23912C.1
taatatctggttttttggaaccatccgataggaactctttggacatttttatttaccaggacctgcttacacgtgatgagcttctttcttactccttccgttacaaggaaattgataatggaatgctgtgggaagttgatgggaagtgggttgttaaaggagcaattgatgtagacattgttgcaaacccttcttctgaaggtggatgataaaattacggatttcatgatgcaacttttaaagttgtttacatttgtgacacattcatacttcatgaacaacccgcatttgataataaacatttttgtaccctcattaatatgtttatc

SEQ ID NO: 58585 - DNA, 304 bp, Glycine max
  Clone ID: PAT_MRT3847_23913C.1
aagtgtatgtattacgaaaaataatcctaagaactaaggttaaaatgtagcaccaaagaatgaatccacgaattgaatgaactgggctacaccggcaaacaaaagacctaagctcaaataatcacaactgcaaagggccaactttttataaagctgagcaggccatggaaaatgcttcacacgattatataattagccttgatcaacagcgatctctgataataatagggaggagtacagaccttaaacggcctgacacaggtgaccttcacggcactaaaatagcttactggataggaaacga

SEQ ID NO: 58586 - DNA, 375 bp, Glycine max
  Clone ID: PAT_MRT3847_23914C.1
gtgaatgaagtatccattacagacatataccctcgctaaaggattgttttcatgttttctttgaccaatccaggatatgtttaaatgtgtcaaaccatggtgttgctgttatacaatcctagtgcatatatattgtaaatattaatagttaaaagaattctgtcaaaaaaaaaaaaaaaaaaaaaaaaaaaaaaaaaaaaaaaaaaaaaaaaaaaaaaaaaaaaaaaaaaaaaaaaaaaaaaaaaaaaaaaaaaaaaaaaaaaaaaaaaaaaaccccaaaaaaaaaaaaaaaaaaaaaaaaaaaaaaaaaaaaagggggggcctttttaaggggcccacttttttcaacccgttttttaacacctaatttttttt

SEQ ID NO: 58587 - DNA, 367 bp, Glycine max
  Clone ID: PAT_MRT3847_23915C.1
aactatctggaaaagaaatcaatccttctctccgaaaagaaacgctatagtgtgggagaaaagggtattaaaaaagataagtgccaaacctgaaagatgtgcgttctacctacctcagttgaagagaaaacacagaccaagaggatataagaaaaaaaagggtctagagagaaggtattaaggtaagagttaagaccagttagcatttcttagtgttgctgtttgttttcgaggctcaatggtcaaagggaaaggaaagatggactgacggaaagagatctatctatgtggcctatggttaacaaagaggttgattgttgatacctgaataataatgaccgcactcacaattatagactagctcttg

SEQ ID NO: 58588 - DNA, 144 bp, Glycine max
  Clone ID: PAT_MRT3847_23916C.1
ctggtaaaaagccacgttcttattcgtcctctatccttggtattcctgatggtttcaactccattctactcctttgggtcaacctcttaatttgaggtttcccatccactgccctctctctcaaccctcctgtttttttttttt

SEQ ID NO: 58589 - DNA, 564 bp, Glycine max
  unsure (1)..(564): unsure at all n locations
  Clone ID: PAT_MRT3847_23917C.1
ggctcgaggagagaatgggttcctcggaagccgaaaacgaggctctccgtggcgccgaagaagaagagggttctacttctaacaagaaatgcgggcaaggcagacattgtttttaactcaccagaagataattcaactctcaatcttagtgatgttcaaggacttgtaacttgggtgctcagtgaaggatttatgccgtcatgggtttttattaagaataaacctcttattcccaaagtggttatgctctatgtgccaggcctggatgcagctttgttcttgtcacagtctaaaatgcttccaagattaaaaaaattctgtggcaaaccaagggcactcctagctcttagctgtgtgtcagatggtatgcagacgatagatgcactcctaacatgcaagatgaaaaggaaaagggacgagaatagttcaattatggggaaatttgctcggacatctcacaaggttttcattattcaactaatatatgaaaatctctttcattanggaaaangaggttgttgtgatacagacagtctatcatttaggagcttacanaagacatac

SEQ ID NO: 58590 - DNA, 540 bp, Glycine max
  Clone ID: PAT_MRT3847_23918C.1
agtagatgggaattaattaccgggctgactagccgacggccgccctggtgtgtcttttcttgttggagatgtatttgttgtatattattgaagttggggtatacattctagtatatggtttttttttccctctcttggcttgtagttatttctatgttcatggataatgacacttagaaatagtgaccaaaacagaaatcatgatactttgagatgctccaaaattgctgaaatatcacagtcctcatagctcttctctgcataaataatgttggggctatcttgggagaacacatcttctcttttgtaactgtcttcactgcgaagaagcctttcactgccatattcaacagccccctttaaaacaagtgtcttctgtatgccagccactagttcttcataatccgtgtcacctttttctcccacaaatacaaccactttggatagatcaattccccccttgactgacagataccttagtgcttgttttcttgaagcaaataatggtatcacatttaatctcaatcctgcatgtgtata

SEQ ID NO: 58591 - DNA, 755 bp, Glycine max
  unsure (1)..(755): unsure at all n locations
  Clone ID: PAT_MRT3847_23919C.1
cgaagctccggctcgggctcgagcaattccataaaagtataaattaaaatttgtgctgcgtcgtttccgaacaactttgttccaagtagtagccgcagagagaatgggttcctcggaagccgaaaacgaggctctccgtggcgccgaagaagaagagggttctacttctaacaagaaatgcggcaagttctacgatgtttatggacccgaaggcaaggcagacattgtttttaactcaccagaagataattcaactctcaatcttagtgatgttcaaggacttgtaacttgggtgctcagtgaaggatttatgccgtcatgggtttttattaagaataaacctcttattcccaaagtggttatgctctatgtgccaggcctggatgcagctttgttcttgtcacagtctaaaatgcttccaagattaaaaaaattctgtggcaaaccaagggcactcctagctcttagctgtgtgtcagatggtatgcagacgatagatgcactcctaacatgcaagatgaaaaggaaaagggacgagaatagttcaattatggggaaatttgctcggacatctcaacaagaagaaggttgttgtgatacagacagtctatcatttaaggagcttacaaaagacatacctttccctgttacatactatacactaacagagaaagagttggaagagaatggatattctgttaataagccaggttttctttctactttgcccgctccttcaggatctnctttttatg

SEQ ID NO: 58592 - DNA, 713 bp, Glycine max
  Clone ID: PAT_MRT3847_2391C.1
gcgtgcgcgcgctcggaagtctggctcgagtttatttctatatccacacccttcatttcttaagagttcagagtcatggaccaaactcaaaatgagtctggttggatgcattctatcaaagtgacactaggatctctagatcacagagaggttaagtccttcataagcagcatcccttgtgtttcaagcaagcttagaaaatcaaatgaggaagcttattcaccaaagtttgtcagcattggacccttatacagaggaacaagtagccaccttctggccatggaagagcacaaatggcgttacatgctggctctccttcatagaactcaaaatccagtttcaaccttggatgaatgtggcactgtcattctaggcttggacgatgcagttcgtgcaagctatggaggtaacatcaaatatgaagctcatgagctagccaaaataatgttacttgatggctccttcttgctagaacttcttcttagatgcgcaccaccaaacatggttcctcaaattccaaaagaagataaccataataatggttcttcttcagatccaatactaggacacaaagaggtgtttttatctattctcaccgatttcactctactagagaaccaaatgcccttttttgttctcaagacattggctaggatgctttttcccaatgtcttcacaagtgaagctgatcaccttggtgctgatctcacact

SEQ ID NO: 58593 - DNA, 290 bp, Glycine max
  Clone ID: PAT_MRT3847_23920C.1
ttaaggtttatattttggagtttacttagtgatgatggattgttattaagagataaggataccatccaattggcagatccgccaggctgctggtgaactcaattacatacgacattcttaactcatgaaactttgctttccgggctcattcaaccactatatataatgcttatgaaggggcagcaactcaacatgatgtttttgaacccataagaaaattccggacacgacaataatgcttacgcccttcccctattaggcatcttttttaacctggacttaattatgga

SEQ ID NO: 58594 - DNA, 236 bp, Glycine max
  Clone ID: PAT_MRT3847_23921C.1
gtcagaggtgcggtgctggcgagagttaaagaatgcttcactctgtcatcgagaatacatgagttgtggagaccgcaatcaaaaaaactttacacttctcaatcttcttaatcagacactattgaatcaaacagttcttaatcaaacttgttctttggttgaccctgatacaatcaaagacccaaaaaccttcaattttggaatattttctgatgctctagattcacatgtggtag

SEQ ID NO: 58595 - DNA, 367 bp, Glycine max
  Clone ID: PAT_MRT3847_23922C.1
cggaaaaattaggcttcagattccgggctaaaattggacggacggctgaatgcaaatgaggcgaaatttttattatagtttatacaaatgcccccataatatttttttacccttaatatgaagtacttaaacaaatgaaataaaaatgatatatatctcttttttatgatttgtaaaaataatataatctttattcatataatatggataaaaaataacaaattaaaactttattattaaaaaaaaaaaaaaaaagggcggtataaaactatatgagatatataacctgtgaattaattctagaccataacatgcaagtgaatacagatttacatataatgagaataataaagctaggagtaataat

SEQ ID NO: 58596 - DNA, 426 bp, Glycine max
  Clone ID: PAT_MRT3847_23923C.1
acgagatttggtgtgatgtcgctcgtcagtatgagaatattgatggtatgcttcccatctgtatttattgctagcagtatgcataaactgatccaatccaataaaaaactgatccaaagaatttaaaactgactaaaccgagaatctaaaaaattgaaaacaaatctgattagatttcggatttgattttgaaaacttactaaattcaaatagaaattacagtgacatactatttgaaaatttatgatatcactcatgtttacatttttatttatttttttgtaaaattatcacataacttaatacttatttatgaaaaatatttaattaaagataattattttagtaactatttgagtaaagggtatttaaatataattattaagctgtgtaaatttatctttaatagtatagtatatatttgag

SEQ ID NO: 58597 - DNA, 265 bp, Glycine max
  Clone ID: PAT_MRT3847_23924C.1
aacagggttcggattgtgactgtgactgcggactataaacgatgacgatgaattgagaatctacatcgatatcgctatcaagcaatgaaggagtagcatgcagtgatgagaagagaataaataggtgaaatgtattgctatgagaaacagtgactgattgagattaggagtcagaaaacgcgatccaaaatgcagcgaccgagttctggggatgacttggcctaaagaggtgagtacaacccttctactaactatcctgtggcac

SEQ ID NO: 58598 - DNA, 471 bp, Glycine max
  Clone ID: PAT_MRT3847_23925C.1
ttaaaatgacttaaaatcactcgtcacctctatatcatataattatggttcttcaaaaaaagtttcccacatttagatcctcatgttttttaattcaacgttagtgtgtcattgatttttataatgataacatgacaaacacctaaatatgacattaatagtttgttgtacataaattaaaaaaaatactaacttataatttcaatacactaataatatcatgtcagaatatgtattagactatcatcactaacatgtcacgttagaaattcatgttaaaaaaaattaatcatacactcataatgaatcaaaagcgttaaattttaaaaacattatcaaacgtgcaatgaattttttaagggagtataaaactatacaatcataatcataaaattatatcgactaaaaatggatttatggctttcagaatggatagataacacttattttatttatttatatttttttaaa

SEQ ID NO: 58599 - DNA, 392 bp, Glycine max
  Clone ID: PAT_MRT3847_23926C.1
ccacgcgtccgttcagactagcactcttttataagcatgggcattgaggctcaccaccggataaggagaaactcagtgtacatgtaggctcgaatacgaaactagaatggtaaactgcatgatagaaggcactgttcgtggattgcacccgtgaacaataccatctgcagacaacactgagggatctaatggcaaagaaaaaatagagacacggatggctacaatcaaaggaaataatgggggaactgacgaggctctagaacctgtgaacagggccttaatactatgtcttgtgcacattaataactagatcactatggataatgagaaagagcaacgcagttaatgagagccacatgtacttgcgaatgctagcaacgtcatatctgttg

SEQ ID NO: 58600 - DNA, 2079 bp, Glycine max
  unsure (1)..(2079): unsure at all n locations
  Clone ID: PAT_MRT3847_23927C.1
cccacgcgtccgtccacgcgttctgctgttgactccacttattcaccaatttaggctatatgcaatcaaatttgcaaaacacaagtttgaaaccttgataaatattgttgttccattggcatcaaaagtaaggtgcacaattcgtccttcaccataatttgcatgaaatcaaacagtgataccagcaaatagtgacaagcagaaaattcatactgaaactaggaggttcattgtagaaggtggaagaagagaagttttccacgaagaaaaaccaacaacaacaatgaaagaaattatacaatgatcaacagcacaaaagaagctgattttccactaaaacaagaaggtctttcatcaggtgatcatgaaaaggctaaggctccatcgacctcatcatcatcatcacaatggctaaaactgaaggatccaaggattgttcgtgtgtctcgagccttcggaggaaaagacaggcacagcaaggtgtgcacaataagagggctaagagatagaagagtgaggctttcagtccctacagcaattcacctctatgatctccaagataggcttggactcaaccaaccaagcaaggttgttgattggttgctcaatgcagcaaaacatgaaattgatgaacttcctccactttctattcgtccggctaacttcaccccttggtaatccctctgttgattgttgtcttgaagttagcacctctcgtgaaggttcaggccagaacactttattgtggaaaccaaaatcaggagaaatggttagtgatgataaagcaaattggatgaatagaagtgaaggagatgatgacaacgcgcacgaccatactatcggtaaacaaggaagcaataataatatttgtcatggtggtacacttgttttgccaaataatctcttgccaagaccaaaccatccttcttttttgagcttgatgaacattatgccatcacttggttaccaatgggaggctaattattcagctcatgatgttaatattggtcaatggcaaaaccatggatttcttaaccaaacagatgtacacagcatcaatgtggttccatttccatcaacattggctctatcaactgggaatgatactactactacttctcagattttggtgtgtcctcctcatggagcaacaacacagccatattttccttcttcacatcatgttgcagcaatggagatgaatgcaagacaaatcaaccactatcagatgctgagttcaagttctcatcaaaatctcttggcaaattctctcaatccatcatcacagcaactcatgagccaatcagagaaattgccattcagcttgggaattaggcctaaacttttccattctcctaacagaagtgaaagccattcccaaaaagaccaggatttgccttccaagtgatgcacaaatagtgcaaaataaagttgtcaaaatttcttctcctcacaagttatggattgatatcatgagggcagtgtgagaagttcattattatagttgcaagacatctttttattcaacgttttgcggtttgaacaaacatttcgttttagtcaaagttatgtttggttaattttctgattttccattcagtttgatctatatggataccaagcaaaggtctacaaaagaatggctttttttcaagggtaagagcttatcctgaagtgatagtgtgattgctacgctaaagggaacgcatgctcagataagttctctctctctctctctctctctcttctacattgagaaaggttggaaggttgaataataatgttatcattttgatagtgcgttttggatttggttaaacatgtttttcgtttgaatcagacaggatttctcagtgtcctatgttatatattatgtctaattttgttaattatagtacgtttttattaaggaaatcatgttttattctttacatcttatgtgtttttccatgagatgagactgagaaaaataatttctccttcatgagttcatgtacactcacccggcacatgaaaaatgatgcatagacacttgtttgcttgtgtttgtatatattccatgcatgagannnaacatgc

SEQ ID NO: 58601 - DNA, 102 bp, Glycine max
  Clone ID: PAT_MRT3847_23928C.1
atattctttattatggattataagattaatccatctcatagttaataactaatccttactaaactaatcaatatggtcatagggaatgtggcatatgggtac

SEQ ID NO: 58602 - DNA, 549 bp, Glycine max
  Clone ID: PAT_MRT3847_2392C.1
agcatggaaagaaggaattagaaaagcctcaagtgaagtgtacttgtaattggttctttgatatttttccaatccaattgaatggggacgccaagaggagaagcgattctttgttttttatttttcttctggttttggagctcttcgaatgctttgctttctccaaagggtgtgaactttgaagtgcaagctttaatgggcataaaagcttctcttgtggatccacatggtattctagataattgggatggggatgcagttgatccatgcagctggaacatggtcacatgttctcctgagaatcttgttattagcctgggcattcccagtcaaaatttgtctggcactctatctccaagcataggaaacctaacaaatcttcagactgtggtgctacagaataacaacataactggaccaatcccttcagagctaggaaaactttccaagcttcaaacacttgatctctctgataacttcttaagtggggaaattcccccctctttgggtcatctgagaagactacaatacttgaggcttaataataac

SEQ ID NO: 58603 - DNA, 111 bp, Glycine max
  Clone ID: PAT_MRT3847_23930C.1
aattttctgaatgctacaaccattgaaggcgcgaatttgatctgatttcacgaaggccgaatcgaaaacgcgacatggtagactccaaattgctgtttcaacacatgcaag

SEQ ID NO: 58604 - DNA, 1799 bp, Glycine max
  Clone ID: PAT_MRT3847_23931C.1
cccacgcgtccgtccacgcgtccgcccacgcgtccgcccacgcgtccgctctctcattctctttccctcttcaactcaaccacacacttcttagatcaaaagctatctttgttgctttgagtttgaaccttgaatctatcaatcaatcaaagtgggtggtgactcatggaagtgaaaggaataagggcaagcaactccaccaccaccaccacaatccaaagtgaggatgagatggaccttcgaagaggtccttggaccgtcgatgaggaccttgctctcatcaattacattgccaatcacggtgaaggtcgatggaactctcttgctcgttcagctggactcaaacgaactggcaagagctgcagattgagatggttgaattatttgcgtcctgatgttcgacgtggaaacatcacacttgaagaacagctttttattcttgaactccactgtcgctggggaaaccgatggtctaaaattgctcaatatttgcctggaagaaccgataatgagataaagaactattggagaacccgtgtccaaaagcatgccaagcaactcaaatgtgacgtgaatagcaagcaattcaaggacaccatgcgttacatttggatgccaaggctcgtggaacgcattcaagccaccgctgcggcctccgccaccacaaccgttaccgctaccaccgcgaccaacaatgcatacacctacggaagcaaccttaataacaacaaattcgaggttcacgatcacaagggcaaaatggggttaaccgatccttcagttatgaacaatgacttagtgggttcacatgtcacgcaaagttacacccctgagaatagtagcaccggtgcgtcatcatcagactcgtttgggactcaagtctcagcaatttctgatttgactgaatattacactgtcactgttagtggtaacaataacaatactaattctgcggattattatcaaccctctcaaattagttactcggatagttgcatcacaagcccatctgggttgttccctcaagggctagattttcaatccatggatccaaacaccccgtggaacatgcaaagtggggactcctctgacagtttttggaacgttgaaagcatgttgttcttagagcagcaactcatgaatgacaacatgtgaaaacattgggaataggaaaataagacttagatacggttcttcttagtattgtgttttaattaaagttaaagttaacacaagttattgaagtgaaactttaattttaattgaataataatactgaaaacaagagttgtatttaagttttattcttttatgaattatgaattagattgacagaaggggttgtttgtgaaatatacaggtgaaagtatagaaagtagcaacattaataaatcattcatgtgtagcacacacctagatatttaggatctatgatcaacaaatatctgaaacggtggattattataaggataaagagaaggatttttttttacaagcgtgtaggaatttaaattataaagtttttataaattttttgttattactaataatcgatctcactttttattcttttatgtattagtatgaattatgaattagattgacagaaggggctgtttgtgaaatatagaggtgaaagtagaaagtagcaacatcgaataaagtattcatgtgtagcacacacctagaaatataggatatctatgatcgacaaatatctgaaactgtggattatataagctttaagagaaggaattgttttttttttttcaatttgagctttctcagtataagatttc

SEQ ID NO: 58605 - DNA, 434 bp, Glycine max
  unsure (1)..(434): unsure at all n locations
  Clone ID: PAT_MRT3847_23932C.1
ccagaatctggattctgttcaaagatatatcacanaccactaggtgcgcttcacatattcagatggggagagagataaagagagagaggaaggttttgcttcttattactagtactttttagtattttttatgttgtcttcccctatgtttaatgatgtatgaaaatttgatgatttatatatattatcagtgacagattgtttggaagtgattgctattattattcgttgatagataattatttattgcaaaataataatcgcttataactaatgaactttcaatagctatagctgaggcttcatctatatttttttacacccaacaacaatatcaacagtaactacaatcttaaatctttataattataatttaattttatattatactttttgttaaaacttaattctaatttaataaattttcttccaat

SEQ ID NO: 58606 - DNA, 440 bp, Glycine max
  Clone ID: PAT_MRT3847_23933C.1
ccggttcagaatcaattccccgggcgtccatgctcactaggccgccctctgttttttttttttttttcacaatatttaatcaattttttgggtttggggttaaaaaaaacaacccgattatacctcactatttattataaatcaggcactcaacatcctcttttggaatggattgaaataacaataactttacggtgaaagcctgaaccctttcattacactttgtttgaattataactttttgttaaacacatttcatgtggatatttaacggaagctataaattaaatacgaaaaatctccattgccctcctggacctatgatacatggatccatgactggttcaaattcacccacaagacccatagccttatttaaaaatcatcgctggtcccccagccaacggctttgaacacataactgtttcaaaaatttatat

SEQ ID NO: 58607 - DNA, 966 bp, Glycine max
  Clone ID: PAT_MRT3847_23934C.1
acaatgcaacatgacaataaagaatattcattcatgcatgctgattatttttattttattttatgccaagatacatcaatgggactatgggaggttgtagtcacacaacaccttcctcctagagactcccctattgttgatgatctgagtaatgtttcgatttccagttcttttgatgttccaaatatttaattttgtgagactttgtacaagtcttcagagcaacctatacattttttggttgttgtacttgtacaacatgctttgactgtttctaaagccttagattgagatcaaaacaaatgtgaaaaatttgtaaaactcattcaatcaaaggtctagaaactgccccttacatgttgcgccagcacagcagttgaatatagattttcccggagtgttcatatttcatatttgtaccactgggattttacattgcataataattatatctacagcattttcatcaagaaagcttcccagcactacccaaaaccaaagacacgaaaaattatattccaacgctgtaatatgacaacattcttattatcaaccgtacctatccttctacacttgtcattccctcttcacgaatcgtcccttcatcctgggccgtttctcagcattcagcttgcgaacttcatatcggatcctcttagagaagagcctgctttgcctcttctccttgtacctctgcacacttgcctctctctgcgccaacttccaactcgtttcttctttcacattcgccttgttagccccacactcttcatgaacactccatgcgttcccaacaacaccaccactcccccaaccgtcccatgcaacctgttttataaccaaccaacccattaatagagagtgagagcatcacatattcatgtgtccatgcatagcccaacctaaaaaaaaaatatctagccattccattaaaagctataaatttctggtaaccctccaccctgc

SEQ ID NO: 58608 - DNA, 135 bp, Glycine max
  Clone ID: PAT_MRT3847_23935C.1
aataaggtttaaggctttgtgggttctatgtaattccctatttttttcgtgaaagttctatgtaactcctaattgtgagaaccatgaacactaaatatcaatgtataatattatacaagtgatcccttgcttgtt

SEQ ID NO: 58609 - DNA, 254 bp, Glycine max
  Clone ID: PAT_MRT3847_23936C.1
gctccacgcgttcggtaattttgttttttttttagaaactaaattatttggaagcataacataaggttttattgtccaaggcagtttataaatttatgtaaaaattttaaaatttttggtatattcaaagagtaattattgaaggaaaccaaaacaatagggtcattttataagcataggaaaaattgaacgcaggaatagcttggataaactgtttttgcaagagccctcacattattttgaggtcaaaaaga

SEQ ID NO: 58610 - DNA, 393 bp, Glycine max
  Clone ID: PAT_MRT3847_23937C.1
gccaaacctacggagaaagccgccaggatgggacccagattggaacctcgattcaatgcggattacgatgaggtggaagcacagatggaaacatagtcgcttgaagaggctgtagctgataaaggatctatgatgggtttcatgatggatcaaaataatattgaacttacaaaagacacagccggaggcacaattgggggaaccgatctatgggcagatttattgacagagggcaagactaaagcaagtgttagagcgcggggcgcttagcatatcactggtatgattaaaggggtggccacagtggtggtcactgagagtacaggtgtaaaaacaggcattgctatgaacagtgctattaaggggcgcgtcaggtggcatgccaacactgtt

SEQ ID NO: 58611 - DNA, 342 bp, Glycine max
  unsure (1)..(342): unsure at all n locations
  Clone ID: PAT_MRT3847_23938C.1
cgaccatatttttttnaatatgggccgcgttaaaattggaatcccaagggacggctttcccctgcctctcaaacccatccttttctcaaatgtaatacttccgtcctggtgaaatttaaaaacgggttttttggggcagcttcccatctgggctatttattaaaccaagtttgcggccgcctttagtctactactcctggaactcattggcttttttcatcgccatctataaacaactattccaactgtctcagctttagaactttagccctccagtgccgtactttttgccgatcccaaggacctgcaacctgtcttctccagcgggcacaccagcaccgg

SEQ ID NO: 58612 - DNA, 1915 bp, Glycine max
  Clone ID: PAT_MRT3847_23939C.1
gccaagaaattaattcagactatattaaaccagggaaacaaaaaaaaaaaaaggtttatgatacaccatcaactatatctaaaagcaacctttttcgagtacaacaaaataaaattactatacatagttaaaacgaggtcaggtgcggtaagaataaaaatacataattcctgccttcctgtgagaattctaatatagccaaatagcctctattttaataaggtcttcaaggaaccttgaatcccgaacaaccaaatgataatctcatttgttagttaagattccatgtactgagagggtggagggcttgttttggtcttctcagaaccagtaagcccacggatctccacttctctccattcttgcacaagggcacagcagcaacacatcaaatgagagaggaaatcatcaataaagccccctgtgatgttcaacatcttccgaagcttcctccttacgcagcaagtatagcaacaacaagacaaaattaacgaatatgccatcaagtcattacatgcttctccagatgatatgggcctgtttcttgcaacagaagcaatctttgaaaatgttccacaaggatagaagaatgtcttcatacaaagagaaggttcagaacaacaagcgagtaaatcagtgtgccaatcttcctgctgatatgaacctccagttgatgccagatccttttgcgcaactgaatatcttgatggtgaatgcttgtcaatttttgcatggtatttttcatcagatgaatggtcctggtcactgttgacatcagagtaattgtattcctctttcttgtgacttttctccggtgaacacttggctggaacagaataagctgcaacttctgtgacatctagtaaacgttgaatgacttcacactgattcatatccaaatttgcttgtgaccgttgtagttctagtttaagcttttcattttcttttttaagggcttcagtgaaagaacagttggggtaagaacatgatagtgttttcttcaacacagcagtgtcatccttgtcaggctcaggtttaaaaataactgtttgtgccttttggtcctcatcatccaatgtgtattcacgttgatccatttcgataacttcaagtctctccctgactcgagaattgtccacaagagtaatgagaggaaccagacgcaggtatctatcgatttcgttttgagccttcctgaactgataaacaatgttccagcccatagcgagcaaataaaggtagctcctgtcctgacagctattgaccaatatataagatcttctgagagcatcttccagctgctccagaggctccctagtttccgggtacttcttcagctccgagatcttgagctgctccagcaagttcccaatcaacttcagatgctgtgcaaactgcctgcagtttttcttatgcatccgtgcagtgcttgcagctctcacaatcatcccaatcagccgcacagcatctacaccagtcaactgtgccacatttgcaagttcccccatttgatcccaagacgccatgctctctgcaaatcaaccttgtaagagaatatgcctttaatagtaaaataggctgctccactcgcacagcccaaagtgaagcagtaaattatcaacaattgaatgtttcacgccggatcaagcgctattcagaaaaatgtttctcagagataacattgtccttgaagatcttggatattcagagacaaaaaacggtgaaagagaagagagcaatgcggataaagggaaaaggagcatagaattcaggtgatggcaggcattgctttgtgcgagggagctttctccctctgaatcactctttgtctctctcttgctcgctcttatcccccttctgtcgtcttctcgccggacgcgtgggcggacgcgtgggcgcacgcgtgggtcggccc

SEQ ID NO: 58613 - DNA, 348 bp, Glycine max
  Clone ID: PAT_MRT3847_2393C.1
ctcgagcccaattggctcgagggggaagaaaggcgaagatattgattccctatttgaagggatggggctgtttaacccttcccaaaagaaagacaatgggagtgatgattcttttaccatcttaaggtggtcgcaatcaccaccccctgatgaaaaattttttttttaacctacccctgggggagaatcccttccaaaacctaaaataacttaaggccgaccccaatttccattcaaaaaagggtcttgccccccccaaaaggaaaaaacaacttggcttgaggttaggatatggtaaaaacccctttttttccaaaaatccgcctaaaattcttttttcgttccccc

SEQ ID NO: 58614 - DNA, 166 bp, Glycine max
  Clone ID: PAT_MRT3847_23940C.1
ctcctagtcggcggcgcttttttttttggtgtgtgatacagaagaggcatacgcaaaataacagtaggtagatatgaaccgcggaatcacctatccctacaatacggcgtgctatattcatatgggaggtaccacgaaagcaacgcaaggcgaagattgcaccagg

SEQ ID NO: 58615 - DNA, 661 bp, Glycine max
  Clone ID: PAT_MRT3847_23941C.1
ggttgcagagaaaaatatggagggaaccgcaacagggtgttacaagtgcggcagacctggtcactggtcacgggattgccctttctccgctcccaattccaatcctaaccctaaccctaaccctaaccctaaccccgccaccactcccaatccaaatactccaaatccttcttcctcttctttcaagcccagattcgccgccgaaaagcccaagaaactcccccgaacaaagcctaagctcacaccggagcttcttctctccgacgagggtctcggttacgtcctccgctacttccctcgcgagttcaaataccgtggtggtggccacgaggttcgcgatttgggtaacctgcttcgtctgtacaccgaatggcactctcgcttgctcccttattactctttcaatcagtttgttcacaaagtggagaaagttgctgctacaaggcgtgtaaagacttgccttagagaattgagagaaagagttgcaagtggtggagatccaacaaaactgcgtgaaccacctgttgtgcatgacattccatctgatgagcacggatatgttgtatctgcagaagatgggggagcaactcatcaagagacagatgtgtttgcagaatccgaaaatgttaatgacattcaagaagacatgcttaatgatata

SEQ ID NO: 58616 - DNA, 467 bp, Glycine max
  unsure (1)..(467): unsure at all n locations
  Clone ID: PAT_MRT3847_23942C.1
ttnnatgatagggaatgtttattgactctacacttttttttgcacgaaattcaaatttgaacgcaaatatgtgattgggtagatccaaatctaaattataatagaattttggttccaaatttgaaaatcaaattcagatcctagcaacttcaattatcgagactcaaagaattaaaacaaaagacgataaaatattaatatagagttaaacaaagggctaagaacaaacaaaggaggaaacacacaagaaaaagaaaacacaaaggagatataacacttgatttcaagaattttcttgaataatagaattagtttcattacacacaacatgaacagattcttccacacatcaagttcataaggggttttctttagaatatgtcttataagtattctgtttaaagtataacaaattatattcccagcatttgcccaaaagtactttggtagccttgtgtgatttaaaa

SEQ ID NO: 58617 - DNA, 288 bp, Glycine max
  Clone ID: PAT_MRT3847_23943C.1
gcgacacgtatgacgatcgtcaccatgggcaacggtcaactgggaatgccggttctaatcctcgctactggcgcaagccttggtgacttaaaggcctcttcaattctatacccaggcatctccatcgtccacagcgtgattggcacacctagagccttaaggtgatgtggtacatcgtggaaagatcaacggctcacatgtacaggtgggactgaagaaccaactgactatagtgtacttgcgttcatgggtacgcttaaacgactcatggtcacagtactgtatgct

SEQ ID NO: 58618 - DNA, 2033 bp, Glycine max
  Clone ID: PAT_MRT3847_23944C.1
cggctgcgtgacgcggacggcggtgagaagggaaagagacagagatagagtaaaccaaaacgaaaggcaaagtgagtagcaggaggagtacggaaatggcatgtggctctgttctttcatcttttcttcacataacgaactccatggccatcaagggtgtcctctccttcgcaccaaatcctcctctgcttcttcgtctccccaaagctgtcacctttctttccttttctgcttccactaaatcccccactaagtcttttcaagtgagatcaattgctggtactacagaagctgcatcggggtttgatgagatggtttctgggactaagaggaagtattacatgttaggtgggaaagggggagtaaggaagacaagctgcgctgcttcacttgctgttaagttttcccgtactccacacctttatattttctcgaatcacaggaatatagcatgtttactcgattcgtatgtgatagatttgatacggggcgcactggtccctgttggagcacctgattattctcctttgcctcctttaataaaccctgagaagtctagggaagagtttcgtattgccccccagcaatttgatccgtatttgggcaagaagaaacccgatagaatgctgctgataaattggagaaactcagggagaggatgataaaagtgcgtgaactctttcgtgatactgattcaaccgaatttgtcattgttacaatccccacggtgatggcagttagtgaatcatctagattgagtgcttccttgaagaaggaaaatgttcctgtgaagagacttattgtcaaccagattcttccaccgtctacacttgattgcaagttttgtgaagatactgaaactaagacaaaacatagtttctgttaactcagcaattaaatacgtctttgcggaagatgaaacacgacagcatgatgctgagaagttggaaaaactcatgtagcggatgataaaagtgcgtgaattctttcgtgatactgattcgaccgaatttgtcattgttacaatccccacggtgatggcaattagtgagtcatctagattgagtgcttccctgaagaaggaaaatgttcctgtgaagagacttattgtcaaccagattcttccaccatctacatctgattgcaagttttgtgctatgaaaagaaaggatcaaatgcgtgctcttgatatagttcagaacgatccagaactctccagcttattgatgatccaggcaccactcatagatgttgagataagaggtgttccagctctcaaatttctgggtgacattatttggaaatgatttacacacagttactcaagcaatgattaggttaaatttagtaatttgctgaagttggtagttgaaaccatagacacatggcatgacatcaaggctcatcagattttatatgatgaatttgtggagcacttgagatgttcagattccggtactggcagttcttaaagagatactggcttccaatattcacacgctagagtttcaaaacaccagacaacttttttgatttttcacattataaatattgttattgtaaatttatttctccagtacttgtatctgactatttttttagttctaatccccttattttgaccttttttgttgagggctataatggtctttatgttttgaagtgttgactgagatattcttgatgcacacatgaaacatataagaaaagttatatttcaaatgttgattatcatcaacaaatatattttagtagttgagtttgaataatctaaataactcaatattgaggagaaatgttcagaagaccaaaacaataactgtgaagaactagacataaattacaatggtcataaattgaggccaaaatcagataatataaaaggatccgaatggctcaaacgccattcaaacctaattgatataaggcacgtaagctatatttaaatattaaaaataatagaatcattccgatgtctcatgctgttgctgcaggtcgactctagaggatccccgggtaacgagctcgaattc

SEQ ID NO: 58619 - DNA, 271 bp, Glycine max
  Clone ID: PAT_MRT3847_23945C.1
tacaagcgttcgcgtacacgccatagcacgccacatttttcagcatacgaacacaatgggacataggtctgggaacataaaccgtctcgacactatatcctaacacttgactaacagctgacttaccttgtgacagatccgcattgtgctaataccttacctgtcttatgaacaatctccatatctattcacacttaaagcttgataacaatactttctcaatattagcgacagccatacttaaatgtaagctacacgccactacgctcat

SEQ ID NO: 58620 - DNA, 301 bp, Glycine max
  Clone ID: PAT_MRT3847_23946C.1
gccacggggatattttagttccgcaagcacagcgaaaacagaagagggcagcattttattgacaggaatagcaccacccacacacaggccgagcacacccgacagggtcactggaggaacaggaccagggctcgaatcacgtaccaacagaccggcatggagagatcagaggatgggaaaaagagtgcgaagaaaatcatggcacaatttcttaccaacaccctggagaaccgcaataaagacaccggagacaccctggacatcgtgaggggtgaggccaacatccgggacaagaacaggc

SEQ ID NO: 58621 - DNA, 416 bp, Glycine max
  unsure (1)..(416): unsure at all n locations
  Clone ID: PAT_MRT3847_23947C.1
gcttgccacaaaattccttttatggcaaaaacgacccatttattgtgtattattaattactgcaactttactttatttggatgctacggatgatatggcgaagctagtattggtattctgtacccacaatttttagttaattacagagagctatctatggagtcgatcacataaagagtgcggggtaaggaaatggtaaacatgaagctaaagggggatttccttttgattaagaccagccttaaccaccacccaaaggtcgctttgccgataccactaaaggtcannnnntaaaattggattggcaagaaatggttgtgaatgataggggttggtttgcttaagggttcggtcctgaatggtgcagggtctgaccatttgagagatgtggttggcaaaactatggggcttactga

SEQ ID NO: 58622 - DNA, 283 bp, Glycine max
  Clone ID: PAT_MRT3847_23948C.1
acgcggccgcccacgcacacaaaggggggggcagaacacacacccaccgggaccccgacagagcgcagagcaaacgccgccgaccccgcacagaacacgaacaaaacacgccaagaggcgaaacaaggaaagagccccaacccacgaaaaaggcacaggacaccgagggaagacccagagcaaaaacccgacccgaacgcccacagcccccaccacgacacggaaaccagcagcgggcgacgcaaaggaggcccaaagcacgaaaaaacacaccggggccgac

SEQ ID NO: 58623 - DNA, 144 bp, Glycine max
  Clone ID: PAT_MRT3847_23949C.1
tgcagatgacgacagacggggaaggtgcgcgagttagttgtgagctataagctagtttatcgagaggaggatatgaacttgtatgatatctttgttgctgcactacttctggtagtatagacatgccatgacgcaggatatcta

SEQ ID NO: 58624 - DNA, 391 bp, Glycine max
  unsure (1)..(391): unsure at all n locations
  Clone ID: PAT_MRT3847_2394C.1
gaagacggcgatcangtccgctttcnccccggccgccacttcttccaccnccgatgcttcnacggctggctccaccactacnagttcaacatgcntactctagcacgctctacgtctcttctccgaangaagcgcgtgagcactcatnggangcgccgccttcaagccacacaactcatcatcttgggttcatccataanactgaatgcggccactctttcgtttttctagaacctccacttttacngttttaatccctctcacgcgatcactttttanttaaactggaagggggtttcttanacagtctttcttttccttgtttttaatattacttttttttttccccataaggtattangctaaatanatttatttttctctttttaac

SEQ ID NO: 58625 - DNA, 349 bp, Glycine max
  Clone ID: PAT_MRT3847_23950C.1
tctatagtataatcttatgatgccggatttgtttattttgtggaaggggttttacccataataaatgatttatatcacggagggaccatgttttttaccaattcttattttgaatttattctaatccgaaattttttgaagttcacaaaatgccttcttttttcttcttgttgagtaacaatctatgtccataattatgtcattagttgaatgtgattatttgatactagttgatttttctaaattcatattaagttgttcctattttgcaattttatttatgaaatgtcttttttgttaatttagttatacaacccaaatttaaatttttcttgctcgtgtttttttt

SEQ ID NO: 58626 - DNA, 353 bp, Glycine max
  unsure (1)..(353): unsure at all n locations
  Clone ID: PAT_MRT3847_23951C.1
ttntttattttctttcttttttttttttttttttgttttttttttttttttttttttttttttttggagatcaaacaaaaccccctttttttccatcactttgggttccactctccctcctatttccattggaataaaaacccagcattaatgggctctaggtggatgcatagacctggggatttagtatcagttttttaggggggcaggaaaggaaccggctggttttcttggggttggtatgcgctcatgggatgaatataaacttttcattataaaggtggcccgatggggggaaccctttttttttttatttgaaaatctaattttggtttggcaatttgggaccttta

SEQ ID NO: 58627 - DNA, 291 bp, Glycine max
  Clone ID: PAT_MRT3847_23952C.1
cgcgtacttgctacatgttatctatacaggctagtctcggacatacaacacaccggcccctacttgacaacgaagggaccaggaacaccatgccattacccaacttaagatgctggattgacatcatttgtcttcaagctggcgtaatacactaacaagaagttaccgcatcgacctaacaacatttacagcagaactgactggctaatggcacacacgctgtccttgacatcaaaccacaaagctgatgacactactcacatacactctggtacacatggaagcacccta

SEQ ID NO: 58628 - DNA, 440 bp, Glycine max
  Clone ID: PAT_MRT3847_23953C.1
gacgtagaacttattgcaaaacatatgactctgaacagagacaagcaaatggggcttccagctagacgcccattcgaagtactggcagctagcacctgtaaccatatgccgatgtccacatccaaagaagaggctcgcttgcttgggacccggctacctcaccatgcccctggtgattttgaccctacagaagcaaaacgggtgatactgatcaaggggagtcgagatatcctttgctcagtgagggcaatgaggaacaacgattggttgttctggtgactgtttacagataagcggtcgagcagctgtgcgccacatgatacaatgggtatgggaaaaactaaaacctcggcgcatgagaagcgccaacaagcgatcagtatatatggcatgatcaagggcgcaatgtgcacgaccctgccaggcctaaccggctatct

SEQ ID NO: 58629 - DNA, 249 bp, Glycine max
  Clone ID: PAT_MRT3847_23954C.1
tcccgtcaaagaaaaaaatgacgggaaagctataaatggaggtaagaacgaacgaagttgcaaagcaaagaatagaagacgaaggatgaacgttgcgttcagagaagctactggattgaacataccacagatttgtccgtagagtcaatgatgctcgattccaacgcctctgatctcgacaaggaagaaagacccgaagttttgtccctactaccagcatatgaaggaaaatcagttgtagaacttgga

SEQ ID NO: 58630 - DNA, 238 bp, Glycine max
  Clone ID: PAT_MRT3847_23955C.1
tttgtccgcttgaacatagacatcatggttgtgggaaacaaatgagattttgagagcctatgcgatgtcccatcgaggttgcaaaaaaatttgtttagaaagaacgattctgttgaaaatactcgtgcttagtagatcctgcacaagggggatcatgccagataactgtgcctgacagaattctactgcattgacatcaagtagaacctatcttctgctggatgtcaagtatttttaa

SEQ ID NO: 58631 - DNA, 330 bp, Glycine max
  unsure (1)..(330): unsure at all n locations
  Clone ID: PAT_MRT3847_23956C.1
ctgcagncacatcaactttacttgagtctgtggatagtgctgatcttattgcatttgttatcatacccgaatttgtagtactatttacaatcttaaggaggtggtcagctctaaccgaagaccaactctatgcacggtcctcacagaaccaaacaatgctctttgcttagcagtccaagaatttattgaacatgaataatgtgcagctactctttacagataaagctttgagattgattgctaagaaagcaatggccaataattactgtcgccagggttttaagagcactactggaaagcattataactgaaggccatgttttgatattt

SEQ ID NO: 58632 - DNA, 664 bp, Glycine max
  Clone ID: PAT_MRT3847_23957C.1
accaaattcaaaacttgaggctaaatgttgctctgtcactcccaactcttcacaaatggatgccgatgaagccaaaatcttgctcggtttccctcccaattctcgtccaactccatcccaggtaaaatcagcttacaaaaagaaggtgtgggaatctcaccctgatctatttccttctcatgaaaagcctctcgctgagtctaagtttaaactgatttcagaagcttacacatgcctggaatcgggtgggagaggaggggctgcagtgccgtttaaactgcgagctgttcatttaatttttttttatttcctcgactgtatcatcacaagaattcggatgataggagcaattttacaactctagtctacttgtgaatggtgatgatattggtagttgactagacatcacatggtgttagactattacagtaaaactgtgtcgtgaatgaagatgatggccatttaatctgttttagattgccatattatatgatttttggtggagaaaaaatgttatattgacttttcctctggtcacccattcttttccttactcagggcactgggaaggaaccccaatgtctagcctaggttttattttgtgctaagttgaaccaaggagatataaggttggcttgtgattggaaaaaggtgaaaggaaaag

SEQ ID NO: 58633 - DNA, 484 bp, Glycine max
  unsure (1)..(484): unsure at all n locations
  Clone ID: PAT_MRT3847_23958C.1
nnnnnnnnggggnntttttttttttttttttttttttgaaaacctaagtccatttttgctttagtggctgatactgcaactgttttcaagtgagtgggggggttccaaaaaaacaacaaacttttagccaatttttgcctaaagttcgaaagaaaaaattgggcattcccgggggggcgtttccccctccccaaaaaaaactcatttttttaaaaagaactatttccagggggggaaatggatggggcggttttggggccctgtcccctttccaattttttctaagaaaaattccgggccccccattatgtaaaaacgccggtcccccggggttttttttctcccccttccaaacaagaaaaagtttcttgctcttcactggagcttttgccccccccatagggtctttttgtggtgaccccaaaacaggggagttgtttaaactcccttgtgacccccacccgggcaccctttggggggtggg

SEQ ID NO: 58634 - DNA, 508 bp, Glycine max
  Clone ID: PAT_MRT3847_23959C.1
gctattacctatataaaagccaaagaaagataatagaaaggacgatattggttttagcctttttaaggcacaaaagctgaaacctgccatacaaattcttaactctgcacctaagctcactggagccgtttagaagccataatggcaaaatatatttctatccaaaagtttctagtgctatttctgaaacacctgtatattctatcctatgctactttcattcctaataataatgaagcaaataaataattaaatccatttattcgaaacacaaacctcatctacccaaaaagggaaggaaaagttctgttcaatgaaaatataaatagcccatttccattttaaccatatccttctcacagaatttcaccactctcaagggaaacaagaaccttctcagccaacaccagagaaactgacatagatgatgtagctgcctcaaacatcatcaacttgtgagtgaaatacaaaactgggaaatgtagttgaaatatctttgagatactga

SEQ ID NO: 58635 - DNA, 543 bp, Glycine max
  Clone ID: PAT_MRT3847_2395C.1
gctatgtcagggattttgacaattcataatctgttattgtttaccatacaaagtaggtcaatgagatcttccctagctagttatttcctctctgtaagttaaagaacaaaatcctacaatgaagtaaattaatcaaatatgtattctctatttacattttctattccactcactagagggatacatacccaaatacaacaaaaaaccatatttgaaaaccaaattcattgctgaactaagaatttggcgatcaaactcacccaagagtgacagcggctggaaatatgaatgctacacagacagcagctgttgctccagtaaactggaaaatatcccaaatgctgggtataaaatttgctcccaggaagataacaccaataagtgaaatagtaattgatgcaaatctgaagttatcttgacgcaaaggcctatatgatgaaaatacgagaccatctaggttgacccgcactgcatagaagacaactggaaatacaagcacaagatgcgcaacatagctaaatcgaacagcgtcattgagcacag

SEQ ID NO: 58636 - DNA, 321 bp, Glycine max
  Clone ID: PAT_MRT3847_23960C.1
acgcatccgtaaggcggcaaaaaaacgacgcaaggggatgcagctgaaaaactaatacaagccatttctatagcagcctaagaaaatgaaaagcactatcgtgttcgcaacccttcgacgttgcggggtcagcgcagagctaacctccgccatcgcacaggatgtactctacgttgatggccatccgaatcggaaccgttccatatactacgttctgcctgcaaaaggaggaaacggtggccgtatacaactagccgcacctttgaaagacacttgccctatctctgttagtgcagacttccactccacaatccaaggggt

SEQ ID NO: 58637 - DNA, 189 bp, Glycine max
  Clone ID: PAT_MRT3847_23961C.1
cacactcatacgcccacgcgttctatcctatgctgcgcaggtctactaacagcgggctctggatcacacgaacaggctagtcatcgatcttgctggtggacttaccatacattacaaccattccaattctcgtgactccactatttttgattggtaccgtcataagccttctgctgaattctattgata

SEQ ID NO: 58638 - DNA, 956 bp, Glycine max
  unsure (1)..(956): unsure at all n locations
  Clone ID: PAT_MRT3847_23962C.1
ggttatttaaattaaattccttccttctctctttcttgctttttagtaggagagtgtgaatcaaatccaactggtttaaaattaaattaagtttaaaaaattgatttgaaactcaactaatttttaatcagttttatactaattctaaaagttgaatcagttaaaaattgatttttaaactgatttttgaattatttttttaaataaaaactaattcagttaatcaaattgattttataaaaataattttattaattgaattagttttataaaatagtatactcatttttgtttaactaattcaaaaaagccaattccatttagattcaattataaaccaattttttttttcacacccctactttttagcgatttaaagggaacatgtcaagcgcagtttggcctcgccgccggtcttattttggtcttaaaccagttggatttgattcacactctcctactagtttaaaattaaattaagtttaaaaaattgatttgaaactcaactaatttttaatcagttttatactaattctaaaagttgaatcagttaaaaattgatttttaaactgatttttgaattatttttttaaataaaaacatttaaataaaaactaattcagttaatcaaattgattttataaaaataattttattaattgaattagttttataaaatagtatactcatttttgtttaactaattcaaaaaagccaattccatttagattcaattataaaccaattttttttttcacacccctactttttagcgatttaaagggaacatgtcaagcgcagtttggcctttccgccggtgaaattctggtctttttttttccactcctcggattgattagaactacgatggatgaatggctctggtaatgatctttattttacgtttgactaaaaagatgtttgttgtgtgtggaaataaataaataaagccaang

SEQ ID NO: 58639 - DNA, 1025 bp, Glycine max
  Clone ID: PAT_MRT3847_23963C.1
tcccgactcgaccaacgcgtcagcccacgcgtccgcccacgcgtccgctctgatcagaattggagtttcacctcagtaatctgcataataaagatgtggtgtattcgaggattacatagattaccaaggtgaatctctaattttgattagagaacaacaccaactatatcaaggttttgttcttttccagttgaggttaccaatactcttgtatgattgtctttgtatgaatgaagatggatgatattggcattgctgttacactgacaatggtttgaatggattttatgcaggcaagccctttgtgaatgtcttgaaggaagctggtgtgcttcctggcatcaaggttgacaagggcacagtcgagcttgctggaactaatggagaaaccaccactcagggtctagatggccttggtcagcgttgtgccaagtactacgaagctggtgcacgttttgccaaatggcgtgcagtgctgaagattggtcccaacgagccatctgagctgtctatccatgagaacgcctatggcttggctagatacgctgtcatatgccaggagaatggcctggttcccattgttgagcctgagatccttgttgatggacctcatgacattcacaagtgtgccgccgtcaccgagcgtgtccttgcagcatgctacaaggctttgaatgatcaccatgtccttcttgagggtaccctattgaagccaaacatggtcacccctggatcccaatctgctaaggtttcccctcaggtggttgccgagcacactgtcagagcccttcagagaaccgtgcctgccgcagttcctgctgtcgttttcttgtctggtggccagagtgaggaggaggcatctgtcaacctcaacgccattaaccaggtcaatgggaagaagccatggtcactctctgtctcctttgggaggccacttcaacagagcacccttaaggcatggggcggaaaagaagagaatgtgaagaaggctcaggaagcccttttggtaagagccaaggctaact

SEQ ID NO: 58640 - DNA, 414 bp, Glycine max
  Clone ID: PAT_MRT3847_23964C.1
ggaaaaaacatcaggccgattattcattagaaaaacccaagtacatgagagaaattgtctataaatgtgacaaaataaaaatatcctaatgtggaacaagctcgactgggaccccaaatatcgaagtgaactaagacaaacgcaacacacttgttgacacgagaaccataactgatacgagtatgtttacctagttgacatgacttgcaccgaaaggacttaacattagaaagactgggaactaatagacgcaatttttccagactcgagttcccaaggtgttgatgtgtgagagctggagatacatgagacacaagattaactggaggcataagctgatataatcctccagactcatgtcctgctccaatgtgtcatccagtgcgtcgatcttgtacgagaaccaaattatta

SEQ ID NO: 58641 - DNA, 366 bp, Glycine max
  Clone ID: PAT_MRT3847_23965C.1
acatcagtgaaggtgacacaaaacggtatctagggaacacaacattggagagtatcgagctagaaccacagaaaggaccggttcatgatcaatatcactgatcatgttggttctatttcttcttcatcctcaagatcatcttctgtttctggaagatcaagtgggtcatcattcgtatctgattcatttgaggatctaacagcctctgcgtcctcttctgcatcaacatcagctgatgatcaacttgtagttgtagctgatccattgggtgacatgacatcgctctttcaacaacttctcatcaacatggggctatcacaattctaccagggagagtcacaaaccttcacttcactgacccatgtg

SEQ ID NO: 58642 - DNA, 243 bp, Glycine max
  Clone ID: PAT_MRT3847_23966C.1
catggcttcttcactgtcttccgttatcaaccaacctcacttagctcaacgcctcaagcttcaccgtccatcctctcttaccactttcacaatcttccaccacaaacacaaacaccaacaccgacacaatgcttcgtttccacacccttatacctcattgcctcgctcacgccctctcaatctcatcatcgcctccagaaccttctctccttccaatactctccaccttcacttcattcctca

SEQ ID NO: 58643 - DNA, 680 bp, Glycine max
  Clone ID: PAT_MRT3847_23967C.1
ggggagtcttatgagtgttttgggaaagctaactgcctagcttcctctccggtttttctcttttgtggagcttttttttatcattatttcagctttgtttttcctgaaatgtatatttcctatctaataataagtaatcataacactttttctacccaaaaaagaatctatatgagccctggaagttacaatatgccagataaaaatcaagacctaaaagaaacaaaataggcaacagttcattacaatgaaaaaagtatgcaaggaaatccaacattgatcctttgaaaccggggtgaatggagtaaagtaaagtttaccagtgacttgcatgacatcatattttagagacactggtaaagtaagtgcattttagaagaaaggtcatggaaaagaaaacaaatcaattaatttaaacatcattctcgtttataatgcaatctcacttgctagaccttttctcttcttttttttgctccgcaaaatgaaagtatattaataaatggcaccaaaagtacctagagttacaaacacagagtggtattagagttacaaagagaataacagaacagaccattctcaggataactccaccacataccagaaaagaaaggtaatctactaatgtctcccccccaaaaaattcctttctcttaaagaaagccagagaatatactaat

SEQ ID NO: 58644 - DNA, 181 bp, Glycine max
  Clone ID: PAT_MRT3847_23968C.1
ggggttgaaaagccaaacgaaccgaaggggtcgataaagatttttcatttagcaagtttttgacaaggggtcacaaaaccgcatagccaccatttccaatggtgaatcccttctaaaaatcagggaaagaaaacaccaacagtactataactgaacactggatgtgacagcgtcctcaaaa

SEQ ID NO: 58645 - DNA, 417 bp, Glycine max
  Clone ID: PAT_MRT3847_23969C.1
aaaacacacatcttcaagaactaatacaatcttactgaatgtacaattcatatcagtcagagattataccaccgggcatcgttccttggccaaaatggttactccattcaccggcctcaaatccgtggctcgctttacaacaaccaagaccacctacgccatcaccctacattcttagcaactgtatgaagacaacaatacatacttgagtggccaccaatttacaacaagaagactgagaataccttctacttaccaaacctaaatgatcccgcaattacataacacgattttccaatacctcataaaagaaaagataggacccctcgctatcgaactcttataacaatcacgcattctgataccgtaatcacaacagctcatctgcatactattatacacgctactggaccatgt

SEQ ID NO: 58646 - DNA, 348 bp, Glycine max
  Clone ID: PAT_MRT3847_2396C.1
gaaacccaaaaataacttgatcttgcttacatgatctaacatcaggtccagttttactataacgcacataataaccagtttgcattgttttggggcaggggaggggttgtgaggggaaatagactaacgcgacacgttttaaactgcctttgcgccaggatgaggagaccagggtgactacgggccatggaaaccatatgcaatatgcagggggcctaaagtgaatcgctcagctccttatctggcatacatttgaggacatacacctgcggaactactctctcaggaccgaccctgagacgctagctaacgatgaaaatctaccaacccacggcgatggcgtatgac

SEQ ID NO: 58647 - DNA, 378 bp, Glycine max
  Clone ID: PAT_MRT3847_23970C.1
acgcccacgcgtccgctttccctctgttgactggtagtttcgaaactctcttctttttccacatgttctaacggtttgctgcttctctcttcatgaagatccccaacaagcatccactattatatgcaacatggaacaactctctcaaccatcatttcaaccccatcaagtctccgaccatcttcttcattcggatagagtcccttgcattgaagtgattttgagagaaaaacaagaagaggagttggagggaaaggaagtggagtatttcaaagaaagagttgagagattggagagtgagagggaagaagttaaaggtaaatggggtcatgtttaaggctttggaatctctcacttaatcgaagggaaagcttgtct

SEQ ID NO: 58648 - DNA, 226 bp, Glycine max
  Clone ID: PAT_MRT3847_23971C.1
atacatttactcttctatataaagatcgattcttaaaaaaagttgcctcattatactactctttcattatatctacttatctacttacattcaattttaatctcattcttttacccttttttaacttatatttatccactatcttctataatttcaccatatcattttaacttttctccctttcttaaacttatatcaattcattttaactcttaactttcttcct

SEQ ID NO: 58649 - DNA, 447 bp, Glycine max
  Clone ID: PAT_MRT3847_23972C.1
ggaaagttaaagctgctgcccctgccggtcccgaatcccagtttcgacccactcccacgcttccatgttttggcaagcacagacacatggtcggactccatgttgctatccgcaacggaagactgtgaaatcccccaatgcaaccgattgttgagccagactggcaagctcaaagtgctgaagtttactttgacttgttacctgtggtggaagcaagataggagggaatgattgacatttgttaagtgacacactggagtctatgtgccactaactacacaaacgaatcttgtgtacccacccctggaaatgcaactggacctacctgtgaacaaccttcctaaggtgtcgagtacaattgttcatatattggtaggcacagaacattacggatctgatccttcactaagtggaagtcataaatattggcactcccatgatgcccct

SEQ ID NO: 58650 - DNA, 537 bp, Glycine max
  Clone ID: PAT_MRT3847_23973C.1
ttgtcgtacctgatccggagtggtggatcggttggtcttgatcatcttggttggttcaagctacatagtgctcaatcactgatccgcagttctgtcatacattgctgatgcaaaacatgtttttgaataggcaaagatggtaatttgatgcacaggagtcatgagtcgtctttgtcgcataaagtacagcaaagtcaggttttcggctgcatagataggatggaacgtgaaagcaactgtagaacaagttggatggacttgatcgcttgagaaaatatgatgtgataaaccgttctagttgcatcaaataattggggtataacatgttttgtaaagattgaagttagagaaataattgtataactttccagaagttctcagaagttgacaaaactaagcaattatttgtggaaaatgaattaaattaagagcacactagatcttgttgaacgttctaaggtgatcctcaacatagggcttctttgtaagttatggtgagatttcgaaagtaataaattcttctagctttacaatacc

SEQ ID NO: 58651 - DNA, 411 bp, Glycine max
  Clone ID: PAT_MRT3847_23974C.1
gcatacactttcttctgtgttcatacacataggtgtctctttgtatcgcgttgagcataacaatggctagcaaagtccgccgaaggagacgcctcatgctagactgccgaactcctggatcctgcttacacaatgctaccaacccaatacccataaactttaaaaagggacaataacacaccagacttactctaccaccgcacccgaggcggacactccaccatgaccttccacaatgggacttccttaccgaccgcgagcgccaattcgtcacccacgtcctcgccttctgtcccgcctccggatggcatcagttctagagaacctttccgcacccttcacaaaggaaatccagctaccgaagacccgggccttctactgctcccagatttccgtggaaaacatccactc

SEQ ID NO: 58652 - DNA, 312 bp, Glycine max
  Clone ID: PAT_MRT3847_23975C.1
ggaaataggagagcgggaaaggcatttggagagtggagagagcaattggaagcgaagaaggcaatgggttccaaagacagttgcagaaccgaacttcgcattgccatccgccaactcagcgatcgatgcctctactctgcttctaaatgggcagcagaacagttggtgggtattgaggaagaccctgccaagttcactccttcgaatacgaggttccagcgtgggagttcgagaattttccgcaagtctaggactcatgagactgctgcggtgatcaccccggtcgtgggtgttttgtatgacgccacacct

SEQ ID NO: 58653 - DNA, 1883 bp, Glycine max
  Clone ID: PAT_MRT3847_23976C.1
ggtccggattcccgggtcgacccacgcgtccggaagactctatccctttccttttctttaatagtacagaggatatgacttccacggtggagcttgaactggcggcggtagcggaggtggttggttttcagaagccatgggatatgatcaatatgctctagagaccgtattaggtctgcagagaatatagaaaataaagttgtattgatttgtgataaaattacaaagatgatggagttgttgacttacaacccaaaatatactgccaggactccaaagataaaagtcagtaataactgcctgaaaatgaaagttataactgacaatgacagatacaaaagaaagaaaattatagtaaatgacataaaacaaaaacaagaagaattatatcagagagatacttgagaagggtattctgttacatctttgcacctcacctcacctcacatgctgccatggctgttcagatcagaaatgcattccttcctgtttacacgactgttagtttgtacaaccaaaacagaaaaggctgccctatgaatttctgttttcaatctttcaagtagactgctcatccaaaatttgaaagacacaactgtcctttttctaacaaataatgtgggaaggaattgcttccgaatacatcaatgtattaaggcattttcagaagcttactctgttcttgaaaatgaactcaaattcctaaatagtgatggtgagtcatgttcaaggccacctgacagactgcttccaaaaatcattccaagtcttgatatatcataagatctcactacatgaagactgaaatgttattttgtctaaagtcaaatttttctgttaagcaggttcctggcttgtgcaaagttatgcatgtcaaaatatggtctgttactctggtcatgcagagtatacatggagaggatcacttactgacgtctggcattgcaaatgggggtgtgaaagttggcatctaatatctttttcatgctttgaaatccaagctttcatgtattcattagttttttcatagttacatggtggcaagaaatgagttaaggactttatcctagatgttgtcgtactgatggaggagtggttgatcggttggtcttgatcatcttggttggttcaagctacatagtgctcaatcactgatccggagttctgtcatacattgctgatgcaaaactgtatgcacatttttttaattggaagttggtagtaatttctacatcatttacttttaaatatttccttatttttttaacacttttagttgatttgaagaggcaaagatggtaatttgatgcacaggagtcatgagtcgtctttgtcgcataaagaacagcaaagtcaggttttcggctgcatagataggatggaacgtgaaagcaactgtagaacaagttggatggacttgatcgcttgagaaaatatgatgtgataaaccgttctagttgcatcaaataattggggtataacatgttttgtaaagattgaagttagagaaataattgtataactttccagaagttctcagaagttgacaaaactaagcaattatttgtggcatcaaataattggggtataacatgttttgtaaagattgaagttagagaaataattgtataactttccagaagttctcagaagttgacaaaactaagcaattatttgtggaaaatgaattaaattaagagcacactagatcttgttgaacgttctaaggtgatcctcaacatagggcttctttgtaagttatggtgagattttgaaagtaataaattcttctagctttaaaaaaaaaaaaaaaaaaaaaaaaaaaaaaaaaaaaaaaaaaaaaaaaaaaaaaaaaaaaaataaagaaaaaaaaaaaaaaaaaa

SEQ ID NO: 58654 - DNA, 246 bp, Glycine max
  Clone ID: PAT_MRT3847_23977C.1
agtaaaaatatccataacttttgaagtctttcaaattccaaacgcaagcatgacatagggccacacgtaattgctttgaaaggaattaaacttgaagtcaatcggaggaagagttgtaaaaatgcctaacaagggcacgagcgtagatcgataactcttttatttactactgtgaatgaaccaaggaaaaacttatctatggatatggaaaaaactgtgccatttcaaaaaaaaaacaaaaaacac

SEQ ID NO: 58655 - DNA, 134 bp, Glycine max
  Clone ID: PAT_MRT3847_23978C.1
cggacgaagctggaattcgctcagaaaaaaaaatcaacttacctgtcttctctgctcatcaacctccccccggggggacggggctattgtcccttattcgggttaatcgcgcttggctaatatggtctagctgt

SEQ ID NO: 58656 - DNA, 372 bp, Glycine max
  Clone ID: PAT_MRT3847_23979C.1
tcgtcctttttttttgcagaaactttttttttgcttgcgccttgttaaggacacatgagatgatggacagggctaaaggaatgtgttggtccaaaattagataccctgcttgcttaaccttcttcaggacggcagcaccaagcttggtctctaccatcgtaaactggaacggaaagaggaattacatttgatactgaacctgactaccaccccaaccttggttttatatctttgtcaacaatgtgagttcttgctcgccttctggccaatggaaagcggcggctttgctgcgacaaaaatctatactctgcccactggcgttcttgactcgaatgtcgaacaacttcagtcgactaaatgcctactcacaac

SEQ ID NO: 58657 - DNA, 288 bp, Glycine max
  unsure (1)..(288): unsure at all n locations
  Clone ID: PAT_MRT3847_2397C.1
ttcagattccaatccaaagagttgttattgttatttctagtttttcatccatnttcccacttccgcgccatcaactgatnttncctgaaaagggtttcttctgatttcttttaccatattgtttctttgtntttnctccctccgaagtttcttccaatttnttcttattacaaataatcaaagatgtgtgtttgagggtgttgcagctcgatcacaatgagaacacacgcgttactgacacttttgttgttttntcgggttatgtttgatgtttccgacgctttctct

SEQ ID NO: 58658 - DNA, 251 bp, Glycine max
  Clone ID: PAT_MRT3847_23980C.1
tgtggaatcccttctggaattccggtcacagttatttgtaataggctttttaatgagatgctcattagatatagctatgaaaaattactgcgccagggctaaagctccaagtatgtttttacaatccctcaaaaattttggttccttgtgtgtgtaaggtgatgataactaattagtgttcatcgatatgtcagcttacttagtggtctaaatgaaagcttctagcggtcatatatcacattacgatgtat

SEQ ID NO: 58659 - DNA, 345 bp, Glycine max
  Clone ID: PAT_MRT3847_23981C.1
gagccttgctgctggctctaatatcactcgttttgctgaccagattagaacatttaagcctgaagctgacggacttataaacgattctttaattgaagaactcagagaggctttggctgatgcggatcacaaaccctaaatcattcctggagcgcttggaggcactgaggccgctcgataccctgacgccaccactgtagttacaggcatagtgggctgtgcatgattaaagccgacagttgcagcaattgtggcaggcaaagacatagcattggccaacaaagagacaatggttgcgggagccacctttgttcttcctttagcgcacaaacataacataaaaat

SEQ ID NO: 58660 - DNA, 752 bp, Glycine max
  unsure (1)..(752): unsure at all n locations
  Clone ID: PAT_MRT3847_23982C.1
ccacgcgtccgcgttcctgttcttctcgctcgctcaactcttcctgagtcccatttcctcccttttcttcctcggggtgcatcagtaaccctctcatctcaattccatttcactcctataccagatctgcaaaacctcatagcccctgaacatgggaaactgctgcgggagctggcgtgcaagtcaatctcgaagaagaagctttgtacggtgatagacatcgacgacgtcaggagggaggtggagatcatgcgccacttgcgtcaggagggagctaaccttgaaggatacctacgaggacgataatgtcgtgcatctcgtcatggagctctgcgtgggtgggaagctctttgatcgcatcgtggcccgaggccactaaaccaaatgcgccgccgccgccatcaccaagaccatcatcgaagtcgttcagctgaagactggatgtgtagctctagtattatgtttaaacattagtgtcgatcctccagatgtaataaagatattcccttgtgccagaatggagtgctggataggaagataatgagttgcggcttgtacctattgataaattatgattgtgttattttggtgatgttgctcatcttgcatgacaatcagtgggtcacaagatttgaaccacttccaatatcagctactcagggactggaactggagagnctcttcaccttgtttgttctgacctatagaaaattgagtgattttcaagttcaggagagaagcaaggtacattc

SEQ ID NO: 58661 - DNA, 382 bp, Glycine max
  Clone ID: PAT_MRT3847_23983C.1
tcgagcggtcgtcctttttttttttttagccattacaacctatatgttggtacaaacccggtttgttcatgtacctttcaaattttctacaaggaaaagaattcgtgaaattcctgactgaatgcacatgttaaaagtgcacccattaaatacgccccaattgtggccttacctttaggagcaacttaatgtgccctctttctttaaacacttcatatgcacaacctgtcatacccaatctctctgtgatgaagtcttgtatgagaacaggttataaacagcatagctgttgtgtaggcatacaaaactggaacgagtcccattaacagtagtattctggtggccaacagcatctcaaggttacaagcggtcccgtggggga

SEQ ID NO: 58662 - DNA, 188 bp, Glycine max
  Clone ID: PAT_MRT3847_23984C.1
tctcattcccccactaacctacctttaccatcacaaaatcctcaattccccttcctccactctttgtcctcttactgaagacaaacaacacacacaaagacacagaacaacaacgttcaaaaatgtcgacaaaccactacaccatggaccttcccgaaccaacactctggtggccacacccacaccac

SEQ ID NO: 58663 - DNA, 329 bp, Glycine max
  Clone ID: PAT_MRT3847_23985C.1
gaagttcatgggaaacacttcttttaaggaaaagccccatactttcatagtcctagatcacctgcacaggtggcgcggtctgaaccatcccgagagctatcctcccccatccacctgagtgacaagatccttattccaatcccttacttattgatttacattggggacaatgtacgatataagtttgggatttctaaccttatgagtaatgcattgtcttgttctattaggaacattagatgcatctgcattatgatgaatgtactgaacgcaccggaaaaataaagtgcaactagcatgtgattatatatgtgagtatgtgtcgcacg

SEQ ID NO: 58664 - DNA, 470 bp, Glycine max
  Clone ID: PAT_MRT3847_23986C.1
gggacctcaaatcagagtcattgttgaatatgctactttacaacgtgttccacgacagtggtataaaaaggatctttgtgatggaaccatatataaagagtctgaggatctggagtgtatagaactacttgccaagcctgttgagaatattacgagagccgtgatacaattggtgaacagggaatgataactaactggtgctgaaaaagatatgcctattattacaccactgatgtgctttgtgcgcccaagcagaactgccatgggacatatgaggccactgtcaaatggaaaagggaatataacagctggcgcttcattatacgggggccctagttacgccacatcaagacgtggacttggaaagaagagagtcattgctacaatgtatgtagcaagggacccaatgaaaagctgtactgtcagagacgaaccatcttatacttaggtacctgagcaagatgatcagc

SEQ ID NO: 58665 - DNA, 473 bp, Glycine max
  unsure (1)..(473): unsure at all n locations
  Clone ID: PAT_MRT3847_23987C.1
gttgtctgctatgaatgtaaataagcttcacaacgcacgcgcaactcttggcatggtcaatgcggacacataaaataagacatgtgacacagcgcggaatgaccaaacattgtcagcgtgagtttttcacaaacttcaaggatttgacgtggcagtacacaggatgtgcgttgatggctaattacaatcatgcgctctgggtttagtgttagaatacacaatgatcatatnggatgtgagacgtggcaggtgttgtctaaccaagggaatgtaaatttgttggaaaagactacgatggatgacttggtcaaagagcgaggtaccggctccgttaccttcactttgagggtatcttccgtgaacatgtttaagtcaggttcaatttccacgaggactgaagagatagtggcaatttgtgaggggttgaaggttgtgtttcagaataataatgccaccactgggacaatggacaa

SEQ ID NO: 58666 - DNA, 3453 bp, Glycine max
  Clone ID: PAT_MRT3847_23988C.1
ctcaagcccctccaaaccggcttcccctccgacacttcgactcccacttcatcttcaacaagctctgccaactctccctcatccgcaatccccacattccactctccgcctaccaccacatcatcaacgtgtccctattgtgatggcatcaaatctgttggccgacgaggaaggagttgggccccccttggagctgctttgtaagacattgtatgcgtgggaggaggccgtgtccccactcttggccacagagagggagggtttggtcccgaaggactcgacggtgctggaaactcttggtgaatgtctcaacgatgtggcggaatggggggccagtaaggagagactgttggtgaagttgccagtccaggaccttctggctcgcttcgatgttacttgtacaggccattccgtattcacgcagcttttgttggggatgggaggctaggaggcatttctggaacaatatcagcttatgagagtccactgatgttgtggatgttgtttttgaggatcacgatcttctaaatgagggtccactgatgtcatatatgcgaaacaaccggtatttatccatggtcaggtaaattaaaaaaaaataattcaaaagaagagaactacacgacaaaaacagaagccatgaaaacgccaccgaaagtccaaaacagacaaagtgcgcaaacctggtgacagcactctttagaggtgacgtgtttgttagcaattgccactgtgttgtttcgttcgtgttcatagcaataagctaagcacagcaaagaaaccaaatcaaatcaaaagaagaataagaagaaagaagatgggaatggcggtggcgagtgacgatttgctgagcaagaaagctgcggcgatgagagcgtctctggagagaagccaagccatcacagacgacgtcgtctcgattctcggctccttcgatcaccgcctctccgccctcgaagccgccatgcgccccacccagatcagaacacatttttattcggaaagcccatgagaatattgataggactttgaagtctgcagaggccatattggctcactttgatcaatattatcaggcagaagcaaaaatagttaaaggaccacatgaagatgtgaagaactatcttgaagcaattgatcagctgagaagaaacattagattttttggtaataagaagggttttaagaatgatgatgatgttgtcatccgtgccaacaatttgataagcgaagctatttctaagctagaagatgaatttaagcggctattatcatcttacagcaaacctgtggaacctgagcgcctctttgattctctgccgcgctcaatgcgaccttcagcagcatcaccaggtcgtgatgatgaatcctaatggaaagaatcattcttctaatttccattctgagttacataaaaataatgctgatgctgctcaatacacacttcctattcttataccaccaagaattttgccgctgctcaataatttaacccagcaaatggttcaagctggtcaccaacaacagttgctcaaagcatacagagatacccgttctaaagtattggaagaaagcctgcaaaagcttggagttgaaaaactaagcaaagatgatgttcaaaagctacaatgggaggttttggaagccaaaattggaaactggattcatttcatgcgtattgctgtcaaattgttgtttgctgcggaacggaaagtttgtgatcagatatttgaaggatttgactcacttagtgatcagtgtttcgctgaagtaactacaaacagtatttccatgctacttagttttggagaagcaattgccaaaagcaagagatcacctgaaaaattatttgtacttttggacatgtacgaaatattgcaagagattcattcagagattgaaattctctttaaaggcagagcttgcactaaaataagagaagctgtaatgggtttggcaatacagcttgcacaaacagcccaggagacctttggagattttgaagaagcagttgagaaagatgctacaaagactgcagtaactgatggaactgtccatcctttgacaagctatgtgattaactatgtgaagtttttatttgactatcgatctaccttacaccaacttttccaaggaattgaaggtgattcttcacagctagcatctgtgacaatgcggatattgcaagctctccaaaccaatttagatgggaaatcaaagcactatagagaccctgctttgacacatctatttctcatgaacaatattcattatattgtcagatcggttcggaggtctgaagcgaaggacttgttgggggacgattggatacaacgacataggaggattgtgcaacagcatgccaatcaatacaaaagaaatgcttgggcaaagattcttcagtccctatctattcagggccttacctcatcaagtggtggtggtgggagtagtactgctggtggtgatgcaggcagtagtggtgcttcaagagcaattgttaaagacaggtttaagacattcaatactatgtttgaggaacttcatcagaaacaatctcagtggacagtaccagacgcagagttgcgagagtctcttattcttgcagttgctgaagtcttgctgcctgcctatagatcatttgtgaaacgttttgggccactagtggagaatgtaaagagtactcagaggtacatcaaatacactgctgaagatctagagcgaatcttaggtgaattttttgaaggaaaaagcatgaatgataataagcggtaattggagtcagtcatgtgggaggtaggctagtttgcctctgcatcatggtatttagaggttaataggatctagattttacatttagcacatatggactttttaatgtcttagtttatctcttttgagatgcatatatatgtaataagggattggtgcccccatcaaacttggtgaggtcaaaggtcataaagttcaaagtaaagaggagagggattatatagaaggaatctgttatagtatttagatagaataaaaatatatgtaacaagtgatataaactatatttatattatatagaagaggtaagcatggaagctactggaatgtgatctatataagtaaacataatcagaaattctagctaagtataggcagttgcaataaataagccacctaacaaactaacccatgccaaatccatgagctactatgcaactatgatcttgtcactacatgtttgatttcacatttaaggttctctgacgcgcgtcaaccggaagcgaaaattatagcttctgcaacgtttatttgtatttgatgcagtttcattagataacgtgtatataatgccaataagttaggttggaaactaatggggacttgaacttattacttgttagatgaaagacgtatattgtactacttctgactccttgatatttgaattgccatttattt

SEQ ID NO: 58667 - DNA, 539 bp, Glycine max
  Clone ID: PAT_MRT3847_23989C.1
ttacaacattgaggaaaaggggatagtttaacctctttacattctgtccagtacttcattttttcttttgtgctatcccatcagaaattttaaaatcaaacataaggcaagtgtttttgtgctgttcctgtctgtcttttagtaaatctataccctatctttattgacacaaacagtcatgaagattaaaaatgtaagtcttttttaagggtcttaagtagagacatgcaggacctttcccatagtacaaacagtttgagttaaccaaattattgtgtatctctgcttcttattttgggcaactaaaatatttaaacacacagttgaacatgctttccaaacgccagttgatcttgcgcgatatatgaccaatctcaacattagaattcagaatagcacgatggaggatcttccttggtagttaatggacaatttggttatgttgtcagttcactcggacttgagtcaacactcattatacatcgtcgtgatggcggtgactgttcgaccggcggagctgagggctaagcatggaatct

SEQ ID NO: 58668 - DNA, 459 bp, Glycine max
  Clone ID: PAT_MRT3847_2398C.1
aggccattcacatcgttcatttcatgcatacggactctaatgggggcattcaaattcataaagcgcttagtgagcgccgtcctgcttggcgatgtaagacacaaggtcgaggacacggggggagtagccccactcgttgtcgtaccaaaagacgagcttgatgaaattctcgttaagggcgataccggccttagcatcgaaaatggaaaaggcggggttgccgttgaggtcaaaagaaacaagctcatcctcggagtaagcgaaaatgcccttgagctccccgttggaagcgtcgcggatggtctttttgatgtcctcgaaagaagcacccttctcgatgcggcaggtaaggtcgacaacggagacgttggcggtggggacacgcatggacatgccggtgagcttgccgttgagcgaggggatgaccttgccgacagccttggcgggaccggtggagga

SEQ ID NO: 58669 - DNA, 785 bp, Glycine max
  Clone ID: PAT_MRT3847_23990C.1
accaaacacgctattagtagatagacctatgattattatgcaagtatttgtactctattaaaaaccgtttttgctatttctggcatttttttttgtaaagtaatggatattgcttgtgttaatttgtttagtagagagtagtataatctgatttcattcagcacaagagagagaaatgaaatttacaaagcaattagaaagacattgaatcttttcttcattactaattagatatcatcattgcccaatttgcatgggattgagcttttaaagtaattaaatattttagtttaagtctatgcttcttcattctttacattaactcatgctttttatgatcatatcatcatgatacccaatacccatggttaacgtattagtacatctacggattgcagtttgccctaataatatataattggtttattctacagatacagagcagttacaagtgcatactacaggggtgctgttggggcaatgttggtttatgacatcactaaacgtcaaagctttgatcacatacctcgttggttagaagaattgcgtaaccatgcggataagaatatagtcatcattcttataggaaacaaaagtgatcttgagaaccagcgtcaagtacccacagaggatgcaaaagaatttgccgagaaagaaggcttatttttcctagagacctcagcactggaagcacctaacgttgaaacagctttcatgacttgtgttgacagaaatattcaacattatcaacaagaagaacctagctgctagtgataatcagggaa

SEQ ID NO: 58670 - DNA, 582 bp, Glycine max
  Clone ID: PAT_MRT3847_23991C.1
actcaagaaatcgagtcacaattacacaaggtttctgctccattattgattctccatggagcagcagatcaggtgacagatccattagtgagccaatttctttatgagaaagcttctagtaaagataagacactaaagatctatgaaggaagttaccacggcattttggaaggggaacctgatgacagaatttttgctgtgcacaatgacatcatctcatggcttgattttaggtgctcacttaaatgaggttcatggtattgtattgttgacctcgccaagatatttttgatcttatagtgaacaaagaacacccttcacaaaagttacctcacaggaatggcacctctattgcctcttatcatggtagttacatgtacatgtcaatttagctttctacttttattataggctcatttatgagtttaatattactattcgcttattggattttcaaaccagatgtaatccattggctccctttattgtgaggtctgaccagtaataaagtttcattatccgacactggagtgccatcaaccatgatacctcggcgatcctccattacaaacttcattcaat

SEQ ID NO: 58671 - DNA, 253 bp, Glycine max
  Clone ID: PAT_MRT3847_23992C.1
aacaaagtaaagactccttttgaaaggaacattgctcacgaacaactagatcaaagctgaatgcatcaccaaggatgccacaaaaccctgttatgtcgaaacctaacctatattaagcctctacaggagcaacaagagctctctcattgaacctcaatccactgtttggtgaaatgcagccataataataatataaagcacaaattacagaggaactagggaggttgactgaaggatgatggaggccaaggac

SEQ ID NO: 58672 - DNA, 227 bp, Glycine max
  Clone ID: PAT_MRT3847_23993C.1
gaccttaattaaattgtgacttatgtatttatcctttatcctccgcggcttcgtcctccccatcagaagagaaaaagaaaaagaaacttgtttacgatggtcattcaagaaaatccaccagaaagtgggtgtatgtgcactagttggaagcttttcagcatttttctcctctctgtatataaagatgattggattctaaccagttttctgggacatcccttttactg

SEQ ID NO: 58673 - DNA, 457 bp, Glycine max
  unsure (1)..(457): unsure at all n locations
  Clone ID: PAT_MRT3847_23994C.1
ttttgttcattgtaaagtatctcaacctcgttcagctttaggtttggacgcaacgtcttgcttacgaatggcaatatcctccttatctcaaccactagcaagcaaacgtaaagaagcatcgactcatggcgtcgaagactcttttgcaccgattctcagctcgatttcccctccagctagggatttctggaaagagcgtcattactcagcgctggcctccagccaagcttcttagcaatttgacttccgtcaattgcgtcctctccccctcctttccacctcttggtgccactccagttttcacccttcctgcattcattttcaaggaaaactgactcagtgccaacagatttggagagggagcttaacctcagcaacccccgccagtggtcgtgccaccactgctcttcgttatttctagggttgggaacgcctcancggtcgtcggatgaatgcc

SEQ ID NO: 58674 - DNA, 227 bp, Glycine max
  Clone ID: PAT_MRT3847_23995C.1
aagcaatacatcagaatggtactgttcatcaagactctcatctcaaagaacgtaaccatagcaaagctagcttaaactacacactgatgatgacactgaagaatgatcgggacgaggtgttaacttgcattaagtttaattttaaaattgtttttggatcttttgtgtctgatatgtaaagtcgtctttgcatgcctgatctgggggaacttttttgctttgttgtg

SEQ ID NO: 58675 - DNA, 261 bp, Glycine max
  Clone ID: PAT_MRT3847_23996C.1
aagcccatttcgatttgcgatataattcagagagagagggggcgagtgtctctaactctgcatctttgattcgatcattccaatcttcacttttcctatgtatccatccatccgctaagggcagcgctctattctttcgcctatcggctactaccccatgttccttccatttcccatcgagccaagtttcttcccatgcgctacgagcggacacactcctcttaatgccaaattgtttctttactgttacacatttacttg

SEQ ID NO: 58676 - DNA, 702 bp, Glycine max
  Clone ID: PAT_MRT3847_23997C.1
attcccggggtccaccccgtcgtatgccttcctcgtcatggagtcgcgagtgcggtcacgcaccggaaccttgtcctccctccctcacctccgcaagccaccgcgggaggtcggtgccggcccctccctcgtcaccgtgaaggccgtgggctccatggcgaacgacgggaacctgttttgggtgaggcagctacgcccaaagctctgctcgccagcgctgaagaaggaggccttcctcctccagccatgcctcgtcatcgccggccgagggcagtgattccgttgggtgagagaagcaaaggttgctccggcgggttttttcgagaagtatccggctctggtgactggattcttcttcttcacgtgctatgtcacgagtcgggactctgttctgtgtctcttacgttccctaagcttaacttttaaccacttaactgtgttccacgaggaatagatagacttttatgtgtggctgtgatcgttccaagtgttaaaattatggttttgtcctttttcttttttgatgcaggtacttgaaagtgattttcagatctacaattacttgctcatgaatttcatgtcttgatgttaattgtgattggatccgtgaaatgttatgtgcaaacatgtttctctgtcctttgttaaaatcggttgttaatgaatagtttttttttggtgaattatgaataaggttaattt

SEQ ID NO: 58677 - DNA, 277 bp, Glycine max
  Clone ID: PAT_MRT3847_23998C.1
caaaaaaccccactaggggacacacaaatcgcctaattatctccagaggctatatcttatatgcggcgtgtgaagtcctatgccctaacttacaatgctacactttatacaccaattggtaagccaatggcctcatgtgaatcttctactacagtacctactccagccatgaaccctcattatactccaatcctacctatgccttatccatacatgccttgtgctcaaaattttgcttttccacatcggattcaagttcctttaaatcccaaaccta

SEQ ID NO: 58678 - DNA, 655 bp, Glycine max
  Clone ID: PAT_MRT3847_23999C.1
gagattaattgtgattttgtgagtgagccaagttcttttattacatagaatccgtgtgtgattttgcattccttaaaaacccgtggtttgttaaaagagaaacgttcccgtcatcccctgcgacaagtccccaatttaattaggaatgaatctctaatggcatcggaattgaaggagaagttgcgcgaattggtgaaggccatcgtggactccgacgactactctcttcaagccgccgacgaagccatcgccacactttcgtctctcaaacatttgaagtcgccggacgactttcctcttcctccccaatttcgctgccccatttcaacccaattgatgtccgatcccgttatcttatccaccggccagacttatgataggccatttattcagaggtggttgaatgagggtcaccgaacatgtcctcagacacaacttctactgtctcacactattgtccctcccaattacttggtccgatgtcgggaccgtggaattgacctacctaaccctgctaaggacctcgatgaagttgtcaccaatgccgatagaaaccatttgaattcgttgatccgttagttgcaattgtttcttcctgaccagaaagaagctgccaaggagattcgccttttgacaaagcgaatgccttccattc

SEQ ID NO: 58679 - DNA, 1162 bp, Glycine max
  Clone ID: PAT_MRT3847_2399C.1
tacggctgcgagaagacgacagaagggggaagtgtggtgtggcaaaacgtaacgcgattgcaatgatatgataggcgcagagcagagagagagaaaacgcaaaggcattatttggtcttggatccctttcgatccgacgacttcgttcgttccttctccttccaagttctaaccatttcccactgtcttcgattttagggcattaaatctgccatggcagcagcacccgctagagctcgtgccgattacgattacctcatcaagcttcttcttatcggcgacagcggtgtggggaagagttgtctacttttgaggttttctgatggctcattcacaaccagttttatcaccaccattggtatcgattttaagataagaaccattgaactagacagcaaacggattaagttacaaatctgggatactgctggtcaggagcggttccgaactattaccacagcttattaccgtggagccatgggtatcttgctggtttatgatgttactgatgaagcatctttcaataatattaggaattggatccgcaatattgaacaacatgcttctgacaatgtaaacaagatacttgttggcaacaaggctgatatggatgaaagtaaaagggctgtacctacctccaaagggcaagcacttgctgatgagtatggtatcaagttctttgaaactagtgcaaaaaccaacatgaacgtggaagaggtcttcttttcaatagcaagagatattaagcaaaggcttgcagacacagattcaagagctgagcctcagactatcaagattaaccaacctgaccaggcaaccagtggtggtcaacctgcgcaaaaagtcggcttgctgtggttcatgaaaagaatcagaatctgcagttagagggtgcaggattctgcaatagcactcatatgggtgctatagttattttgatgacatttaaaagtgggagcaggtatttgtccttgtatttcccaactgcaaagactatgttttgaagatagtgctttaaattttttgcttacttagttgtcggatttgttgtgattaattcgtttgctccattctctcctctttcatttgtactcctactcttaaaagaaaatctttcggaagtttcgtttcctaaaaaaaaaaaaaaaaaaaaaaacccaaa

SEQ ID NO: 58680 - DNA, 444 bp, Glycine max
  unsure (1)..(444): unsure at all n locations
  Clone ID: PAT_MRT3847_239C.1
gggncgggaattccggggcggaccacaggcgtccggccaaattggggcacgggaatgggagcggttattcagaaaccatgggccgtggcattgggaggaggtttttcaattaagccgggtttttaattaaacaccaggggttgggttgggggttaaccagttggaaaataatcggggttgggggatggggctgttgccactcaacgttttaggcaaactggggtgggggcgcaccagcgacctacatggttccaaggactggatccccaacttaatttggagggacctttggttggagatttggggttcgaccaatttggacttgcaagggatccggcaggttaaagggggtttgtgcaggcagggctggttaatggccgttttgcaaggctgggggttttgggaattttagggccagatctacttcgggtaacaggaattagt

SEQ ID NO: 58681 - DNA, 180 bp, Glycine max
  Clone ID: PAT_MRT3847_23C.1
aggcgtcaggctacgagtcaacgggagagtggggatggtagaagaacatagagaggcgctgagttcttgtagagagatgtaggtttgagttcgagtcatatgcatggggattcttcgcagatgcaagcgtcgccatccgatgatatatgacgggagtacatagtaatagtagcatcagag

SEQ ID NO: 58682 - DNA, 399 bp, Glycine max
  Clone ID: PAT_MRT3847_24000C.1
acatggaaaccaaggattgtgattctctccaaaatgacacccacatgtattgcgtttcacaggtgaatcattcttctccaaattcacaatggatttccctccatactgtcgatcccaattgcgtagcaacacttaccgtgccctcgttcacctcctctctcacatttctgcttacaacgcttcaattcttgaagcttcaactcaacccgtcaacattcccgataatggcagtggtagaatggatcaagaaaaccaggaaaaggagcctaagtgctccgaagttgttgattctgattttttggatcccaaggatcctatatgccagaaggatataccggaggtccaggaaaccattgagggggttgaagacaaggatatggattttacttctaacaagat

SEQ ID NO: 58683 - DNA, 332 bp, Glycine max
  Clone ID: PAT_MRT3847_24001C.1
cttaccactctcccccttctttccaaaacactcccttttcctttatattgacttacactaccctcacggggggaggtaaatagagaataaaaagagaccagtgtgcaccgagaaagagactgctcactccttgtgaggatgagctttgttctctgtgctggaatctgatcatgggtgaagaacgagaagaagtgtctagagagaatgaacaatacatgggagtgtatggaaatgagtagttgcattgtgagtgctctgcaaatagacgccgtttaagacaccagaattcctgatacatgcctctgttaaagtgaaaaaaaaaaaacaaatac

SEQ ID NO: 58684 - DNA, 593 bp, Glycine max
  Clone ID: PAT_MRT3847_24002C.1
ggatgacaatataaaacttttacattgtcaatgcatatattttttactcctctagaaagcatttaaaaaatagtttataaaataattttagataaacttttgtgcttctcttcctacttttaagctaaaaaatttaaaaattgtcaagtttaactttaattgaagcatatttttaacattgaagtagctttttaaggtctagaaaatcctagccaaacactacccaggtctttaattatggtagactgtacaaggtcatgttagtaagggtaacagtttcaataccactttcaatttttgaatctatggactctcatcgtctgaactaatgtcatccatcctcctttcagcaatcgctggaaaaagtcgctgacgaaaatcaggtggtggacgtggttcagatgaagatgcttctcgaggagtctcttgtttttgagttttaaccgacttcttctttgtatctctcacctcgttgcatactttatccaccattattaggaagtctcgtactactatgaacaacctggtgccttcatccttcccagaattcccatggaagtaatcaccagtgctcttcaccaaagccacgattt

SEQ ID NO: 58685 - DNA, 557 bp, Glycine max
  unsure (1)..(557): unsure at all n locations
  Clone ID: PAT_MRT3847_24003C.1
tgggagagtngtgcctcttcttttgagccgccgcagagtttctctttgctcctcttcttcttcttactcctccatttctgaccacgtttctttcgtgaaggatgtttttgctattcatcctcctcagcatctttcacaactgcgcggccttctttttttttctagngaatctattatctccccgggggccaggcgatgattaattcctccccccctaccactgtcaaaaaatagctctggtaatgtgactgcactgttgcggtggccgacggctccacctgagatggaaatgccagtggtggaagtcagaaaatatggagtatggcttttagctaagagtgtagaccaatttatacaacgactgttggttgaggaagataccaagaatggtcgagagagaaatgaagaagtattttatgcttcgggtgatgctggggagaaattttacaggaagggggattttacagagtctggaatttctaacctagatgtctatcttttgaaaaaaggtgggctattttcagatattataaagcggaaagtggcacgacattttg

SEQ ID NO: 58686 - DNA, 376 bp, Glycine max
  Clone ID: PAT_MRT3847_24004C.1
ggtggcggttgcttctccaagggacacgaaattcatggactttcaaaaatggcgtgttagagaccacacggaatcaccttgcaggatagaagagggatccatcctggttaccgaatgcgaagcaagccagcactgctgcgaagcggctgaatcgaacaaaatcaggagttccggatatcttggcgacatgattacgctttttctcccgcgtgtgctgctggttctagcgcgtcaaagctctctccttccctttctttttcctctgtgcttttgtgtataacgcatgctgggaggggagatgatgacattcgcatgagcctcctttgctttggctgggggcgaggacccgtttgtagcatcgaggatacctacaaca

SEQ ID NO: 58687 - DNA, 419 bp, Glycine max
  Clone ID: PAT_MRT3847_24005C.1
gggggttcctaattatgttttcctccttttctcccttatattttttatttgttggggaacctttcctccattgctgattctccattttttaaaactcccctcattttctgttttttaaggggggcggggggtgttcaacccaagttgggaaaaaaaaacaaaaaaagggtttttttatgggcctaccattcctttgcccattttttttgacttttttttttcccccaaaattcttttataacaacaaattgttccatttaagaccccaaaactttggggttcattcatcaatcaccctcttaagcgcattgatcggtcacatggcaacttctgattcaggcccctcgttttttttccttttttcccacaccaacttggttacaacttcattttttttagggacttggtcctttttctcc

SEQ ID NO: 58688 - DNA, 396 bp, Glycine max
  Clone ID: PAT_MRT3847_24006C.1
ctcgagccgtgacccgacagtggttgcaactaaaatgtttagctataactcattgagatcagcaacaggagattttcatccttcaagcaaaatcggtggaggaggctatggagttgtctacaagggagttttaagggatggtactcaagctgctatcaagtctctttctgtagagtctaaacagggaacccatgaatttatgacagaaattgatatgatatcaaatatacggcatccaaatcttgtggaactgattggctgctgtgttgagggtagtcaccgaatattggtttatgaatttttggagaacaatagccttgcgagctctttgcttggtaaataccagaacaatctaaatatgtattagaatttgagtgttatctaagttagttggct

SEQ ID NO: 58689 - DNA, 454 bp, Glycine max
  Clone ID: PAT_MRT3847_24007C.1
tggttgagccttgtgattttcgaggttttgaggttctctctgtgttccacccttccgatgaggtcatcaactcggttgtcatagcacgtaaattatatcactctcttgagcaaggccttgttggctctatgatcctacctaacaagtgttccgagattcaagccttcaaccctctcaaccatggcaacatgattgaggaattggccgttgaggagcaactcttgtgaattattgcttctttttttttttttatctatctctactccgtctcatgctttagatgggagattattattggggtcatgtgcggtaccaacttattatgtagtttacataatatttccacttaattgtgtccgactgttttgtatcacatcgagtaaagcttaagtgttttacactgtgctgttattaaatttgcaataaatatgaaaagagatcgattatgtgttgt

SEQ ID NO: 58690 - DNA, 767 bp, Glycine max
  Clone ID: PAT_MRT3847_24008C.1
acgagggtgcctccacctccaaccttcactgcttccttttcctttgcatgcaaaattcaaaccgcagttacatcatatgaggcacaccaccaaactattttggcttactactcaccaacctccacgtggccagcacttaccttcagcaagtccactaagtaccaaggcacttccacatttagtggttgttgccccagcccaatccggtgacttgtccaccttgctccgaataagtgcagtgcttctatcggcatacttcatagcaaattttgtcgtgccaggtttctttaccaactctttcggatatgataagtcatcaaacgaagagcagaaggttgacgatgtaaatgcaatagaagatgaatagatagtcaaggaaggtcacgaaggaagaaacaggactacgtaaacgtgagaactgagctcatgatggttgaagcgctactgcatgggtcttttgtatctttagttcgcatttagattataataaaaacatccaagtgtcatttctgttgctcattagtattaggtattctagacttggtagcgattacaatctcatgaaaccaaattgttcctgcccttgactcaagtggggttactactaccccaaaaaaaaatgttagttaacctcttgtgagtatagtctttatttaacaaaagattaatagattattgtttgatatttaataatacgagttctttgtactaaagaaatttgccatcaatgattatgtttatgttaatgttagtataaaaagctttac

SEQ ID NO: 58691 - DNA, 263 bp, Glycine max
  Clone ID: PAT_MRT3847_24009C.1
ggacaaggcagatgttcagtccatcatcgggctccagcgcttttttgagacacgaatgaatgatgcctttggtgacaccaagttttctgctgtgctggtagaaccaccaccactgaaccttcccagtgctggcgtaaaatctcaggaactgtctggtccttgtgatgggccctgaaactggggctcttgtggacagaccagaccaacactggactctgttttttaaaccctcccctgtcctttctctgttggactgactacct

SEQ ID NO: 58692 - DNA, 288 bp, Glycine max
  Clone ID: PAT_MRT3847_2400C.1
atgtctctgacttgctgagactattaatatggtgtgacaataagtaaaccattaattcatgtcgaagacaggacccacgacttatttacgccaattgatgtagcctaaattaatgtactaactagcattttaactaacgaggcgtttgtttgataggatcttctcaaatttattttattaaatttgcaacactttgaatccgattaatggcttggaaatgcaattaaaggactgtgtgtggagaataataatctgtgttgcgataatgttaattatgatgggttgatt

SEQ ID NO: 58693 - DNA, 452 bp, Glycine max
  Clone ID: PAT_MRT3847_24010C.1
acggctgcgagaagacgacagaaggggatggtacacgcagtggtgactggccctatgcgcatatctagtctacgtgtatcatgctcagatgatatggaccgccaccgacaacgccgcaaactctcacccacggagccaatctatccatccgttgagaccgtgagcttccagtatatcggtactgccctctgccaaattgctactagctatgcccatgagaagaaggctggtctgctgtgccgacttggcactatctatgctcagctcagagagacaggctgggagacctgttccttcgtttatagggaagaggatcacgagcgtgtggttgctggcactactcccaatgcataatggaagcataacatttctcgctaaccaacggaagcccgatgaccagtagtagtgctccgaacagcatgtgacaggcatgtatactctcgctgactaaa

SEQ ID NO: 58694 - DNA, 359 bp, Glycine max
  unsure (1)..(359): unsure at all n locations
  Clone ID: PAT_MRT3847_24011C.1
ccacttaatatgcgattatgctttatataatttaagnnnnnntttttaaaaatgttattccctttgtccagggattttggggggaaaaaattttttttactgcaaggccttcacaaaaaaaaaatttggtaacaaaaagtttcatggggtgggttcctttttcctcttgggcattttagaccccacacaaaaaagggcgcctgtttcaacaagtttttttcgcccaaatgtgaagggaaatttggttaaagaataacctttcctagcccctttgctcactttaataggagtgaaaatgggggaaaaagcactttattgttgttttttacatttttgttttttggggtttaacccacaaa

SEQ ID NO: 58695 - DNA, 405 bp, Glycine max
  Clone ID: PAT_MRT3847_24012C.1
ggttggtttaactgagagccttcttactgatcatcagcctgatcttgtggtcttcaagggttgcctgtgtctatcacatgaacacatgagaacccatgtgcttgtttggctaatgagggaatttggagttgaaaattctcgggttctgttgctgaatgtaagttatgagcatcttcaacttcgtcagcatccttcattgacacctttgtgcatgtctgaaaatcaagatgtcctgttgctaattaacgatttggaacaatttattctctaccattcgagagataatagaagagaccgtgctgaagatcttgttgatcacaaacatataggattctgctacgattttgatcaaagctatgttgtgccatattcaaattaagctccgcttcatttgcttatatgact

SEQ ID NO: 58696 - DNA, 969 bp, Glycine max
  Clone ID: PAT_MRT3847_24013C.1
gagaaaagtagtcttttgtcctcaacttattgaagtgagagtaattttggtaaatactgtgatgcccctgaagtgcagaagcatctaaaaaccataccgcaaacacgaaacaatacacaaccattccgtatatttatcttcatttctctatttttatacattgccacttttgggccttgattagcttaaattcctctccaacgtctaatagtttttgccaagtcttcatctctctgcaccaagaggaacaaccctcaaccctgccataggcatgtggttcctccactcaacttcctaagccttcacattttccttgctccaagtgccacattaacaaaatggagagcacaagagaatcttctgtgttgctgctaagtgatcttagtcctttttcaggctcttaaccctccactattcttcctttgttcctccacattcagcaatcagagggaatggataacaaggcaacaattctgatgcaaaagtacgaggttggacattttcttggccaaggcaatttcgccaaagtttaccacgcaaggaacttgaagactggccagagcgtcgccatcaaagttttcaacaaagagtcggtgattaaggtggggatgaaggagcaactcaagcgcgaaatctctctgatgcgccttgtgaggcaccccaacattgttcagcttcatgaggtcatggcaagcaagacaaagatatattttgcaatggaaatggtgaaaggtggtgaacttttctataaagtgtcccgagggaggttgagggaggatgtggcaagaaaatatttccagcagctgattgatgctgttggtcactgccacagccgaggggtgtgtcaccgcgatctcaagccagagaaccttcttgttgatgagaacggggacctcaaagttacggatttcggtttgagtgcattggtggaatccagggagaatgatggccttcttcacacaatatgtg

SEQ ID NO: 58697 - DNA, 476 bp, Glycine max
  Clone ID: PAT_MRT3847_24014C.1
ccaaaaaccggtatttttgaaataaattaaaaaccaggcagataccacattggcggccttttccttattaaaaaagaggaaaaaatcccgggaaaataaaaaacccttgtataaaaaccctggatcaaaataattttcttttcccatgaccccgggaaacaaaaaaatccatttcctttttgaaagccaatagggctcagggaaaagagtattttaacccttgggacccaaataagcttacttattccacgtcacaggttcccacccaaagggaaaagaggagcccttttcctcgtaataaaaaacggttttgatctcataaaaaaacaaggtgtgggggggcaagaattttgagcatacaaaaaaaggctaaaaaccttgcaaaaattgctgattacaacacgggaggcccaagggtttctgcccaaatggcataaaagcccaattcgggaatggggaaaaggacgggtcctggg

SEQ ID NO: 58698 - DNA, 412 bp, Glycine max
  Clone ID: PAT_MRT3847_24015C.1
cttggggaaggggggcctttttaccaaaaaaagggttgggccaacggccttccctttttttttttaaaacccaattttggggggaccccccccaattttaactaacccatagctaaaacctttaaaaggccccccgccccaagttgaaaaaagttgttgcccattcaatttaaaaatacccccggaaaaaaaaagttgctgaaataccccaagggcccaccaaaaagccccccattttggtttttaaaaacccccccagggggggtcccgttccccccccggattggggcctccatttttcctttgatgaacccctaaaacggtttttcccacttataaaccccttttttggaacgggataaactttcggtggcaatccccccttattcagggaactgcccttttcaaaggg

SEQ ID NO: 58699 - DNA, 374 bp, Glycine max
  Clone ID: PAT_MRT3847_24016C.1
ggctcgagaggagttgctgagtaagacccatctttttcccatggaggtcggatttggattgagggcgagccttatgctcttaatgggctagacataacggatgccatcttgccctgggtgcaagactatgtctgattctacttcgagtctaatgaggaacctgcctaagaccctggactcaaactagttggaaagaacttgacgaggagagagcggatgatgtgaaagataaccaatgagtggccaaagatgcttactcgaggggacttggcttaagctgacgatctcctaaaaccgatcgcgtcttcccttaatgctgccgactactctagtcagaaggcatgttgatgtgttctccagagcagggccactat

SEQ ID NO: 58700 - DNA, 357 bp, Glycine max
  unsure (1)..(357): unsure at all n locations
  Clone ID: PAT_MRT3847_24017C.1
naagtcgagatcgacgtacttcgcatnactggatnaangactagctcgccaagctcactagcgcgcgcggccgcccttttttttcatatttataccctacccaatttttttctttttattactgagcaacacatttatattggggctccggggtcaaataatatcacaatctatggccgtaaaacttttgcgttaaaaaactcctaaaaaattcttaacaccataaaataaacttccttcctttccaaaaaattgctctccctcaatctcttactttattaccaatgactcaagcttctttacctaaatcctgacttacatggccttgctttccacggcatctctcgtaaatagggt

SEQ ID NO: 58701 - DNA, 449 bp, Glycine max
  Clone ID: PAT_MRT3847_24018C.1
caacaaaataccttccaattttcatcacaaagctttcaacttattgcttcaaccgaccattcaccatggcatcatcagcaacaaacacttggattaggaccacactcccttctcttccgacatcttctccgacaaccttaaataaaaggtttccttcctatcctaattccaattccaattccaacaccatcacatgttcccttcaaacactccacttccccaaaaagtaccaaccaacctccacaaccacaacaacaaaaacaacaaccaccaccaccaccaccaccaccagcccagcaagagaaaccaaaccagtaatcacttctccctccgaaacaaaacacccattacctcaaaaatggaactttctccagaaagcagcagcttcagccttaaacatggtcgaaacagccttggtctcccacgagcgtgaacacccactccccaaa

SEQ ID NO: 58702 - DNA, 455 bp, Glycine max
  unsure (1)..(455): unsure at all n locations
  Clone ID: PAT_MRT3847_24019C.1
gcacgaggttctgtgggcttttcttcaaatgaagttttagttctttaaaatgatttccaaagttgattattgatggcatgaaggtgcatttattgttgattgtgataaaaaagacattggccactctaccaaattcgatattttataagcctcattttcatgcttagattatcttgatctgatatgactttgatagtttcagtgtcattcatacttttagttgtatttatcaatattagatttatacagatacaagtgtagtacccaatttgatttttttattatggatgatttagcagattcataactttttgtatggaacatttttttttatattgagctcacaataaagcttgaaaagtgtctaatacctttaccatgtntttcactttaatgcttacttactactaatgatcattctgttagtttctatgtttatatttgccactcccgtg

SEQ ID NO: 58703 - DNA, 595 bp, Glycine max
  Clone ID: PAT_MRT3847_2401C.1
tttttttttttttgacttagaattctcataatatatatagtaaccagatcatacaaatacagggatagagcataggtgacgcaatgcacaaaagtacagacatatatatcatggtccaccacaggcacaagccacgtatgtgcctattgaactctttattaggtaccttttaatgtcggcattttgaagcatacactaacttaagtttttgttaatttatttagattgagctaaccatgccatctgatgattctttggtggcaagagtagccaatccagcagaattcccattaataaaattacattgttgtctgatttctccttgagatcccgttagcactccaatgttacccatttttatcattgaagccttgaagttctcaaagaaaagagtttggttactgctgaagctattgacaatggcaatggtatcagcaccggttgtggaaaacagctcttggtcactctgaagcaagcccttgttaacctgaagattggagtagtagttactgtccactgtgtcaggtgtggttgggtcaaaattggtgaggttagtgccaggtccaccattggcgcatattgcactgagtggttg

SEQ ID NO: 58704 - DNA, 413 bp, Glycine max
  Clone ID: PAT_MRT3847_24020C.1
gttctagagcgcgagcggcgccctttatggtaattgcgctttaaggcgttttgtatggaaaattctctctttattatggtttaccaacggcacaggcacgtgcaaaaccagggcccacaacggctggccgaaaaacggacagcagaaaaagcgggcgaggctaaccgcaattaacaaatagaaaagggaaagaaaaccacacacaaaaaagggggagaaccatgaaacaaccaccaacagcggaaaccaaataagcaggtcaacgaccgcaacaggaaaacgaagaaaagtaacgggacacagacataaagggggtgaaaggaaacagaggcaagaccagacaacgaaagctgaacgacgacaagggggggggaaccagccaccagcagtggaaaagcgatctacaaagacca

SEQ ID NO: 58705 - DNA, 456 bp, Glycine max
  Clone ID: PAT_MRT3847_24021C.1
ccctcgcgtttgcccacgcgtccggcccatcagaaagagaacggctcggcacttgttttgctaatatggaattgattagcaagacgacgccggacaaagggaacagcaacaacaattccaccaacaatttgccgactgaacaacatggaaatgctaaaactggaattttgcttcgattcaaaaaagcgtccgatgttaatggtgttttctcttattccaccggaggtggaacagcaacaaagttttcggctgcacttgagcctggcagcgtggtcaccgtttccactgacaatgcctacgccctgctgatcgccaccattgtttctgtcgatgtcttcgaatgttccgtaacattgcgctccgaaaaggattttcccgccgaatttggtcagcagcagtcggttctttaccacttggacaaaaatgacggcttcagctcctttgcctaccgtcttg

SEQ ID NO: 58706 - DNA, 1367 bp, Glycine max
  unsure (1)..(1367): unsure at all n locations
  Clone ID: PAT_MRT3847_24022C.1
ggggtacttgcttcccaggcccaagatggttaactctgatcttgccaggattattaattctgacgaggttcagtctgttgtgaggcccattaagaaggatgtgaagaaggccacgctgaagaagaaccctcttaagaacctgaactctatgctgaagctgaatccttatgccaagactgctaagaggatggctcttcttgctgaagctcagcgcgttaaggccaagaaggagaagctcgacaagaagaggaagactgtctctaaggtacaacatgttattgcactttattttatttactttggtatatttattgtttgctgtttattatggtggatatatattgttgatcatggtttcatgtcattttttttattgactaatgttagtttgttagaatgttagtggtttgtacaattgtacattttaagcttattattgattttgtcataaaatgcgcatatattgatgatctgtcttaccttgtatgctagtttccttttgatttgtattggaattgttgtatcttcttgttacatgttactggtttgattaactcttataaatggagatttagttgtgcgttatgtaaagttttgcctatgattttgagtttttttggatagtagagtaaggatatcctgttgtattatctactatgatctttctaaggattgcttttgaatgctgttaatgtgaattctagaaattttttagtctaataatttgtttgcaaggactgatcgttgtttcgttgtctattggatatattttatgttggggttgtctaacgttagctgtattagatgattgattcaattctctatgtacttaaaaatggttgcatttttacttgtaataagttagacggccacactgttttgaatatgaactttcttttaactcgcaagtgttttatgctagtcgaaagtatctgccaaatttacgtgctttgctcagtgaccttatactagtcgaaagtaactgcaagtgacctgttaaagcctttataatttgtttattaaaggtgcttagtctatatatatatatataatatcaaatatgttgatctcataagatcttgcatcatagaacttgtgaaaaaatggaaagttcttgtaagacaatcagggctccaataataagttgctcttgaaagttcttcatttgaatgtatctgaagattagatttgaacgactcttggttttaggcgtccgttctatatttttgttattcttgttgtattgtgcattttgaaatgcttttttatgtangagtttctagtcttggacaaacgttaacattatattttcaacacattctcctcctagtggttgataagtatgtgagtttaatatttagtgggga

SEQ ID NO: 58707 - DNA, 1968 bp, Glycine max
  Clone ID: PAT_MRT3847_24023C.1
gggaattcggctcgaggttctgttgtttcaaaattgcaaacgttatccacctcagaccatgcctccgtggtctccatgaacttatttgtggcacttctttgtggttgtattgtccttggccatcttcttgaggagaatcggtggatgaacgagtctatcactgctcttttgattggtgtttgcactggcatagtcattttgctgtttagtggtggcaaaagctcgcatattcttgttttcagtgaagatcttttctttatataccttctaccacctataatatttaatgccgggtttcaggtgaaaaagaagcagttttttgttaacttcatgaccatcatgttgtttggtgctattggtacattaatatcatgtaccatcataactttgggtgccacacaaatttttaagaggttggatgttggtcctctggaattaggggatttcctagcaattggtgcaatatttgctgcaacggattctgtttgcacattgcaggtgctaaatcaggatgagacacctttgctgtacagtcttgtatttggggagggtgttgtgaatgatgctacatcagtggtgcttttcaatgcaatccaaagctttgacctcaaccaaattgactcttcaattgctgtacactttttgggaaatttcttgtatctatttattgcaagcacaatgcttggagttttgacaggtctacttagtgcttacattattaaaaagctgtacattggcaggcactctacagatcgtgaggttgctcttatgatgttaatggcatacctgtcctacatgcttgctgaattatgttatctgagtggcattctcactgtattcttttgtggtattgttatgtctcattatacctggcataacgtgaccgagagttcaagaatcactaccaagcattcttttgcaaccttgtcttttgttgctgagatctttatcttcctttatgttggtatggatgccttggacattgaaaaatggaaatttgtcagtgatagccctggaacatctgtagcaactagttcagcttattcttgtctaattcttcttggaagagcagcttttgttttccccttatccttcatatccaacttggctaaaaaatcaccaaatgagaaaatcagcttcagacagcaagtgatcatttggtgggctggccttatgagaggtgctgtttcaatcgcacttgcatataatcagttcaccatgtcggggcacacttcactgcgaagcaatgcaatcatgatcacaagcaccatcactgttgtgcttttcagcacagtggtgtttggtctgttgactaagccactcataaggcttttactgccccatactccacatcataaagaatcaagcatcacgataatcacagatccatctactccaagtccaaaatcagtcactatcccacttcttgggagtgcccaagaatctgaagttgatatcgatggccatgatattcatcgtccaagcagtattcgtgccttgcttacgactccaacacacactgttcatcgtttgtggcgtaagtttgatgatgcattcatgcgtcctgtttttggtggcaggggttttgttcctgtagaacctggctcaccaactgaacgtaatggccatcaatggcgttgagagaaaaaaagccaagaaatttgtaatttgtattgtaaactgcataagttttgtggagatcaagcaatgcgtgtataagaatcctgtcctgagattttgcttagctctttgggtagtgagaagtgagaaggctgtgcaatgcaccataagcatctcaactcatgtctgcgttttccgtaaaatgtaatatttgattattagatttcttgtactaaaagtttgaataactaaagctaaattttttttccaagttgtatttgttgggtttatggtatgctgcttttgcctgtaaaagatgaatttttagtgcacttgattactgggtat

SEQ ID NO: 58708 - DNA, 739 bp, Glycine max
  unsure (1)..(739): unsure at all n locations
  Clone ID: PAT_MRT3847_24024C.1
cactcatgaaaaattgctgaatggcattctttcatgtcaacaaatcagtacgatgtaactgcttgaagcagtccttgtattaacttgatgtgactggagagttcttctatagtgctgttttctgttttctctttctcgaaatgttatctttcactcatgaatctttcctctcaaatcttcattttgttataatagaaaaacattttatttgctatacttggttctttctacagccctggaacatctgtagcaactagtggagtattgttgggtctaattcttcttggaagagcagcttttgttttccccttatccttcatatccaacttggctaaaaaatcaccaaatgagaaaatcagcttcagacagcaagtatggttaaatatttgtcagtgagtgccctttttcagatttcttgtgttactaccaagttttactgataggtttctcgttgtttctcaattctaggtgatcatttggtgggctggccttatgagaggtgctgtttcaatcgcacttgcatataatcagttcaccatgtcggngcacacttcactgcgaagcaatgcaatcatgatcacaagcaccatcactgttgtgcttttcagcacagtggtgtttggtctgttgactaagccactcataaagcttttactgccccatactccacatcataaagaatcaagcatcacgataatcacagatccatctactccaagtccaaaatcagtcactatcc

SEQ ID NO: 58709 - DNA, 212 bp, Glycine max
  Clone ID: PAT_MRT3847_24025C.1
cttacgcttgcgtcatggctgctaccatatcgaacctttccgatctgaattaggttagggttagactctagggtttacaacatcagcataatccatcgtcacttcaatctactataattgagaagatagctgaacactttacagccatggttactgctcgtctataccgatgacaatatcattccatttgatgccacatctcactaatggaa

SEQ ID NO: 58710 - DNA, 1502 bp, Glycine max
  Clone ID: PAT_MRT3847_24026C.1
cccacgccgactctacgagacgacagaaggggggcctatgagtttcatcaggacacatccatggtggcatgctctttcaattcccaattgaaattcccccaaagccaccttttttttattcaataaatcaacacccaattttcaaaattccaacttgtaatcaatttttctttccatttgtcaaaccataccaatcaaccaacctcgttgcttcttgtgatcactcttgaaccacactaatggatattgatgagtgggagtttctctctgatgatggctaccttgatttcaatgaagagggtgggaagcaaaagcaaaagcagaattcctttggaaaattggactccgagggcatctttgacatggactacttttgctcatcaccaccaccaccaagggtgagaactcaactagtccctttgccaattcaattggagccaaaaattgggaaggccccagaagatattttggtgaaagacatcatcaagagtagtcctatggaagtggctattgctaccccatcagagaacacaaaggaatttgagacagtggaagctgatagagtgaaggttttcttcaagatcaaggagaaaagtgagtttgtggacatgaaaaggggaatcttggctccaatggatgctgctggttccttgaaatttgaggacaaaggtgaggccatggagatcatcacctctcccagaaggaaggttattgagaaggatgtgtgtgacaaagaagaggagtccacttgggaggaagagaacaacagtggtttcaacttgtggaagtggagtttgacaggtgttggagctatctgttcttttggtgttgctgctgctactatttgtgttctcttctttggaagccagcagaggaacaaactaaagcaggatcagaagattcggttccagatctatactgatgacaagaaggattaagcaagtggtgcagcatgcgaccaaattgaatgatgcaatttcagcagcaagaggtgttcctatgagcagagctcacataagcgttggtggttactatgatggtctttgaaagcatttgattaggtgccttcatgaagcaattggagtctacaatggatcaaccatgccataagatctattaatctggccatatcctatattgctgtaaataacatgatgccagatgttaccttattgttgatgtttgttctgtatattttctctggtcttgtaaattaagtcacagattagcggcactttcattattattattattatttgattaatattttggaatttatgtatcaaaaattcaaaatgggtatagaaaattgattttgttgttaggcatgctctgatgctcactcaaatgttggcacaggtaggcagaatttaagtgtggcagcaattattaatgctttggacataaaggcaagtcataaagaaaagatcatggccgaattaatgatccctcatttacttttatgagcttaattaccaatattaaaaaaaaaaaaaaaaaaa

SEQ ID NO: 58711 - DNA, 303 bp, Glycine max
  Clone ID: PAT_MRT3847_24027C.1
gagaatggttccaaaggggttaacctttttggctgtcttaatatgctcttcgggactgtcactgaatcctgctgatgcggggcaagcgcaacataatggcctcgatatgaacttgtacaaggaatcatgccttcaggctgaagacatcatcacagaacacgtgcagcttgtctacaagcgccacaagaacactggtttctactggctgacgaacatcatgcatgactgggctgtacagagtggtgatgctttactgttgctggactccacaagaaggaacttgtctgataaggaaacagatac

SEQ ID NO: 58712 - DNA, 312 bp, Glycine max
  Clone ID: PAT_MRT3847_24028C.1
atccaacgactgaggtcaatcttaaagtaagcgttgatcgggcgcgcactcatctggttaggggagagagaaacacggaggccacaggtggtttacttgtgaatacacgattgttatgggactgagctatgcatagcagaataagggggcgcgtcccttgtgagcattacacaagccgctgtcaatactgtgaataggggaatgacggttgcacaaaatcaatgactgtgtcatgtgatgcacaccatgattgtgatgcatggaactgggcatacctgaagtgcactgacagctataacgatagcatctgat

SEQ ID NO: 58713 - DNA, 656 bp, Glycine max
  Clone ID: PAT_MRT3847_24029C.1
agagttaggcgttcgattcaatctaaggatagggatagtactaacctgtttatttttttatggaataaataactaacactgtttgttgttcttaattgacccaacccaagggcaagccttttatgctctaattggctgctgaggaagaccctactttgaactctctatctctgccttttcacaactttgttccatttttcatccacttcgccacgtttgcaatgctttttttgtacatagatggtgccgtgtttaatttatactccatgaaatacatgggccatgcttgatacattgttatcagttctgcatcacgtatttgactattttgtattgccttcttaggaactttgcatataaatgttcacaacattgttattgttgcaatttggtccttaattttctagcaatcatttcataatttatgtattgatttgatattgtaataaatctgttcataaccagatttgaataaaatctgaattatgaccattggtgatagactatttctaaatgggcagatgtttcactgtccatggggggcatgggcaccttcgtaaccaaagaaggacaccttcacaggagtaaggtagaaacttaatatccatggctgtccagttactttctaatttttctccctgattactgcagattta

SEQ ID NO: 58714 - DNA, 1516 bp, Glycine max
  unsure (1)..(1516): unsure at all n locations
  Clone ID: PAT_MRT3847_2402C.1
gggagattatatttacaatggaagaactcttgcagagtgcgaagacaaacatgaatgtggaggaggtttgggtttcaatagcaagagatatcaagcaaaggcttgcagacacagattctaaggctgaagtatgttgttgacttttttggccttcatttgtactcttatttcttttctgaaagactaaaattttgccatcatcaaattctaggtggtgtgaaaacttggtaaggaaatatctggatttttttaattctaacttttgaaggaagtgcatggaattgctgcttctttcttaatcctgaatgatgacaggatcttcttcttgtgtggttccctttggatccgacgacctcgttggttttcctttgtaagttgtaagcatttggcaccagcaagccctgtcttcttcttcgatcagattagggcatttcatttctgcgatggccgcagcacccgctagagctcgtgccgattacgattacctcatcaagcttcttcttatcggcgacagcggtgtcgggaagagttgtctgcttttgagattttctgatggctcattcacaaccagttttatcaccaccattggtatcgattttaagataagaaccattgaactagacggcaaacggattaagttacaaatctgggatactgctggtcaggaacggtttcgaactattaccacagcttattaccgtggagccatgggtatcttgctggtttatgatgttactgatgaagcatctttcaataatattaggaattggattcgcaatattgaacaacatgcttctgacaatgtaaacaagatacttgttggcaacaaggctgatatggatgaaagtaaaagggctgtacctacctccaaagggcaagcacttgctgatgagtatggtatcaagttctttgaaactagtgcaaaaaccaacatgaacgtggaagaggtcttcttttcaatagcaagagatattaagcaaaggcttgcagacacagattcaagagctgagcctcagactatcaagattaaccaacctgaccaggcaaccagtggtggtcaacctgcgcaaaagtcggcttgctgtggttcatgaaaagaatcagtatctgtagaaagaggtgcacaggtttctgcaatagcactcatctgggtgctaatgttattctgatgacattataagtgggagcatgtatttgtccctctgtatctcccaactgcagatgtcttattttaaagttaatattttaaattctttgctcactgacttggtggaatttgttgtgactagtaatttgcttcaatttcctattttcatttgtagtgtgactcttaaaaggtatcttgattagatgcggatagattatcacaacagcttgatcatttgcagggnaaaaaaaaaaaagtcgtaaaaaaaaaaaaaaaaaaagaatnnntttataaggaacaaatttaaaaacagaagcatgcaacagcatataataaaaaaaaaaaaaaaaaaggggcggccgttttaaa

SEQ ID NO: 58715 - DNA, 419 bp, Glycine max
  Clone ID: PAT_MRT3847_24030C.1
cttaatggaccggcctcaaaagaaaagtatatgaatgggggtaataatgtgacattattttacttaccaaatgaaatcctgtattttcgaaacagaggataaaaaattactataatatacaggtgtgagatagaaaaatgtgatgaacaacaacattcatgcgctgaatctattcctagctcatgtctgaaaaagcttctgcttcatggggtcttgtgttggtaaaaccatggggggtttaaaacgctctgattgagacaaatgaatgaaaatttccataataactgtgacccggagcaggaaaagcaccgtaaataacatgccttcccaagaggagaagagtgaggtccactggaagaattcataaacaaggaatcctagcgacaccacccacaaaccccaaccaaaatatatttttt

SEQ ID NO: 58716 - DNA, 459 bp, Glycine max
  Clone ID: PAT_MRT3847_24031C.1
acggctgcgagaagacgacagatagggcgatcaactggataatattaccattttgttcggcttatgggacgtgtatctctcgacattacactgtggattctcactactaacatattttaaaattgactaatatgtgtaggtcaggtctaccccacgaacattaaatttgatgtaaagtaatcataatattctttttattctataattaaaatttcatgtcgatagtaaaaataattataatttaatatgtctactatcatataaaggttaaatttaatttattcttatgtatattttatatgatataccattctatatttgttatgcatacagtccaagtacttaaattcatatatttgactatctatctctaacccttgaacacttttttttttatgtattcatatccagttgtttgaataaatatcttataaatgtaattaattcctcttaactcat

SEQ ID NO: 58717 - DNA, 1325 bp, Glycine max
  Clone ID: PAT_MRT3847_24032C.1
ccacgcgtccgattcacctcttcgtctcgagccgcgagtcaaccgagtcaactcaccaccaccaatgcctccgtccaccaaaccgaaccttccttggaagcttcgcatattgacctctctcctcaacctcctcatcaacgcctctcgccgctccaatggcaccgtcaaccgccgtctcttcaacttcttcgaccgcaagctcccctctagccccaaccccgtcgacggtgtcaaaacctccgacgtcaccgtcgacgccacccgcaacctctggttccgcctcttcgccccttcctcctccgtcgccaccacccttcccgtcgtcatcttcttccacggcggcggcttcgcgttcctctccccggcttcagccgcatacgacgccgtttgtcgcttcttctgccgctccttcaatgccgttattatctccgttaactaccgtctcgcccccgaacaccgttacccctcccaaaacgacgacgggttcgacgtgattaaatacctcgacgaaaacggcgccgttttgggtgacattaataattgttttttggtaggtgatagttcgggcgggaacatagcgcaccacgtggcggttcgggtttgcaaagagaagttccggttcgtgagagttatcgggttggtttcaattgaaccgtttttcggaggggaagaacgaaccgaatccgagatccggatgacgcaagacccgttggtttcgttggagaaaacggattggtattggaagtcgtttttgccaagcgggctgggccgggaccatgaagcggtaaacgtgagtgggcccaatgcggtgaatatttcgggtttgggttatccgaatacgcttgttgtgattgcgggttttgacccgttacaggattggcagaggaggtactatgagtggttaagaaaatcgggtattgaggcacagaaaattgagtacccgaatatgattcatggttttcacttgtttccggatttgcccgcctcttctgtgtttgcttctgatgtcaaggatttcatcaccaagcaaattgccgacgtgaattaagagggtttaaatttgtgcaattagttgtgatagtattgaagagagaaattatttgcctttaatttgtatgaaaagcgaaagacagaaatttgatagacgtggtgtatttatgttatgaaattgatatggacatctcatatggtggttgggtagtagttgtctcatatacgcattaggttctcacgcatgttaaactcaaagctcattgatggagtcgctctaacccctctcttactctcttgtatgtataataacgcattgctctttttggtattgt

SEQ ID NO: 58718 - DNA, 557 bp, Glycine max
  Clone ID: PAT_MRT3847_24033C.1
atctaaaatattttaagataaatacaaataccttcttaaatatttcacataagtatcaaatattttctcaattatgggtattttttatcttaggaaacatataatttaatcatttatactaatttataatttttgggatcctaagtttttaactatatattacttggttacttcaaatattatataatattgaaaaatataaaaccggttcaaccacagtttaactacaggcgaaccatcgaaccttaaaccaaggccttcaccagttcaatcactgggtcagttttaaaaacattggttttaaaaaattaattggcctggggcaatcattggacaacaggagatatgttttagtttaggacaacattgacccctttcattactttttctggggggtttctcaaaattatccaaatagaaaatttgggctggatttggacttctatggctataactacctcatgactggatctggacagggggggctaaaaatctatcaggggaaaaacagacttggtgctgctcctgcaagctcttactctgcaatactgacacag

SEQ ID NO: 58719 - DNA, 205 bp, Glycine max
  Clone ID: PAT_MRT3847_24034C.1
gcattcggctcgagttcgtgtagtacgtgtacttggcgctgctgctcggagcatgcggcacggtactcggcgctggtgaactcgcgatcaccctttttcgaaggtatcccttcatagcattgttgtcaggcttggcactatacatagtgctccgtattgtttcaattctgcagaatattatgtccatcaccattataactagttt

SEQ ID NO: 58720 - DNA, 1189 bp, Glycine max
  unsure (1)..(1189): unsure at all n locations
  Clone ID: PAT_MRT3847_24035C.1
cccacgcgtccgtaaccaccaaatctttcctttcaggaaattctattattattcacacaaaggaggaaaaatcaacacgaagatctcattctcgcagctgcaccgtttcaccttctaaatcagagtaccgttttttcatcagatccgtatacaaaactcctcagggaatgttgaattacgatattttaattcttgattggtagccggttttggctggatttgggttgttggtttttatatcagaaggagaaaggaataggttgagagttgaaagtgaaagtaaatttctgtttcaatggctgctgcttctggtgaaaggtggatggaccgtcttcagttttcctcattgttctggcctcccccactagatgatcaacaaagaaaggatcaagttgctgcgtatgttgaatacattggccaatttacatcagaacaattttctgaggatattgctgaggagttttatcaaacacacttactggtttgtgttgctttgacagttgatccgcaaccattatccatcaaaagaaatgctcctctttgatgatgttttgggctcgagctcgagccgaatcggctcgagcgggcatgcagttgtgcttccaattatttcatgtattattgatggtacgctggactatgataagactagtcctccatttgcttctttcatttctttagtctgcccaaaaaatgagaatgaatattcagaacaatgggctatggcatgtggtgaaattttgcgtattttaactcattacaatcgccccatatacaaaatggaaaggcaatattgtgaaccagaagtaagcagtggcaaaagtcatgcaacgactaatgattctgtagatggggagtctggccataattctttgatgcagcaggagaagaaacctataagacccttgtccccttggattactgatatattacgagctgcacctttaggcattagaagtgactattttcggtggtgcagtggtgttatgggtaaatatgctgcaggagaactcaagccacctactattggttctgctcgcggttctgggaagcatcctcaactcgtgccatcaactccaagaatggcagttgctaatggtgctgtgttatattagtggtgtgatgataagntgtcgtatgagactgctacttacagcagttgctgcccggactctacttctctcaacac

SEQ ID NO: 58721 - DNA, 391 bp, Glycine max
  Clone ID: PAT_MRT3847_24036C.1
gcttgaaaagaaaacttcattttagtgatggagattaatgacattattacagctctctaacttgaaacacggatacagattaacgttacttactacgtaaatttccaagttattctatcttcagtcataaccctatttctgaacgagaagttttatcatgccctatcacttgcaaccaaaaattgacctggacgcaaatctgtaaaaaccgatggaaacaatgttaagccactctgttaaatggcagaaacctttcaaccagtctagccatcacttggttcatatgcgtgatttagctattccgtatgcttatttcacaggaccaatcgactctgcaccaacagatcccacatcaaatgctcataaatttcacggctcattcattccacag

SEQ ID NO: 58722 - DNA, 427 bp, Glycine max
  Clone ID: PAT_MRT3847_24037C.1
aggcgtcagtacagcagcgaaaggagtactgaatggggctgctcctagacgaccttcgaccttcctaacgtgatcggtcacttgctctcgcagcaattccgccttgtacatcagtgagaagttcctatctgcaaaagcatctgcaacaccttaagattctcactgatgattgggcacacgtatctgtggttgatcctttgcttgatggatttatcatgcgaaattctgtcatcattctcctttagactaatcagaagtggtctaaacaagacatatctatatcatgatagtatcagagcagctagagtgctacgagaaagtcaaacattacgtagaggtctgttgtgttcgtatgatcagcatccttgcaaacgaaataaccaaggacatactaccatgtaaaaattatgtgcatgctcatcattat

SEQ ID NO: 58723 - DNA, 326 bp, Glycine max
  Clone ID: PAT_MRT3847_24038C.1
ccacgcgtgcgtacggctgcgagaagacgacagaaggggacacgcacctctttctgattgccttcaaataacacactctcttcaatttctagggttgtgctattgcttagcctccgttccccctttctcacaaaaacaacgccttttctcttctccttcgtatctaatctttgcgcttggtttttggttgattgaaggcattcaccagtgtaatatgggtgctggattttaatcaagttatctaaccaggactggatgacctaatggagtctaaaggtgggaaaaagaaatctagtactagtagtagctaaatgattgtttaccaa

SEQ ID NO: 58724 - DNA, 2265 bp, Glycine max
  Clone ID: PAT_MRT3847_2403C.1
ttaggcttgttcctttgaccagaaacgagggtgattttgaggatgatgctgttggaggcatcaatggatctgaaaataaagataaatccccttcttttgccaaaaccttgacacagtctgatgccaacaatggtgggggcttttctgttcccagatattgtgctgagacaatttttcctcggttggactattccgcggaccctcccgttcagaacatccttgccaaggatgttcatggtgagacatggaaatttaggcacatttataggggcacgccgcgccggcacttgttaactaccgggtggagtagctttgtgaatcacaagaagcttgtggcgggggattcaattgtgtttttgagggcagaaaaggatgatctgcgtgttggaattcggcgggctaagagggggattggaattggtggaggacctgaggctcctgcagggtggaattcaggtggggggattcgtcctatgccttatggagggttttcagcttttttgagagaggaagatagccagctcttgagaaatgggttgagtccaaatgcaaaggggaaagtgaggcctgaagcagttattgaggctgcaactcttgctgccaatatgcagccatttgaggttgtttactatccccgggcaagtgccccagagttttgtgtgaaggccaatttagttagagccgcattgcaggttaggtggtgtcctggaatgaggttcaagatgccctttgaaacagaggactcctcgcggataagctggtttatgggaaccatctcttctgttaactttgctgatccaagatggcccaactctccttggagacttctccaggttacatgggatgaaccagagttacttcaaaatgtaaaaagggtgagcccgtggctggttgaaattgtatcaaacatgcctaccattcatctttcccattactcaacacaacaaaagaagccaagattccctcaacacccggatttttcttttgatggtcagatttcattgccagcatttcccagcaactttctaggtccaagcaatccgtttggttgtctagctgaaagtactcctgctggcatacagggagccaggcatgctaattatggtatatccctatcaaatctccacttcaataaactgcagtcaggcctatttcaagctggtttccctccacttgatcacactgcttccccagtattgagagtctcctccaacaatgcagcaacaatgcaaaaggtcggcacgggtgacaacgtctcttgcttactgtccatgtcaactgctactcaaccttcaaagaaagtggatgatgtgaaggcaccccaattggtgctttttggccaaacaattctcaccgaacagcaaatttctttgaacacctctgctaagacagatcctactcgaaataattcatttgatggaaatgctgataaaatgtgcaagttttcagatggttttggttatgctcttcacccacaaggctcttctcttgagaggttacagtggtacaaggatcaacaaaaagaaaccatggctagtttggagacaggtcactgtaaagtttttatggaatctgaagacattggtcggactatggatctcacaatgcttggatcttatgatgaattgtatagaaagctggcagacatgtttggcatagaaaaatctgtggtgctaagtcacatgctttaccgtgatacaactggggcagtcaagcacattggagatgaagcattcagcgaatttaccaaaactgcaaggaggttgaccattctaatggattccaacagcgatggtagaggaatctagaggaagaaataaacaattatcatttcaattgtacagctggttgatcaatttctctggagagtctcatctaatttatggatattaatgtttttctcgaagggcctatttggatttgttttttttcttttagtgatgatagctcgtggttttccttctctttttggatcataacatggtttacttgaggcttttgtttaataattctgatgtgaaaaaaggtgggggagagaagagaaagggtagtgatcatatatccctatgaatacgattggttcataggagtttcctgtatacaatggtttttaagtgtaaaaaaagctacctaggcttaatggttattgagacagtagttacctatttttttgttctgtgtttttaccactgtagttacctatttcattttcttgtgactttcgtatgcaaaaggaaagaaggggaaaggggggggggggtaggt

SEQ ID NO: 58725 - DNA, 194 bp, Glycine max
  Clone ID: PAT_MRT3847_24040C.1
agattcggctcgagctcgagccgctattctataagcaatagaatgggccctaccctaggatcgatacatcatggatgctatatttctttaccatgacaattttttgatttttctttttttggtacatgtttataatacagacgttttataaacatgtacctattcaatgatcacccacctttttgcatggaaaa

SEQ ID NO: 58726 - DNA, 315 bp, Glycine max
  Clone ID: PAT_MRT3847_24041C.1
cgcgaacagatgactaggaatgagggctctacctccacagagtgttatgtgtttttattaacaaaccaaacccaaaaaaaacttattaactcttaaattgggatggcataatataaaaacgtagccagaattgagtcctggatagcccggccacctgtgaacgattaatggatgaaattagggcctcgttcttgacgggggggttctaaacaaggggcttctgaagtgtttttcatgcgctgttctgaaggtggaaaaagacgagtctccgttgctgaaccaccccgccgaagtcggtttcacccccaaaggggc

SEQ ID NO: 58727 - DNA, 251 bp, Glycine max
  Clone ID: PAT_MRT3847_24042C.1
tgaaaaggaggtatgtaatgtgtgggtgtggtgtgagtgacttaagcccacatgagccaatgagcagcgtccaggtcatgattgggtgcgtgctgtgaacgtggcgcacgttagccctttcccccagcaaatcggtggtgccctccctccctccctggtcctagccactatgttacccactttccctcaagcctctctcccatggcctcctttaagcctcctcccgatgcccccactgccgtccccctcgc

SEQ ID NO: 58728 - DNA, 557 bp, Glycine max
  Clone ID: PAT_MRT3847_24043C.1
aaaatctttaaataagacgcacgtttgagtttaaaagttgtttccagttaagctttatttttgtgcatatcattcgttagttttataacgaaagtgccgtattgtcttgatgagagattcatttgataacttgtgtagttctttatcctcttagtgtgatttgatatttttatccttttttatttttttaatctctaatgtgttttctgataagcattaatgttttttttatatcaaacaatgatgttaattattcaatttaacgtaaaataatctcaaaataattgttattttaactttttaatttaatattgttttttattaatattcttaataagtggtttataggtttttaatctaacattaataataaagtaagcatcgtaaaattattatattttatttttttattaacttttttatgtttgtgtaaaaagttatgactacacttattatggaatgaagtatttttttaaaaaaaataaaaaatctatgaataagcaacaagctattttgaataatatttatcatttacattgcaaggtcataatcacgtc

SEQ ID NO: 58729 - DNA, 812 bp, Glycine max
  Clone ID: PAT_MRT3847_24044C.1
agatgggaggtcttggtagtttggatgaggaatgtgtgatatgcttctttggtgattttcttgtcaatgttttgaagatgggaggtcttggtagtttggatgaggagtttgtgatatactcactgaagaacagattggactgccagtgtgaaacaaccaagaacaaaagagattgacaggatgatggatcaactaccatgagagaattcagttaagagagggtgatgagctcattcattttaggtcataatccttggtcttggattgtagttgagtccctcggatcaatgttattgtcatgggtgccctttcgtggaatattaccaattccactttcaagttttcccagttatcccaccagaaaatcttctatgaggacggaatctgaaggcagcatggaattcctagttttttgtatggactacttggctgtgtttatgtcacaaagacttgtggaaaatgatttttcttggatttttctcactgtagtatactttttactgttctacattttgttggcttattgttttctaataatgttgaatgtttgcaacacagtttttttaaaaacctttccaaatgtgattttctaagcatcttgaaaaatcaaatgattttgagctagctgtttgagtttcaatagttccccgccaattttgctaaagcttggtttttgggcccgttttttccaattaaattgttttcatgcttttttattcattttgcagattccacataagtgcatcagtcttttattactggcctggcgtttcttctgagttctgaagtttaaggagctgatgcaattggcg

SEQ ID NO: 58730 - DNA, 420 bp, Glycine max
  Clone ID: PAT_MRT3847_24045C.1
ttcgatcttcgagcgccgccctttttttttttttttttcttttttttttttttttgttggctgtttctctcacctgaaaatgtcttgctgcggaggtaactggggttgcggcagcccctgcaatagcggcaaccgctgccgaggctgaaagatgtacccaaacttgagctacaccgagtcaaccaccaccgaaaccttggtcatgggagtggcaccagctaaggctcaattcgagagagctgaaatgggtgttcccgctgataacgatgggtgcaaatgaggagctaactgcaccttgaacccctgtacttgtaagtggggtgttggagagctaaagcttcaagccaagatggcccttatgaagtatgataaaaactatatataggttcaaaacttcaaaattatgtcgactgtattatg

SEQ ID NO: 58731 - DNA, 407 bp, Glycine max
  Clone ID: PAT_MRT3847_24046C.1
atctcttctttttttgggggagggaagggcccaaatataattaacctccattaattttcctttaataaaacgctccgggcatccataatgcccattgcaccctactaattttagcatcataaaatcacagccccacatttcaaaaacattcttgaataagtttgttttacacccataggctaaaaggccctgctaattaaccatccttttaacctatctaaaaaggataaacctgaattttctccacatttagtttttggaaattgctgccctttctacggacaaaaaacttgccccaattgtttggcctttttttggcggggtttgggccattgagaaacccccccaaaggcttaacttcagagaagggggcaggaaataaaaaaaaagggttggaaaacctttct

SEQ ID NO: 58732 - DNA, 258 bp, Glycine max
  Clone ID: PAT_MRT3847_24047C.1
gctttgtgctttggtcttaggatcaggggaaaaccgcatatagaaaagatactcactcgctacgacactgccaaggtccaaacagaggtttcttctactctcaatccatacactattctttcttctctccctaactgcaaaagataaatggagtggcctgcgtctacggacgaatacgaaaagctcataatacggatgagcactcccagggttgtcattgataattccgtttgctcctcagtaagctagtcaaggttg

SEQ ID NO: 58733 - DNA, 1370 bp, Glycine max
  Clone ID: PAT_MRT3847_24048C.1
acgggacctgcacagcctttccatactgagcttgtttacccacctttcaaaccctccaaccttagtttcaattctaaacttgttcaccctttattctcctcctcttccaaacatcaaccatggcttcacaataataaccttggtgacatccaccttgcctctttctttctttcactttgtcatgtgctattgacacctccaccatcaccaactacaccgacaacccacgcgtccgcccacgcgtccgagggaagttgtggaagttgttgggcgttctcaacggtggccacagtggaagcaataaacaagatagtgacagggaagtttgtgtccttatctgaacaagaacttgtggactgtgacagagcctacaatgaaggatgcaatggtggccttatggactatgcattcgaattcatcattcaaaatggaggcattgacacagacaaagattacccataccgtggctttgatggcatctgtgatccaactaagaaaaatgcaaaggtggtgaacattgatgggtacgaggatgttccaccgtatgatgagaatgccttgaagaaagctgtcgctcatcaacccgtaagcattgctattgaagcctctggcagagctttgcaactttatcaatcgggtgtatttactggtgaatgtgggacaagtttagaccatggtgtggttgttgttggatatggctctgaaaatggtgtggattactggctagtgaggaattcatggggcactggatggggtgaggatggctatttcaagatgcaacgcaatgtgagaacccccacgggcaagtgtggaattacaatggaggcctcctacccagtgaagaatggtttaaactctgctaattcagtttatgaaagcactgaggtgtatgttagcagtgcttgatataacaaccttcatcgttatttatgatctttggaattgggaagaggaacaagtgctcaagttgcaaatgtttctgttatctttgatgcttctattgaatatgtctgttgggctattcttgtacatatatttcttcaggttaaaaaactgaacctgattatcaatttgtactggttttcactcattgttattccatttgaatgttttatctgaaatccttaatgatatgtatgcgctagttatattaagtgtggaattacaatacaattcgctagttatatttctgatatggttgatgcttctattgaatatgtctgttgggctattcttgtacatatatttcttcaggctaaaaaactgaacctgattatcaatttgtactggttttcactcattgttattccattatcgagaccctcgaaattaaaattaaaaaaaaaaaaaaaaaaactcgagactagttc

SEQ ID NO: 58734 - DNA, 1373 bp, Glycine max
  Clone ID: PAT_MRT3847_24049C.1
atgtgttttatttcctactttccacacaaccattagttcttaatttgtttcctcttgcttccttctccttctaaattattattactagtacaacttatcatatatatatatatatatatatacctctggttatagcagcaaactaggctagcttagcttgcactttgaaaatatatatacacagaccaagtacaaccccaagctctagctagctagggacatgtctagccgaagatccagacaacattcagggtctacaaggatctccgatgaccaaatcatcgaacttgtttccaaattgcgccaacttgttcctgagattcgcaataggcgatctgacaaggtttcagcgtcgaaggtcctacaagagacctgcaactacatcagaagcttgcacagagaggtgagtgacttgagcgagcgactgtctcagttgttgaccacaattgatgctgatagtgctgaagctggaatcattaggagcctacttaatcaatgagagagtgttatgattttttatttattcaaagagagtgttaattaaattataattatgattattataagagtattgtacttcattctaggtgtgctgagagcctgggagagttcagtttttgaggctgtacctcccatatggcaggtagggcattttcataactagttgtttttctcttttttccaataaaaattcaagtgcttgtaccagctacatatatatgtatgtgcctctttttgtggatggccaaaatgtagcacttgttaaatttattaaggttcttactagttatatacttttaatatatatggctccagtcacgtagaggttggaagtcagagttgtaagagatgcatgtttgatgcagaaatatatatatttaatgtttgtttattctggatcaatctacatgtttggattgaaattaaaaatattacgtgcttattctgatgtaaattcaatcaataaaaatgaaatgaaaacaaattaagataaagatcctaatcttttgataaaatttaatttgtctcaatgtattttttcacccaaaaattaaacatgcacataattatgagttttgtcacctgtgtgtttatactcatgttactataaattatttatcgtaatgaaagaaaagatataattatgaggttatgtgtagattgaagtactcgtgctaaacaccactcaatgtaacggaaagtgtgtctgtgtggataaaattgttagttaatggaggttgtaagtgtaacatatgaacattttggagaccggttttaattacttgggattgtgtcggcaaagttgggctcaggtttctataataaggcctgaaagtatttgacgtgagtgagtggtttggcggacggcgtgg

SEQ ID NO: 58735 - DNA, 643 bp, Glycine max
  Clone ID: PAT_MRT3847_2404C.1
aataggtaactactgtctcaataaccattaagcctaggtagctttttttacacttaaaaaccattgtatacaggaaactcctatgaaccaatcgtattcatagggatatatgatcactaccctttctcttctctcccccaccttttttcacatcagaattattaaacaaaagcctcaagtaaaccatgttatgatccaaaaagagaaggaaaaccacgagctatcatcactaaaagaaaaaaaacaaatccaaataggcccttcgagaaaaacattaatatccataaattagatgagactctccagagaaattgatcaaccagctgtacaattgaaatgataattgtttatttcttcctctagattcctctaccatcgctgttggaatccattagaatggtcaacctccttgcagttttggtaaattcgctgcaatagcatcaaagacataatcaacatttgaacctctaagacgggttttgtatttgcaacacaagaggatatagtgacattgatttttacctgaatgcttcatctccaatgtgcttgactgccccagttgtatcacggtaaagcatgtgacttagcaccacaaatttttctatgccaaacatgtctgccagctttctatacaattcatcat

SEQ ID NO: 58736 - DNA, 479 bp, Glycine max
  Clone ID: PAT_MRT3847_24050C.1
ttgctctcttcaacccaattctcactcactctttctctctccctcttccattaatggcttctcttccctcgaggccttctttattatagctcttgcgtccctttcgccgttttccctgggaatcaatatcaaattcaccttgttttcaaattttactccataccctcttcaaaaaaatcatttttttcccaccctttgttttctgctcatcaaatttcatcactgaaaacacattccttctccctcagtattcttctgtgtgtgagtgtcgttcttggatggagtgattttgaaattctgaacaggaaaaaaagaaaagccaaaagagaatttcccgaagttttgtttttctcttttttgatcctcacatggcttttttctaatccctttatttatttatttatttatttcctccttttaccccttttgattctttctagtttctactccttcctttttgtttatattccctgagattt

SEQ ID NO: 58737 - DNA, 814 bp, Glycine max
  Clone ID: PAT_MRT3847_24051C.1
ggtccggattcccgggtcgacccacgcgtccgcccgaccccagtgccgcacaattttccttcactcgcagcggaggttagggtttctttctttttttcattttcctaatcttcacttcgcatgtcctgtttatcgcttttttttttttttgtgtccgacccaatccaccttcaatttctcgcttcgttttgtctttgacttgctttgacttgttgtttctcgcctcttagcatcttttttcggtttctttctcttcaataattgctcactccgttgcaattgcttcttcaggaatttttttttttaatgtttttagtatttcagcttttagttcgggtgcgacgtttgactgtctcggaatctgttattgattgaaaatttagatcctccgtgagtggtggattgaaccgttttggagatccaggcatcgtggcttttgttattttgttttgtttttgtacggaaatgcgtttcatttctgttaaaagatttaggtctgtatgcattaacttctcaacgcttgttagagaaaaaaataagaaaggagaatgaattaaacttttctcattatttaaaattagctttcaaatcagcttttacacaagttaaatgtgagaacttctgtaaaagttgtagtgtatgggtagatttgagccaatgggagaaggttaatttatttttggccttttgttttattctcttataaataaatacttattgagaactttgttcatataaactgtcaggcaagtggtgctacaggccacttggaatgagctagcagcaggggtttggggtagttcctctttgatta

SEQ ID NO: 58738 - DNA, 257 bp, Glycine max
  Clone ID: PAT_MRT3847_24052C.1
atcccaaataagttccttgttccttattcttttttctggaagaattttgagaggctggcatcaaggtggtgtaaattggactaaccttcctgacatttcgaagtgtcttgagcaggctggcaaccaatataaaacttgattcagatagcatcatgtgccatggtcatcataatgggaatatctgtattgttcttaatgcagtctaaaacaaaagtgttaacagggattgggctcagtttgttaatgtctggtttgtt

SEQ ID NO: 58739 - DNA, 471 bp, Glycine max
  Clone ID: PAT_MRT3847_24053C.1
atttcctacttcccaacccataaccattaattcttaattagtttcctcttgctttcttctccttctatattattactattactagtacaacttatcatacacatatacctctggttatagcagcaaactaggctatagcttgcactttgaagatatttatacacagaccaagtacaacaccaagctctagctagctagggacatgtctagccgaagatccagacaacattcagggtctacaaggatctccgatgaccaaatcatcgaacttgtttccaaattgcgccaacttgttcctgagattcgcaataggcgatctgataaggtttcagcgtcaaaggtcctacaagagacctgcaactacatcagaggcttgcacagagaggtgagtgacttgagcgagcgactgtctcagttgttgaccacaattgatgctgatagtgctgaggctggaatcattaggagcctact

SEQ ID NO: 58740 - DNA, 204 bp, Glycine max
  Clone ID: PAT_MRT3847_24054C.1
actcgggtcgagctattctctgctttgggaaagtcccatttgttaactgctgctgaaccatcttccagtaagagcaatccaccgtgggttcgggattttattggatgccgctttgatgactcaaaagcatcaactgtcatagatgttataaacccagcgacctcagtagttgtttcacaagttcctttgtgtactggtgaagag

SEQ ID NO: 58741 - DNA, 395 bp, Glycine max
  Clone ID: PAT_MRT3847_24055C.1
aaaaaaaaaaaaaaaaaaaaaaaataaaataaaaaaaaaaaaaaaaaaaaaaaaggggagaaaaaaaaaaaaaaaaaaaaaaaaaaaaaaaaaaaaaaaaaaaaaaaaaaaaaaaaaaaaaaaaaaaaaaaaaaaaaaaaggggggggcccttttaaaggatccaatttttcttccccgttcttgcaacgaaatatttttttttttgggccccctaaattaaattaattggccttgttttaaaaactttgttaactggaaaaacctttggtttccccaatttaaaacctttgaaaaaaatcccctttttgccagttggggtaataactaaaaggccccacccattctccttttcaaaaaattgcccacccttaatggcaaatggaaccccccctt

SEQ ID NO: 58742 - DNA, 482 bp, Glycine max
  Clone ID: PAT_MRT3847_24056C.1
acggctgcgagaagacgacagaagggcaccaatattaagtgaaatatgccatcccaagattttcgaaaattttacggaagccccggatgccctcaattccattttttaacaaaatggaggtggttgcttcttgagaatattcctaaatgcaccccataatgataagttcacccaccctttagaatgttatgaatgaagtttcctgagtgcacccccttgtttgataagttcaccccccgtttttatgtttttggttgttttctttccaaaacgtcctggaactttacggattccatggcaataggtattaaacattttgaagtggtcaaacgaaggtcacatgccggcaaacaatgatccccgaacgaaattaggatatgacagtagtgatagtgacttccttttaggtcagaaggaagtaacatgtctcctttgcacgaaccaatattcaaatgaggttgctaatctattgatgattcatg

SEQ ID NO: 58743 - DNA, 458 bp, Glycine max
  Clone ID: PAT_MRT3847_24057C.1
ggcaaaagcccaaatgcaatgcacatttaataacaggggggtttccgctttatcagaaacctttaccataaaccaaagaaacatccaccaaaaagagcaattctagacaattttgtaaaaaaaaaaaaagggttgtacagttgggcccactattgcaaatacattatgaactggcattgttttttttggaataaaaatgctaaaaaaaaaaaaaaaccttttagggtatatgtaactcccaaacgtggccccaaaatgtcagtttgagctccatgaatccatgattgaaaacctcgatcaacttgatttgacatgaacttcaataatatcatcggcttccatcccaagggtagcaggggtttcaaacgaacttattttatcaccatcaaaggacaattctatctgtttaaggttacacttgattttctctgcatatgttttgacaatcctttaaaact

SEQ ID NO: 58744 - DNA, 296 bp, Glycine max
  Clone ID: PAT_MRT3847_24058C.1
gtaaaaaagccctatggtacagggacttattatcatacgttggagttttccaagagaagagatttaaaaagacacaaaggcttgctggggattttagaaatatatgagagtcaaggagtttgagtaggactcgggtgttttgaggcaaaaccgttaaccaatacatgagcgttgcttgtcacttgaaaaacgaggacaaaacctgaccttttatgagcctaaacgtcactccctacggcggaaccagcaaagcccttgagacaagtgctgaacttcgcaatggcagatactgaccc

SEQ ID NO: 58745 - DNA, 636 bp, Glycine max
  Clone ID: PAT_MRT3847_24059C.1
cattaaatgactttttgttgtatttgcttataatcttcctttacacgttgataattcatgcatggatctgctgccatactgcctttacaacaggaatattacccgtaacatttatatctaagggggataaatatatcactattcactatactacatttaaaaataaaaaaaagattaacataatttttatcaaaaaataacagcttttggtaagggaagctacaaaatttacaaaaaaatgtagtaatggtatgaaagtgtgctaccaaggcatcagtatttgttcactcatctttaacttgaaagccaggcattaatcaaacccttcatgccttaaaatgttgttaaacttttctccaagctttgaccattcttctctgatatttgccttaattttctttgccaattcctgctcatcagtgtggcatttgttcttttaacccatttttttgagctttcaaaatttttgcttccccaaaaatttttttttttttttgactagccatgtttctagctgcttgggaagcaaaaatgttaaatttgacagcatttatttgttcttctagctccttctttttttgctccaaataggccaactcactgcacaactcattttccaagcacatgacttccttg

SEQ ID NO: 58746 - DNA, 2981 bp, Glycine max
  Clone ID: PAT_MRT3847_2405C.1
ggctcgagggaagcaatcacgagcttcattcccaaagaagagtacttggagggctacacaggttctacaactaattcatgcagatatttgttggtgttttcagggtttaaatacgctttaccagcagagtatggtatatggtttgccaacaatgaaaacaccaacaaaactgtgccaggacttcttggtagggaagcaatcacgagcttcattcccaaagaagagtacttggagggctacacaggttctacaactaattcatgcagatatttgtggaccaatcacacctatctccaacagcaaaaagaggtatctgctcacctttattgatgatttcagtagaaaaacttggatttatttcttgacagaaaaatcagaagctcttcctgtctttaagaaatttaaaattcttgttgagaaagaagctgactcattaatcagaagtttgcgcactgatcgtggggggagagtttacatcacatgatttcaccaatttttgctgtgacaatggtattcgtaggcaactgacagctgcatacacaccacaacagaacggaattgcagaacggaaaaatagaaccatcatgaacatggttcggagcatgctctcagagaagaaaatgcccaaaactttttgggctgaagctgccacctggtctgtgcatattttgaatcggagtcccacattagcagtgataaataaaacgccggaagaagcctggagtggagtcaagccttcagttaagtattttagagtttttggatgtatttctcatgttcatgtgcctgatgctaaaagaaccaagctagatgataaaagtttgtgttgtgttttgttgggggttagtgaagtatcaaaagcatacaaactttatgatccgatttcacaaaagatcataataagcagggatgttgtctttgacgaagataaaagttgggattgggataagcagtatgaagaaaccatcttatgtgatttagattggggtgataaggatgtggaagctgttgtagaagaagaacatgaggtacgacacaatactgataccccaaaagaggatattattatttcctctgattctatggccgaagtaaacacttctagtcccgttcaacgaaggtgtagaagaccacccctttggatggaagattatgaaactggagaaggactttctgaaggcagtacagaagctaatctggctatgtctgcaactggtgaaagtgatcctactcactttgatgcagctgttcaaattgcaaaatggaggaaagccatggacgaggagatggaagcaataaacaaaaatggcacatgggaattgatggaattacctgacggagcaaagaaagttggagtaaagtggatttataagacaaaattcaaagagaatggagaagtggacaagtacaaagctaggcttgtagtgaaggggtatgcacaagaatatggggtaggctatacagaagtatttgcactagtggcacgtatggagacaattcgtttggtggtagcacttgcagctcaaaagggatggccaatctatcagctggatgtaaagtcagcatttttacatggagagttggatgaaacagtgtatgtggaccaaccttgtggttatgaacaaaaaggggaagagcataaagtgtataagttgaagaaagccctttacggacttaagcaagcaccacgtgcttggtatagtcacatagaagcatattttctgaaggaaggatttgagaagtgactatgagcatactttgtttgtgaagagagaaaaggaagatatgatattaattgttagcttgtatgttgatgaccttatttttactggaaatgatgagttgatgtttgcaaaatttaaaagctccatgaagcatgaatttgacatgacagatcttggtaatatgagatattttctaggtcttgaagtgatgcaacgaatagatggcattttcttatgtcaaaagaaatatgcattagagatgttgcaaaggtttggaatggataaaagcaattcggtgcaaactccaattgttcctggtgttaaactcacaaaggacgacactggtgtaaaggtggataagacttactataaacaaattgtgggaagtcttatgtatctaacatctactcggcccgatatgatgtttgtggtgaacttaattagcaggtacatggagaatcctactgagctgcatttactagcagccaaaagggtgctgagatatttaaagggaacaactgagtttggaattttctacaaaaagggaggaaacaaagagcttcttgcttacactgacaacgattatgcaggggatttggatgacagaaaaagtacttcgggttatgttttcttattgtgttcagctgctgtttcgtggtcatcaaaaaaacaaccaattgtgagtctatcaactacagaggcagagtttataggtgcagcatcatgtgcttgtcaagccatatggttgaaaagggtgttgggaaaattgtgcaaaatgcaagaccaagctactgtaattcgttgtgatagtagttctgctattaagctttcgaagaatccagtgatgcatggtcgttgtaaacatattgacgtccgattacatttccttcgagatcttacaaaggccggaactatcaagatgatgcattgtgggacacaagaacaagtggctgatattatgaccaaaccactcaagcttgatactttcttaaagctacgcaggtcactaggaatgtgttcagagtctgatataaactaattgcatatagcattcagtttaagggaggatttgttagtgagcttatggttccatatttttaggagcagttatgtttttgaatatgtctagcacattattaggaaatagtgggtcatgtatgcgtgagcagttttatttttcagttttctttattctgatgtaaggctatatattagccaagtttgcttttcaataacagggaatgaattccttccttt

SEQ ID NO: 58747 - DNA, 294 bp, Glycine max
  Clone ID: PAT_MRT3847_24060C.1
gactacccaaaatcgttatgccttaaaaacaatggtacacattattataattttattcaactattccaaaagaatcaatcaacccgcaaataaatagatggaacctggggatgctggttgggatcccctaactggattaatttattaccattcaggacttatttcatttaccctttgaagccacggatccctttaacaatgagggatgccactggcttcttttccttggggattaccacttaacccatggaatcaaccccaattattgggttacatttaaaagaacccaaccgg

SEQ ID NO: 58748 - DNA, 229 bp, Glycine max
  Clone ID: PAT_MRT3847_24061C.1
ttcggctcgtgctcgagccgcgcaaaagtatatgaacgatacacctttggacaaagaaagcacgaaggcacagagagagaaacactgcgagagagagagtaccagacccccaccacccgaatttctcaaaacttgttaaacagtatcgaaaagttaaccaaattttttttattttgggggggtggaattccaggatcaagaggacgcaggacgaggagctccttctggg

SEQ ID NO: 58749 - DNA, 506 bp, Glycine max
  Clone ID: PAT_MRT3847_24062C.1
aaaaaaaagttccaattgaatagctattcacaatctcttttctcatttttcttgtgttcttagtagacaaaggaagtaaatttactgcacaaatgaaagttgcactattaaaattctagacaaccaaatttgaaccttactgtgaaaatacctaacgtaaattactttttcataaaaaaagaaaggctaaaagatgcttccatgtccaatgctaatatctttctattcttcttaatcgggtctccatcactgcttgctatgaaacactgtcagaagcagaagaacgtttggagcggttgattttctgcaagtgaacctgagtttccatgaagagtttcattctctgggtttccaaatccttagcaaactgcatcctctgtttctccaattccaccatttgcctctgtttcgctccctccactctctcataaatctccccaaacttctccaacgcctctgccatctctctgtacccaaattcccaatctcctcttggtcttttcttc

SEQ ID NO: 58750 - DNA, 292 bp, Glycine max
  Clone ID: PAT_MRT3847_24063C.1
ctcttggcagaaattttgccagattgatcaattttatttccaatttgaaacttgttcaaagctatactaaattcttgttcaaactgatatgaagattgttggcttcacttttttctttgcacagaaggacgagtggggaggggggttttaaaagaattcttccttaaaacccgattaggttgctttggaagttgtgatcgggcatagcatttcttcacacagcaaacctctcgcgttagcttatcgtgtaagccacgtactttaacaccttctttacctcttcaacgctccc

SEQ ID NO: 58751 - DNA, 347 bp, Glycine max
  Clone ID: PAT_MRT3847_24064C.1
gccaagcgtacgtagggatgccagaagacaaccgcaggggacgccaacgccaaaacaaacccactaagatgggcgtctttgtatgcttcctagagctgattgttgcgacccttaatgtcatacgtcacaggacttgctgacttactacaaagccgatgcaccaagcctccagaatacaaaggctaccacgttcagtgaacacagtgttcaaaccaccggattataatccaggagcaccggttttcagagacgacaccagcgggttacaagccaacatataagaaggcgccctacacgaaaccaccgtatggaaagatccctgcagcggaggacaacacccctgccta

SEQ ID NO: 58752 - DNA, 240 bp, Glycine max
  Clone ID: PAT_MRT3847_24065C.1
ctcaagagaaactttaagcagatgtctaatgttttgtgggtggctcctgaagacaaagcaagtttatgagtcacaacttcattatagttcgtgtaataatctggaaatgcaagaagcttatcttggcaatttcctaaaaggggtacgagaattggttttgcccaagccaaaagaaactcccccattgagaaagaaacccccctcccccttgaatggcccgcaaaaacttatgggcccgcc

SEQ ID NO: 58753 - DNA, 482 bp, Glycine max
  Clone ID: PAT_MRT3847_24066C.1
ctttattgaagtgatttagtcatttaatttatctaatagtttataagacacatttttagtctgtttgtaaattatatcccccatgtgaaatgtgctgtagcagtcccaaaatggcatactattttgtattagagctatgacttatgagaaatcatgcgattgaatatatgtatctagattctagccttaacatagttctttaaggagtttgtaatgtaaccatgaaattttaggttttctattcttgtatgaagccctgatactaggtatgacacggatatggggacatgacaaattttttaaaatttaggatacaatacggtttgggtatgttaacaaaaacttataaaatattttatacagatgcagaatattggtaaagaaagagacattgatcatatctcatttattcatgttaaatgaaaattaaaccagaggcatattgtgctgaaaccatgtgtttgaatgggatgtgagtttat

SEQ ID NO: 58754 - DNA, 311 bp, Glycine max
  Clone ID: PAT_MRT3847_24067C.1
cctcgtgccgatgtcgaaacggctgaagctgttgcaaaccaatacaactgtccctttttggaagcaagtgctaagacagctgagaatgttacagaatctatcgaattacttttattggaaattgcaaaggcaggtgttacctctgactctggagtaatgaaacgacctgcgaaaaagggttaattcttctgtagttttattttcattcattttatgtaccattttatgttagtttacaacataataagcagtttgtaaaaaatctccttcgattttataaagacaactttgtaaaacaaaaaaaaaaaaaa

SEQ ID NO: 58755 - DNA, 474 bp, Glycine max
  Clone ID: PAT_MRT3847_24068C.1
gaaactcacagaagaaacactgacagagaagagacagttgcagcaactcctttcaatatgtgcagctgaaaggacaacagaagagacggccatgaatgaaactagctccagatctcaccaaattcttagattgacagttgaaagtaatcctcgtgattatgcagacaccgcaagatccggagctctatttgccagtgtgaattttgttgatctagcaggaagtgagcgtgcttctcaagcaatgtcagcaggcacaagattgagagaaggtagccacataaatcgcagtttactgagccttggaactgtaattcggaaactaagcaagggaagaaatgaacacataccttacagggactcaaagcttactcgcattctgcagaactctttaggtggtaatgccagaacagcgatcatttgtaccattagtcctgcaaggggccagagtgagcaatcaagaaatactctgctttt

SEQ ID NO: 58756 - DNA, 812 bp, Glycine max
  Clone ID: PAT_MRT3847_24069C.1
tcgcgatctagaactagtcgctataattctatatatagaatttcgatatattatttctagtgggttgcccgggactcgaacccggaactagtcggatgaagtagataatttattctttaatcaaattcaagaataaaacaataaaaaatccctccccaaaccgtgcttgcatttttcattgcacacggctttccctatgcatacatctaaaccggaattacttccctaggaaaagactctaagaaagtcaaatagtcaattaatgaaccccgaatcttgactcttacgtcctgagcatttcaaaatcctatagatatagaatactaaaaaatatagaatactaaaaaaatgatttttttgtttatcttcatttaataagaatttcgatttacctatttacaccgatttacaaagtatcataacctattttatattagaaatgattgacgaaatcgtttctgacaagaatatccaaataccaaatccgacctatatataacctctgcaaagtaaaagaagttcttggaaaaatcaaagaaaaagtctcttcttcttctgtaaagaattcttccaataatttttctgaccctaatcttttcaaaaaagtgcgcgcagtacttttgtgcttacgagccaaagtttttatacaagaaagccgaagtatatatcttatttgatacaaactcttttttttgcggatccattgtaataatgagaaaaatttcggcatatccgcaaaaaccggtcaataatatcaaaatcagataaattggcccaaaccggcttactaatgggatggccaaatacattac

SEQ ID NO: 58757 - DNA, 405 bp, Glycine max
  Clone ID: PAT_MRT3847_2406C.1
tattaaaaaacacgctttccgctttattacaagggaaagaataacctagaccatatacacacatgggtcgggcttgattacttgcaggatgcgcaccatatccagacattacaactaccacatgagaggactatcgcacaccctcaataaacgatatttcttcgatgcgaggacattcaaatgttgctgtaccgctcattcatgcattgattcattcctagatcgtggatataactgacttgacttagagagaactccacgaaacttattcgttcttatgcatgagtgtacactattatgaaacatgcaccccactgatttgctgctgaccctagcgcttgatctcacgcgcctgcgtcatgatattgtgaggcagctctgaatatttgaaccgccccaggaggg

SEQ ID NO: 58758 - DNA, 732 bp, Glycine max
  unsure (1)..(732): unsure at all n locations
  Clone ID: PAT_MRT3847_24070C.1
ccagcgtccgggaacttgtgtgagaggcttgtttcccttaggctccacggtaattctttatctgggttagtttctgagcctgcattgcctaactcttcttgcaagaatctgcaggtgcttgatttgggtggcaacaagttctctgggagtttccctgagttcatcacaaagtttggtggcctaaagcagcttgacttggggaataacatgtttatgggtgcaattcctcaaggcctagctgggcttagtcttgaaaaattgaatctttcacacaataactttagtggggttttgcctttgtttggaggagaatccaagtttggtgtggatgcttttgaggggaatagccctagcctgtgtggaccacctctgggaagctgtgctaggacctctacactgagttctggtgctgttgctggcattgttattagtctgatgacaggagctgtggttttggcttctttgctgatagggtatatgcagaacaagaagaagaaggggagtggggagagtgaggatgagttgaatgatgaagaggaagatgatgaagagaatgggtggtaatgctattggtggagctggtgaggggaagctcatgttatttgctggaggtgagaatttgcattggatgatgtgntgaatgcaactgngcaggttttggagaagacttgttatgggacagcttataaagctaagcttgctgatggaggcaccattgctttgaggctgttg

SEQ ID NO: 58759 - DNA, 305 bp, Glycine max
  Clone ID: PAT_MRT3847_24071C.1
tttcaaaaaacaaccagaaggtaccattgcgaaatgacgacagaaaagaccctcgtttgcggcaatcttcattatttagatatcctcaaaccctgaccaggttaaagacttggaagctgttgttctacaaaatccaagtttacattcgcatgaattcgacctcgtatcaatgtctataaagcaacataaattgaattcaatatccatgattatactacgaggaaactgcaaaaaccttgggatgcatatacttaatatgattacatcacatgcggttttcaccagctgccgttttcccaaaaatg

SEQ ID NO: 58760 - DNA, 174 bp, Glycine max
  Clone ID: PAT_MRT3847_24072C.1
ggtcgacccactcctccggatggaggggtcatgagagagttcatcaacatccagccatgtccatactactcttggccatttacgacaaacaagtggcagtcactatagaaacagttggtcacctgctggcacgtaaaacgggggtggtgaagagagcacttatcactgacaaca

SEQ ID NO: 58761 - DNA, 2045 bp, Glycine max
  Clone ID: PAT_MRT3847_24073C.1
acgcgtacgtgttcgtacggctgcgagaagacgacagaagggggttacggtaaatagcgtttcgttaacttactcagtcctctatgacggtgtgcgtgcgcaaaccctaacctagttcttctatatcggcacctctatcccctgaaccctgttccatcttccaaccatggcgaaccaagacttcggaagagcgctcgcagttatcaacccgcaggagctagggtacgacccgaactttcgtccccgactcggtaaaatcttttgtggttccacctgtaccgtcacaatccgtgaagaagaacgtgtacgagatccaccagatgtacgagagctccttccagaccctctcggagcgtctcttcaaagataccccgtggccctccgtggacgccgtcgcgcactacgtcgacaacgaccacgtcttctgcctcctctaccgcgagatgtggttccgccacctctacgcccgtctcactccgacgctccggcagcgcatcgactcgtgggacaactactgcagcctcttccaggtcgtcctccacggcgtcgtcaacatgcagctccccaaccagtggctatgggacatggtcgatgagttcgtctaccagttccagagcttctgccagtacagtgccaagatgaagaacaagaccgaacaggaaattgcactcctgcgacagttcgaccaggcgtggaatgttttcggtgttctcaacttcctccaggcgctggtggagaagagtgctattattcagattctggagcaggagaaggaggggcttgagcagtttaccgcgactgatgggtatgattacaacggggggagtaatgtgctaaaggtgttagggtattttagtatggtggggttgcttagggttcattgtttgttgggggattatcatactgggctcaagtgcttctcgagccgattcggctcgaggcaaggggtttataccagtgttattgggagtcacatcaccaccatttatcactatggtttcgccaatctcatgctccgcagatatgtggaagcaattcgtgaatttaacaaaattctcttgtacatctttaagacaaagcagtatcatcagaaatcaccccaatatgagcagatactgaagaaaaatgaacaaatgtatgccttactggcaattagcctttcactctgcccccaaagcaggcttgttgatgaaactgtgaactctcagttacgtgagaagtatggtgaaaagatggttagaatgcagaggtatgatgatgaggcatttgctatctatgatgagctcttctcatatgcatgccccaagttcattaccccttcagcacctagtttcgaggagcctctagtaaattacaatcaggatgcctatagacttcagttgaaactgttcctttatgaagcaaagcaacaacagttgctatcaggtgtccgcaccttcttgaaagtgtattcaacaatctccctcacaaaacttgcaagttacatggaagtggatgaacccaccttaaggactatcttgatgacatacaagcacaagacacatgctgttgatagtgatgggaaaattacatccaatgccgatttagatttctatattgatgatgacacaattcatgttatggagtctaagcctgccaaacgttatggggattactttttgcgtcagattgtcaagcttgaaggggtgatcaatgagatggacggtataaagctggagtgagttactgcctgtaagatgctaaaaggatttgatagtattccgttgtaggtttccctttctacttgctctccaggccgagtttttcccgaggagtctgtgttttgaggtggaggatgtagttagctttctacatgtaattctaaaattttctttccccgacttgattttatttaacgaattaacttacccatttattgtttcaaaagagggcttacagaagttaataattcttcatgtgtgttgctcgatttgattcatgatttattatatagctttaacacttttgtccgtctcccagcttaaaaaaaaaaaaaaaaaaaaatt

SEQ ID NO: 58762 - DNA, 488 bp, Glycine max
  unsure (1)..(488): unsure at all n locations
  Clone ID: PAT_MRT3847_24074C.1
gtagacttgaagaattactctacatatccagaattatcttctgctctagaaaagatgttcagctgttttactataagtaaatgtggatctcatggaattctgggcagggagatgctgaatgaaaccaagctgaaggaccttcttcatggatcagaatatgttcttacatatgaggacaaagatggcgattggatgcttgtgggtgatgttccctgggagatgtttattgaaacatgcaagaggctgaggatcatgaagagttctgatgccattggtctagctcccagggctgttgaaaaaagtaagagcaggacctaggcagtacctgtgttcctctctatccatctaactgtctgcgggactaaaagcttctgggctatcagggacgaacaaatcagaacatggttgtcttggaagcaagaaatgaaggcattttggactggatagaatctcatactatgctgccttaatccttttttntttattat

SEQ ID NO: 58763 - DNA, 141 bp, Glycine max
  unsure (1)..(141): unsure at all n locations
  Clone ID: PAT_MRT3847_24075C.1
catcaaatattaaccaccanctccatctttctgggggtatgtgtccagagggcagggcctctcactactcattctaaaccaaccaaccaatcatcgcgtcctccttaatacaattaaccaaaccgggcttaaccattactt

SEQ ID NO: 58764 - DNA, 451 bp, Glycine max
  Clone ID: PAT_MRT3847_24076C.1
cccaaaaaacttatatttctttccattatccggcccattggggaagtatttttttctgtagaaaggcaaggtatcaagctggtttttggggcgtaccaaccaaagacacatcccaatggccacaaccaaacacatgataaaaaaaaaaattgacaaccaaagggtttctctgttcatgaaagtttccagtctgcttctcttggaaggaaaagctgcactgttaaacattgcttttgtttcctgccctgcataaactacaacaccaattatccaatctgggttcttcaattggcaaccacccaaaacaatgtttgactggctaaggaaaaactttagcccattgaactccatgttggccgggaactcataaatattccggttcggttgctcacatctaattacaccaaaaacatcacaggcttctgatgcaaccgctgaagctgtttcctgc

SEQ ID NO: 58765 - DNA, 366 bp, Glycine max
  Clone ID: PAT_MRT3847_24077C.1
atttgggttttgtggttgatgaggttgagattgaaatggagggtgatgatggcgatgggaattcggtggcgtcagggttcactaatgccgttgaggaggaagaagaggaggaggaggaggatgccggggaagaggcgctgaggtacctcgaatgggagattctcttggcggttaacaattcggagaggaatgtgaatggtgtgttggagcacgagggcaatgctgttggtggtgctgatttcttaacaattcaggatggttatgtgtatgccgcagagtatgatgtttcgttcgggcagtttcttgagaatgagagtgccttgaaaggaagccctccggctgctaagagtgttgtggagagtctcc

SEQ ID NO: 58766 - DNA, 1082 bp, Glycine max
  Clone ID: PAT_MRT3847_24078C.1
attgatggttctgcaaataataataacagtgcaccagctaccaaggctcatgttgtgggatgggctgctataagatcattccggaaaaattcattggcaactacttcaaagaacaatgaagtagttgatggaaaaaagggggttggtgcactgttcgtcaaggtcagtatggatggtgccccctatttaaggaaagtagacttgaagaattactctacatatccagaattatcttctgctctagaaaagatgttcagctgttttactataagtaagaaagaattagtttaatgtggaaaaattttacctttcaattatttatgcatggacagtctgtctggatccagttactgcttgttttggtatgatttcaggtaaatgtggatctcatggaattctgggcagggagatgctgaatgaaaccaagctgaaggaccttcttcatggatcagaatatgttcttacatatgaggacaaagatggcgattggatgcttgtgggtgatgttccctgggagatgtttattgaaacatgcaagaggctgaggatcatgaagagttctgatgccattggtctagctcccagggctgttgaaaaaagtaagagcaggacctaggcagtacctgtgttcctctctatccatctaactgtctgcgggactaaaagcttctgggctatcagggacgaacaaatcagaacatggttgtcttggaagcaagaaatgaaggcattttggactggatagaatctcatactatgctgccttaatcctttttttttattatgtctgttttatgttgtcgtggagtttatgttttagtaagcttcttttcaagatgatgttaaaacttaacaaaactccaagaacttgactatgggagtaccgatattttatgtatgcgagattgagaagagttaacgttgtggttgaaggatctgtgatgtgttaattttgcagcgtaccttcaacggggtgtcctatgtttgtgtgaaaaaaaaaacaagttgtatgtcagtatgtcccttgccataactgtatcaaagtcattaaccaaaaagagcatactgttgtcaggacacgg

SEQ ID NO: 58767 - DNA, 551 bp, Glycine max
  Clone ID: PAT_MRT3847_24079C.1
ttggggggggggggggggggggggggggggcggtaaagaaataggtgacgggagacacctataaaaaaggtttagggtatagcacaggatatgggaccccctggatacgcaccctgcaccacgagagcatcataagtagccgggaaagggacctaatatgcttggctaggactgagaaaatcgcaggtgtgtggccgtctaaggcttgacttgtatttggtttgggttagtcgcggctagggggcccaagccctaagtagcatatgacctgctttccttgagggaacaaagatgaaatattatgccaaagggtaaccggaaaactagcggcgtaggtgagctgaggataccctgagaccgtgccggggcgccacaggcaagtgtggggcccgtccgctggtggttatggtgggggctctaatggtagcacagaccaaccaattgtatacttgcagctgcctagaacaggactaataggttcaatcaagccaagcgtagtggttcgcgaaaaacgaagtctggtgttacgttggttgctgtgcttacaatca

SEQ ID NO: 58768 - DNA, 408 bp, Glycine max
  Clone ID: PAT_MRT3847_2407C.1
ggtgaacggggctaacccctgctgtaccatgctgctctatactgccataaaatggctcataatataaagctaccacacttattctcacaaagacccgccgtccatttcttgtctgtcagtactatgctgcttactttgaccggtcctgcttgttgaaccaagaatgagtggatcataaaggacagctagtgggactctactaagacttagtgcctgacttaagactcacaaacggaatcatgcaactgggaacttaggcatttactatggccatgatgagactagactccacccactactttgacatctctaacataaaactaatcattgatgttgacataattacgttcctggctaataagtacaagaacaaaacggcctgtacagaggggatactctacacttaag

SEQ ID NO: 58769 - DNA, 150 bp, Glycine max
  Clone ID: PAT_MRT3847_24080C.1
gttcgttcgcgacacagcttccaccttctgcgttcctcgtttgccgccgacgaccaccacaacgcaccttcaccttcacctgacctaaccgctcacaacgaaccaacaaacctgagacattgccgcacgaaatccactgattttaacctc

SEQ ID NO: 58770 - DNA, 468 bp, Glycine max
  Clone ID: PAT_MRT3847_24081C.1
aaaaaaaataaaaaaaaaaaaaaaaaaaaaaaaaaaaaaaaaaaaaaaaaaaaaaaaaaaaaaaaaaaaaaaaaaaaaaaaaaaaaaaaaaaaaaataaaaaaaaaataaaaaactaataaaataaaatatattttaataaaattaaaaagtggataaaaaacaagaaggtataatttttaatatggcttaaaaaaaataggtctttcgatttataagatcttatctaacatgcccgttcttgaaagacaattaatattttattgaccctaataaattaaatttaaaagcccttaaaaacaacattttccctaaagattgccgtttttaaacgcaattagaccgttatagttaaaatagcattatccccagttgaatttttatattttccggcccctttatgatctcttttacaaatattttcacattatgatttaataattaggactcactttttatctttaaatta

SEQ ID NO: 58771 - DNA, 147 bp, Glycine max
  Clone ID: PAT_MRT3847_24082C.1
ggctcgagcgcaaacataccattccattctcacaggcgcgcacatccgaatacggcgatgagcagagacgggtaccattgccaaataaccctaaacgacgttcgagatgagctggtagggaaggttcagaacgccacaacatggctc

SEQ ID NO: 58772 - DNA, 258 bp, Glycine max
  Clone ID: PAT_MRT3847_24083C.1
aggcgtgagaacacctccgaaaggcggcttcattttctatcacccactcgacccccaaccttcacaaaggcactattaacgacccttctcttatttattcccacacctataccttaccgatcttccttcattttacacattcaccaacaaccccatagtgctctaactactcttgctttgcccaacattcaaactatcctcaaccaaactagagctatttcaaataccaaagacctgcaggataattcaattctgaaa

SEQ ID NO: 58773 - DNA, 1598 bp, Glycine max
  Clone ID: PAT_MRT3847_24084C.1
ctcgggccggagtggagctgttacggctgcgtggggatttgcgtcgccgcaagcattgcagagtgacagcagcagcagcagcagcttggtctgaggttagagatggttagccaaaggcagcgacttgctcgaaagcgatacaaagcggaacaccctgagctctttccgaagcccgagcccacaccccccaaagaccccgagaagaagaaaaagaagaagaaaaacagcgctttcaagcgcaaaaggcccgagcccaagcccggctccagaaaaagacaccctctcagagtccccggcatgaagcccggcgagagctgtttcatctgcaaggccatggaccacatcgccaagctctgccccgaaaaagcagaatgggaaaaaaacaagatatgtttgcggtgtcgacggcgcggtcatagagctaagaactgcccctgaggtactagatggcgccaaggatgccatgtattgctataactgtggggaaaatggtcactctctcacacaatgtcctcaccctctacaagaaggagggacaaagtttgctgagtgctttgtctgtaatcaacgtggacacttgagtaaaaactgtcctcaaaatactcacggcatttatccaaagggtggttgctgtaaaatttgtggtggtgtgacacatttggcaaaggattgccctgacaaagggaagagtggatctgttgctgctaacaggcctgctgatggatggatgagaattgaagagaggcctatgggtcaggttaccaaatttgtcagcggggatgatattgaggatgacttcatgacagatgacatacatagtgcagacaagaaaaagccagcaaagtcaacagaagaccatgtaaaaccaaagaagaaggagggtcctaaagttgtgaacttttaactaaggatagttacctcataatgtattgtgtggatatttgtttccactcaccatttctttcctgttctatccacaaggctatggtagacccctgaatcccttccagaatgaatgtaatcgctcctgcaaagtcttgggttgcctaaatgtttggagaattgacatgaaaactaggactatcgcctctcattgctgatcataaattctacagtgatttgtaaaaggtaactgaaaatgtaactattttttggtacaagtactagtttattatttatctttactttgttgatcgactttcggtgcaatattgttactaatgagaggcgatagtcctagttttcatgtcaggttaccaaatttgtcagcggggatgatattgaggatgacttcatgacagatgacatacatagtggagacaagaaaaagccagcaaagtcaacagaggaccatgtaaaaccaaagaagaaggagggtcctaaagttgtgaacttttaactaaggatagttacctcataatgtattgtgtggatattggtttccactcaccattttctttcctgttctatccacaaggctatggtagacccctgattcccttccagaatgaatgtcatcgctcctgcagagacttgggttggcgtggggggggggggggggggcgtgaaagctggggactgtgggtctggttgggggg

SEQ ID NO: 58774 - DNA, 1767 bp, Glycine max
  Clone ID: PAT_MRT3847_24085C.1
cccactcgtccggacttataattaaaagaaaattattattaataaattactgtattttataagtgtcaattattatttaataaaatttgtaaaatactatattgaaggtattttttttaccgttgtaggatattgtcaacaatttctgtctttagatataaataataaaaagagaaaaagaataaataaaagtggaggaggagggtgtaggtttggttgatttgattgttgtgcatccatcgttaagctagtggcgatcggatccagctacagcatagagatcaaggaaggaaggaaggaagatgttgggtgttataaggcacatccatgttaagctagtggcgatcggatccagctacagcctacaacctacagagtattcgccccgccttctccgcaatcagacacttctcttctgcagctaaagagattactgtcagggatgctctcaactccgcactcgatgaggaaatgtcagctgatcctaaagtcttcttgatgggtgaagaggttggggaatatcagggtgcatacaagatatccaaggggctgctcgacaagtatggccccgagagggttctcgatactccaatcactgaggctgggtttgctgggattggagttggcgctgcttactatggtctaaggcctgttgtggagtttatgacttttaacttctccatgcaggcaatagatcatattattaactctgccgcaaaatcaaactacatgtctgctgggcaaatatctgtacctattgtctttagaggacccaatggtgctgctgctggggttggtgctcagcattctcaatgttatgcatctttgtatggttcatgccctgggttgaaagtcttgtcaccatattcatctgaagatgcccgtggtttgcttaaagctgctattagggaccctgatcctgttgttttccttgaaaatgaattgttatatggtgagtcattccctgtttcggccgaagttcttgattccagtttttgccttcccataggaaaagcaaagattgagagggaaggaaaagatgtgactattacagcctattcaaaaatggttggctatgctctcaaggctgctgagacactggcaaaggaaggaatcagtgctgaggtcattaatttgcgttcaatccggccgcttgatcgatccacaatcaatgcttctgtcaggaaaaccaacaggctggtgacagttgaagaagggtttcctcagcatggcgttggcgctgaaatctgcacatctgtcattgaagaaagttttggttatcttgatgcacccgttgagagaattgctggggctgatgttcccatgccttatgcagcaaatctggaaagaatggctgtcccacaggttgaagatattgttcgtgctgcaaagagagcatgctacagatctgtgcctttggctgcatctgcttgaatgttctggaaaattttcatgtcctggttagttctttgcagaaacaaaattttccctattttccgccacaaaacagcaggaagaaattgcaaccaaagaatgctgattttaactcatttattatgttaggctttggtttaaaagattctgttgtatgcataatactgtcctaattttcaggactcacagatgctatacattttttccccttctcagcatatctgggaggaagttaatgttaaataacttgtacaacaatgacacaaaggcagcaggaagttttctgcgtttttggtttctgcttggcaataactaaaaatcaactttttgaat

SEQ ID NO: 58775 - DNA, 2178 bp, Glycine max
  Clone ID: PAT_MRT3847_24086C.1
ctaagacttataattaaaagaaaattattattaataaattactgtattttataagtggcaattattatttaataggggttgtaaaatactatattgaaggtattttttttaccgttgtaggatattgtcaataatttctgtctttagatataaataataaaaagagaaaaagaataaataaaagtggaggaggagggtgtaggtttggttgatttgattgttgtgcatccatcgttaagctagtggcgatcggatccagctacagcatagactgtttcatacctttccctgtttttgttttttcagcgtccgcaaccctagtaactctctaaaagatcaaggaaggaaggaagcaagatgttgggtgttataaggcacaagagtattcgccatgccttctccgcaataagacacttgtcttctgcagctaaagagattactgtcagggaggctctgaactccgcactcgatgaggaaatgtcagctgatcctaaagtgttcttgatgggtgaagaggttggggaatatcagggtgcatacaagatatccaaggggctgctcgaaaagtttggccccgagagggttcttgatactccaatcactgaggctgggtttgctgggattggagttggtgctgcttactatggtctaaggcctgttgtggagtttatgacttttaacttctccatgcaggcaatagatcatattattaactctgccgcaaaatcaaactacatgtctgctgggcaaatatcggtacctattgtctttagaggacccaatggtgctgctgctggggttggtgctcagcattctcaatgttatgcatcttggtatggctcatgccctgggttgaaagtcttgtcaccatattcatctgaagatgctcgtggtttgcttaaagctgctataagggaccctgatcctgttgttttccttgaaaatgaattgttatatggtgagtcattccctgtttcggccgaagttcttgattccagtttttgccttcccataggaaaagcaaagattgagagggaagggaaagatgtgactattacagcctattcaaaaatggttggctatgctctcaaggctgctgagacactggcaaaggaaggaatcagtgctgaggtcattaatttgcgttcaatccgaccgcttgatcggtccacaatcaatacttctgtcaggaaaaccaacaggctggtgacagttgaagaagggtttcctcagcatggcgttggcgctgaaatctgcacatctgtcattgaggagagttttggttatctagatgcaccggttgagagaattgctggggctgatgttcccatgccttatgcagcaaatctggaaagaatggctgtcccacaggttgaagatattgttcgtgctgcaaagagaacatgctacagatccgtgcctttggctgcatccgcttgaatgttctggaaatttttcatgccatggtcagttctttgtagaagcaaaaaatttccttaatttccaccataaaacagcaggaagaaattgtaaccaaagaatgttagtcttaactcatttgttatgttaggctttggtttaaaagattctgtcatatgcataatactgtcttaattttcaggactcacagatgctatacatttttttcccatctcatcatatctgggaggaagttaatgttaaataacttagacaacagtgacacaaggcagcaggaagttttcaatgtttttggtttctgcttggcaataactaaaagtcaactttttgaatacattatttccagcggacgatcactttactgcaagatctaacttgctgttagttcatattcgtttactgttttagttacattgacaaactagagatatctgatttgatgtgaggtccgtattcttgaggttgtgggcttggttttgtgttaataatgtgttgtgtcctccaaaccttacatttttgccttttacacttaacagatttaggttttcaatccattgccaaagtttgagtctagttttgatccttgttagaagttttttttcaccgtgtgttcacaaatcacttggagagtgcttttaaaacgctagttgtcatagtcttatagactacttcatttaataatgtggtgtattatcggagtaagataatttagctaaatttaaattaaaaacctatttt

SEQ ID NO: 58776 - DNA, 1791 bp, Glycine max
  Clone ID: PAT_MRT3847_24087C.1
agctcggaattcggctcgagggagggtgtaggtttccccctgggttatctagctgttacggtttgattggtgtgcatccatgttatgccagtgccgatcggatccagctacagcctacaacctacagatcaaggaaggaagatgttgggtgttataaggcacgggtgatttgattggtgtgcatccatgttaagctagtggcgatcggatccagctacagcatacaacctacaggatcaaggaaggaagatgttgggtgttataaggcacaagagtattcgccctgccttctccgcaatcagacacttgtcttctgcagctaaagagattactgtcagggatgctctcaactccgcactcgatgaggaaatgtcagctgatcctaaagtcttcttgatgggtgaagaggttggggaatatcagggtgcatacaagatatccaaggggctgctcgacaagtatggccccgagagggttctcgatactccaatcactgaggctgggtttactgggattggagttggcgctgcttactatggtctaaggcctgttgtggagttcatgacttttaacttctccatgcaggcaatagatcatattattaactctgccgcaaaatcaaactacatgtctgctgggcaaatatctgtacctattgtctttagaggacccaatggtgctgctgctggggttggtgctcagcattctcaatgttatgcatctttgtatggttcatgccctgggttgaaagtcttgtcaccatattcatctgaagatgcccgtggtttgcttaaagctgctattagggaccctgatcctgttgttttccttgaaaatgaattgttatatggtgagtcattccctgtttcggccgaagttcttgattccagtttttgccttcccataggaaaagcaaagattgagagggaaggaaaagatgtgactattacagcctattcaaaaatggttggctatgctctcaaggctgctgagacactggcaaaggaaggaatcagtgctgaggtcattaatttgcgttcaatccggccgcttgatcgatccacaatcaatgcttctgtcaggaaaaccaacaggctggtgacagttgaagaagggtttcctcagcatggcgttggcgctgaaatctgcacatctgtcattgaagaaagttttggttatcttgatgcacccgttgagagaattgctggggctgatgttcccatgccttatgcagcaaatctggaaagaatggctgtcccacaggttgaagatattgttcgtgctgcaaagagagcatgctacagatctgtgcctttggctgcatctgcttgaatgttctggaaaattttcatgtcctggttagttctttgcagaaacaaaattttccctattttccgccacaaaacagcaggaagaaattgcaaccaaagaatgctgattttaactcatttattatgttaggctttggtttaaaagattctgttgtatgcataatactgtcctaattttcaggactcacagatgctatacattttttccccttctcagcatatctgggaggaagttaatgttaaataacttgtacaacaatgacacaaaggcagcaggaagttttctgcgtttttggtttctgcttggcaataactaaaaatcaactttttgaatacattatttccagcggacgatcactttactgctaaagaggaggggggggggggggggggggggtgggtggcggccgctttagaaggcatccaagtcttacggtacggcgtggcatgcgacagttca

SEQ ID NO: 58777 - DNA, 1600 bp, Glycine max
  Clone ID: PAT_MRT3847_24088C.1
cccacgcgtccgggagggtgtaggtttggttgatttgattgttgtgcatccatcgttaagctagtggcgatcggatccagctacagcatagagatcaaggaaggaaggaaggaagatgttgggtgttataaggcacaaggtactgtctcaagtctctagtctgattcctattccatatgatttattttattttatttgcagagtattcgccctgccttctccgcaatcagacacttgtcttctgcagctaaagagattactgtcagggaggctctgaactccgcactcgatgaggaaatgtcagctgatcctaaagtgttcttgatgggtgaagaggttggggaatatcagggtgcatacaaggttggttgcttccttagttgctttacttgtcttgccaccctctcctcttaagaacttcattaacttaactttcattttagatatccaaggggctgctcgacaagtatggccccgagagggttctcgatactccaatcactgaggctgggtttactgggattggagttggcgctgcttactatggtctaaggcctgttgtggagttcatgacttttaacttctccatgcaggcaatagatcatattattaactctgccgcaaaatcaaactacatgtctgctgggcaaatatctgtgcctattgtctttagaggacccaatggtgccgctgctggagttggtgctcagcattctcaatgttatgcatcttggtatggttcatgccctgggttgaaagtcttgtcaccatattcatctgaagatgctcgtggtttgcttaaagctgctataagggaccctgatcctgttgttttccttgaaaatgaattgttatatggtgagtcattccctgtttcggccgaagttcttgattccagtttttgccttcccataggaaaagcaaagattgagagggaaggaaaagatgtgactattacagcctattcgaaaatggttggctttgctctcaaggctgctgagacactggcaaaggaaggaatcagtgctgaggtcattaatttgcgttcaatccggccacttgatcgatccacaatcaatacttctgtcaggaaaaccaacaggctggtgacagttgaagaagggtttcctcagcatggcgttggcgctgaaatctgcacatctgtcattgaggagagttttggttatcttgatgcaccggttgagagaattgccggggctgatgttcccatgccatatgcagcaaatctggaaagaatggctgtcccacaggttgaagatattgttcgtgctgcaaagagagcatgctacagatctgtgcctttggccgcatctgcttgaatgctctggaaatttttcttgtcctggttagttctttgcagaaacaaattttccctaatttccgccataaaacagcaggaagaaattgcaaccaaagaatgttgattttaactcatttgttatgttaggctttggtttaaaagattctgttgtatgcataatactgtcctaattttcaggactcagatgctatacattttttccccttctcagcatatctgggaggaagttaatgtttaataataaataacttgcacaac

SEQ ID NO: 58778 - DNA, 1300 bp, Glycine max
  Clone ID: PAT_MRT3847_24089C.1
ctcgagcggtgaaggggctctagattcgaagatactcaaaacaaagtctgaactctttctctctctcagtctcaactctgaaattctgaactaggatttggatgcttccattccctctctctctttctgttcccaaaattctcattccacattccaaattcgccccttcatggggaaaggagccggctgccttcatagcaagaagaagcccccgccggtcgccgacgatgctcccgctcccaccgttgccgccgcagcccccaccccgccgccgatctcgcctccagacaacgcccacgcgcgcgaacccgacgcgccagcgcgtgaagcagcgtcgtcgtcgtcgtctctcccgggcggcgcgaaattgaaggtcttcatcgtgttctattcgatgtacggacacgtggaggggctggcgaagaggttgaagaaaggcgtggacggagtggagggtgtggaaggggttctgtatagggttccggagacattgccgattgaggtgctgaatcagatgagggcgccgcccaaggacgacgccataccagagattacggcggcggagttgacggccgccgatggggtactgtttgggtttccgacgaggtacgggtcgatggcggcgcaaatgaaggctttctttgactccacggggcacttgtggaaggagcagaagcttgcagggaaacccgctgggttctttgttagcaccggaactcaaggaggaggccaagaaactactgcttggacggcaatcactcagttggtgcatcatggaatgctttttgttcctgttggatatacatttggacccggaatgttcaagctggatgacattagaggtggtactccatatggtgcaggagtgtttgccggtgacggcacaagagagccaagtgaaacagagatggctcttgcagagcatcagggcaagtatatggctattgtagtcaagaagctcgcccagtcatgaatggtgttttcttcatttcattctattcttgttgatcatctgtatttttttaccgttcttttttgtcaaaattggttctggcattttaccattgcattgtgatgaggaatggaagctctgttacactattttaattgattctgttgggtttgggggttctgcattgtttccggaaggtttagatgttgataaattttcgtctaataataattgtgaatttttgtaatcttcgtgtgatcgttttttctatgtttgcctttacacgtgattatcaatgtgtaatatgactggataatacaattgtttaaactcgtgattgtgccccac

SEQ ID NO: 58779 - DNA, 415 bp, Glycine max
  Clone ID: PAT_MRT3847_2408C.1
cccaagtgaaaacaattgggctgggcatttacaatcaaggtaaaaaggtacaccacagggtaagatatttgaaatcctggggaaaaatggtggggcgacaaataaatggacccaattgttatgtgaatccactggctgggaaaacaaattgtttgggggaccaaaaccttggggcccccctttttttggttcgaaaaaacgagctggtaaaactgtacccggaaccccttgccaaggaggccccaaacgtttttgccccctgcgaagggcccttaggaggggcgaccttcctgtcccactgaaaggctggggttaatcccaactggggggaacccttggcccccaacggggccaaaagggtttccaggggaagaattttgggaaccacgggaaactggttttcaaaggggggtgg

SEQ ID NO: 58780 - DNA, 655 bp, Glycine max
  Clone ID: PAT_MRT3847_24090C.1
cgtaagttcggaattcggctctgttctgaactctttctctctctctcagtctcaccactgaaattctgaacttggatgcttccattccctctctctttccgttcccaaaattattattccatattcccgatttgcccttgatggggaaaggaggcggctgcgttcccagcaagaagaagcccccgccggtcgccgacgatgctcccgctcccacgccgccgccgatctcgcctccggataacgcccacgcccgcaaacccgacgctccagcgcaagtagcgcgtgaagcagcgtcgtcgtcgtcgtcgcttccgggcggtgcgagattgaaggtcttcgtcgtgttctattcgatgtacggacacgtggaggggctggcaaaaaggttgaagaaaggcgtggacggtgtggagggtgtggaaggggttctgtatagggttccggagacattgccgattgaggtgctgaatcagatgagggcgccgcccaaggacgacgccataccggagattacggcggcggagttaacggccgccgatggggtcttgttcgggtttccgacgaggtacgggtcgatggcggcgcaaatgaaggctttctttgactccacggggcatttgtggaaagagcagaagcttgcggggaaacccgctgg

SEQ ID NO: 58781 - DNA, 482 bp, Glycine max
  Clone ID: PAT_MRT3847_24091C.1
gatggaggacataagaggtggtactccatatggtgcaggagtgtttgccggtgatggcacaagagagccaagtgaaacagagatggctcttgcagagcatcagggcaagtatatgcctgttgtagtcaagaaactcgcccagtcatgaatggtgttttcttcatttcattctattcttgtttgattatctctgtattttttggccgttctttttgtcaaattggttctagcattttaccattgcattgtgatgactggtgaggaacggcagttctgttacactatcgattctgttgggttggggattcccatgttgggttctgctttgtttttggaaggtgtagatgttcgtaaattttcgtcatataataattgtgaatttgtgtatcttcgtgtgatcgtttcttctatgtttgcctttacacatgattatcaatgtgtaatatgacttggataatacaattgtttaaactcgtgattgt

SEQ ID NO: 58782 - DNA, 867 bp, Glycine max
  Clone ID: PAT_MRT3847_24092C.1
gctcggaactcggctcgagcccagctttctgctcctttggttaaatcgccacagcaacaactgacagagaggatttttttacaaaccattcagtttctcaaggatgatatagaggatgcacatactcaagtttcaataattcaggatgtatataaatgtttctttgaagatattgtgagtgagtttagatgcagcactgaagaattacatatggagaatagtttcatgcaagaaatatatgaagtaatattcaaagaagcttcccacagtgctcaagcttctagtgggttgggaattgaggaagctgaaatggagtcaactattttgcaagggcaattagatattaatcatattatatttaaagaaacattggtgaatgcaggtgaagcattaaaattcgaaagtgctgagaaagagacactaaaatatgaaatgcttatgttgaattcagtagtggaggaaaaggaaaagttaatccaaggagcagcagatgctttggttctagagaaacaaaaaacggagtctgccgcggaacagcttaacagtttaagagctgagatagttcagcaacataaattaattgcagagaacagtaaagaattgaatgtcaccaagggtaacctggtggcagctttgaaggaaattgaacaatacaaggagcaagtgcaagagctacatcaaaatcttgaacaaagaatgaacaagcttaaagaaactgatgaagaaaaaaaagtgctttgtactcttacacaaaagcaacaagaaacactaaaactgattgaggaaatagaaagggaaagcaggaagcaaatggaatcaaccattaatctcatctataaattgttggcaatggttactgattttgaa

SEQ ID NO: 58783 - DNA, 348 bp, Glycine max
  Clone ID: PAT_MRT3847_24093C.1
taaaatcaatcaaaaggggctccgggaacagatcctcgataactattatgtgattttcatgcttaccttacccttactgtaaatgtcaaacgtgatccgtagcgctatcacacatgtccttactagtacttgcactcaattgacatccctacttatgcctagtttcaaacttcattcgacgacataatgctttaattggagatagcgcacattgattagtccgtgacactcacatgagcgcccttaacccatgtgctaccatgcctacagtgtaaattcaccttctttgacagcaatgtatgcaccttagcgccgccaacaccttcacaatggccgcctccaacttat

SEQ ID NO: 58784 - DNA, 370 bp, Glycine max
  Clone ID: PAT_MRT3847_24094C.1
attcgaaacagggaaagcaacctgatctcgctcgttgtcaatggccttacgctgaatgtcgtatattgcgatcaggcctacactatgttcgttgtgcgaatgcacactgactgtaaggggctcgctaacgccttgaacaccgcaagttgcacccatcgttatcaccgcatacaacaatagcttgctttgaaaccacctctgagtagagcaccctatcaccagaggcatacatccaatgatcacaacatagcatcacactgttaatcaactcaccaacacgctctactcgctaccatcgaactctaagatactaacgctgactcatgagctttcattatagatcgcaaccgactctataatatgatatact

SEQ ID NO: 58785 - DNA, 277 bp, Glycine max
  Clone ID: PAT_MRT3847_24095C.1
tttttcacgtccgaattctctaaatgagctcatactctgcatctctaagaaagaggggacgttgctagcttacacgacgacagcttatgcatattagatctcagaacccttatacctctatgataccacctatggatgagaccacataggccatatgggacggaggatcatgaattgaacatcagcgcacaccgagtactttccaactaccagctggcgaccctctatatcattactaagtgaggctctaaatcatacagaccaggtaaagcttcat

SEQ ID NO: 58786 - DNA, 173 bp, Glycine max
  Clone ID: PAT_MRT3847_24096C.1
gggaaaaagaaaaaatctcctttggtgagagtcaaaccattaatcaacatataaaagcccgcgggccttccggttttaccgtcgctttttaaggaatggtttatacgggttgggaggtttttatctgctgcgggtgattaaccctgtctgtgggatgctgggccttgttgaac

SEQ ID NO: 58787 - DNA, 424 bp, Glycine max
  Clone ID: PAT_MRT3847_24097C.1
gaaaagaaactctaggtattataaatatgtaatcaataatcatgagacacaactccatacacggcaaggaagcaacatccattctcaatttgaatatccgctattttaaattggaaatttatttggacaaagaaaatggaaatggggtcgggattaaaaaacaaatattatgaaggatattgaaagactacaacttatgtctgcaatgtaagaaggcggtcccacttgcctttcacagttcattagagattttgagcttacagccattcctcggctccacatttttgagactgttagccaattcttgggagggccatgaaacatgcaccagtcgtaaggcagtcattgaccaaagttcttctggaagctctgacaattcaacacattcatgaatgaccagatgtcgaagtcgaggcattgcacc

SEQ ID NO: 58788 - DNA, 937 bp, Glycine max
  Clone ID: PAT_MRT3847_24098C.1
agtttttccggcgaagtccgcggtttctatttggtatctgcatttctccaccaggtatttttcaattccattgtgagtgcccacacaagtggctctgttgtatatggcctagtcatacttctcagttctcactctcactccgtagaaagaaccctagaatcagaattctccgtctatgttgcagaagcagctacctccccccattgaggcctcttccgatgaagagcaacgaccttcctccaagcaacacacagaagaaggagtttcctcttcagaagaagcttcttcccaagaagaagacgacgacgaccaacctcccacccttcctctcgcttccgcaaacccccacccgaaaccgtcgtcctccgactccgacaccgacttcgagcccaccaaagtaaaacccaagcccacggaccaggcccagaagccccagccctcacccgcgccgcccaaatggggatccaagcgccctgcccagaacaacgcccctgccactgacccgaaacgcgcgaagaagaaattgaccaattcttcttccgccgctgccgcccacgagacggaggagaagtccggtggcggccaagcgaagttgtctcagagactcttcagcaaggaagacgaactcgccattcttaagggcatggctgagttcatttcgaagacgggccaagacccttacaagtacgccgatgccttccaaaatttcgttaagaattcgctctgcgtggaggcttcgagcaaccagatcaaggagaagatccgacggctgaagaagaagtttgaaactaaagcacagagagcgaagaaatgggaggaccctgagttctccaaatttcacgaccggactgtgtttgaattatcaaagaaggtttggggagaaggagccaatgggctggtggagaagccaaaacctataatggaaaaagaaaactgc

SEQ ID NO: 58789 - DNA, 565 bp, Glycine max
  unsure (1)..(565): unsure at all n locations
  Clone ID: PAT_MRT3847_24099C.1
gggcacagcttctttcatgggttttttattcccattcttggctggcaagggccggaaactgggcccattaaccccaaaaatgggaaaggtgaacattaagaaaaacgttaccaaaccaggtttcttaagaaacccaatggaccggccaaaaccagtcaagtacttgggcccattcttttgcgaacccccggcctaccttaccggtgaattcccaagccaataccggtgggaccctggtgggcttttcgcaaaaccagaaacctttgcccagaaccgtgaacttcaagtgattcacttcaagtgggccctgcttcgaaccttgggctgcctctttccggagatgctgtgccgcaaccgggtgaagtttggaaaaaccgtgttggttaaaggccggttccanaacttcaacgaaggtgggctctaattcttgggcaacccaaacctgattcacgcccagagcattctctgcatatgtgcccacaaggtattctaatgggtgccgttgaaaggtacccatatctggatggccctcggtgaaaggaatgaaccctcttaccagggggga

SEQ ID NO: 58790 - DNA, 207 bp, Glycine max
  Clone ID: PAT_MRT3847_2409C.1
cgctaacggggtaaataatgaatgcgaatatcgatgaccgtgccctattgatgataagttggagaagctggtctggctagtcatttcgtgcccattactggtgggatggtcttgactacatcaggtctgcggatctgcaaggttgcggattgagattctgtaaactcaccacataggggatgctatgatggttaatgggtggatgct

SEQ ID NO: 58791 - DNA, 477 bp, Glycine max
  Clone ID: PAT_MRT3847_240C.1
gaaaagggaaaggcaacctttttaagactaccttttttttcattagtggcaccttcactatttttcctatctgtgaacagatcaaaacgagagggggggacgctacatattgtgactcccccgcttttttaacgggggacatccaatttttttggaagacggaactatatcctcattggcgccgtccctcatgctatcaataaggaacaacttatcatcccaaaagaacatggggtgctgattatacaaacaaattttcagttatgcacccaatacgatgagcagcacaacagctgaattttatcaaaaccaaacagaggctagtgtcacaacagtacaaaattcaccttgtacatcaacaaggaaatcgactccatcagatcaccagctacaataaaatctcctcttgtttgcacataaagtgcaaagatgcgcccataaaaaccacattaaaactgcttttcatgggccccatca

SEQ ID NO: 58792 - DNA, 185 bp, Glycine max
  Clone ID: PAT_MRT3847_24100C.1
gtctagggccctgtagggtgagtcaaaatctatcatgaacccttggtaattgtgaagctccccccatgattgtggaaaattcatggtgcacactggtttggaggtacccaccataattttaaaagatatccaaccgtaattttaaaagatatccacactgtgcttttgttctcaaaaaaataaaa

SEQ ID NO: 58793 - DNA, 557 bp, Glycine max
  Clone ID: PAT_MRT3847_24101C.1
ggggtccccggtcgacccacgcgtccgctttcggagtgctgcctgcttcttcaatgtcagctttgaagcagccaacaatcagagttgtagccatcatagcagagggtgttcctgaatcagatacaaaacaacttattagttatgcacgtgccaacaacaaggtaatcattggaccagcaacagttggaggaatccaagctggtgctttcaagattggtgatactgctggaaccattgacaacattattcagtgcatgctttacaggcctggatctgttgactttgtttctaaatcgggtggcatgtcaaatgagatgtacaacaccattgccagagtgacagatggtatctatgaaggaattgcaattggaggggatgttttccctgtctcaactctgtcagaccacatgctgcgtgtcaacaacatacctcaggtcaaaatgatggatgttcttggggagcttggaggaaaagatgagtattctcttgttgaagccctgaaacaaggaaaggttcagaaacctgttgttgcatgggttagtgggacatgcgctcgt

SEQ ID NO: 58794 - DNA, 230 bp, Glycine max
  Clone ID: PAT_MRT3847_24102C.1
gactttctattggccttaaaccaaacgcagcatcgctattctcttcattccagggcttagcccatgcagcaaaacgtggattaacctaatttcaaactcgctatcgtccgctatggtgtgacaggtcagacatcgcttgtcaacaggcatctcaccggagaactcgacatcaaatatgagccaatcatcggtgtggaggttcacccattggcttttttcacaaactgtgg

SEQ ID NO: 58795 - DNA, 601 bp, Glycine max
  Clone ID: PAT_MRT3847_24103C.1
ggctttcttttcctttccctcggattcttcttctttttttcactctctggttttcatgcctcatctcactaattgtgccctttagctgctttttttcacttggagttggtgctttgagataataatgctgaggaagaggaacaggtcagtgcagaaggatcaacacctcatgtgtgaagtcaattcggagcactattctcaatctcatcatgctttggggcgaaacaacattaagggccactcaattttcaatgtcccttgtctttttgtgggtctaggtccaaaaggcttgttggattctgattcagttaggagccccacttctccactcgatgatgctagagttctttcaaatctaggcaagaaccctgttaggaagccaagatcttcacaccatgaaaggagctgggattgttgcaaagtaggtctaggcattgtggagtctttggaagactgttctagttctaggttttctgggaaaattctccagtcaccagagagcaagagagttagtctcagtccccaaatgatgatgatcaaagccccaaattgccaaatccacagggattcttctcttgagggatctaagtctttgcccaaa

SEQ ID NO: 58796 - DNA, 278 bp, Glycine max
  unsure (1)..(278): unsure at all n locations
  Clone ID: PAT_MRT3847_24104C.1
gaggccgttaatggtggtgttaggcatgactctattaattttcttttcaaataggcaagctacacccccgtgcggttatctcctaaatacagagacaggatgtcatnaactccacttatccaccccacacattctccaatccaatcaaataaacccatattacatgtttctaccaacttgtatcatcttccgctatacttgaaaatattattaccactatcactcatgctctcaaactttccaacttatacaatgtcaacttcacactcaccaccttc

SEQ ID NO: 58797 - DNA, 823 bp, Glycine max
  Clone ID: PAT_MRT3847_24105C.1
cgagtatttcagaagctcgctgcttcgctgattttgaggcatgcaagaagagagaggagtcgtactgcacaagtttcacacttcctctcatgtttttactgcatttgggactcttcactcttctcgacatcttcatctctgtcaagtttccatagcacagagagaaaactgggtgttttgagataataatgctgaggaagaggaacaggtcagtgcagaaggatcaacaccacatgtgtgaagccaattcggagcactattctcaatctcatcatgctttggtggggcgcaacaacatcaagggacactcaattttcaatgtcccttgtctgtttgtgggtcttggtccaaaagggttgttggattctgattcagttaggagccccacttctccacttgatgctagagttctttcaaatctaggcaatcctgttaggaagccaagatcttcacctcatgaaaagaggtgggattgttgcaaagtaggtctaggcattgtggagtctttggaagactgttctaggttttctgggaaaattctccagtcaccagagagcaagagagttagtctcagaccccaaatgatgatcaaagccccaaattgccaaatccatagggattcttttgagggatctaagtctttgcccaaagatttttgaggcgcctccttattatgccccccaaaattttcattggctctgttgtttttgaatgtgaatctgagtccactgttctttttgcgattgcagaaaggagccccacttcttgagccgtttgggaaaatcacgtcttgttcattggactcatgcagtccactgaaagc

SEQ ID NO: 58798 - DNA, 3020 bp, Glycine max
  Clone ID: PAT_MRT3847_24106C.1
ggctcgggcgattcagatcttagggtttcttcttcttttctttctgtggagccccattgaccatagccgccagccagagagagaagagaagccttcgatcgtaggttttcttacccccctttctcccaaatcggacctttccgcttctcgattcgcttccgcagctgggcgatctggaaaacccagaaaagaaccaaccgaacgttttatatttttcggataatcaatcaattgaagatgtctcgttgcttccctttcccccctcctgggtatagggcacgtggcgaggccttgatcaaatcgattaaggtttgttgagccgtttcgattttgcgttcgtgctcaactctctctgcatgttgtttctctgcataaaactgccaccccccctttttgcgattgggttgtataatagtgccaaacgctgccgttttagatgtgttttgatcgaaccctagaacccagatttggccatgttgtgagcaaagatctgttgccccgcagtctttcacttaaacttttataatattatttagggttttcttttgggtaattagtaaacagaaattgttttgtgagacctagaaaaagggtttcggtttttataaggattttataatgcatgcggttcttacaaatcactaacaattgtttttaatatttggtgggtgtttttcacctatgttgcctaaaaaacctgaaatgtttttttttaaaccaataatctctgatacgtaaatggtgaattcaaatattggatcggttttttgtagttaggatcacgttaggttatataatctgaggtataaagatgcgaaatcatatgaaactcgttcattttgattagtgggtgattgggtaatcttcgattttctcactcattggtagaaatgactcaggttattttactattttgtggcatgtgattgctactcgcttgcttctgtcttataaatttaagagatattaaatgaaatatgaataattattgttcttacaattgttgaaaagattgttcttgactaccaaaagattcgtaaagagatatgaattagttcttgttcttgaattgcatggtgaagcaagtgtctcgtgcctgccctgcccccccgcctcggtggacggctccccgcgccgccttgtgcaaatcgttttcgctcgcagaggagatggagaaagcagagaaggaccggagggagaagaaggagaagaaaagggaaaagaaagagaggaaaagagagaagaaggagaagaaagagagaaggaaagcggagaaagaaaggaaacttaaagaaggagcaagtgcctcccctggcactgatgatggcaaaaagtttaagctcatcaacgaactaaaggaaaccaaagcagatggaaaattgcaaaagggtgaagacagtgagaatgaacaacatgagaggagtgggattacagaggaacttgacctacctgtcacttctgtggagccttgctgcctttctgactgtactcaaagcagtaagagaaaaaggagctccccagaatcaactcatgatcatggatctgctattaaaattcgacttccgttgaggaagcatagagaacctgaagaattgaaatccaaatcaaaatttcaagcggggtgttcttctggaagtgtgggggcaactgcaaattccttcactaaaactacacttggaagtgatcgtcagtcacaatgtctcaggattacagagctgaatcgggtacttggaaactctgattcaagacatggcaaagcaatgcagaattcagttcatggagatgttgtggtcactaagaataccattggaagtaatcgtcagtcacaatgtcacaggactacagaacccaaacatgttattggaaactccggcaaagtgatgcagaattcagttcatggagatgctgcggtcattaagaataccattggaagtgatcgtcagtcacaatgtctcaggactacagagcccaaacgggttcttggaaactctggcaaagtgatgcagaattcagttcatggagatgctgcggtcattaagaattccattggaagtgattgtcagtcagcatgtctcagttcatggaggtgctatggtgttcttgggtcccctgggaagtgaatgatggcagttcatggagatgctgtggtcactaaaaagaaccttggaagtgatcaatacctcagggttacagaaccgaaacgggttcttggaaattctgattctagaaatggcaaagcaaagcagaatccagttcatggagatgccgttgtcactaaaaatacctttggaagtgatcatcagttgaaaagtctcgagattacagagcccaaacggattcttggaaactctgattctaaacattgcaaagcgttgcagaatttggttcctggaagtcaaaaagttgaatctttgtacgaatctttgttacagattccaccactaacgtatgatggattggactcggtatatgatgattggttatttagttcggaaccgaaagagtcaaggcccgtctcgaagaaacagaagtgtgattctgatgtctttcagctttcaaattctatgtggcctcgtgcacaatacttgcctgaggtcgaagtatatgcgttgccatacgcagttccgttttgattcttttggattattttttgacaataggtggtagtttgatgaaagtagggagctgttctgtgttctaattgagaaccggtggatgattgtttttttgaaagagaaaaacaattacatggcatatgggcaaagattgcgttaatatgttcaaacatgatcgatgtaattttgtcatccatacttggcgttagtagtatttgtagaatgcacagacataaatattatagtagtaaaacagttttttagcaaataaatcccctcactatagaatcgttcaggccgtacacaagatatagagaaaggatttggtggaagttattgattccatgggacttgcacttgttcacttgaatctgcacaatttcgtattgttgttaaagtgataat

SEQ ID NO: 58799 - DNA, 879 bp, Glycine max
  Clone ID: PAT_MRT3847_24107C.1
cgcccgagaagacgaccgacgggggaggcatgcaagaagagagaggaatcgtactacacaagtttcatactgcccctcatttttttactgcatttgggactcttcactcttctccacaccttcatctttgtcaagtttccatagcatagagacaaaaccgggtgggtttaattggctttcttttcctttccctcggattcttcttttttttcactctctggttttcatgcctcatctcactaattgtgccctttagctgctttttttcacttggagttggtacactcattcactcatctttcaatggcataaaaaaagttttttttttttttttttaattcacttttgcatttggagtttatggggtggaatgaaatgatggctttggcttccattattattggtttcttcatttgcatgttttttttttctcttctgtgtttctagagaatcttgcaattacagtgtgagatgaatttaaagttttgatttttattttctggtgtttggctaattgtgtagtagcattatttgtgatttgaaaaattggttgtttgtgtgtttgtgttgttcaggtgctttgagataataatgctgaggaagaggaacaggtcagtgcagaaggatcaacacctcatgtgtgaagtcaattcggagcactattctcaatctcatcatgctttggggcgaaacaacattaagggccactcaattttcaatgtcccttgtctttttgtgggtctaggtccaaaaggcttgttggattctgattcagttaggagccccacttctccactcgatgatgctagagttctttcaaatctaagcaagaaccctgttaggaagccaagatcttcacaccatgaaaggatctgggat

SEQ ID NO: 58800 - DNA, 814 bp, Glycine max
  Clone ID: PAT_MRT3847_24108C.1
aaacttttataatattattaagggttttctttggggtaattagtaaaccgaaattgttttgtgagacctagaaaaagggtttcggtttttataaggattttataatgcatgcagttcttccaaatcactaacaattgtttttaataattggtgggtgtttttcacctatgttgcctaaaaaacctgaaatgtttttttttaaaccaataatctctgttacgtaaatggtgaattcaaatattggatcggttttttgtagttaggatcacgttaggttatataatctgaggtataaagatgcgaaatcatatgaaactcgttcattttgattagtgggtgattgggtaatcttcgattttctcactcattggtagaaatgactcaggttattttactattttgtggcatgtgattgctactctcttgtatatatgaaataaaatgtaaatagttattgttcttgcaattgttgaaacgattgttcttgactaccaaaagatttgtaaattgtaaagagatatgaaatagctctagttcttgaattgcatggtgaagcaaagattgaaatgcttgcatagcatgtttatttctttggacttcttccctatcatctatttgaaaatgttattctggtgctttaaagctccgagaggagatggagaaagcagagaaggaccggagggagaagaaggagaagaaaagggaaaagaaagagaggaaaagagagaagaaggagaagaaagagagaaggaaagcggagaaagaaaggaaacttaaagaaggagcaagtgccttccctggcactgatgatggc

SEQ ID NO: 58801 - DNA, 1821 bp, Glycine max
  Clone ID: PAT_MRT3847_24109C.1
cgagaagacgacagaagggggaccacagactcgtttttcttccacctcttggtcataggccaaaatggtgtcaccacatctaattctatacataactcttcccatgcttttgttattcttcttccaatatcgcagagcgttcaagaactcaacccttccacctggtcctagaggccttcccataatagggaatcttcatcagctaaatagttcttctctttatctgcaactatggcaactctcaaagaaatacggtcctctattttctcttcaattaggtttaagaccagccatagttgtttcctcccataaattggccagagaggcattgaaagacaacgaccttgagtttagtggacgacctaaattacttggccagcagaaattgtcctacaatgggttagagatgatattttccccatatggtgagttttggagagaaattagaaaaatttgtgttgtccatgtccttagctcaagacgtgtctcaagattttcctcaataagaaactttgaggtcaagcaaatgattaaaagaatatccttgcacgcctcatcttcaaaagttacaaatttgaatgaagtgctaatgtctcttactagcactattatatgtagaattgcctttgggagaagctatgaagatgaagaaaccgaaaggagtaagttccatggtatgctaaatgagtgtcaagccatgtggggaaccttgtttatctcagattatattcctttcttgggttggattgataaactgaggggactgcatgcacgtcttgaacggaatttcaaggagttggatgagttctaccaagaagttattgatgaacacatgaatcctaatagaaagaccacaaagaatgaggatataacagatgtgttgcttcaactgaagaagcagcgtttgtattccatagatctcacaaatgatcacatcaaagcggtgctcatggacatgcttgtggcagcaacggataacacttgcagccacaacaaggtgtggctatgactgctctactaaagaatccaagagtaatgaagaaagttcaagaagaaattaggactttgggaggtaaaaaagattttctagatgaagatgatattcagaaatttccctatttcaaggctgtgataaaagagacactgagactgtatctaccagcaccgttgctagcgcaaagagaaacaaatgaagcatgtattatagatggttatgaaattccagcaaaaacaatagtctatgtgaatgcttgggctatccatagagaccctaaggcttggaaagacccagatgagtttttacccgagaggttcttagataatactatagattttcgaggtcaagattttgagttaattccatttggtgctggtcgtagaatatgccctggcatgcctatggcaattgcttcattggatcttattcttgctaatcttttaaattcatttgattgggaattgccagcaggaatgacaaaagaagacattgacactgaaatgttgccaggacttactcagcataagaagaaccctcttcatgttttggccaagtctagaatccaaaattatgattaattaaaaatgtactgattctgtttgtaccctgcccataagaatataagataggtaaataagggtaggtcgatgttatttcttagtgcactctacttttacccttttccggtatactttttcccttttttttggccaaatgtcacatgtaagagtctgttaaaagtgtattctatactctatataattttgggtacgtaatcgataatcttcgtctatatatataataaagggcatctcgtggtcttt

SEQ ID NO: 58802 - DNA, 2146 bp, Glycine max
  Clone ID: PAT_MRT3847_2410C.1
aaactattgaaagcatcacttgggtcaatagatttcatcacctctttatgtcaatctgaagatgagtcagaaaagatcaaggaagctgttaccagatttcgcccttgttctgaatatcttcatgctgccctttcagttaatcagaaggtaattggcatacaagagggttcccgtgcatgacgtgagtttattaatgttatttctggtttgcaccggcgagtctgtgccagtagattgtgaagtattccaaggcagtgccacaattaccatcgagcacttgacaggggaagtcaaacctttggaagccaaagttggagatagaattcctggtggttcaaggaacttagatgggaggataattgtggaggtaatgaaaacttggaaggaatcaactctcagcagaattgttcagttaactgaagaagcacagtcaaataaacctaaacttgaaaggtggctggatgaatttggtgaacgttatatcgattatgttgaggtgttatcaattgctatttgctgttattagtccatttttatttaagtactgattcgacagtacataggcttagcattgacgtctttacagatgccttcccttccagcagttaggggatttctgccattgtggttaacggttcttggcatatgctatagcaacctgcttgtctgtctcaattgccgtacgtgctctgaatgaaccatcttggtcctggaagcatgatatattccatttgattagcgagattaaatctagactcctgtctctcaagacaaatatcacgggctctaacagtatcataacgacgaaattgtaacgtagtgttgtagtgcattcattccatattgcattccgaattgtgaaaaagaatctcttgctgttgctgcagctatggaaaagggtactactcaccctattggaagggctgtggttgaccatagtgaaggcaaagacctcccatctatttctgttgaaagtttcgaatactttcctggtagaggccttactgctactgttaacagcattgagtcaggaactggaggtgctaaactattgaaagcatcacttggatctatagatttcatcacctctttttgtcaatctgaagtcgagtcagaaaagatcaaggaagctgttaatacatcttcttatggaagtgaatatgttcatgctgccctttcagttaatcagaaggtaacattgattcatctagaggataggcctcgtcctggggtttctaatgttattcaagaattgcaagatgaagcaaagtttcgtgtgatgatgttaactggtgatcatgagtctagtgcaaggagagttgcaagtgctgtgggcatcaatgagtttcattgcaacctgaagcctgaagacaagctgagtcatgtaaaggatatctcaagagatatggggggaggcttaattatggttggtgaaggcatcaatgatgccccagcactagctgctgcaactgttgggatagttcttgctcaccgtgctagtgcaactgccatagctgttgcagatgtattgttgcttagagaaagcatttctgcagtgccattttgtattgccaagtctcgtcaaacaacttcactgattaaacaaaatgtggctttagcattgacgtccattctcatggcttcccttccatcagttttgggatttctgccattgtggttaacggttcttttacatgaaggtggaaccttgcttgtctgtcttaattctgtacgtgctctgaatgaaccatcttggtcctggaagcatgatatatcacatttgattagcgagattaaatctagactcctctctctcaagacaaatatcacgggctcaaacagtatcatgacggcgaatttgtaacgtagtgttgtagtgtattgcatatttatagtgtattgagaaaaatgtcaatatcccttttcttgtatatctgtaggcttctttttcactccagagaattgaacattccattctattggaggttagtttccctttaatcctcgttttcccattcaaatggaataagaaaaatgacattaagggaagaatatgcatatgcatttcggatttggcatttacaatataatgatataatgtttatatgacttaaaaaaaaaaaaaaaaaattaaaattaattgggg

SEQ ID NO: 58803 - DNA, 644 bp, Glycine max
  Clone ID: PAT_MRT3847_24110C.1
ttcctttttttttttttttttttttttttttttttttttttttttttttttttttttttttttttttttaaaccccaaattgggaagtataataaggcccaaaatttcaagggggaaccaccccgggggggccccaccttggaagaaaaccccccggggggggggggccccccttttttaaaaaatccttcaacaaagggggggttcccaacaatataaaaaaaaatcccccaaaaaaaaacccaaacccaaaaccaaaaaaccaaaaaaaaggcaaggcatttagccccccaaaacaagccacccggggggcccccccccaagaccaacatttttgggggaccccaccaaaaaacccccggaaccggaaaaaaatttggaaaaaaaacaaagggccaaaattttatccctcccccaaaaaaggggaaataacccaagtaatagttttttgggggacccccccaaaaaagccccggaatcggaaaaaaatttggctaaaaaacagggggccataatttaatccctcccccaaaaaaggggggattacccaggtaataaatttttggcggaccccaccaaaaaacccttggaaccggaaagaaatttggcaaaaaaccaagggaccataattttattccttcccc

SEQ ID NO: 58804 - DNA, 303 bp, Glycine max
  Clone ID: PAT_MRT3847_24111C.1
cggctcgagacaattcagctgcttggcagaatacaccgctaatttttctcattacttgagaacacaacacctaggttgcctccaacaccctggggggtgcctgggtcttcaacaaaaactcacaacactcgctttcccttgatcctcatcttattgcatggcaaatcattgagactttctcttccttcattttccccatcatactctgtacatgttctataagagaaaagtgatgttacaagtatctaccacaccctctaaactataagactgtacttactccgccaataggatcacatactc

SEQ ID NO: 58805 - DNA, 397 bp, Glycine max
  Clone ID: PAT_MRT3847_24112C.1
aatgtgtacagagttgtatttaacaataataaaagtaacttaagtttgctctatcagattttagttctgcacagaggttaagtgggaaaatgcagctgttgcaaaatgtatataaatagtatgttcatttttttcagtatattatctgatactgagttagcagcaggtctgcttaaacctagtcttgtagttattgagtcattacctctcctttgataactagaactgaaagcatttttaacattcttctcctggaagaaatgaattacttgaagcatgaaaagcacaccagggtggttgtttatttagcaattatgactgtagatttaaaaacaagcagcgaaacaacacctcagcagctgcccgtttacttagtctccacttcagagggggatgc

SEQ ID NO: 58806 - DNA, 409 bp, Glycine max
  unsure (1)..(409): unsure at all n locations
  Clone ID: PAT_MRT3847_24113C.1
gcacacgnaagntagaatcctatagagcgagcgctttttttttttttttttttttttttttttntaccctccctatttcacatagaaaaaaaaacggcggctaatttaaccttttaaataatccaacaataccccctccatttttattcaacccaacatataccctatatccaaattaaccaccctttttataacaaataattcttataaatacaaactttttcctcaatactccattaccaacacttccaaaaatctcatttagccgaaacaatttttcgttttatgaaaagccgttaataaaaaaaactactgaattttcttcctaaacagtgcttcttccagcatatttaaaaccactccctaatttcctacttgattaccactaacctgtttcatttaaaaatta

SEQ ID NO: 58807 - DNA, 365 bp, Glycine max
  Clone ID: PAT_MRT3847_24114C.1
acgaaagacgtttgtagagaccaatgcgcaatccgttgtggattatcgctcacagaggttggtaatagcttctttaatgagaggctcattagatctacctatgaacaatgactgcgccaggctacaagctcgcagtatgtgcttacactcccacaaaagttttggttgtttgggtggggatggcgatcacaccttaattagtggacatgaatatgtcaggccttactttagtgccaataaatgggaaaggtctctatcctgtcagtaaatcaccattactggctgtcttgacaaaactagcacgactttgcaaactagaaagttagcagattgtgattttctcaagagaaactttaagcagatgt

SEQ ID NO: 58808 - DNA, 1458 bp, Glycine max
  Clone ID: PAT_MRT3847_24115C.1
attaaatctcaatttattctgtcaacttgaaaaaaaaaaaaagaaacaaaagaagaaaaaaatcaggaacacgacgtcggatgcagaagccagtgtattgattttgttacagcaactgaagcgaaaaagcaagagttaccactcagtctgtactatccacttacggttcccaacatatgaacaacaacgccgccatgtagaacacaaccgcttcctttttcttcttcagaaactcttctctttctcattttcctcttctttgaattcaaagggctctagatggatacagctgaccaaagaaaaggcaagtatgctcctaccagggatacagagaacccactgttgggaaaatttgacaagccgcttccatgttttggctgtggaattggatggttctctcttctgctaggatttgtttgcccgccgatgtggtattatgctacaattctctatttcggaaattactatcataaggatccgagagagcgggctgggcttgctgcttctgcaattgctgctctagttttcacaattgctgcggtggtaacagtagctgttattttcttgtaattttactttctactagcccatgtctagctaaggagacaaaaaaaaaaaaatcacttctaatatcagcccctacacgaagaaggcaagcctgatgcacccacagaccacggtagatcaagctcttatgatcacttttgatcatcaagaaaaataggtaccaaagcaccaaaggtggtacaaagctagttccattccattatgtggatgtagagctgcttttgtttcccttcttggagttgtgtatagaaaaggatgacgtaactcggattttatccaaaatgatggctcagttaacttattttggtgtgtatgtgtcttggtgttggtaactagttactatcattaatttattagaaaaaaaaagtgaaaatatactgctgctggtgtttgatcatatgaaagcctggttttatgtgctgttctccacttggatccagggtgaaggtggtggtatctggtgcatgaggaagacacctaaatggaaagttgatctcctttagaacaaccctcatattgttcacgttcaagtagaagttgcatttttgctaagtacttcaaaatgagaaatattcaagagtcaaaacaggtgtaaagtacttgatgtgtcaacgcttggtcatgaatatttgcagttgctatctaaccttttaattgcaattgcatttcagctatttgtgattcacctaataactttggtatgacatgattcaaacatacgtggagagtatcaagaatctctgtctttcgctcaaagaacaacacttttgtttgccctcactcaaatttggaatttttattttttataatagggtaatgtgcaattttggtgaagtagtggcttgaagaatgtactttttgttttttcccctaaataaaaaggtttagggt

SEQ ID NO: 58809 - DNA, 1168 bp, Glycine max
  Clone ID: PAT_MRT3847_24116C.1
ctcggataacggaaccattaactatggcgtgcgttttctttcaaattcttcaatctcgctagggttttaccctcgatcaaatttgctagggatcctaatttctcccgaaatcgaaagaaagagagaagcaaaacgaaaaaaatggccgtgtctctgacacagggggcgataacggagatttgcagaggcaattgctccgaaagcttgcaaccggtgctgcaggtgatcgagttgaagcaggtgcagtcgcagcaaaacagcaccgtcgagaggtactgcgtggttctttccgacgggtccttttaccagcaagggatgctcgccacgcagaagaatgacttggttcattcgggaaagttgcagaaaggttccgttcttagactcactcagttcctctgcaatgttgtccagaaccacaagattattatcatcattgacctagatgttatactggactattgtgagctgattggacaacctgtctcaacaccaaaacacacacctaaagaaccaggagtcaactttgggaattcacaatctttaaatagcagttcacatgcaggtggcatgaatgctagaccaaatgtatctgggtcatctatctattatccaaaagcgaatcctcctgctcgtaatgaccctcctgcttatcctaaagcaaagactctgacgcagggggcgataatggagatatgcagtggcaatgaccccaagaatttgcagccggtgctgcaggttatcgagtttaagctggtccagtcgcagcaaaacagcaccattgaaaggtaccgtgtggttctctctgacggttccttttaccagcaagggatgctcgccacgcagaagaatgagttgatctattctggaaggttgcagcaaggcgccattattagactcacacagttcatctgcaatgttgttcaaaaccgcaagattattatcatagttgacctagatgttatatgtgaaaaatgtgagctgattggagaacctgtcgcagctccaaaaggtgcacctgcagaatctgccactggtcaatctggattcacctttggaaatttgcaatatttggataggagttcacattcaggtggtatgactactatacaaaatttggctggtcaatctctggacttgaagccagtgctgcaagttctggagttggagt

SEQ ID NO: 58810 - DNA, 1262 bp, Glycine max
  Clone ID: PAT_MRT3847_24117C.1
tcccgagcctctctgtcgcaagtttcgtttccaggtttcggcgcaatcggcttctgcttcaaggaaggagagcttgttattctctatcaacaagtaaaatgtcaggtgaagagggtgtcattgcagttgagccagctgctgctgctgctgccatcccaggcgagccaatggatatcatgactgccttacaacttgtgctcagaaaatctctggcttatggtggtttgtcgcgtggccttcatgaaggtgcaaaagtgattgagaagcatgctgcacaactctgtgttcttgcagaagactgtgaccagcctgactatgttaaactggttaaggccctttgtgcagagcacaatgttagcctgctgacagttccgagtgcaaagacccttggagaatgggctggtttgtgcaagattgattccgaaggaaaagcaaggaaggttactggttgctcctgtgtggttgtgaaggatttcggtgaggagcatgaagcctataacgtcgttctgcagcatgtgaaatctcaatgagttgcaagattcatagattttatgcacttcacattttcattttgggttattccttgagaatgaattttgccttgtggctggattatatctaccttgggttttgattgtttaatatgactttgccacattctcaatgttgctgttacttttttttatcctctgatgcattgctgtggctctaattaggaactcttgtttcacatttaatcattaaagagggaaaaatcatataaagtagaagttaagaatttggccctttatttaaaatttgttgtccgtccagtatgttctgttctgatgattgcattacagctagtcgggctgtatccaacttggttgagctgggcattcaccatcgttctcaacatatctgtgtcgttagccttgtattctctggtggtcttttaccatgtgtttgctaaagaactggcaccacacaaacctctagctaaattcttgtgcatcaaaggaattgttttcttctgcttttggcagggaatgttgctggagcttttagcggcaactggtgtcattcaatctcgccatttgcggttagatgtggagcacattgaggaagcaatgcagaatattttggtatgtctagagatggttatcttttctgttcttcaacagtatgcttatcatcctgcacctatagtggattcatgcgttgcccgtgaaaattttgtacggtttgactactgcaatttaatttaaatagtgatattgttt

SEQ ID NO: 58811 - DNA, 257 bp, Glycine max
  Clone ID: PAT_MRT3847_24118C.1
ggctcgaggcaacttggagattgggaatgctcatgttgcgatacatacgcagagacatgaaaagactttcatcgaacgccaaagacacgagaattgcactgactggcggaagcggtccaccactaaattgttaatgtcgagagggcgatgcgcctagactagatattacgggtactgctggtacgacccatttgaggaaggtggcagctttggcagatttactggaccggtgagagtgattgcttatgataacaact

SEQ ID NO: 58812 - DNA, 899 bp, Glycine max
  Clone ID: PAT_MRT3847_24119C.1
cggctgcgagaagacgatacggctgcgagaagacgacagaaggggatataagatcgattatactcacaagttttgttctttcctagcaattcggcgcaatcgtcttctgcttcaaggaaggagagcttgttattctctatcaacaaggaaaatgtcagggtatgattgtttttctctctgaagaggttgttgttgcagctgagccagctgctgccatcccaggcgagcctatggatatcatgactgccttgcaacttgtgctcagaaaatctctggcttatggtggtcttgcacgaggccttcacgaaggggcaaaagtgattgagaagcatgctgcacaactctgtgttctagcagaagactgtgaccagcctgactatgttaaactggttaaggccctttgtgcagagcacaatgttagcctgctgacagtttcgagtgcaaagacccttggagaatgggctggtttgtgcaagattgattccgaaggaaaagctaggaaggttactggttgctcctgtgtggttgtgaaggattttggtgaggagcatgaagcctataacgtcgttctgcagcatgtgaaatctcaatgagttgcaagattcatagattttatgcatttcattttgggttattccatgagaatgaattttgccttgtagctggattatatctaccttgggttttgattgtttaatatgactgccacattctaaatgttggttccttttttctttctttctttgatgcattgctgttactctaattaggaactcttgtttctcatttatttcattaaagaagggaaagttacggctacaaaaaaaaaaaaaaaaaaaaaaaataactcatataaagtaaaagttaagtacgtggccctttttttggccttaatgttt

SEQ ID NO: 58813 - DNA, 645 bp, Glycine max
  unsure (1)..(645): unsure at all n locations
  Clone ID: PAT_MRT3847_2411C.1
cgacctagcgtccggaaattttaaggtggtttcaggcagaacggataatgctgtgaaaaaccgtttctccacactgtgcaaaaagagagcaaaatatgaagcattagcaaacgagaacaacacttcatacatcaattcaaataacaaaaggatttttctccagcatgggtgtgatacagatgtggcatcagaatctgctagtgggaaaatgaggaggtcccatatctctgatgccactgagaagatcaactttggagacagatcgcataaacaaaatgggattctattaaatcagcagtcaagagcaccatttgcagttttagctcaaaactctcacaatgtcaacttgccagaccagcatcgtgtctgcaatttgaagtttagcgattatgctcaaaacaacaagattcaaggaacattccttaaaaaggatgacccaaggataaacacattgatgcancangcngagttattaagttcactagctctaaaagttggtgcggagaacatggatcaaagtcttgaaaatgcatggaaggttcttcaagaatttctgnaccgaaccaaagagttagacattcctggatgtaagattccagatttacaacttgtggatcttaaagatttattggcgggcttaaagag

SEQ ID NO: 58814 - DNA, 146 bp, Glycine max
  Clone ID: PAT_MRT3847_24120C.1
cgaggtcacctgatcttagagcagagttatacaatgagctccatgtagatgactggcagcaacatgatagcgtcagagtcggggtttagaggtccagagagttagggctgagaacccattagtcttgaggtctgatagggtcgcaa

SEQ ID NO: 58815 - DNA, 1882 bp, Glycine max
  Clone ID: PAT_MRT3847_24121C.1
cacgcgtccggcgcttaaacaaaccacgttcttctctgcggtgccactgcgacactcgctggccccaaaatgaccatcattaacatgaaccccccggtaattacaattctgccctcactctaattcacaaatacctagcaccaccctcactcctttttttttttccttcttccgaacctttttctttttctgtgtttgcatgttgacggttactttgcggtattatggaacaacaacaccagcagagaactctctccggttcgtcacagagccctagatctccgtcttcgtcgtcgcaaccttttctctccgtctccgtcaccgatcccgttaagctcggcaatggcgtccaagcctatatctcctaccgcgtcatcaccaaaacaaattttcctgaataccaaggacctgagaagattgtcatccgacgttacagtgactttgtctggttacgtgatcgcctttttgagaagtacaaaggcattttcattccccctcttccagagaaaagtgctgtagagaaatttcgtttcagtgctgaatttattgaaatgaggcggcaagcattggatgtatttgtaaataggatagcatcacatcatgaactaaaacaaagtgaggacctgaggttgtttttgcaggcagaggaagagacaatggaacgattaaggtcacacgagactggcatattcaagaagaaaccagccgatctaatgcagatttttaaggatgtgcaatctaaagtcagcgatgttgtccttgggaaagagaagccagtagaagaatcagatcctgagtatgaaaagatgaaacattacatctttgagcttgaaaaccacttggctgaagctcaaaagcatgcataccgtcttgtgaagaggcacagagagttggggcaatcactgtctgattttggaaaagcagtaaaacttctaggtgcttctgaaggaaatgctcttgggaaagcgttctctgaacttgggatgaagtcagagattttatcagccaagttgcaaaaggaggctcatcagctcttgatgaattttgaagaacctttgaaagattatgtccatgctgtacaatctattaaggcaacaatagcagagagggccaatgccttcagaagacaatgtgaactggctgaaacaatgaagctaaaggagattaatcttgacaagctcatgctgattcgatctgataaagttgcagaagctgaacatgaatataaagagttgaaggcagagagtgaacaggcgacgaagacatttgagacgattgtgaaactaatgaatgaagagatggggcgttttcaggaacagaaaacattagatatggggattgctttccatgaatttgccaaagggcaggcacgtctagcaaatggtattgcagatgcgtggagaagtttgcttcccaaactggaagcatgttcctcctcgtagagaaagaattaatcaatgagttctgcagagcatagataaattactctttcatgggtgtttacagcccttacaggggctactagggtatggcaaacgcagatcgcagctcgtgttttgtaaaagagctttcggattatgttgtaaaagatgtgtttttttctgtctggccgattttgtacaaattttaaacaaagtaaaaggttacctatccgcacttttattttttattttgctgctgttgttgcgatatctcttgtcttcctctgttgtatatagtcacaacggaattacatgacaatatggaaggcttttctttagtcttttagatgagtcagcaataccgtcttctcttaatacattttttatttatttggtatcatcatgtataaaaaatgtatatagtcacaacggaattacatgacaatatggaaggcttttct

SEQ ID NO: 58816 - DNA, 465 bp, Glycine max
  Clone ID: PAT_MRT3847_24122C.1
acgagaaaacatacgtataaattgaactttatgccttgattggatcaagaaagaaagtttcaaaatgaataaaaaagagggagggagataagaagcttggtgtatccagttgatgcttaaaaataagagtatatcatttaaaattacaaaatcctctttaattacattttaagggctaaagcaaatcaagtttaaaaaatgaatggacacataattatagttcaagagcatgtttaacttacttggagggatccactaagtctttgtaaagcctcggtctgctgctgtgagcaaaaaacacatgaagtagtttatactatagttcacagtagattaatacaactaaattcacatttggaacaaaagatgatgtgcgttgcatcatagcaactgcccgaataaataactgaataacttgtgtgtatatactacatagaactacataatgaaatagtagctgaccag

SEQ ID NO: 58817 - DNA, 377 bp, Glycine max
  Clone ID: PAT_MRT3847_24123C.1
ttgggggggggggggggctgtaaaagcagagctgaggcgggaggaacgaacttttagacccatagggacgagagagtcgtatagtagaaaaacaaaaacaaaaacaagtggataaaactgcctagacgctaaatgcttgtttgggatttaatcaggctgcacgaaactaatctgacgctctatggaaagcaatgggtaatgaaaatgacaactacaaaacaccaacaccgaaacgagttatgataaaaataacgggccaacaaactgggattgagatggcataatgagccatggcagggccgctggtgagtgttgctggatcacaacttaaacgaaatgtagcacaccttgttggccaacgcatgtctaggcactag

SEQ ID NO: 58818 - DNA, 117 bp, Glycine max
  Clone ID: PAT_MRT3847_24124C.1
ccggccttacttgccgggcccacccactccgtgcttttttgtacccaccacggccttgggttggcggaccttaagaccggaaacaaaaacgattgcagcttggtgcctagagagcct

SEQ ID NO: 58819 - DNA, 425 bp, Glycine max
  Clone ID: PAT_MRT3847_24125C.1
attaaaggctacaagtataaaatatgactaagttacaagtcgtcagtaagaatttattacttttgaaaatgttaattaaagaaagggagacccaaagaaagggaggctcttcctgaaatccacacaggggggtgcggctcaaacgggtgacagacccccgctgttcccagtagggcagcacccccaaacccagggggccaagggaggggctcccaaatgaaacagaggctggttgctgatttcttgggggaacttttgtaaaaatgaagacactgaatccttgagctgaatcccaggtgcaaagactggggggagggggagaatccaaaatcatgctcaggtttctcctgaaaagtgtgtattttctaaaaaataaatataaactcctggtttgaaaaactcccttctgatgaatgggaggaaaa

SEQ ID NO: 58820 - DNA, 524 bp, Glycine max
  unsure (1)..(524): unsure at all n locations
  Clone ID: PAT_MRT3847_24126C.1
atggacttccagggccattgtataactgttctgctaaagatacattcaagctaaaggtcaagccaggcaaaacataccttctccgtttgatcaacgctgcacttaatgacgaactcttcttcagcattgcaaatcacactctcacagtggttgatgtagatgcaatttatgttaagccatttgacactgacactattctcatttcccctggacaaacctccaatgttcttctcaaaaccaaatctcactatcctaatgccacattcttgatgagtgctagaccatatgcgactggccagggcacttttgacaactcaactgtggctgctatccttgaatatgaagtttcaccacacgctcttcactcaacaacttcaatcaagaagctttcactcttcaagcccattctccctgcccttaatgacacttctttcgcgacaaacttttncaacaagcttcgtacctttacaagggcttagtttcagccaatgtaccccagaatttgataagcctttttcttcaca

SEQ ID NO: 58821 - DNA, 300 bp, Glycine max
  Clone ID: PAT_MRT3847_24127C.1
ggatgagtccgccaacttatataaagcagtgcttggtcctgcctctccgagggaaaaccatagctatcgggagtaatgactaacatcattccaaactcgttcgcacacgcatacccattgcggcgatcgctcactactctgatggtacccggagcactggctcgcataggccaggcaggccaggctgtgatcggccaaaacctatacttagacatcgcagaatgggggtttcggagcactgggtgccatcgcgcggtcttcagagtgtatcaggccgcatatcgtgcccattacaagggc

SEQ ID NO: 58822 - DNA, 1296 bp, Glycine max
  Clone ID: PAT_MRT3847_24128C.1
gagtcattgtttttaagaccaagtagaagtcactttatgggtcaagacttagcactaaagccaagagaccaaaaagactaaaacaatgatggagtcattcaagtgttatgtttgagtgagagtcttttctaagcttacgaagtttcagggcagaagacatgcacagcttctgattcctctccaattcattcaacttccaaggtaggtggattattgttctaagaggtaggccttgagccagagtggaaaacaatgaattgcttatgtgagaaagactctggtctattttcttctcattcaacagctccctatgttcttggatgcccatcatgggcgacttctgaatttgaagtccaacgatcatctatgtccagaagtttgagctcaaaagtggatgttcttccacaacaatgccacaatagcaagacatttaattttcaattccaagaacaggatgcatcttcaaccaaatccactgatcaatcttatccagaagttggtcaaatttctgtccagcatagttctactgattcaacacttatcagaaatgaggggaagagtatgggatgtgtcatcaggtcatttatggggagtcaggatttccctttccctcctccactactggatcacagaccaatacttccagtggaaactgctcctgttcgaattcctcttcaattggattttgcagaagaacctatatacgtgaattcaaagcagtaccatgctattctgaggcgaagacagtatcgagcaaaactcgaagcgcttaacaaacccatcaaggatcggaaaccgtatcttcacgagtcccgccatcaacatgcactgaagagagctagaggcgctggtggacgctttctcaatacaaaaaaacaattacaatcaaatcatacacctgggaatattgcagaatcaaaaatgcatcacattgaaaactatagagatggtgctgatgtctcatatgcatttaacagtgatgcaagaaacatgcagaatgatgcagctgataagggtggtggcaccactcagcaacctctatttgtctacatgtgactaaactggcttgttgttgggcacatcactttgcttgtgttgtgttccattgggaagtcatccttggctcatcttttattatgtagttacgattattgctaattttgattttcgtcgacattgacatggacgtattgtataccctaaaattgtttgacactgacttgtcaaaaacaatgtttttctatgttaataccatatctgcaacatgtctaattgaaatgcgattatgtggcttcc

SEQ ID NO: 58823 - DNA, 1357 bp, Glycine max
  Clone ID: PAT_MRT3847_24129C.1
ggctcgaggtgacatccacactcaactcaaaaaccaattccaataatggcgaccttatctatgtcatcttgatcgtaatccccgtcatcaaactctttctttattctacgattcacaatcaaaacccaacaacttcaactctccaatctctatcctcaattcaacccttttggtggcaacttctatttatgctacaaaaaatgctgcgattgcacttcaccaccgcactctctcactttgcttccaaggcctcaccttttcctctcacacccgtttccgttaccgtttccagagctattgtttgcaacaaccccaccaggttcagatcgcaaatgggttctttctccacttcctcttcctcttcctccaaactcttgttccgccagctttttgagaaggaatcttccacctacacttaccttctcgctgatgcctcgcacccagaaaaacctgcacttctgattgacccagttgataggacagtagacagggacttgtcgatcattgagcaactggggttgaagcttgtgtatgccatgaacacacatgtgcatgcggatcatgtcactgggactggccttatcaagagcaaagttccttctgtaaaatctgttatttcaaaagcaagtggtgcaacggcagatctttatgtggagccaggtgataaggtccaaattggtgatctttttctagaggttcgtgcaactcctggtcataccaaaggttgtgttacctatgttactggagatgcacctgatcaacctcaacctaggatggcattcactggagataccctattaatacggggatgtggtaggacagattttcagggtgggagttcagagcagctttacaaatcaatccattcacagattttaacactgcccaagagtacgttaatctatccagctcatgactacaaaggattcactgtgagcactgttggagaggagctgcaaaacaatccacgcataacaaaggatgaggaaactttcaagaacatcatgggaaatcttaacctgtcatatcctaaaatgattgacatagctgtcccagctaatatggtttgcggaatccaatccaatccaaagcaagctgaggcttcataagccttatctgagagtcacacactgatgttatttgacacaaagaccttgcaagcaaaagggggaaaaattgttatagccctttgaattgaagagaaaaatggaaattgtaaataaataaaatggtatttgtgttgtggcccaatataattagaattaggttccagtgattatgctgtgtttctgttgtatctgattgtttatgttaaaacttcctaatcctatacttcaaagcccaattttcaggattt

SEQ ID NO: 58824 - DNA, 481 bp, Glycine max
  Clone ID: PAT_MRT3847_2412C.1
gttggatgggggtggctctgttcgcatgacaccaatcgagcgcatcaacgtatcaagtctgtctcctttacttaccctccttttctggacctctccgagggggatcatcatgagacccaagccaaccctgtacgcatatcgaagcaaagctccggcagccaattccgagatgggcactggcgagccttctaagaatatgcacctctaccactgaaaggcttgccggagctcaagaagcagatgatgtgctctgttatgtgtcgataagaccgatagctactagcttaccggtgaggaacgaccaaggacaggaaggattgggctcgcacgaacaccggagaagtcatgccacaatctacgtgtgctgtgattgcgactagggcacatacaacactctagtgcatgactacatatccagtgattcgtttaaccgggctatagcagtttgaatcagcggcctggagaccggtgatataccaca

SEQ ID NO: 58825 - DNA, 175 bp, Glycine max
  Clone ID: PAT_MRT3847_24130C.1
aacgcagggaaacgcgctttgcatattaaaaaaaattaacatagcatcgatacacgtcaatgattctaaggtggcactctctgataagaagtctagatccgactccaataaagctgcccatggtgattgcttatttattggaagggatgcaaggcaaattgaaacgtaagctttt

SEQ ID NO: 58826 - DNA, 345 bp, Glycine max
  Clone ID: PAT_MRT3847_24131C.1
atggctgacacaatttatggaaaccaaaagggttggctcgcatagccgaccctacaagaagaaaaaaaaaaaaaaaaaaaaaaaaaaaaaaaaaaaaaaaaaaaaaaaaaaaaaaaaaaaaaaaaaaaaaaaaaaaaaaaaaaaaaaaaaaacttgggggggggcccgggccccaatttccccttatagggggtgtattaaccccccctaatggcccgtgttttaaaaacgtgggaatgggaaaaccctgggggtacccaaattaaatggcttggaagaaaatccccttttccccggtgggggaaaaagaaaaaaggcccgcccggatcgcctttccaaaaattg

SEQ ID NO: 58827 - DNA, 304 bp, Glycine max
  Clone ID: PAT_MRT3847_24132C.1
gctctggagctttataaaacatctccgtgcaatgggtgaaaaaaagctctttaacaaatgaacaatatcccaaagagggacacagcgttaacaactgcagcgaattatgaatcaatgttttctgcagaatgacggacctgtacttgcaacattccagcgttatataacatgtaccggcgtggaccagaacatccgtctcaacagaaagcaaaaagaatgggattaaccacgatagccttcaacgatattcaggaacaagttggaaaccaaaaatgagtgtccttccccatatttttcactctgc

SEQ ID NO: 58828 - DNA, 596 bp, Glycine max
  Clone ID: PAT_MRT3847_24133C.1
gatagtaaaaatacttcattccagaagatatgaaaatgcatggtatataacaggttcagtgaggaattcttttaacatttccatcagactgttgatttaaaggaaaagaaggaagaaatgttagtccttcactttcctttatctcctccaaaattgcaaaccaaataagatattttgatttcccatccctccacccaacagtaggcatgtctcttttgtcattcccttcataaattgattactaaaattctttctccaataagcatcgcatctagaaaaatgagaaaggggggcagagagtatctataggatacaccgtgacagcaggaaaccaaaagcatttaactataccaatcaagaaagagaattgaaaaagtaagcacaaatagaaatagtaaaagaaatgtcctgctgctgctattccgctgaatggcttgtgagagttctttgttaccaagctcaacattgttagtagcttcaacagcctgatcatacagatgctcaatttgctgagcttgatgcaaaacatgtgtagacatgaggtgatttagtgcagacatctccaccatcttagtttcagtttcttgaactgtatc

SEQ ID NO: 58829 - DNA, 1814 bp, Glycine max
  Clone ID: PAT_MRT3847_24134C.1
cacgcgtccgctcactttacttcgatccagaggggttcccacaaatcagtcaaaagtttaactttcataggctgtttggtttttatttttgttgttcagtccaatgtcactcaaaagtcacaactcacaacaatgtataagtagaacttattttaagcctgccaagtgatttgggcttcagctacttatatgtcatttctattagcctcctctctttatgtgtcaagaagaattgttatcctgttattgtatagcatccttgaaaagttgtacagagttttgctgatgacttaataatcactttggtgcagaacgaaacgtttagattggaagaaggcatcgtcttcatcttcttcccttaggttaggttttgcagagctcccttcaacgcatttcttcgacccatattcactctttcaagcacaacgacactatctcattgagtggtatcctatctcacgataatttggtttctttattttctgtctttgaactcccattgatcggcgacaattgagagatgggaaaagcaagggacagaaccgaagatttcaaagacgccgtgcgccacaccgctcgctctttgggctacgatgaggctaaattggcgtccgtaatggcatctttcattattcataaaccagttttatgtaccccggtatttttttctctttgtttatagttggagagtattggagagctggatcagtttttgttgaagcacagaaaggactacacggatctgcatcgcacaactgaaaaggagagagatagcattgagcatgaagttagtacttttattaaaacttgccaggaacaaattgatattcttaagaatagtataaatcaagaggaggaaacttcgaaaggttggcttggcattgcaaccacaaaatctaatgccgacatcattgcccacaaacatggggtggttctaattttaagtgagaggctccattcagttacggcacagtttgatcagctcagagctgtacgcttccaggatgctattaacaaagcaataccacgaagaaaacttaaccgtgtagccaggaaagattctgcagaaacctctaagtcaggtgacatggagctcagagaacctgaggagttacgcgctgagcctctaagagtccaacagcaactcttggacgatgaaacacgtgcccttcaggtggaattgactagtcttctcgatacagttcaagaaaccgaaactaagatggtggagatgtctgcactaaatcacctcatgtctacacatgttttgcatcaagctcagcaaattgagcatctgtatgatcaggctgttgaagctactaagaatgttgagcttggtaacaaagaactctcacaagccattcagaggaatagcagcagcaggacatttcttttactatttctatttgtgcttactttttcaatcctctttcttgattggtatagttaaatgcttttggttttctgctatcacagtgtatcttatagacactctctgccccttttctcttttttccctattgctgtcaatatttgtttttactttttaccactaggaaggcatctttttctagattcgatgtttattggagacagaattttagtaatcaatttatgaagggaatgacaaaagagacctgcctactgtttggtaggaggggagggaaatcaaaatatcttatttggtttgcaattttggaggagataaaggaaagtgaaggactaccatttcttccttcttttcctttaaatccccagtttgatggaaatgttaaaggaattcctcactgtccccattataaacaatgcgtttt

SEQ ID NO: 58830 - DNA, 364 bp, Glycine max
  Clone ID: PAT_MRT3847_24135C.1
agggtggttggatggcttgttatagcgggttgggacctagatgggcttcaatgtcaatgtctgcgacaactatgatcactacatatgagttccttaaacgactttccatgaaaaatcaagaggttttgacttgatgaaggatagaatttaataacaccaaaaaacagagaaaggagaaggggttttctcctttcttttgtataaatcatgtccttactttctttccaattgtccctttttttttctggcttctttcacttttcctgaatgggatgactgcttgatcaatgtaaagctattgtaacttgtaagtcaccttatgtgtatattttgaaaataaataaaaattcattctaacacagtt

SEQ ID NO: 58831 - DNA, 1293 bp, Glycine max
  Clone ID: PAT_MRT3847_24136C.1
gatctgaaaataaatcacatattctttcatatatcttcatatatatggacataatagaaaaacagaaaaaaaaaagaaaaagaaaaagagagcagcaaacaagaggtcatccctaaacaatacatcaatcttaattcgaatcccctattttctttttcttaagactatttcaaacaacaaagtgaaagtcttatgacaattcttttcttttgtcagcaatcttcactaattgatcataattatattctcaatagaaaaatactaagttcaggtcccccattaccatcaggattcaacatgtaaaacgcctccgagtcacggctccccacgactcgctcaaacctcgccctcatgtacatcaactcaccctccgacccaccgccggcggcggcggaggccgcctttccgtcctccaggagagggatgaccccggcaccgacggacacgctctgaatggtgctcagcacgtgccagtcgaggtccccgcacgtacgggacacggcatagccacagttcctcccgttgcaatacatggtccacgaaggctcctgaaagagcttgcactgctgctgtctgccactattgctacgcattgtacgcgtaatagtggaggcagacagtttctggctctcaagcgcgatgcgcacgaggccagaggacatctccttgacgagcgaggaggtggacatggcgagctcgagtaggaggacgggatcggcgcgggggtggagctgcacggcgaaagagatgtgtccacggcggtgcccgaagagggttccggtgacttttcggccaagggaaggagtcacggagagctgcgacggaatcgtgagccacttgcatgttgggatcattgttgggaacgtgaagatgttcaagaacgagcgtatgagtgaagatatcttgttttgttgcgttagctttggtgtgtgttgttgctgttggtacaagtttgagaccgaaggcgaggatcctcgccgcacgaggagattgtcggagacatcatcggattcgaaggagcggaagtgatgggttaggtttgaagggaggattcttcggctgtttcttgttgtgacggtgcatgcacttgagcttctttgaaatattttttgtttttgttgttctttcatgttgtgatgaaattaattaacacaaggaaggttgaagaatgcgagaaagagagagtgatggggttgtgttttttttttttttgttggagtgaatgagggagattgtgaatcaaggttggaatagaaacatgaagagagagagagaaaggggagcgacaaaggt

SEQ ID NO: 58832 - DNA, 393 bp, Glycine max
  Clone ID: PAT_MRT3847_24137C.1
gttaatccactgaaatttctggggggtaaaatagtagcagacagggccaaaccagggcatggggtgcatggttagtataggttattcagcattaatgtaccaagtgatcgatttgtgaaaggaaccaacaccatctatctaaggcagtcaagagccatgaacccttttcaaggagttatgtatgattatatccgtttagaacgacctccattaacacagatttgattgtgtccaacttctagttgacaaagtcaaaacatatatgtagactttatgcatttcgttttattctttttcaaactagagttagtggaaaaacatgattagctagaaagaagttactgatatatagaataattaaatatttcagtttaatttacaactacctaaaaa

SEQ ID NO: 58833 - DNA, 353 bp, Glycine max
  Clone ID: PAT_MRT3847_24138C.1
cataccaaactcactcatcaattaccatctttcttattactaactattaatacataatgtcggggagagttggacaagtgagcgactgcaaaactagtatatcatgggatgcagggaagccacaatgtgattgaataagtacaggttgcgccaccacaagcaggggaagtgcgtatgaagatcctatacacctctctatgccacactgatgatgacttctgggaagttaagggccaaactccattgtttacatttatatttgtgtcaagaagctggagggattgtggatagcgtatcacaaggtgttagctcatttgaaactcagggaccatgcccttcctgtgtttaccggt

SEQ ID NO: 58834 - DNA, 435 bp, Glycine max
  Clone ID: PAT_MRT3847_24139C.1
cctatgcgtgcgcggacgcgtgggggaaatttgggtgatgacaccatcaattttgaagctttctcccacaagctgtagcagtttggagagatccaggaaaaagttgtatcgaaattttcacaagaggaatttcttacagcttgttcaactcaggtgcgtcctgcaacaactctgatggctgatgggtgtccatatttgtatgctatggtgcatgatggttacaagtgtacaactccaggtgatattgtcactggcgttgagttgacaaccataaacaatatgtgtgcatatggactcaatcctggaatatcaggacctcgtctcatgggcaccattcctcagtctatttcacagtacaccgtccgatatcaaatggctgcagagagaacaccattgaattttgaggctagcaagcagagcttttgtcattttcta

SEQ ID NO: 58835 - DNA, 427 bp, Glycine max
  Clone ID: PAT_MRT3847_2413C.1
acggaagacggctgcgagacattactctactcattaaacactttctaaattctattcgaacttatcaaaccattttttataaaatatttgtgcaaatactaaaaaagggtcgtgctccaaaatcaccaccatatccatagacgttaattccaacctctcttataataactacggatcatctacgatccagatctattaacaaatgcaaaggcattaacacccaaaacaacaaacccgacgtttatatatgaacactattgccatcttagcttatcaaaaatctccgcatcatttttaaaaacctacctcacaacaggatccttttcatggttaacttgaaaatatgacagtactgcataatcttgcatatcagggactgtataataacttataatatcctgctcactataggttctaacaccattat

SEQ ID NO: 58836 - DNA, 1231 bp, Glycine max
  Clone ID: PAT_MRT3847_24140C.1
catgctgacattttttaattccttattcaatgtaataatatacgagtaacctcagctctatcaacaatcaatgacatttttgtctttatttgttttcaatcaatggaaacaattttcatattttcattttacttctccaaaataacaagtacctaggaaagcaagacatgaaatcattcatattcatatttctgataaatcactcaattatttgctactgcacaccagttacaagaaacaattatctctcggtatcattctgcatacagacaacagcagatcagcaacaccattcaacttccgtcgggtaaattttgtcctgttgaaaaaatccaccaatcaaattgcagctataagtttggttgcttgaatatctaaactccataatttactaagacagtaaccaagcaccccagttttgattactcaaactcttcaagtggtttggcaaatagtaacagtctgaacaatgctcagggaatattctttctctgagaggctcgcacgcttctggtgaaaccaagtcagagtatccttttacgtaagagcagttccatggcaattttttgctcacattaagggtgatgtttgataggcagatattgacaaagttgtcacctttaataccctgtataaggccggcacgtttgacttttacccctatcacatccttgatagtaatcctttctattaccggtagagcatctgggtcataagtgtcatctggatgttctccatataaaccagtaaacctaatagcaatatctacattagccaagatcatgttagagatatagacatttcttacataaccacccctgccaggagaagtttttattctcattgcgctatgtgaatcaaaaatgtaaatatcttctgcatgaacttctgatactcctccagacatctcacttccgatagcactcccagggctcgggggcaacccagtgagcgagcggatgaaagtaagagcagtggcatggcaattttgagctcacattaagggtgatgtttgataggcagatattgacaaagttgtcacctttaataccctgtataaggccggcacgttggccgaagaccccggacacatgccagctggaaatggtgaccaaagcggggcgaggatcggggcgatcagagtcgtcaggaggctgccgaaaacagggagaaaagcccaaagcggtgactacatgagcgaagcacatgaaaggggaaccgccggaagcaa

SEQ ID NO: 58837 - DNA, 409 bp, Glycine max
  Clone ID: PAT_MRT3847_24141C.1
ctcagagacagcattttttgctgataaccagaccattgatatcacacccttcttgaaacaaggaggttcaagcaacaagaagggagccattataggcggtgttgttggaggtgtaggtcttgttgtaatcctccttgcactatttggcttgcttagacggtataagaaacccaagagggttcctagaggtgacatattgggagcaaccgagttgaaaggtccagttccctataggtacaaggatttgaagactgcaacaaaaaatttcagtgatgaaaataaactaggagaaggaggttttggagatgtatacaagggcactttgaaaaatgggaaaatagttgcagtcaaaaaattaatcttatgccaatccgggaagatggatgaacattttgaaagtgaagtcaag

SEQ ID NO: 58838 - DNA, 208 bp, Glycine max
  Clone ID: PAT_MRT3847_24142C.1
tgttaagaccgccttacggatcgagtgctccgagacaggtgggaatggaagtcctgcagagacgacgatgctacatgagctttatgagaaagaaggagagagtccatggtttgatattctgtgcagacctgggacagacgctgcttctataatagcaggtggtgtcagacgcgtaactagctaccctgtgatctgtcgtaaggctttg

SEQ ID NO: 58839 - DNA, 395 bp, Glycine max
  Clone ID: PAT_MRT3847_24143C.1
gggttaggtgattcggaacggaaggagttctctcgccgcatcagacagaccacttatggagaagtcatagactatgtaaccttgttctgtgctcatattgctgaagatatctctgattacgctacattcccagatggtgttccaaaagaaagactgcctatacccgatgtacttgttaggattgctctcctgctcttgattagggacaaggttgttgcttgtgtcacaacatttcttgaactacattgcttttagatgatatataactacggtatacacttctgtagggtgctgctatatcaaccgaggatcatgaatatgttttgctacgtgcgagcttgactcatagggatggaaggtggcatgctcttgcagactataaagatctgcagatt

SEQ ID NO: 58840 - DNA, 310 bp, Glycine max
  unsure (1)..(310): unsure at all n locations
  Clone ID: PAT_MRT3847_24144C.1
agcgtangtaatctcnggnatgcnggttcgagcngaacctctcatnttcactcnctcnctctctaaacacagatttcagnnncaattcnntatgngctagaanatggggnacaacaattncgtcgngnnnacnantgnctncaatgcnggnctnctgncanagggggcntttancaggggcgatnaagtgngagaantngatntaannncantgcttgncctgaaggtntagcngtntattgncaaagnctttttcgtgggggaagtttnttcggtttgcaaatccnnnctanaggtntaanccccgggn

SEQ ID NO: 58841 - DNA, 232 bp, Glycine max
  Clone ID: PAT_MRT3847_24145C.1
cgaacattgttgaggtgtttccactcatcctaattcaccaagcagggctcctgcgtcgacctctgcagctcagaggggggatgatgactcaactcctacaattgatgttgccaatctgtctccaactcctgaaactggagaagaatcatcgcatccgactgtagtggcgcctgttcaagcagaacaggtatctgcgtccggctctggaactactgcgctagcgacagcgcaa

SEQ ID NO: 58842 - DNA, 369 bp, Glycine max
  Clone ID: PAT_MRT3847_24146C.1
cccacccgtacgtacggttctgcagaccgacggggggaggggccagtggttgctgctgctcatgactccgctggttcaactgctttgtgcgtctatcatcactatccagtggttctcagcaggactctgctccgtctgcctattttggttgcaggtagcttgacgagacgggtattttaaaccatccctcctgccttatttggctaagactgtacctctactaacacagaggcctggagattagaactgcagcttgatgatgttggtgcttgtccttaggtgagatctgcatcacactcctggtgcgtcctttaataggaggagcaattggatagagggctgaacgagacatggacaactgactcttct

SEQ ID NO: 58843 - DNA, 1013 bp, Glycine max
  Clone ID: PAT_MRT3847_24147C.1
gagagctgaggagaaattgggtgtagaaacagcgaaagagaaagagagagagagagagagatggcgtcgggctggggaattaccggaaacaaaggtcgctgctacgatttctggatggatttcagcgagtgcatgtctcgctgccgtgagcccaaggactgtgcttttctccgcgaagactacctcgagtgcctccaccattccaaggagtttcaacgacgaaaccgaatttacaaggaggagcagcgcaaactaagggctgcttccaggaaaggccaggaggatggggttaatgaacatcatcattagcacctgaagttaattttcaatttaagcttctgaacaattatttttgataaaacgtttgtgatttgcttggatcggtattcctgcatgttctgtgagcccatattttatactttgatgttgcgggcttgttttccctgtgcaataaattcagaaatcaacctggggctgcaaattacactataagtttgctgagtgaattttccttaaccactccctttcatttttcgaaaccctaatttctactcatatgcattcattcccctcgtttacgaaccctatcgattacgcgactttcacatcttgtctctttcattttacttagatcgacttttgtggttcagtgcattaatctgacggactgaagtttgtcctgtgtttgggatcttaaattatttgatgattcaatttactgtattgaaaggagacatctgtggaagtgtttaagctagagttgaatttgcaaattccctcttctgcttatatccacatcaaatgaagatgaatgtggcttctaagaacttctcaagaaggaaggaactggacttacacctcatttatttattgtgaaaaggaaagtcctaataataggtgaatggtaagtgattgaattggccactgttactgtaaaaagtaaaacttttcactatctggtggagttggtggggaatatcattctactacagcagcattaaagaaaaacaaaa

SEQ ID NO: 58844 - DNA, 216 bp, Glycine max
  Clone ID: PAT_MRT3847_24148C.1
acgacccgccgctctttgggaattgctctctcaattcttctcataaggctaatcctcctggcgagagtcaccaactacacgggcctttggtattcctattccctctactgctgatcgtcaaacatacttctttctcactcttctcttctatcccttattcttacttatattctttcattcataatccaactcactttatcttttctctactgtctt

SEQ ID NO: 58845 - DNA, 632 bp, Glycine max
  Clone ID: PAT_MRT3847_24149C.1
ctgcgagaagacgacagaagggggggtgtagaaacagcgaaagagaaagagagagagagagagagatggcgtcgggctggggaattaccggaaacaaaggtcgctgctacgatttctggatggatttcagcgagtgcatgtctcgctgccgtgagcccaaggactgtgcttttctccgcgaagactacctcgagtgcctccaccattccaaagagaatttggccatggattgtgaactttgaattacaactggactttcaatatttgatttgacttttcaacgacgaaaccggatttacaaggaggagcagcgcaaactaagggctgctaccaggaaaggccaggaggatggggttaatgaacatcatcattagaacctggagttaattttcaatctaagcttctgaacaattattttgataaaatgtttgtgatttgcttggatcggtattcctgcatgttctgtgagcccatattttatacttttgatgttgcgggcttcttttccctgtgcaataaattcagaagtcaacttaggactgcaaatttcactataagtttgctgagtgaatttggaaaatgtctttgagatgtaaacatgggttaaaaggattgaaattccctaaatgaaa

SEQ ID NO: 58846 - DNA, 208 bp, Glycine max
  Clone ID: PAT_MRT3847_2414C.1
attttcttaaaaagtgtcgtgagaagggtacctttgactggggagagcttagactctacaggtctttatatttatcctgatggcatccggcccattatctggttcgcgatggtgatcttcccctgatatagtaaacaacttacttggggctgactttgctgtatactatatcaaagcagactactctcagcgagcatgactcattaaa

SEQ ID NO: 58847 - DNA, 346 bp, Glycine max
  Clone ID: PAT_MRT3847_24150C.1
tagtgtggtaaatctagagcgtggttcatgaaaatgaaagataaaatacataccaatttgaggtttggactttggacaaaaaaatcagggtttatattttcaaaatagagctcgaacaaaaattgtaaagaaaaaacttaggtgaatcttattttaatcatttaaagaaaaaataaaatatagactttttaaccaacgagtttaactagttggttagttgagcaattaggtgaattatcattttatgtttccttatatttgtttgggtctgtttaggatgactaatattttattctttcaattggtttctaattaatgattattctaaaaaataaattttgtttta

SEQ ID NO: 58848 - DNA, 284 bp, Glycine max
  Clone ID: PAT_MRT3847_24151C.1
gagggaaaaaaacttacaggggggtttcacgggaaaaaaaaaaaaaccctactcctcacacgctatccatggaaacaccttcaaattacacaattggacatggatgaaaaaaaaaactattacattggtgggaatttggtttcttggaaaggaatttatataaaccctcatatcttatatttggaaggtttgagtattaaagtttatgggggtttttttgccttccctggcccccggggaattttggggagggaggtcttgttaaaccttttatagtttttctt

SEQ ID NO: 58849 - DNA, 484 bp, Glycine max
  Clone ID: PAT_MRT3847_24152C.1
ctggccataaagcaacgtattattcaattaaacaaaaaatctttctttactcaccctaagaaaaaaaaaaccccaaagggcattgctcgggggcattaaaaggggatacatactacggaattctaaaaaaagatctaacttaaagttacccccctttttttgggacccacacataaatggacccggcaattctttatttatgaaactaaatattcaagcaaaggcccggggcaaaaaagggggcctaaactattttcaaaaactggccttacattgggccagtctttactaagaagttctttttttctccattttcggcaggggtattgggggcacaactcagccattactttttatgggcataaacattggagggggtttcatcacttttaacagggggagtttctaattggccatcttcagtatcaggaggctgggcagcagcatcaatatcacgggaaggaaattctaaggggtcaccaag

SEQ ID NO: 58850 - DNA, 357 bp, Glycine max
  Clone ID: PAT_MRT3847_24153C.1
aaaaagcaaaaacaaacattttggaaggggggcgggggaccctgggttgggccattggggccaaagcaaagcaaaaaaagcccaacttttgggggaccccgccgggggtaattgaacaatggggggccaacacacattttattttttttggccaaagcaacaaggacaaaaacaaaacatgggggagctgggaggggcccaaaactaagctaaggggttggaagcatttcatccttaagaaaccttttcctcctaggggggcaagagggaaagattcaaaattggatttttttccttcacaaacaggccttaaaagagggggggggggaaaactgggccttcctacccggggtactt

SEQ ID NO: 58851 - DNA, 249 bp, Glycine max
  Clone ID: PAT_MRT3847_24154C.1
gtcctataaaaaatattcacaaccaccatagttagaatattgtcctaattggggtagttaacacaagtccctaatcattcttataatgcccatggatttagactctacacttgcttcataattgggtggttgttgttgttgaaaagtattgtatgtgtggtgcacagggcagagattaatataaagccatggcatattttgttgggagggttgaaagaagacactacgaggataccatggctgaacaga

SEQ ID NO: 58852 - DNA, 1865 bp, Glycine max
  Clone ID: PAT_MRT3847_24155C.1
tcctctcgtccgctaatttgatcattcggtaggtcttgtcttgtttcttcaccctctttctctttccaaccttaactttctctttcacacctgggatcagcattttcatttttctgtggcatgttggagcctagattcagtggtggggtccttctcctgtggcttctgtgtgggactttggttccaacaatggtggaatcagccataggggtcaactggggcaccatatcctcccacaggctgaagccaaccacagtggttgatctgctgagacaaaacaagatctctaaagtgaagctctttgaggcagactctgatgtgctcagggctctcatggggagtggcattcaggttatggttgggatccccaatgagatgcttcccttcttgagttcttcacctgctgcttctgatttgtgggttagacagaatgtttctgcttatgtggggagagggggtgctgatatcaggtatgttgcagttggaaatgagccattcctttcaagttataatggtcaatatcagaacttgatcatgcctgcaatactcaatcttcagcagtctttagtgaaagcaaatcttgctggttacattaaactagttgtcccctgcaatgcagatgcgtatgagtcatcacttccttcacaaggtgcattccggcctgaactgacccaaatcatgactcagctggttcagttcctcaactcaaacggtaccccgtttattgttaacatctaccccttccttagcctttataacaatggagatttcccccaagagtatgcgttctttgagggaactacccatgccgtccaagatggttccaatgtttacactaatgcatttgatggaaactatgacactttagttgcagccctcactaaacttggatatggtcagatgcctatagttattggagaaatcggttggccctcagatggagccattgatgcaaatatcactgctgcaaaggttttcaatcaaggccttatcaatcacattgcaagtaacaaagggacccctttgagaccaaatgctccacctatggatgtttatcttttcagtttgcttgatgaaggagctaagagcacacttccagggaactttgaaagacactgggggatattctcttttgatgggcaggctaagtatccgttaaaccttttacttggaaacaaggagttaaaaaatgcaagaaatgttgagtatcttccatctagatggtgtgtggcaaacccctctggtgatttgaacaatgtagtaaaccatatgagactagcatgtagtgttgcagactgcactacccttaactatgggggctcatgtaatgaaattggtgagaagggtaatatatcatatgcttttaatagttactatcagctacaaatgcaagattcacggagctgcaattttgatgggcttggtatggttactttcctagacccttcagttggcgattgtcgttttcttgtaggcgttacagataaaggctcagattcatctacgtctcaaacaacatatcagtggtggactctagtgttacttctgattttacatggggcttttttgctttcaatgtgacgtaagtttcataagtgggtttttcatggtcccctcttcttagactgttagaactagattagctgatatacctatttaacgtaagaaatattccaaagattcatggcttgtagcactgcatatgattaagtcattgtatcatatcagagacggtataaacactatcactgtgcattgaatattacacatttattttaaattttttctggtgatgcctatttaattattgaatgaatcagaatatagttttttagcttgcctccccaggaaggagagcagaatgc

SEQ ID NO: 58853 - DNA, 293 bp, Glycine max
  Clone ID: PAT_MRT3847_24156C.1
gaaccaagccattctccatccttcttttttgatttaaaaagaacataaccctcctggggtcatggtactatcaccgcaagaaagaagaacccacggaactaaaatgatttcaaatgacaacatcaccggaacgaggaacccagggaaataatggaaatagttcgctcttaacggacgtgctttattcttaacttcagcaacattagacactgtaaaatcaaaagtgagcaacatctgatacgttagtcgatgaagaacgcacagctcttcatacaacaatacttatcgaaaat

SEQ ID NO: 58854 - DNA, 631 bp, Glycine max
  Clone ID: PAT_MRT3847_24157C.1
agtccataacccaacctttttatatttgcatcactcataatgtacccctggttttccactgccaataggtaaatcataaacacaactatgttctttggtctaagttaaccattcaatatatgttaaacttgacagatctgaagtcattaaggcagaaatcacaaggggaaaagcaaaaactcataactgaagaaatcataacaaaacttccaaggtaacatggactcattgtaggactcctcccacactcctttccacctcttttccaaagcttaaataaataaagaaaataggagacatctacctattcttgccgccttccagaagaaaccacgaaacctgtcaggaaagcatatatgtcatgccatcaagtctgttcagcaagtttaaaaaatctgttacagagaatgaaaacactaatgcaaaaaatacaacagttaaaaaaagaacataaatagggcaaaaccttatgatacatagaattttgaacaaataatattcaaatgttcatatgatcaatcacttgaaaagaaaaaatgaaaggtacgggaaaagaatgaaggcttgaaataggattttccctcccctctggttggatgtttaaaaataatttggaggggggaacttgcac

SEQ ID NO: 58855 - DNA, 456 bp, Glycine max
  Clone ID: PAT_MRT3847_24158C.1
tttagctccgagtccgacctcttgctcattatgttcattatgtttgttaattacgtatataacctctctctttctcatttgagattgtattgatatacttacaataaataattctgttatctattaaaaaaaaaaaaaaaaaaaaaaaaaaaaaaaaaaaaaaaaagatggaaaatataaaaaaataacaaaataaaaaaagaggcccgcacaagatagaccttgcctacagtgagccacaactgacatggccaatgggacgcacctttgaagcggagttattaagcacgggggggtctttttaaaacgcccaagtttaccgccccatttcgccacccacctaattttctttaggggcaaataattttcattccttgcccgctttttaacaagggtaacgctgaaaagccactgggtctccccctctatatacgcctcttaaacagtgctttttgg

SEQ ID NO: 58856 - DNA, 328 bp, Glycine max
  Clone ID: PAT_MRT3847_24159C.1
ttgcccttgcgtccggaggggcggggggtgtatatctcacttggagaaaaagaagagcctccgttgggactccgatccggaatggtagtggagccattgctgtgcctgggaaacgcgaaccaaggcagacggtgaactgcgaatctaagaacgtgctcacaagaggcaaaactgcccgggacgatgaaaaacacaaggaatatagagaggaggttatcaagaaccatgcagataacggaggagaacctgacaagactagaggagctaggtcaagcctatgaagggatgagagaacctgaaatgaaagaacagtcagaccagcggggtg

SEQ ID NO: 58857 - DNA, 490 bp, Glycine max
  Clone ID: PAT_MRT3847_2415C.1
atttacttgaaaagagtgacttcagggtcaattttaagttgttgactatgagttgttgtaatttatttaaaacaaacaccacaattgtctcttcacacaaagcaacatttcaaacagtgaggaaaacttggtctcattcacagaccccatcagaaagtcaaaataaatcacacaaaagaccttccaacccagtcaaaatctggaaacttgggctaaaaacaaataactcaaccaagaaatttagagaagaaaagcatagagatccatcaataactggggaaatttcaactcctatcataaaaataaatacccagcaaattctaacccatcttgtactcatgattaaatcagaaagtataattttttctctcccctcctatgcatatcttatagagacagaatgtgtatgtgggcatgaatgaaagttagatttttataatccaaatcagataaataattaggcacattacactgtggattaatgggtctt

SEQ ID NO: 58858 - DNA, 455 bp, Glycine max
  Clone ID: PAT_MRT3847_24160C.1
tccacgcgtccgattacagccaactgggatgacattgatattccaccaaaaagtgctgatgaagcaagagacctttgggaggtattgtatttggattcattcaatcttttgtttcgtaattgcttgcatgctttgtaactttgttttcatcacaattttgttggatacttgtgctataacttaaggtgtctgctaatgcatgtagcacaagacattgatgagacccttcgtggataaattgactgccacagtacatccacatgggtgtaaaatgtacgtgctgaagccagtggcttgagcacgtacattttacacccttcgtggataaattgactgccacagtagatccacatgggtgtaaaatgtacgtgctgaatccagtggcttgagttttctgaaacaaatttttggattgcagcttttggagtcactgatgtcaatatttgtttttcttg

SEQ ID NO: 58859 - DNA, 859 bp, Glycine max
  Clone ID: PAT_MRT3847_24161C.1
aaaaaactaaggtttctacctttctacgatgagagacatgaaagacgcaggtgccttgggaggcaagacagcaagagcctgcgacagctgcgtaagcagaagagcaaggtggttctgtgcagctgatgatgctttcctctgccatggctgcgacactttggttcattccgcgaaccagttagcaagcaggcacgaaagggttcggcttcaaactgcttcctcaaaagtaaccaccacgcacgcatggcacagtggattcacacgcaaggcaagaaccccgcgtcacaacagcaagcactttgcgctgcaacagcgtctcaaagacgaagttctcttcaacaagaaccggtggttgtggataacgatgagacggaggaacagatgctgtgtcgcgtgcccgtgttcgacccttttgatgtgagaaccgatgacttggatagcttttctgacatggatttttctgagtttgctgctgatgttgaaggccggcttgacaaagaagacgatgaaataagtgcgtatgtgggaggaggagagggagttcaaggtgtattggccaaggttaagggcgaagaagaaattgatggtgatgtagcgtgttatctggagtcagtttttgacatgatcagtgatgatgcctttcattggaataatattgagtctgtggtgtcagatgccccggaagagaaagggtgtgtggtgccatgtgaaggtggggttagggaacaaggaggaataaagggagacatatttttgagactaaactattaatgagggtattactgcttggtctaagcaaggttctttcccatggacaactttaaacccaccttaagttaactttgattatgactttttc

SEQ ID NO: 58860 - DNA, 1515 bp, Glycine max
  Clone ID: PAT_MRT3847_24162C.1
aaacgaaaagccattgttacaagcatttcacacttaacatatcaaaaaaacaaaggtttctactttctacgatgagagacatgaaagacgcaggtgccttgggaggcaagacagcaagagcctgcgacagctgcgtaagcagaagagcaaggtggttctgtgcagctgatgatgctttcctctgccatggctgcgacactttggttcattccgcgaaccagttagcaagcaggcacgaaagggttcggcttcaaactgcttcctcaaaagtaaccaccacgcacgcatggcacagtggattcacacgcaaggcaagaaccccgcgtcacaacagcaagcactttgcgctgcaacagcgtctcaaagacgaagttctcttcaacaacaccagtgttcttcccctcgtgccggagctcggaggggaagaacaagaaccggtggttgtggataacgatgagacggaggagcagatgctgtgtcgggtgcccgtgttcgacccttttgatgtgagaaccgatgacttggatagtttttctgacatggatttcgctgagtttgctgctgatgttgaaagcctacttgagaaagaagacgatgaaataagtgcgtatgtgggaaggggaggggggaagaagaaattgatggtgatgtagcgtgttatcgttaaggatgaagaagaaattgatggtgatgtagcgtgttatctggaatcggtttttgatgatgcctttcattggaataacattgagtctgtgctgtcagatgcacgggaagagaaggagggtgtggtggcgtgtgatgtaggtgtcggtgatgaagaaggaggaacaaagagagacatatttttgagactaaactatgatgaggttattactgcttggtctagccaaggttcttctccatggacaacttcaaacccacctaagttcaactctgattatgacttctccttgggtttgagtggtgtaggtggggaagtaagaagcttaagagggcacctagatggtggaagagaagcaagagtgtcaaggtatagagagaagagaaggactcgtttgtttgcaaagaagataagatatgaagtaaggaagttgaacgcagagaaaaggcctagaatgaaaggtcgttttgtgaagaggacatgctttgttggagccaatgcttttcctgcttaccactgacatcaatcaattaacggatccatctttgctttttctgcaaatttgggttaatacttggtttggctatatatatgtacgtatatatagcctgtattatataaatactagtaaataatattactgggccaggttaattttactagaattgttgcttgggatatttctgtctatatatatctctagacaggtttagtaattagtactaattaatgatcatctttattggcaggtttaagccttttggaatcccttttcattgtttcttattagaaattcaattgttcaatgctgatgctgttatttgctagccagttgatatttcacgctgctgatt

SEQ ID NO: 58861 - DNA, 319 bp, Glycine max
  Clone ID: PAT_MRT3847_24163C.1
aggaagagatctaaatattttttaattttacattatattgtatcctatggaaaggaaatgcataatttagttacttctaaaagattagacaaagaaaaggtatagaaagttatgttttggctccagaatgtaacagagggtgtgtttttgtgctaggatatacatcattctgcctcctgtggagttggctctgatgatcaacacttacattagtcataaagagatggaatctgcttcaattggacaattttattcctctaactggatatacatttcataaccgaacggacataaaaaagtttcatcaattcatttaatt

SEQ ID NO: 58862 - DNA, 2477 bp, Glycine max
  Clone ID: PAT_MRT3847_24164C.1
tccggattcccgggtcgacccacgcgtccggaattactagattgagacgttactttaccaaagctagctcgagtcaacaattgttgactagttgtcgattgtggtctgagttcgcggtttcagtgaaagaaagatgcccgctctgttggacctctgattctgattccccatgttagggttttaagggatccaatttcagcttccactttcccatggaattgaaaaagggcaagcttgccaggttctacacggatggtaaaaagcataaggaatcgctttggggagcaagagcaactgagcctccatcacttattcctatcaatttacttcaagtatggaatattagaaaatgcagtaaagaaacattttgtatcgtcaaactttatcccaaagtacctttattgtttatggtggggagtgcgtcgattaagttcttatgggcagtatctagaagctgccccgtttgttggaccaacgtcatttgctattctcattgccatcttgggtcttgtattttcttcccatttaattgcgtacatgcaggtatgtacgtatatgttcggttcagtctacgttcaattagtctctaagttatcaagaaggtcaaatataaaacttcatttcttacaaagtttaggtgcagtctacagactgacaattttcttgatttggtggaactttttccatgttggttttctaacaaaggctctatataagtcctgccatggcgtaaaagaatacttgacccgggttgcaagattatatttaactgtatccttgagtcttcaaatagtcatgcctaggggcctttttatgtggtctgctgggcccttagctgcctagtgtgtgctgttgtatacgtgtagacttatttgcaatcaattactataaggcttgaggagtggaggcttaagcgaagagacacagaggagtggatgaggcatcgccaactccctgaagatttgagaagtcgtgttagacgatttgttcaatataaatggcttgctactcgtggagttgatgaggaaaccattctacgtgccttacctgctgatcttcgccgtgatatacagcggcatttgtgcttagaccttgttagaagagttcccttcttctcacagatggatgatcagcttctggatgcaatatgtgagcggctggtatcgtctctgagcactcaaggcacctacattgttcgtgagggtgacccggtgactgaaatgctttttatcattagaggtagactggatagttctactacaaatggcggccgtagtggtttcttcaactcaatcatattgagacctggagatttttgtggggaggaacttctttcttgggctttactccccaaatccaccattaatttgccttcttcaactaggacagttaaagccctaagtgaggttgaagcttttgctcttcgggccgaagacctcaagtttgttgctaatcaatttaggcgccttcacagtaagaagctgcagcacacttttcgattttattcccaccattggaggacttgggcagcttgctttatacaggctgcttggcgccgatataagaaaaggatgactatgaaagacctcagtttgagggaaaccattcctttagacgaagcagtagctggtgagagaaaacatggggactattctgctggttcaaattcaactcagactaaattgaaccttggggctacaattcttgcttcgagatttgctgctaacacacgaagaggggctctgaagatgaaagatgacatgccccagttacagaagcctgaagaacctgacttttccactgaagctgacgatgattagttacacttattcagtggcatttggttttcaaattcggttgggtcctgcattctatttcagtatggataatgattctgcaggtcacaaaaatcctgcgtaaccctctgcctgccgtatgacccttgctggtagggttgtcgatgtattttaattagtaagatacaaagggggaaatataaggttatgccagggaatggtgatggtgggttttttattgctcagttgtgtatactcatatttattgcaattttcatcagagtaagttgattactattctacaaagtatgcatcagaccctattagatggccccaatcttataaaagggtggaaaatgggggcaatgtgagaatcgttgtttttgttgcattattaatgctactcagtccttaaattcgagttgacattggagttccttgttcggtgggaacctacattctatttcagtatggataatgattctgcaggtccatcctgcgtaaccctctgccatatgacccttgctggtggggttgttgatgtattttaatgagtaagatacaaagggagaaatataaggtcatgcccagggaatggtggtgggttgtgttgcttcagttgtgtatactctgacaaatatttattgcaattttcatgagttagttcattactattctgcc

SEQ ID NO: 58863 - DNA, 344 bp, Glycine max
  Clone ID: PAT_MRT3847_24165C.1
gcaccgacccggaacggaccgggacgtcccacgcagacgcttgctcgcaagaagacgacagaagggggacgccgcagcagcagagcaaaaaaccccacaaaggcggaagagagagcgagcaagcaacagacaccaccgaccacgaccaaacaagcgccggaaaggaggacgcaacaaacacggccgaggccacgccaaaaccacccggagctccaaccgaggcaaacgcaacgcccaaggacaaggcccacaaaaggcccccggggaggaaacaacgccgaacaggcagcaaccaaagaaatgcaagaagcccggacacaaaaacaaaacaggaaccccgaaaa

SEQ ID NO: 58864 - DNA, 413 bp, Glycine max
  Clone ID: PAT_MRT3847_24166C.1
cccacgcgtccggttgcgatcaaattcaacccgtgtcgaaattacaggactaccatgcacacagcctcttaataagcctataccacactgcctcttctataagatctcaacatatatagaaaaaattatgtttcactcaatcaaaacggttttaacctgtccacaagtttcattccctgcacggtctctctcttccaaccttggtcgggaaacttgcgcagttagattctgcactgacagtgctcgtaagatggacaagactcagaagcctagtactgaggaaaataaacaaggagatacgatgtctcattcatttggggaagggtacgctacgaggtctgatgaagaagggtttggtggagtttatggtggaaaccaatcgaagcctgagatggacccagcttatgacaaga

SEQ ID NO: 58865 - DNA, 449 bp, Glycine max
  Clone ID: PAT_MRT3847_24167C.1
cccacgcgtccgcccacgcgtccggaaccacttggagtaacataactcctaacactggaaactttgctgtttctgaatcttcatttcacttttcattcagtaccatgtctcctttgcatgtaagagataccaagacaaatgattctgtatctgatgatgcttttccaaactgtattgggaatgatatggcaagttcaggatcagcatcatctgagaatgacaagatgaattcttcgaaggggaggaatttctcgttcatcaacagcaaagtttccagtgttaggagttatgttactccaagtggttctgaatctgatcaattggaatctaaagacagctctgggccacctttatcatctttctcccctcaatcctccagtgttgacaaaaattcagtttgtgcagatgctttgaacttccatatcttgcaatcaactggctctaatgta

SEQ ID NO: 58866 - DNA, 320 bp, Glycine max
  unsure (1)..(320): unsure at all n locations
  Clone ID: PAT_MRT3847_24168C.1
cctccccgcaaggaagcaccaccggaagcgacggagggggacccgaaggcatcgcccaccgacccagaaccagcaagaaaaacaacggcnggacgaaacccaaaggggagcaagacaacagaggcgagcccacgaagcagcacgcacgaaacccaagcccagggggagcacacccggccaanagcccaagaccaaacggagccccacgaaagngggcacaccgcggagcaggccacccaaaacaagaagcaggacagcggaaagcaccacgacaagcccaccccccacgagaggaaaagaaacgccaangccacaaagac

SEQ ID NO: 58867 - DNA, 558 bp, Glycine max
  Clone ID: PAT_MRT3847_24169C.1
atcctggttgcgtttgggatgcaaaatttatggaaaatggtgatattgtgacagcatgttcagatggagtagtacgcatttggaccatagatcaggataatgttgctgaccagctagagcttgagttatacacttcgctactttctgaatacaaatctagtagaaagagggttggaggattgaaactggaagagttaccaggcttggaggcactgaagatcccaggaactactgatggccagacaaaagtagtcagagagggggataatggggtggcatatggatggaacatgaaagaacaaaagtgggataaaattggtgaagtagttgatggaccagaggaatcaaatcgccaattttttgatggtattcagtatgattatgtgtttgatgtggatattggagatggtatgcctacccgtaagacaatcgatcaatatgatggctgaattcagttcgaaaaaatactgacaacaatacttttgatgcttatctatgcgtataagttgccatacaatcgatcagataatccatatgatgttgctgataaatggctac

SEQ ID NO: 58868 - DNA, 556 bp, Glycine max
  unsure (1)..(556): unsure at all n locations
  Clone ID: PAT_MRT3847_2416C.1
ctgatgcgcccttgtcagagcagacactaactcaagcttgggctacagccagagccgcgtgtgggtcaaggagcgggatttgagaattgagaaagattctcaatcctcttcctcaattcaattcaagctgtgtgaacatgaaattgaaacttggacaagaaaaattcaattaaaattccccccaaattaccgtgcatgtgtcgtcgcctggacccaaatcactctctctctctctgagcataatattagggtttaacaaggagttttcttcactctggcaataacactcacaacacagcgatgtcattttcgttgttcgccactccgcagcaacagcaaccgcagcagcagtctccttttcagccacagcaaactagtttgttcctttcgcagcagcagcaacaatttcaacaacagcaacaacaacaacaacagcaacaacaacaacaacagcaacaattttttccacacgcacatcaacatcagcccccacaccanttgtttttgtttacttaccatagaaccccccctcgttttttttcccattgggcgggtc

SEQ ID NO: 58869 - DNA, 171 bp, Glycine max
  Clone ID: PAT_MRT3847_24170C.1
ccttgctctatactacacagtacacacactagaagaataatggcatccatcctccactactttatagaccactctctttcttgctctaatcatatcttcttatccgtatcagtcagtcctataaaaccagtaaaccttgtagatctacacgatcataatgatggttccaca

SEQ ID NO: 58870 - DNA, 230 bp, Glycine max
  Clone ID: PAT_MRT3847_24171C.1
tttgttttttttttttttttttttttttttttttttatttttttttttttgcgttttagagagagattgatcatattccataagaagaagaagacgaggctgtgcacatggagaagatgagactcggggtgatgaagcgcccagaggagacggagtacgtgaagaaagtgtacgggggatagcctggagaagtcgtgagaatgctggccgaagaaggagagacatgggac

SEQ ID NO: 58871 - DNA, 1311 bp, Glycine max
  unsure (1)..(1311): unsure at all n locations
  Clone ID: PAT_MRT3847_24172C.1
aattcggctcgagctagagatcgaccattagcactctaatggctccaacaaatgtcacatgcttcagagaagaaaatgaatccgagaaaggggaggaaataacaatagaagaagacaagctaagtcaagaatgtaaggagttgatactctctcttcctagggagagaggttggagaacacgttatatatatctatttcaaggattttggtgccagccattggaaatccaagcaataatcacttttcagaagcacttccaagctaaagacagtgatgttattgtggccacaattccaaaatcaggtaccacttggctgaaagctctcacctttgccattgtcaatcgccatactcatagtatcactacatcaatgtcatcacatcctttgcttacttctaatcctcatgaacttgtgcctttcatagaatacaccgtttatggtaatgcccctagccatgttccaaacctatccaacatgactgagccaagactttttggtacacatattccattccatgcattggccaagtccatcaaggagtccaatagtagaataatttatatatgtaggaacccacttgacacttttgtgtctacttggattttcctcaacaaaattaagccagaacatttacctgaatttgaactaggggaagcttttgaaaagtattgcaaaggaataatagggtttggtccaacttgggaccaaatgttgggttattggaaggagagtatagctaggcctagtaaggttttgttcttgaagtacgaggatcttaaaaaagatgtcaattttcatgtgaaaagaatagcggagttcttaggatgtcctttcacttcggaggaagaaggtgatgggactattgagagcataatcaagctatgcagcttcgagaagatgaaggaattggaggcaaataaatctggaacatttgctaggaactttgagagaaagtacttgttccgaaaggctgaaatgggagattgggtgaactacctttcccctgaaatgggtgaaaagttatcgcaaattatggaagaaaagttaagtgggtcaggcttgtcattttaagtgtctccttatttttgttgatcgatcactagctagtgatcatcatctacatcaagtgtctaaataagaatcgtgcatatatgcaggtcatgatgtggcctacaagtgcatgttcgttgtgattttcccttttcccgtttggatgatttttcctactagtgcattgaaggtctcagtaaagttatttctatcatgcgtgttttgtgtgtaattaattaagtgactcatttgcttgtnt

SEQ ID NO: 58872 - DNA, 1324 bp, Glycine max
  Clone ID: PAT_MRT3847_24173C.1
caaatccggagggatcaacgaaaaggttcttcttggtgttaccattccagtttgtgtcttatttattgggatgattggtgttggaatcctactttgccggtggcccccaaaaaagcatcttgatgaagaatccaaaagcattgaaaaaagtgatcagcctattagcatggtgtggggaaaagatggaaaattcacattttctgatcttgttaaggccaccgatgacttcaatgacaagtactgcaccggaaaaggaggatttggaagtgtctatagagcacaattactcacaggccaagttgttgctgttaaaaggctcaatatatcagactctgatgacattccagcagtgaaccgccagagctttcagaatgagataagatttcttacaggattgaggcaccagaatataataaagctttatgggttctgttctaggagaggacaaatgttcttcgtttatgaacatgtagacaaaggaggtttgggggaagtattgtatggagaggaaggaaaattggaactaagttggactgcaaggcttaaaattgtgcagggaatagcacatgcaatttcatacctgcacactgactgctccccaccaattgttcacagggatataacattgaataacatactactagactccgactttgaacctcgtcttgcagatttcggcacggcaaagctgctaagctccaacacttcaacatggacctcggttgctggatcctatggctatgtggctccagaactagcacaaacaatgagggtgactgacaagtgtgacgtgtatagttttggagtggtggtattggagatattcatgggaaagcatcccggagaactcttgactacaatgtcttcaaacaagtatttgacatcaatggaggaacctcagatgctactgaaggatgtgcttgaccaacggcttccacctccgactggccaattagcagaagcagtagtgttgacagtgaccatagctttggcatgcacgcgtgcggctccagagtccagacccatgatgcgtgctgtggcacaagaactttcggctactacgcaggctactcttgcagagccatttggcacgattaccataagcaagcttactgggtttcagaaatagcatatagtgtagtactgtgatttctgtgctgaatgtcgtcgtgtaatccatgttgctgaacttacctagtgggataaaactttgttgtagtacacaaatatgttaatctgtagtacaattatatttgaagttgacatttaaaattacaataaaggaaaggtttggtgattggagcaaaaattctgtatgatctgc

SEQ ID NO: 58873 - DNA, 723 bp, Glycine max
  Clone ID: PAT_MRT3847_24174C.1
aggctgtgctgttttgacaggttgtcacattgggcatttctcccacatggtactggaaatgcaacgatcaaatcctttgtcggttcatcaggtttctggaaaactggagctcgaaaaagctctcattgagctcttcaccaatgcaacacttctggaagcacgccgtagagccgctaaggaagcgttttgtcagttgtcctgtggcattgttgaaaatatttggagtttgctaaattttcatattttttgtaggttgtctgcagatgaatccaagagttttagactatgagaaatgaagtttcacattgtcacaacaaattttcgttcagactcgaaccatttattggattcatttaccccgcgatagaagcacacccatatttataaccccatttcacagtaatgatggtttgatgttattattttaacagcatgccatcaatctactcgttagctttctaatattctcggatattacctaacatcaaaagcttgaagagtgtagatgccagatgcttcttttattcaagtgttgttacaaacttttactttggtttggactttggcaaatgtgtttcaaatcgttgagtagctcatgaacaatcatctcctggccatacaataggctcttgtaggtggctttgaatattgtgattcgtactatagagttgctatttgcataatcatatagcatctcataatctatttcgtggtgggtacatt

SEQ ID NO: 58874 - DNA, 398 bp, Glycine max
  Clone ID: PAT_MRT3847_24175C.1
gagtggaaagcaaaattggatttacctttggacaaaacctgggcggccatttacccctacttacttgggcttccatggccttcggtcaaaccaaggggagaaggttaccattcccaggcaaattatttcatttaccattaattttctaccggggacctcgtggttattggtcaattgccagggggggaagggggccgggttcttattcccttacttggacaaattggaccacggggggcaccgctttttcaacaacctttaagggtaaaaaaacccacccaagcctgtctaattggggccttttcccgggctggttttgataaaataatagccgtggaagtcctaccaataggggaggcctgcttggcctcttctgtttcagcaggggcttggggggt

SEQ ID NO: 58875 - DNA, 528 bp, Glycine max
  Clone ID: PAT_MRT3847_24176C.1
aattcggcaccagcagcctctctcattcagtcatggttcgtacccttggatcaatcccaatgccaagtctacttctcaggattcagtcactactagtgcaatgcttactaacaccatgttactggtgcttctcagaatattcatcaggcattttgatggtccggatcaaattttcattggcaatagccaaggtttgcatattaagggatctagttgttctttctttaagtctcctcttaattctaagttttcatttgtccttaagaatttgcttcatgtgccttccattaccaaaaatcttttaagtgttagtcagtttgctagggataattctgtctattttgaatttcatccttacacttttgttgttaaatctcaggcgacacatggacctcttattcagggtactattggtgctaatggtctccattccttcactcatgtcaatcttcatccttcatctgcattgctgtcgagttccagctcaatatcacctagtagtttgtcaaataagtctttgacatcatc

SEQ ID NO: 58876 - DNA, 298 bp, Glycine max
  Clone ID: PAT_MRT3847_24177C.1
ggttaaccgttttaattatttttttttttgtttggaagggcagggggggtttcttccaattttgatcaaccctgtgtaaaggccaaaagttctttttggtccttaaaaacttgggcggaaatatcttcccaccgcatggtttgtttttactaaaaaaattaaaaatttttttgcccaatgccacacctttttttaactggggaattaaatttaaattttttaccttcaaacctggaatcaaagattaatgggagctgtttctttttttcaaagctttaaattcccccccttcggatta

SEQ ID NO: 58877 - DNA, 432 bp, Glycine max
  unsure (1)..(432): unsure at all n locations
  Clone ID: PAT_MRT3847_24178C.1
ggnnnnttnntgtggaagcattttgcgtgcactcttctccatgtaagaagacgannaaagnncttttacatacacacaggaatgtatgcatgcatacatgaatgtaggcatgtaactgtgatcatgggataataaacaccaactgcaaggaagaatatgctccagtacttcctttggattctatactagtactattactaactactctgctccatgagaaggcaagtcattctgagctctattcatgtttggtttttcgcaagtgacaacaatctcatcaccttggaactctttaaagtgtgctactaggcccaactcataaacttcaaccataacatgatccagtttagccaccatctctacaagcaaagaagtgaaagcagcaaagggtaatgcttctgagaactcaaggctaatgattgcactcctcgt

SEQ ID NO: 58878 - DNA, 463 bp, Glycine max
  unsure (1)..(463): unsure at all n locations
  Clone ID: PAT_MRT3847_24179C.1
gctcggaatcggtcgggccactcggcgagtcggaagcgctgccctcttgacctttccaaagaacagaagaactctctctttcccaaaaactggcctctcggatacggcggcgacgacgaagacgaagacgagctcgccgagtcgttccgcttcgactcggcgtgttcgaccgagtcgaacgagttggcactcttttccctgcgcaagtttgcgcgcgaactggagatgctgggtttaaagatcgttgatgggttaacaaaggacttggggtgtgagaatncgcttggggatgacccgaaccggttctgttcggttctgtgggtttcggagtctctgtccgggaacaaatcgggtgggttttacccgtttgtaatcggattgcagtaccagataaggaatcagaaatactcattgctgtcggattcgggatgggtttctgtgctgccacacgtggactcgattt

SEQ ID NO: 58879 - DNA, 973 bp, Glycine max
  unsure (1)..(973): unsure at all n locations
  Clone ID: PAT_MRT3847_2417C.1
gcagagagacaaagaaaagaagcactttactcaattcaatttctttcgttcctctcactcacaaactcaaacacaacatgatgtgggaatgggacgattaccaagacaccatccccaaacacgacctaccccaacccgattcccacctcaaattcgatttcttctccgccctctccaggcccaaggattattacaagatactggaagtggattacgacgccacggatgacgctattcgctccaattacattcgcctcgcgctgaagtggcacccggacaagcacaaagaccagaactctgctacctcgcgattccaagacataaacgaagcttatcaggttttgagtgatccagtcaaaaggagggaatatgacataaatgggatgcgttacgaatatgattacaatataattgattatctcaaccgttacaagggccttatattgacgtgcaatggccttggcataaagcattcgatatggtaaaaaacaaaaccaacatcagacatccttccagtgcatctgggacagttttttttaagtacctgtcactgcaagccatgcttattaatgaagatatctgattatgatgtcctagagagagtttcatgtttttgtataaaaaaaggacaaaatgggacttgtacctcttgtaacgtcgaatgctctcgcctcccatgccttctttcatatttgtgtttatatcatccttccctgctattttataaaaaaaaaaaaaaaaaaaaaaaaaaaaaaaaaaaaaaaaaaaaaaaaaaaaaaaaaaaaaaaaaaaaaaaaaaaaaaaaaaaaaaaaaaaaaaaaaaaaaaaaaaaaaaaaaaaaaaaaaaaaaaaaaaaaaaaaaaattaaaaaaaanaaaaaaaaaaaaaagggggggcccctttaaaaaaaccaatttttaaacccgggggttggaacaattttctttttttttaggggcccctaaataaattt

SEQ ID NO: 58880 - DNA, 256 bp, Glycine max
  Clone ID: PAT_MRT3847_24180C.1
cttggaaactcttcaatgaagccccttctttggttgaagaaggtgtggttgtatttgtcacccagcaaactgctttggtggtacggctgagccctacgttgcaagtttatgctcagctctctaggccagatggagttcgggaggcttccatgccagagactgcatggaaatacatgacacaaatatgtagttctactgaaaatatgtctgcagaagctgttgaaagagtttcattgcttgcaattgcttgggaacg

SEQ ID NO: 58881 - DNA, 417 bp, Glycine max
  Clone ID: PAT_MRT3847_24181C.1
agaagaaaataaaaccgtactctgatccaaccttttttctcccttctttcttcataatattaaggaatccacacgtgaacaatgtgtggatgatcatttggtgctgagaaagaagggatatatagcagaagaacactagagtccattcttttttgaggaataaataattagttattcataacaggttctgttagacggttacaaaaagttattattccgttaacagttaatcagttatgtcgaaaaaggtaattcttccgacggtggcgtctcaccggcgacagccactgctgctgcagcagagcgagagctaccggaaggcggggacgcggctcatgggggaggcggtgggcggcatctccaccgtgtgctgctgcatctcgttcggtctggacaacattatttacctggcgattt

SEQ ID NO: 58882 - DNA, 314 bp, Glycine max
  unsure (1)..(314): unsure at all n locations
  Clone ID: PAT_MRT3847_24182C.1
gcatgcacgcgtacgtaagctcggaattcggctcganctcgagccgattcggctcgagtacggctgcgagaagacgacagaangnnannnaaanaaaannnaaaanaaaaggggcnnangattagngnnctcgtggcccggggntttnntccgggangggnnccgggnggggtcccggtttncccaannnngnnccnttttngnnttnggggaaancnngggnannnnnnttncctgngngaatttntttncngntnannttnccnnnnanntnnnnnnnnngangnnngnnnncaacatgatnanggnagngc

SEQ ID NO: 58883 - DNA, 143 bp, Glycine max
  Clone ID: PAT_MRT3847_24183C.1
gggccggtagcgcctgctttattttaatttcatcaagctattttaaaacaagacttgggaagaatcattaacctcacaccaaaatttttccataccatggaattctaacttacagaaaattttattttggaactttgtataag

SEQ ID NO: 58884 - DNA, 278 bp, Glycine max
  Clone ID: PAT_MRT3847_24184C.1
ggctcgagctcgagccgctgatgaagggattgaggtaaaaaggcaagctaagttttttttgttcatttaaaggcaaggtaagttgaaaccgtggaataattttgaaaaacatactatacattatactccctagacgattagacactccttaattagtggactcgtcaatttatttagtggtcttcgaaccagaattagtggtcaatttatctacacgcgtgttcgcaactcttgtttatttatagttgaaatatgattttggctttggcaagtctttt

SEQ ID NO: 58885 - DNA, 954 bp, Glycine max
  unsure (1)..(954): unsure at all n locations
  Clone ID: PAT_MRT3847_24185C.1
tcttgctctagtgtatctgattaacacaacttgtgcattctttcttcttaatgctatttttttaatctcttactacctttgaatatattatatgaaatgaaatgaaattgtgatttaatgaaaaagtatcaccttaggaatattgctttttggaggaaataaaaaattgtgtccacttttcaagaagatttgacagagatatggatgtcatgtgagtgtttatccaaaatgtgctgcatgttcctttggtttgtgtaacaaagtcggtgctgtgcctctgtgattatctgcagctacaagtgtgcttaagctgatactcttcaactggagaacattcataagtgagcgaggttaatggatcttgaatccagcaagtgttgggacacctcaaagggctcttggaagactattctgctcttggcctaccaaagccttggtgttgtatatggggacttgagcatttctccattgtatgtttacacaagcacatttgctgaagatattgagcattcagagaccaatgaagagatttttggtgccctttcttttgtcttctggactctgacactggtgccactcttcaagtacgtttttgtggttcttcgagctgatgataatggagagggaggtacttttgctctatattccttgatttgtaggcatgctaaagttagtctcctaccaaatcgacaacacgcggatgaagcgctttctacatataacacggacgacgctccacacaaagatacttctaaagtgaacatgatgcttgagaaatatgagggcttgcgcacagctctcctaattgtggttcttcttggcacttgtatggtaataggggatgggctacttaccccanctatttctggtttctcggcaggatctgggcttgaaggatctatgtccaagaaacaccaccagtatgctgggattcccatcacttgcttcatactg

SEQ ID NO: 58886 - DNA, 272 bp, Glycine max
  Clone ID: PAT_MRT3847_24186C.1
cgacattcccaaagacgttcagcagcaactcgccgtgcctaattgggacgagcccgttaacctccccggttacctcgccaggctgcccaggccccccgccgaggcccaattggaacacattgtcagactcatcatggaggcccaaaagcccgttctctacgtcggcggtggcagtttgaattccagtgctgaattgaggcgctttgttgaactcactggtattcccgttgctagcactttaatgggtcttggaacttttcctattggtgatg

SEQ ID NO: 58887 - DNA, 423 bp, Glycine max
  Clone ID: PAT_MRT3847_24187C.1
ggtccggaattcccgcgtcgaccacgcgtccggccatactctgttgcacctgatggcctgcgcatgctctatggacctgattcagacgtgtggagcgctggggatattctgtacatctcattaagcggggcgtccaccattgtgggctgaatctgaccagtgatctgacgacagattttactaggaaaacttgattttcaatttgagccttgctctaacatttcagacattgccaaggatctaatccggaaaatgcttgatcaaaatgactatacatggcttacatcacatgaaggactccgcctcccatggattgatgacgacaacattgcacctgataaacctcttgattctgcaagggtatcacgggtggaacaatcacactgcatgcataaaaagagaaagatggcgttgaaggatatt

SEQ ID NO: 58888 - DNA, 297 bp, Glycine max
  Clone ID: PAT_MRT3847_24188C.1
ataagaacgggtgggattttgattacacccggtgggttggtttggattcaattaatcactggaattttctaaacttggaccaaagacaaaacccaacccttggttaattaatggaaccaaaccccccccagcttttccccaaaaggttaaataaataaccgggggaaccattaaacccccattttccaaaccaacccttcgaacgtacccccgccgtttgggtcgccgccgccaaatcggatcatggcgttgatgtcgttggccgggggccgaaaaaccagcgcaggccatgtaagt

SEQ ID NO: 58889 - DNA, 422 bp, Glycine max
  unsure (1)..(422): unsure at all n locations
  Clone ID: PAT_MRT3847_24189C.1
gaggtaggnngtgnacgnncgtngggacggtgtgngnnnnntcangngccgcggtgngcgcgagcnnantgtgngagngcncgantgtggcgagngnggagngngngngcgtnagnnntnnngcantggngtgngagggtggtnnnntgnnnntcgngccgtaganttgggttatntgcgganngntggantggngtggcatgtannggntgtgcngtgncatgnangtccggantggcngcaggcnangnncgtggttgngcnggtcngttcngcgnnntgttnggntgcacannnccnnnanctcattgtgngataggccatgangnctatgngggntgctcntggccaagaatngtttnnggntcntcangngcgcatacttnngnnntgnggccttnagnanncnctncangnggnng

SEQ ID NO: 58890 - DNA, 199 bp, Glycine max
  Clone ID: PAT_MRT3847_2418C.1
cgatgcctttattgtcctccctggaggatatggaacccttgaagaattgctggaagtcattacatgggcgcagcttgggatccacagcaaacccgcgggcctgttgaatgcggatggatgttacaattccttgctgccgctcattgacaaagccgttgatgaaggctctatatcccctacggcacgtcgcattatcgtg

SEQ ID NO: 58891 - DNA, 105 bp, Glycine max
  Clone ID: PAT_MRT3847_24190C.1
atgaagctcaatacactcgtttcgagcctctccctatacgatatagccggaaactctcggcgtcagcgccaatatcagcaacataaaccacagatctagggtagt

SEQ ID NO: 58892 - DNA, 138 bp, Glycine max
  Clone ID: PAT_MRT3847_24191C.1
gagacagtccgtcacgcgtgagacacacgtacggcggagcggagactgccgatggtaaaagacaagctaaggatagtgcaggaaagcccttcttccgtgagcagcacgggacaatgattacgaatcgcgattgtagga

SEQ ID NO: 58893 - DNA, 144 bp, Glycine max
  unsure (1)..(144): unsure at all n locations
  Clone ID: PAT_MRT3847_24192C.1
taaaagtttttagtttttaaagagcagggcaaaaccagagcctgacttccttgttttgtgtgtctaagantnccaagattatgacaaaagacaaaataaagatcctatcatataccaatatgccttttgatcaacggacatacc

SEQ ID NO: 58894 - DNA, 679 bp, Glycine max
  Clone ID: PAT_MRT3847_24193C.1
gcagacgacagaacggggtgttgaatttaatttgagaaaatatatctgtcaagattctgtagcagcgagaagcagagtagcggatatgaagaagcaagcatcaagcactttcctgatgtgggttatggtgatatcgcttcacgcacatctcatcattgcagctgtgtctaagtctaatggcacaatttccgtgtgcgatggctccgtagaggactgcctcaacgtcgtccacttggactcagagcttcttcccaccatctccagctcccacttccgcagaatccttgctggaaaatatgatggagttaccaacgatgcactaattcctgataaacccttcaagggatgtaaaatcggagaagcttatcgtagctgtctggcccaagttgaaggtagagcgagaaactgtgccatctacaagaggggttgctaatgaatatctaaggttgtgatcgcgccgagctatttgcgtgttttaatgcttttaatttgtttcctctctctctccactttgttgctgtgctgtgtctcgattattgggcatgtttccttattgcaagaataatttcatttactgaactggacaaatttcggggaagagattgtgaacatttatatgtatgcttttctgctttctatttattgaagcctgaaatgtaactatgtatcctctcttaat

SEQ ID NO: 58895 - DNA, 185 bp, Glycine max
  Clone ID: PAT_MRT3847_24194C.1
gataattttaattggtgtttttggacggattgaacatggaacattcttgtcctgagggctgaggcagcgccaccaaaaacacaacattgaaccctgaataaacactcgtgctctttccaatgggttttggcgaggatccaaacaacaaagtcaattttccgtacaagtccccggcatcgcaaccc

SEQ ID NO: 58896 - DNA, 563 bp, Glycine max
  Clone ID: PAT_MRT3847_24195C.1
ggccagtggatgctgccagcggtcaaggcgtcaagtgggccgggcactcgccatccccgtcgcccccgatctggcgtgagtacttttgtactcggcgtccaaacgcacgtgcggttgtgggtcccttgctttccacgtttggcgttgtcctattccgcttcgatggctgttccgtcagcccaacacgctggggccaggctgtggtgtttctggctgctggaagcttattggcggctgaggtcaagccaacgaagggggctgccacccgtcgtgtgttgagcccgcatctcgtgtcttcgggccgaggcgactgggttctgtcttttgtcggtgcctactggccttggcgccttctgggtgtgtcgcgcttcggcctgccgaggcatccgggccatgttcttaacctgtgcaaattgatttttgcaccaactttgtttgaggagcattggtcttgttatgcatttgagcccaaggacaaaattttgtatgtgttagattcgatgcatgataaattctcaaccagaaagaagaacttggatgatgcaatgaaacgtcgttttgag

SEQ ID NO: 58897 - DNA, 2024 bp, Glycine max
  Clone ID: PAT_MRT3847_24196C.1
catccaattccccttcttccttgcatcatcccttttcacaaattcaatccgctaaatatcgaaaaccaaaacgccatcatcatattcctagagtgacatgcagtgacaaccaaaaaccaaacacatctggagaactagtactcccacataggaggaacattctacttggcctaggagggctttgtggtgctgctgctactcttaacaacatcccttttgccaatgctgccccaatacttggtccagacctaaccacatgtgttcaagcagaactacccgaaggtgtagaacccaccaattgttgtcccccaatttccacaaacatcatagatttcaagttccctccctccaaccaacccttgcgtgtacgatccgctgctcatctggtcaacaaagactatctagctaaatacgagaaagccgttaacctgatgaaaaatctcccgtcagatgatccacgtagtttcgcgcaacaagccaaagttcattgtgcttattgcgacggtggatatcaccaactaggcttccctgaccttgatctcgaagtgcacttctcttggctcttctttccttaccacagatggtatctctatttccatgaaaggatattggcgagcttgatcaatgatccaacctttgctcttccattttggaactgggatgctcctgggggcatgcaacttccttccatgtacgcagatcccaaatcacccctttatgattctctacgcaatgccaaccatcaaccaccaacacttgtaaaccttgactttactatcgaggatcctaatgcagaggcaaatatctccaccaacctcaccacaatgtataggcagcttgtgtctaacgcaaagactccaacattgttcttcggaaatccttatcgtgctggggatcagcctaaccctggtggtggctccgtagagagcactccacatggtcctgttcatgcatggaccggtgatatcaaccaccctacaatggaggacatggggaatttatatgcagctgcaagagaccccattttctattgccaccattccaatgttgataggatgtggtccatatggaaaacacttggtgggaaaagaagggatttaacagacccggattggttagaatccgcgtttctcttctacgatgagaataagaaccttgtgcgtgtgaagactaaggattgtcttgacacgagaaagttagggtatgtttaccaagatgttgacattccatggttaaaatctaagcctacgccattaaggtcaagggctcaaaaggtagaactgacaccactttttggtggtgttgctgcagcacatgctgctgagacttcaaggaatgtgaagttcccattggtgttggattcagttgtgagtacagtggtgaagaggccaaagaagtctaggagcaaaaaggagaaggaagagaaggaggagattctggtggttgaagggattgagtttgagagcagcacaggtgtgaagtttgatgtgtttattaatgatgaagatgataagttggtcaagccagataatacggagtttgcaggaagctttgtgagtgtgcctcattcgcatgagcatcacaaaaacaacaagaagattgttacttgtttgaggttgggactaacggatttgttggaagaattgggagcagaagatgatgatagtgttctagtaacattggttcccaagtatgggaaagggcgagttaacatcagaggcatcaagatagattttgtttcagattgaaattaaattgtttatatacttcaaatgtgtgtttgtgctgtaggtagtaatgcacgcatggttccttgaagaatttcaaatgacgcaggtcactcagacggagatatatatagtgtatttcctataatataagtttgagacatgtattagaataatatagcatatccttattatcctatgttcacttactgtgaaataaaataatattgttgtgatataaaaacccaagaaaaatattttaatgtgttaaaaaaaaaaaaaaaaaaaaaacccccc

SEQ ID NO: 58898 - DNA, 934 bp, Glycine max
  Clone ID: PAT_MRT3847_24197C.1
gtccccttcgaccacttcacaccctcattctcaaactcgggtttcactccaacgtctatgtccaaaacgcgcttattagctcgtacggcacctccgggtccctccacgtgtccctcaaactgttcaacgaaatgccccaccgagatttgttctcttggtcctctttaatctcttgtttcgccaaacacggattccccgatgaatcccatgcgctttttcagcaaatgcagcttctcgagagtgatatcttacccgatggggttgtcatgttgagtgtgatatccgcggtttcgagcttaggtgccttggaattgggtatctgggttcacgcttttatttcaaggatcgggcttaaccagactccaccatgacataaaacgcctccaaagcctccataccacgtccatgcacggcaagcccgttaatcagcgtggtccacgtgacaacattcctgtgaggcatttaatcgaacaccttaacggaacgatcaatgtccccgcatcgagaatacatgtcaataagtgcagaacccaatggaacagtaaggttaagcccgatccttgaaataaaagcgtgaacccagatacccaattccaaggcacctaagctcgaaaccgcggatatcacactcaacatgacaaccccatcgggtaagatatcactctcgagaagctgcatttgctgaaaaagcgcaagggattcatcggggaatccgtgtttggcgaaacaagagattaaagaggaccaagagaacaaatctcggtggggcatttcgttgaacagtttgagggacacgtggagggacccggaggtgccgtacgagctaataagcgcgttttggacatagacgttggagtgaaacccgagtttgagaatgagggtgtgaagtggtcgaaggggacattggttcggtgcatgtgggaaaagagggtga

SEQ ID NO: 58899 - DNA, 143 bp, Glycine max
  Clone ID: PAT_MRT3847_24198C.1
atttttctgtgtacatagacacttatctgtaccactcaaccgaatttttagaacgagagggagagttagaatattcacaagagagatttagagagggaaattgtccagtgcacactttcttgcttctaattttcaaatttatt

SEQ ID NO: 58900 - DNA, 421 bp, Glycine max
  Clone ID: PAT_MRT3847_24199C.1
tgcagtgacaaacaacaagatcttttcaatgccatggttctcctttatgctgctgttctccttattggcatttagaatgctaatgcagggcagccagtggttgctgttgagcgaacagtcttttatagggaaaaagcagccggaatgtattcagctttaccgtatgcttttgctcaggcaagcaaatcctcattctaaaaatttgtctttgtagtgttactatatcctcacaaatcatcatcgttgttggaaagtctcacattgtctgtctcaatttctggggtgtagcttgtatatctatcgggcacttttacatattgttaattggtttcaagagtgaatctaacaatcctaatagtctttttaatacttaataacaaaaacattggagcaaaaaaatcgatgcatctaatcttacaaa

SEQ ID NO: 58901 - DNA, 236 bp, Glycine max
  Clone ID: PAT_MRT3847_2419C.1
gaacgacgtatggactgatctcagtgcatgatctgtgatcaattcatctcatcaaaatcgacagagtcaattcactaaaatgccgatcaaagacatcatcgtcagcaagcctgatgaggcgactcaccccgagacgttcaaagccgctttggctgaattcaactcaagcctcatcttcgtgtacgacggctcaagctccagcatcgcctacaacaagctcaccgacaacggcactg

SEQ ID NO: 58902 - DNA, 435 bp, Glycine max
  Clone ID: PAT_MRT3847_241C.1
ggaatttttcaccccgcctcgtgccgattcggcacgaggctgaactgcatcgttgctattgtcatctaaatttctgcatttttatattaatttgtgcaaaagaaaattttcacttttttttttcttcttctctatattgcttcacagaaaagagaatagagagcgcaaccgagtcttcatcttcgactcaccatgaagctcatcaaggttgactgtttatatatgttttcatttcttagtttaaaaacaaagaacatatttaaaaacaaagaatcttttttaatttttattacgcaaaaattgggtgttacacaagatgtatatggtggtaatttttccttgtatggaatcctaatacttttagtaaatgataagtccacattattggtgtgaagcctcgatcatatctttaggaaaaacattgtacttaaaaaa

SEQ ID NO: 58903 - DNA, 146 bp, Glycine max
  Clone ID: PAT_MRT3847_24200C.1
caattcccacccaccaactctttctctagtcttaatttcccatgtcttccactcccaacaaatctcattgatttcttggtgaaacccagccattgagtgaaagggtctcgcttgatttgaacctcgcaagtgtttcctcaccaata

SEQ ID NO: 58904 - DNA, 211 bp, Glycine max
  unsure (1)..(211): unsure at all n locations
  Clone ID: PAT_MRT3847_24201C.1
tcattttgattctacaggaaaggctggactaatgcaattcattcttcaacacactaatcgatcattgcactcgttatgatgactcaatgtatggaacatcatgattaaatcactgtgacgctatatctcacgggtaagatgactgcaacganatggcatctttatggattgaatttgctttgaaggtcactcacaataccaatcctcccta

SEQ ID NO: 58905 - DNA, 304 bp, Glycine max
  unsure (1)..(304): unsure at all n locations
  Clone ID: PAT_MRT3847_24202C.1
gnangcgtangtnagntcggaatgngggtggnggtagggttncgangtgggtgnggtcttcgtgnttggngntttcngtggngtnngnttngcagannnnggnngnggantnatcggagagagagttcgnanngganattgggnnantngangtgncggggggactgtgaggancggnngatntgtngtngtagagtnngnggnngcatggnnngtnagggtgtgaggnggtnttntcgngnatgagnnagtgngtggatgngagnngnnttgnngngngggtgnnngggnnnntnggnggngn

SEQ ID NO: 58906 - DNA, 358 bp, Glycine max
  Clone ID: PAT_MRT3847_24203C.1
ttgttcacgcgtccgcccacgcgttcgcccacgcgtccgcccacgcgtccgcttgttttattgactggttgcaaaagcaaaacaaaaaacaaacctggtgtaagatttgtagagtattcctgaagcggtgcggtgccttgtttctgcgaacatttggctgaggtatctatctggaatcatctctttctcttccttctgagttgccaccgagcgctgtgccacttcgtttttttactctgctgtaatatccaattcctgcttcctctttcaaatgaattcccaatacaataagccaactgctccgtaatttctattctaccaaatttttttcttaacagagaaaaaccaccattggaac

SEQ ID NO: 58907 - DNA, 211 bp, Glycine max
  unsure (1)..(211): unsure at all n locations
  Clone ID: PAT_MRT3847_24204C.1
tcgagggtggtggtacaatcanntagcaaaactcanngaaaaactnngcgtagaattgtgctcatttcatactattgtnnagagcatggcgttggaggatgcttcactagttgttnnttgagtgtacactgcttcattacttannaataacnnattaacnntgtcaatnngtgctgtttnntaatctnnttccgatgcgctaataataatg

SEQ ID NO: 58908 - DNA, 710 bp, Glycine max
  Clone ID: PAT_MRT3847_24205C.1
ccatcatctccgatcatcacacaaatccaaaatgcacaacaacgaccacatacccgttcaccacgtgcagggttccaacccgaagcccgtgaaactgaaccggcaccacacgatgcggtactacgtccaccgggtccacgaaagcctcacaacccgcgtctccaagatgatctgcgctaccttcttaggccttctttttattgtgggcctcatcaccttcatcctctggctcagcctccggccccacaggcccaggttccacatccaggagttcaacttgccgggcctgacccaaaactccgggttcgaaaacgccgtcataacgttcaaagtatccgcgcgaaactccaaccagaacatcggggtttactacgagtccatggacggcgccgtttattaccgggaccagaaaatcgggtccaagccgttactttacccgttttatcagcagcccaagaacacgacggaggtggacggcgatcttagtggggcgacgttgaccgttagtagtcagcgctggtcggagttccagagcgatagggctgacggtagcgtggtgttccgcttggaattgacatctgtgatcagattcaagatatccacgtgggatagcaagcgccacacgatgcacgccaactgtaatgtgggcgtgggacccgatggttccctcttgaccctttacaagacaagaggtgccccgtttatttctc

SEQ ID NO: 58909 - DNA, 473 bp, Glycine max
  Clone ID: PAT_MRT3847_24206C.1
gcccaaaactggtaattttttatataaataaggattggggcaaacccccaaaaatccaactttttttagggaaaacaggagttggaaaaaataaggggagaggggttgagaaaaaataatttgttcacaaagcatgctaaaacatttaaattttccacccccggtttttgaaacaccccaatataaaaaatttttttttggggttttataaaaccaaaaccaaggaacttggaaattttacttttttataccattcacttggcaagttcgttacggatgatttttgttgcggcaaccatgtttgggagggctggtttcatttaaggggacttgggggttttaaaaccacagtcagggttgacccacaaaatgtttttttcgagccctggaagctttttattgattttggcagcgattttttcaatggggggtatttttggggaggggatgtcataaaccccagggccaattcc

SEQ ID NO: 58910 - DNA, 288 bp, Glycine max
  Clone ID: PAT_MRT3847_24207C.1
gccctgaagacaccgaaacctggttttcgttcaggttgatgaattcgctctttaatgctcttctccttcgcaatttatgacaagaaagagcttcaatttttaggtcaaccaccacaaccctcttcatagccttgaactttaatacaatattcaaatactagtgtctattttttgttttttcaattttagttttagacatgtttgtttgtaatagttaggaggatttagggacaaattatattgtattttaattgaaaccttttaatttaagctgttgatatttttttt

SEQ ID NO: 58911 - DNA, 295 bp, Glycine max
  Clone ID: PAT_MRT3847_24208C.1
gacggaacgagctcgggttctttttatgaggttccgcggggacctgacgttgccaagcgcgaacgaactactacaaggtattgccctggcagacgatcatgttattgaccggactcgagaaaagcacacagctccaggtgctgcaaagaactgctggtgtggattatcccttagtctgatgactacacaaagggtgacatgactgaccactgttataaccaccattgcataggtggagccactgccaagtacagagagcttgactaagccgatgaagatatatgtgaccctccga

SEQ ID NO: 58912 - DNA, 231 bp, Glycine max
  Clone ID: PAT_MRT3847_24209C.1
gtgactactttgcttctttctgtgttaatatgatcaaggaaactgggaggtaggtttttaatggtgtcccccccaacagatggagtaggggcctggctggaatgacccgacgaacatgcgcacgcttctgaagaacccaccgaccccgccaccgatgaaaaagaaaacgaagatcccgaagcagacgttacgagtgaccccccagacgggagcccgcccacggaaccaacg

SEQ ID NO: 58913 - DNA, 424 bp, Glycine max
  Clone ID: PAT_MRT3847_2420C.1
aaaaaaaaaaagggcggttttttggttcctttgcaaaattttttaggccaggctaattttacccccaaacaatgttttctgggttaactgaagggggcaaattacctcccccggccatttgtttatcaactgggggcccaacctggggtttaacttttgggttttccaaaagccttttttggaacctcccccccgccagaaataactccctcttggggggggttactcaagcaggccttaaccctacccttgttagcaggggtggaaaaaaataaaaaatattttttatgctcctatccagcttttggaaaatttccttttttttaaaacccaactttccggcttttttggggggggggacaatgggggcccttagtttttttaccgccccggaagggcaaacccccccaaatccaaaccttgg

SEQ ID NO: 58914 - DNA, 120 bp, Glycine max
  unsure (1)..(120): unsure at all n locations
  Clone ID: PAT_MRT3847_24210C.1
gtcactcgtgtattgtcaggagatagatgcactnccaagtcttcggntgtgcaagcgcacgtgtgcccaataatgcaaagcttggaataagntataaataggacagaggaatgaggtggt

SEQ ID NO: 58915 - DNA, 1069 bp, Glycine max
  unsure (1)..(1069): unsure at all n locations
  Clone ID: PAT_MRT3847_24211C.1
actcgagccgattcggctcgacacaaaattgaactgtaattgtagtagtagacagtagcaccatgagccaggaacagctcaagaaacctcaaggggagcaggaccccatcaaatacggcgacgttttcaaagtctccgacgaactcgctttcaaacccatcgcgccaagagacgcagctctcatgcaagccacggagaaccaagcattgggccaaactcaaaaaggaggtcccgcctcggtgatgcaatccgccgcaaccgaaaacctccgcgccggcgtcgtgggccgccaagacatctccgacgtggcgaggaacgaaggcgtgagcgtgaccgaaaccaaagtgggctgccaccgcgtcatcacggagttcgtgggaagacacgtggtggggcagttcgtggagcccgacgtccccatgaacaccccaggcaccgcgctggagcgtgacgccataaccatcggcgaggctctcgaggcatcggcgatagccggagcaagcgacaagccggtggatgaaagcgacgccgccgcgatacaagctgcggagatgagagcgacaggaaagaacgagacagagcctggcgggctgggcgccagggcccagtcagcagccacgcggaatactcgtactgtgtcccactctcacaagacaaccttgtctgatgtcttaacggatgcgaaggagaagctaccagcggataaggcggtgacgcgagaagatgcggagggagtgattggagctgagcttaggaacaaattggacatgagaaccacccctggtggggtcgctgcatccatggctgcagcagccacacttaatcaaaacagacaagtgactgatgcgtgaagatctcaagtttccatgcatccagtggagttaagtgccataccctgtggctgctggggcatccatggcgatagtgtgtatgtttaaataaatcaagtcactctgagtttgactaataaaagtacaatagtcttagtgtgtcaattttctgcttttgtactttgttttattgattatggttanattnattntatatagtncttggntcntcgatcgcc

SEQ ID NO: 58916 - DNA, 184 bp, Glycine max
  unsure (1)..(184): unsure at all n locations
  Clone ID: PAT_MRT3847_24212C.1
tttcgccctgtgggtaatgcctttttttttttttttttattctttccgttttcgggggggcaaaaccaggaaatcacacctcgataagcaaagcattgccctgttattaagcatcttacaaacatcactgggcacaaagcgaaaatgctttaaacctttgngtgaataaagaggtgaggggccc

SEQ ID NO: 58917 - DNA, 711 bp, Glycine max
  unsure (1)..(711): unsure at all n locations
  Clone ID: PAT_MRT3847_24213C.1
gcggtccggatacccgggtcgacccacgcgtattcttcgttattgtgttcccttctccaatgatgccggaaagtgacatcactctatcctctttcaggcttcgttgggacgtgttcctgagcttcaggggcaccgacacgcgggacactttcaccatgagcctctaccacgctctccaccgccgcggcctccgcgtcttccgcgacgacgacgggctggagcgcggcgacgagatccagaagaagcttctggaagccattgaagactccgccgccgccgtcgtcgttctctctcccgattacgcgtcttcccattggtgcctcgacgaacttgccaagatttgcaagtgtgggaggctgatccttccggttttctactgggtcgacccttcccatgtcagaaagcaaaagggtccctttgaggattctttcgggtcccatgcaaacaagtttcctgaagagagtgttcagcagtggagggatgccatgaaaaaagtgggtggaatcgctggttatgttttggatgagaaatggttggttataaattaatattttgctagatatgaaaattgtttcagcttttaactttttagaatctctataatctatatggtttatccttgtcctgatgggctcnacgatagagttgaagagttgaaaaagctgttagatgtgaaatccaacgatgtaagggttttggggttgtatggat

SEQ ID NO: 58918 - DNA, 218 bp, Glycine max
  Clone ID: PAT_MRT3847_24214C.1
tatgaacatgaagaatatggcttcctaaagctcctcattagtgctgctccttgcagctctaattctatcccctcaagttcttgctgactatgagcacgctcccaatttacgagccacctgtttacacaccgccagtttatacgcccccagttgaacatccaccagtgtataagcatccagtcaataagcctccagtttacatgcctcctgtttataag

SEQ ID NO: 58919 - DNA, 259 bp, Glycine max
  Clone ID: PAT_MRT3847_24215C.1
ttacatgaaaaggcagatcaggaatcctttgtgtggaatagtatttgaccggaaaatgatggagggtactgacttgggaacagaacagaatcaacttttgcgcactagtgctcattgccagcagcagcttattaaaattcttgatgactcagatcttagcaccatcatatatgggtgctgggatgttgagatggctgaattcaccatgcatgaagttctggttacctcccttagtcaagtcatgacaaaaagcaatgga

SEQ ID NO: 58920 - DNA, 357 bp, Glycine max
  Clone ID: PAT_MRT3847_24216C.1
attcgtttattcgaccgactcaagacgataatcccaggtgcgttaacaactagctggcgacaacagcagtactaccattagccgcgtttttcaaaagagatacatcgagaaacagacgatgggaacatgaaagaaggaggcctccaagggactacaggtagcgccttggagacgagctcgcccaagcacgagcgattacctgcaagcatggcctcggcggcgcatattcctgccgccacagattccgcgtttctgtgcaatcgactgcgaattcaacatacactgcttgaacaaaactagagacgcgccacgagcgcgtgtggatgcatgaggggagcgagcaagcaccccgctgat

SEQ ID NO: 58921 - DNA, 408 bp, Glycine max
  Clone ID: PAT_MRT3847_24217C.1
aacggttgcaagaagacaacagaaggggacaacacaacgcgtgagaacgcgcactatgtcttggctcatctaaacacaaaaaccctatcggtattcgtggtttcggcgattctcgacatgccgaaagccaaatacgacgccaaagccgtcgataagccggatgaagcgcaagggcgctggtgctggaaggaagcaatcgaagaaagctgctaaagatcctaacaagccaaagagacctccaagcgctttctttgatttcatgtccgagttcagagagcagtataagaaggagcatactaacaacaaattcagcggtgttgtcagtaaagctggtggagacaaatggaaatggctgtctgaagctgaaaaggccctatttgttgccacggtcgaaagaagaaacaagag

SEQ ID NO: 58922 - DNA, 304 bp, Glycine max
  unsure (1)..(304): unsure at all n locations
  Clone ID: PAT_MRT3847_24218C.1
gtccgttctgtttcctcccactacgcccttgctgtgtcgctgtttctctcactccaacgtgcgactgcttgctccgattcgattttccgttttccgattcccgcaaccctaacccctcccttcctcatcgaaactccaatcgaaacctcgcattgggtgaacaaatcaatttacttagggttccgattcgagcgggcggaaaaactgaatgtaatccacaccgatcttaagcctcagagctgggggcgaatcactctgctccactcttaagcccggcggncgcggcgtggcctccttcgtcgta

SEQ ID NO: 58923 - DNA, 301 bp, Glycine max
  unsure (1)..(301): unsure at all n locations
  Clone ID: PAT_MRT3847_24219C.1
ctcgagccgaatcggctcgagcggctcgagttcttattctcttgagttcccacatttttctatcttttttttttttcctttgctgaaaacctggtaacttcaactttggctaaaagcctgctaattaaactacttgaatctgaattctcgtgtgtctattctatgtgaaaatgcaaaaggggaaaattaattcgctaacattctttttttttgggctcaatattatatattattcggtgaacgaggttcagaaaatagaaacctcttttggtttctggaaactngatttactttcatttat

SEQ ID NO: 58924 - DNA, 1013 bp, Glycine max
  Clone ID: PAT_MRT3847_2421C.1
tttaactctcgaaagatgctgggatatatcgttttccaagggtttcttgtgctgcagcttctgcagatgatgctgatttggatcctactgttgctgagcttcctccaagacctttactagagaaactggctaaggaacttcgatggcgattgggtcttcgtctattcaacctggatattatccgtgagtatggaacaagaaatcacttttacgtcattgacataaactacttccctggatatggcaaaatgccagaatatgaacatatatttacagacttcctgttgagcttggggcaggggaagtacaagaaaaaataggctaaaataactgtttccagcccttttatttatgtcccccacatgacttatgctgtgtgatggaagtgccatggaaaactatcaagacttgtgtttcaggaacttcgacctgtacagaacaactgctagtattttattgacacactctctactcactcacctgatgaggagtacttgggtgagaggcaacaaccttccatttggtctggcgacgctgagattgtagaggcgttctacgatttctccgccaaggttcaacagatagagaaggtgattgatggcaggaaccttgataggactctaaggaaccgttgcggtgcaggggtgttgccttatgagttgcttgctcctagctctgaacctggtgttacatgcagaggggtgcctaatagtgtgtccacataactatactaaactaataaataagggagtcactcccacattttgataattaaacattaatatatatatatatatatatatatatatatatatatatatggttggcttactagttactaccataccatggacagtgactctcagtgtatgcccattttgtacctagatttaataagttgttatagtatatattggtaacctagggctgtatagactgtgtatatgaaaatgagtttggtggtgttggaggatgtgtgactgtttataaagttattatcacaatttgtagtt

SEQ ID NO: 58925 - DNA, 366 bp, Glycine max
  Clone ID: PAT_MRT3847_24220C.1
cgatgcaaggggggcattggtgggaaccatagccttggatacctcagcaatcacattattgctatcagcactcatacatgcaagcatcgcatcattcaactctggaaaccattgggtatttttgcttcaaaacggttcgttgaatcgacccatcgatgagtgtttcgctccttgttcatcacatccaattcccctattggtgtggaaattctaaatgtgcagtcacgcattagtcgtccgtatcgtgggttcactacgactgcgtcactatggatctctaaagcttgcatgattgtgaatcattgtagtttttagtgtagactgtatagttcacacaggcacacttcatgtaattggggtctatgt

SEQ ID NO: 58926 - DNA, 739 bp, Glycine max
  unsure (1)..(739): unsure at all n locations
  Clone ID: PAT_MRT3847_24221C.1
ccacgcgtccgctagatgcgggcctgcactatatccagagtgactgacggaagaggcagcgtcgatcatttgcctattgtgggacactgtggttacactactgtgccttgaggacacgagctaccgcactatcttactccgaagcaggacctgtgagatggaccttggacactatgcgtgcccactggactaagagctcagctgcagatatgcatagccctgactatgactcaacgaccgacaaagggggagatgggtacggaagaggatacaacagactagcaatgacaccatagggggtgcatagatgagtttgagagtcagggtaacgaccaccctaatactaacgctagggcgataactacttcataagaaactaccctgaccagtgccaatctgagaggaaacacttcactctactgctctgagacatacaagactggctcaggccttgctgattagacatagctcttgagaggaactacatggaactagcattgaaaatgttagcgactaccaatgtaccgagtctctgattcatatggaggagtcctagctactgattacgataaaggactaaacttggagtggtgctgtggatggaaccaccaagcccatccgcactaagcatgagattcagccgctgctcanatgttatgcaacttaagacacatggtcttctcagaccactgattttggctcttctgtcgtaagcatagaaatggcgtgcttctttgga

SEQ ID NO: 58927 - DNA, 169 bp, Glycine max
  Clone ID: PAT_MRT3847_24222C.1
ttctactacatgcttcagtgttcatctcggacaaggtttgttagatctctatgttaatcctttggttccggttcagcgggtcgcagctgcgccactgtcggattcaaccgcttctgcctggaatctttcttccaatagctttaattgcttcatgtcacaatccatacac

SEQ ID NO: 58928 - DNA, 260 bp, Glycine max
  unsure (1)..(260): unsure at all n locations
  Clone ID: PAT_MRT3847_24223C.1
attttccagtacgccaaaacaatgaaagtagcttcttgggatttctttgtgntctgatgatggggatgctatagagtttattcaagtcattctanncatccatggagattctagcaaccaaaagctcacctgggttggaggtaccaaaccaggcaagaagaaggaggaggagatgaagttaattaatttctatctttccttgtattatgatcattgagaacatttttttnnctncctttcatacttgagagnggnggggg

SEQ ID NO: 58929 - DNA, 1974 bp, Glycine max
  Clone ID: PAT_MRT3847_24224C.1
aagtctgattcacattcattcatcgaaactcagagagaagaaaaaggagcaccactcaagcttcctccaacaacaagaagaccaaacgcaatcacaagaaatccctctccctccccgcccgtaacggaatcacccctccggatgatggcggagaaagaaccgttaaaaagcttcggttgtcgaaggcgctcaccatccccgacggaaccaccgtctctgaggcctgcaggcgcatggctgctcgccgcatcgacgccgttttgctaactgattccaacgccctgctttccggaattctcactgacaaggatgtggctactagagtcgtcgccgaggggctgaagccggaggagacgacggtggcgaaagtaatgacgcggaatcccatctttgtcacgtcggatacgctcgccattgatgcgcttcagaaaatgattcagggtagatttagacacctccctgttgtggaaaatggtgaagtcattgccatgctggatatcaccaaatgtctctatgatgccatatctagaatggagagcgctactcaacagcacgggagtgccgttgctgcagcggttgagggagtggaacttcagcaaactactccaaatactttcattgaaacattgagagagcgcgtgttcaaaccttccctgtcaactatagtcgatgaaaatacaaaggttgctattgcattagcatcagatcctgtctacgtggctgcaaaaaagatgcgggagttgcatgtaaattcagctgtgattgtgatggaaaacaagattcaggggatacttacttcaaaggacatccttatgcgcgtggtggctcaaaatctttcccccgagtcggctcttctggaaaaggtgatgactccaaatccagaatgtgcatctctagagacaacaattcttgatgcactgcatatgatgcataatgggaagttcttacatcttcccgtggtggacagagatggaaatgctattgcttgtttggatgttttgcagataactcatgctgcaatttctctggttgaaagtagtcctggagcatctaatgatgcggcaaacacagttatgcaaaaattttgggactcagcttttgctctagagccgccgcctgaagattttgacacccatagtgaagcctctggacggttgactttggatggggcagataccacaaagtctacatatcaatctgtaggttttggaaattcatttgcttttaaatttgatgatcacaatggccatgtgcatcgattctactgtggtgctgaacatcaagaacttctatctgctgtcatgcaaagaattggtgatattaatgatggagaacaccctacaatgctgtataaggacgatgatggtgataaaattattattgcgactgataacgatcttgtggctgccgtcagctatgctaggtctgcaggactgaaggctttaaagttggatttggagtttcccaattcaaccaaaccaacaaaactgcaacctggtacagccactatacagaaaaccagtacattgcgtctccgttctggtatttttgcaggtgttgttgttctaacgagcattagcgtattggtgtacttaaagcgctctagacagtaatatgtttgccagcttgaaaacaaaacatgctataatcttactctatgaatcccagagtttcgtcataaatcaaatgctcgttgacaaaggaaatgatggacacggaataggtggatgatgtggagtctctctaatcagccgtttttaattatctttttctttttgagtcactgatgtaattagaaccaaagatatagtcgtggcatgcaatactgaagtgtcaccatgttcttctcaattaaggtacttgtaattccatatatttatcaactttcatcacttacgacttttgcgtccagatattatcagttagatcaccatcaaggtcaagccatttgatgaaatcaattacaatattatt

SEQ ID NO: 58930 - DNA, 293 bp, Glycine max
  Clone ID: PAT_MRT3847_24225C.1
cccctaaaatgacctctgtaaatgagagagcttagttactaacaactattcactccctttttgatttcaaactgcggtttatttgttcactacgcagggatgcctgatacactacaggaacgtgcctatatatgatacatgtccatgatgctatttgggtgacttagagaacgctcccaaatcaatacaagtcgccaacggctaatcatgataccatacgctctcgtggaaagagtcaggaggatgcagaaccctgaacagcgtcaatgttatcaactaaatcctcctattga

SEQ ID NO: 58931 - DNA, 204 bp, Glycine max
  Clone ID: PAT_MRT3847_24226C.1
cgcacgcgtacgggaacactgacttgtttcttgacagatgtcttgctagaggactaactatgggctcatatatacgcctgtttatacagcctttggacatgctggatgacatgctaactggtacataagctgctatatgtaagtgtgctggcaggtgtatacgaattgccatgcgagatttcgttcaagcattttttgacagca

SEQ ID NO: 58932 - DNA, 154 bp, Glycine max
  Clone ID: PAT_MRT3847_24227C.1
ctcgagcgaattcggctcgaggcgagcagccgcccagttttttttttagccgggtttttgctaaagcacttattattatcaaagggttttgaaacggggtaacgtaacaattactaacatattaaggggccagtattcggggtgagataaaaag

SEQ ID NO: 58933 - DNA, 505 bp, Glycine max
  unsure (1)..(505): unsure at all n locations
  Clone ID: PAT_MRT3847_24228C.1
cgcctgcatgtaccggntccggaatcccgggtcgacccacgcgtccgctagatcgcgagcggccgccctttttttttttttttttttttttttttttttttttttttttttttttttatttttattatgttcttttttttttttcattaaattatttagtaagttatttatttcattactttatatttagggggaaaaaaaggacaattctaaatgctgaaagcagacgggggggcgggacctcaaaaccaaaaatagaatatcttccacacgacaaaataaggggaaaaaaaaaaggaactctaaacaagccaaaaaaaaaaaggggggccgaatttagaggaccacaagaattacgtaacgctgtgccgtgcagacaatatatattttaaaagaaaaagggggacctaaaaacaacaaaaaaaaaagggggggacaacttaaagaaaggaaaaaccctggcgcggcccaagaaaatgaaaatgctttaaatgcgcccaccaaa

SEQ ID NO: 58934 - DNA, 516 bp, Glycine max
  Clone ID: PAT_MRT3847_24229C.1
gggggttgggtagagagaaaagaccgaaccccacctccgcagcgcaaccatggcgaccaagcaaggtggaaaagctaagcctttgaagaaacccaagtctgataagaaggattacgacgagaacgatggggctaacattcagaagaaaaaggaagaggagaaggcgctaaaggagttgaaagccaaggcgcaacagaagggaagctacggaggacctgggctcaagaaaagaggaaagaaataagggctctttatcatgagagtatgcagtcaatacggagccctgcaattacagttgcgaccatgacaacttctcttattattgtggcctactgtattgctaaggtgtactgaaccgaggtatgtcgtgatgcaagctgcaataagccaatcgtcagtagctccacagtatcccctacatggggttctgataatcacatccttgtagaagagaagtggatttggcatagactagtacaagtaaataagggcatggctcgcgaaattatattcgtc

SEQ ID NO: 58935 - DNA, 627 bp, Glycine max
  Clone ID: PAT_MRT3847_2422C.1
gacgaaaatctgctttagattcctactgtcaagaatttatgccatatatacagcaaagaacggtcagtacatttgaaatccttcaacttatccaacatggtcatatcaacatccattgcggggcgaatacaaatccttcaaattgcagacttgaccccttgggtcatcaagctacccagctatagaacttcaggatttgaaacaacattttgttactttggaaggacagcagaaagttcccgcacaacaaaatactaacagtttttctgtacaggtcgaagttcacgaaacattaagtctttatagttgatgttattatcactaatgctttctaagatactttccaacagccatagttttgagcttcatactgagaggcgaacgggcttacgttatgagaggcacataaatcaaagggctggaaagagttactttagcctattttttcttgtaattcccctgccccaggctcaacaggaagtctgtaaatatgtgttcatattctggcattttgccatacccagggaagtagtttatgtcaatgacgtaaaagtgatctcttgttccatactcacggataatatccaggttgaataggcgaagacccaatcgccatcgaagctcctt

SEQ ID NO: 58936 - DNA, 307 bp, Glycine max
  Clone ID: PAT_MRT3847_24230C.1
tcggtacgaggataccaaggctaaagggaaggcagccattgatggtgtgcgcaacccattggggaagcctggaggtgccctcatccaccaattgatgatattgactttgggggcactagctaatgcaaccccatacttgggaggagtgcttctgctgattgctcctgcctgcctagcagcggcaaaatccttgcatacccagttgactgcgttgcggagagaggaagaactcgacaaagagatggaacgagcacgcgccgagcggaataccagggagggctgaaactgaaagggaaaatgggcctct

SEQ ID NO: 58937 - DNA, 250 bp, Glycine max
  Clone ID: PAT_MRT3847_24231C.1
ggaaaaccccggtcggccgcacacgtccgataactcttaaccttctttcaactgcttatacctacacacaaacaaacgaaaacaagggggtattttcaaaggggtgcggactcctacaaacaattaaacattaaaattagcccttcacagcatccacacacttcccaatctatatttcataatcaaaatccttttttttcaacatcacctaaaacctctcccatatctacacatcttctcacacatttta

SEQ ID NO: 58938 - DNA, 366 bp, Glycine max
  Clone ID: PAT_MRT3847_24232C.1
gaaaagggaacagggaacggacaaaaacccaagggaacaagaacccacaaaacaggaaagccccggaacgggaaaacaacaaacgacaaagcccgcacaagacaaaggacaaatacccacgaacgcagccaaagaaaacaaagagcaacaaacaggcaagcagtgagagccaaaaaaaagcacaagggacaaggaagcttaaaagacccagcacaacacgcagaagccaggagggcaccccacagggcgccaacgggaccaaagaatccgaaaaccgccagcgccagcaacccaccaccagccaacatggacgcaaatgaaaacccaccagaagacccaaacggacccccgcgaaggaccccccac

SEQ ID NO: 58939 - DNA, 558 bp, Glycine max
  unsure (1)..(558): unsure at all n locations
  Clone ID: PAT_MRT3847_24233C.1
tgtgagaagtggattcgggctgctgaagaccctttggagggatctaaggccaagtggtggttgagtagactggtagggcccccgaagaaagtaacaattgactggcaattcccgttttctgaggggaaactgtttgttctttccaatagtgcctgggtttggaagggggtaatcaatggtttcctgtgggaatgggaaggcatggtgaacctcttttccctaatcgcgcctggtttttaacctntgaaggaatgccaacccgggccttttcgnttgaaaaggaagacattgaatgtccaacttcctgtaatttgccggcagtcttttgccccttcaatcgcaatcccagttttgccccgcagcggcatcttgaaatttttccaaccccaaggtggcgtgcctcaaccaactttcatgaatctggcatcgaattgttcattggtgtcctctctgctgaaaccatttgctgagcggatggctgtgaagaaatcatggatgcagcatangctcatcaaatctgaagtaagtgttgctcgtttctttgtggcactgcatgca

SEQ ID NO: 58940 - DNA, 331 bp, Glycine max
  Clone ID: PAT_MRT3847_24234C.1
ggggggcatttctttgcggtcctgtttagtatttccaactttgtaaagctattgtgcttgcagcctgcaaagctatacaagctaaagcacctgtcaaaagtggaagttgtagcaaatgatccctgtggatgtacatttactctggtaaagttccatgatggaagagatctttatgttctagttccagacatgtactcagtttctggcactgaagcgatatgcgaagcatcctaccgttcctgttttggagttttttttttttatgtcttcccaatcatttgcttgttgggctgatgcatgtgtatcttgcagggatttgataaccttaaaa

SEQ ID NO: 58941 - DNA, 461 bp, Glycine max
  Clone ID: PAT_MRT3847_24235C.1
cttattattacctatcttctttacccttctttttttcttcccttcatctctctactgcaaaccgccacgattcttggcagtcttcttctctccggctaccaataattcccaaccgcaaccacaccatccttcttcctcctctgtccaaaaaaaggataacacgaagcattgtaacatccctaaaggtcgaacggcgatttcgtggtggtgcctcgggtttgggttttgtggtagtgtgtagcgttggttggcgtggaccatggtggattcgctgcttctgtgatgggttctgacacgaagcaatctcgcccaagcacactagcttcgccatcacgctcttccttgtcgattcaagcctagatctacaaatcaacaaacatcgccgccatcaaaacatcatcaattcttcaccaccgtcatagccacccttccttcgttgttatatttcctatttcatccaa

SEQ ID NO: 58942 - DNA, 272 bp, Glycine max
  unsure (1)..(272): unsure at all n locations
  Clone ID: PAT_MRT3847_24236C.1
gaggganancatnangaaggcaattgnatttcttaaaganactgatggcctgctaaagattgangatatattaccattctttccagattttgccctgattgacgacttcaaggaggctatctgctcatcnttggaggattannatnagcnaatngancagctgnaggaaganntgaatgatncaacccatggtgctgacaacatcagcgaatgatatcagtgcactgctacaaagatgcactattantgatcgagagaggagtgtggggtat

SEQ ID NO: 58943 - DNA, 334 bp, Glycine max
  Clone ID: PAT_MRT3847_24237C.1
ccaccccaaaaaagaaagctttttttacaaaaaaaaccttttttcatcaggggaaccacgaaatcccaaaaataaagattttttttttaaaaaaccctaaaaaaaccacagagaaagcgaatatatttttttataaaacacacacaaatttttataaccctatatccccaaaaaaccacaacagggtcttaggggagaaattataaccaaatgatttgaaaaaaacccctttataaggccataaaattgaaaatttccccccacaggacctttggggtcacacccaagaaaataattgttgtctaaaacggggccaactttcaggaattttttt

SEQ ID NO: 58944 - DNA, 259 bp, Glycine max
  Clone ID: PAT_MRT3847_24238C.1
attgaaattttaaaaatgattgggataaacttaagaattcaattatggaaattgaataagtaaacaatttaattggattggtcgaatggtatcagaagaatggagtactgactcccatttcttatttattattgacttaaccgatcaacttgctttgttatcgaacatgtctagttgatttcaaaaattttccggaaaaaatttgaatctatttcatatgcgaatcaatcctactacttctggtactgaggtatctgcg

SEQ ID NO: 58945 - DNA, 657 bp, Glycine max
  unsure (1)..(657): unsure at all n locations
  Clone ID: PAT_MRT3847_24239C.1
cctntagtttcantttatctttgccccaatcggaagggacacagccatatgagaatcacctaatcaccctgaatatggttcatggattcatacgaaccccatcccttatgtatctacatattcaccaattacactactccaaaggatttttacatagactaattgtagtagttactaaaaaccaaaaatcaaaaggcacattagagtttaaccaacctatagaaaagcaagataaaaaattcccaaatcaaacaaaccagctatccagaaagttggattgatattgcaccattatcagcaacaccaggatcaaagcagccacaccccatggagagctcccttctgaaaggccttggtgagttcgcccccgcctttcccccggtaatgaagcagagaagaaccaatatgaattttccattgatgatagccaacgaactatgagaattagcaccacaggggtgcaaaaaagtaaccaacccaattgttgttcagcagtttcaaccacttcttcgtaggaaaagtaccatgaaacgccaaggaagatgaagatcagcgataagattaacagaacaggatacggcaggggattcagagtgaagccatccaaaacagaggaggctctgcttctaccataagccattgaattttatggtcttc

SEQ ID NO: 58946 - DNA, 1695 bp, Glycine max
  Clone ID: PAT_MRT3847_2423C.1
aggaggtgttattcccgtcgacccacgcgtccgtgaaaaataggcatgttgcaaagccactagttgccgatggaagtgcaaagtcccatgaattatcccttgcttatgagcatttttcccttcaaaatcttgaacctcctcttgttcttcaggagtttgttaaccatggaggtgttcttttcaaggtttatatagttggtgatgctataaaggtcgttaggcggttttcattacctgatgtaagcaagtgggaactctcgaaagatgctgggatatatcgttttccaagggtttcttgtgctgcagcttctgcagatgatgctgatttggatcctactgttgctgagcttcctccaagacctttactagagaaactggctaaggaacttcgatggcgattgggtcttcgtctattcaacctggatattatccgtgagtatggaacaagaaatcacttttacgtcattgacataaactacttccctggatatggcaaaatgccagaatatgaacatatatttacagacttcctgttgagcttggggcaggggaagtacaagaaaaaataggctaaaataactgtttccagcccttttatttatgtcccccacatgacgtaagcccccttgcctctcagtttgagctcaaactatggctgtaggaaagtatcttgaagcattagtgataataactttttcagttatgctgtgtgatggaagtgccatggaaaactatcaagacgtgtttcaggaacttcgacctgtacagaacaactgagtattttaaactttcggcttccaaggtaacaaatgctgttgcaaatgaagttaagctggtagcttgatgaacgaaggggtcaaggcaatttgaaggatttcgcagtggatgttaatatgaccgtgttggataagttgacggatttcaaatgtactgacccgttctttgctgtatataaggcataaattctgacactaggaaaaagcaaattttcgtcaaagtacatcttttttgtcttgaaatttatttcgtgtttctataattttgttataatgttctctcatcagggaatatgtcgaacaactaaggaaccccttgctttgcgtattaattataaggagccaattaagcgctcgctcatgtctatagaaattttcctttccgctgtaagtatatggtagaaattatagaagctcaagggaaatgtccaaagtgagataataaaaagttgttttagcttaattttataaagaaatatatggggttgccgagcttcctccaagaccttcgctagagaaactgcctaatgagcttctatggcgattggtaactagctcattctttggttcaaggtgtcatgttattgatacaaggactataattatgcttctttgtcatattcttatttctagggtcttcgcctattcaacctggatattatccgtgagtatggaacaagagatcacttttacgtcattgacataaactacttccctggtaagacgatatattgaagatcttgtttacttaaatcccatatcacactaatagagagtatgccaggttatttggtatgcccaatgagatttcccctgtgttgacaagagtatatgtcagaagagttcgtttataaaaatttcttttgatattctactttgagttgacatataatcctctcaccttcccatcatcatctct

SEQ ID NO: 58947 - DNA, 307 bp, Glycine max
  Clone ID: PAT_MRT3847_24240C.1
gtctgtcgagagattttttttattttttcttgtcttctttttttttttttgttcctttctgcattttacaatagctgttctcatgctactactactactaggaacaggacaacacacgggcaccgctggatccgcggcgggagcaaaagatggcaaaggcccaaagcaaaccggggagccaccacacgcggatccagcgccagagtccccctgcttaaaaacaggggcccagctaagccaacgcagccaatcagtggaaaaagcggggtgcgaacagccgccctcagggaccacggggccggggcgc

SEQ ID NO: 58948 - DNA, 419 bp, Glycine max
  unsure (1)..(419): unsure at all n locations
  Clone ID: PAT_MRT3847_24241C.1
aataccacacatagtataaaacttggttcaaaagttcacgagcatttttctaaattttgtatgtcactgaataagtgtatgccccgtgtattctcatttattgatatcaattttggaaaaaaaaaaaaaaaaaaaaaaaaaaaaaaaaaaaaaaaaaaaaaaaaaaaaaaaaaaaaaaaaaaaaaaaaaaaaaaaaaaaaaaaaaaaaaaaaaaaaaaaaaaaaaaaaaaaaaaaaaaaaaaaaaaaaaaaaaattttttattgggccaaaaaaaacaccaaaaaaaaaattttgtttgcgcttttccccccttctggggggcctttaacggttcccgtagccacacttttgtaaccctttggggggaccttttctntctccccttaaaatatttttacccccctgttttgtacccccc

SEQ ID NO: 58949 - DNA, 613 bp, Glycine max
  Clone ID: PAT_MRT3847_24242C.1
cggctcgagattagctttgcgtatctgagaaactaagccatgtcaaaacccttttgcgccctctttgcactgtccatcatccttgtgacatgtcatgctcaaacccttaatacatcaacaacatgtgaaccttctaaatgtggtaacctcaacattagctaccctttttggaagaaatccaacaccaacgttcaagaattttgcggttaccctgaatttggccttgaatgtttggatgaccaagccatcatgatttttccaactgacagataccaagtcacggatataaactatgatattcattcaatcacacttcttgacatagatgtgttgggacaaccatgtcctagggctcgacacaacgtttccctacacaatctccctttatctttcagctcattagattttaacctcagtttctatttcaactgcagttcttacccttcatctattcagcacatagggtgcatgaaacatgataagtatcagtcttacgtgtttaagaccggggatgaagctgaaagtaatggctttgattggcttaggcactgtgaggagcatgttgtggtgacagtgaagaaggatgagattgaaattagtggtttgatcactg

SEQ ID NO: 58950 - DNA, 268 bp, Glycine max
  Clone ID: PAT_MRT3847_24243C.1
gctagagacagatcggttaagggtgggtaagatctaccatctatacaaacagggggccaccaacacactggagagagtgcccacacacactcacgcaagcgggaacgcactcaaacgtgtgtgagcgaacggatacacaaatataggattgggtaacaagataaacacacaaacagctatatgaacacccatagagagtgcgggacaggcactgcactcgctcatgaaagccaggatggaggaagagaagccacaagcgaaagcaaca

SEQ ID NO: 58951 - DNA, 358 bp, Glycine max
  Clone ID: PAT_MRT3847_24244C.1
tttaaacatagatattgacaaaggcacacaaagtgttttccgctcataatgcactgagtttgacgctgaacttatctgtaggtgccgcttgattaacatgggtgctggtgactactacaaaatactgtaggtgaagcatgatgccactgatgaagaagtgaagaaggctgattagtaattggcaatgaaacgggacccagataagaaccttgacgaccctcttaggagagactagtttgaggccaggtttaagcaggtttctgaggcctgtgatctggttagtgacccagagatgcgccagatctatgacttgtgcggacactatgcccttgactgtaacgcttctataaagaatatg

SEQ ID NO: 58952 - DNA, 657 bp, Glycine max
  Clone ID: PAT_MRT3847_24245C.1
ctggacgagaggtcggtgttagagtacgtaaagggcgttccaggcctgtggtcgaagctggaattggatgatgataacataataaccgtgaaagagatcggagatggtaacctcaactttgtgtttgtggtggccaactccgttatcatcaagcaggctctgccttacattcgttgcataggggaatcatggccactcacaaaggacagagcatactttgaggccatggcactccaagagcagggacgcttaactcctcaccatgtcccccaagtctatcattttgacccaaccatgtccttgatcgccatgcgttatctggagcctcctcacatagtactcagaaaaggcttgattgctggaattcagtatccactcctagcacgccacatggcacatttcatggcaaacactttcttctttacttctctccttttccgctccacactagatcacaaacgggaagttgccaaattttgcgggaatgcagcgttatgcaggcacactcagcaggttgttttctccgacccgtatcaaatttctcaatacaatcattggacttctccttatcttgatcctgatgccgaggctcttcgccaagatgatctcctcaaacttgaaattgctgatctcaagtctaagtatatatattctcca

SEQ ID NO: 58953 - DNA, 509 bp, Glycine max
  Clone ID: PAT_MRT3847_24246C.1
gtgctgtgaaagctcttcgtttttcctctgctttgtctgttctgaaagatgaatttctacgttcaagagattatccgcgatgtcctcctacatgtcatttatttcacaggttcaggcaattgggttatgcctgtatcaggtttggccagtttgatagagcaaaagaaacctttgaagttactgcagattacaaaagcatgcttgatctatttatatgccaccttaatcctagtgctatgaggcgtcttgctcagaagttggaagacgaagatcttgactcataattgaggcgacactgtgaatggattttacgagttcgatcttctggatggacacaaggcatatttgccaactttgcttcagaaagtatggttcctaaaggacctgaatggggtggtggagactgggaaatcaaaacccctacttatgcaaaggatatacctcattgggagctagctgcagaggtgttgccatacatgaaaactgatgatggtgcaattccatacatc

SEQ ID NO: 58954 - DNA, 279 bp, Glycine max
  Clone ID: PAT_MRT3847_24247C.1
aaaatccaacaagatataatatgcatgctattgtataaataacgggaaaaaaattttttcaatacgtcttccaatgaaattgaaacttaattgacaaaatttgtgtaaacaaaatcaccactcaccaagggagtgcttcttttgcaagggggggtatctactgtttaaactaatttaaacaaaatatatatatgcatgcttttttttaaatttgggccaaaaaatatttacaatacgttctccttgtttaagagggagattttttttttccccaaaatt

SEQ ID NO: 58955 - DNA, 712 bp, Glycine max
  unsure (1)..(712): unsure at all n locations
  Clone ID: PAT_MRT3847_24248C.1
acataagaatgcatgttttatataacgatcattaggtactaatgttaaaaattgtacgcctaaaatcttaccttacacaatatacaagtaaaatggaaaatatactattataattcaactgccaccgaagccaaccttgaaagcaactttaactggatgttgaggtaccttctgcaacaattctagtgtgcctaatggcttcttattatccttcccaatcgagaaagctcaggttctgccaataacatatcttgcagtggtttcacgtcaactctattatcaccagagccataaacatgatgcatagaaagtagcctgtggtgaagtttgtagtcattgccgacataggatacaactagattaccagcatcggggtgtggccagcttcttgaggtaggaaatcggagtataaaggtaccaggttcttgaaatcctgtgggaccttgaagtgaagattctgcttcctccttagttatgaatccttctatccacttaggtgatgtggaattccagataggatttatccagtcccttgatattataaatgccacagggtacaaccaacaccacaacttctcaaagttctcttgtgttaggtactcttgacatccagcaatccttctcaggagatttaggcccggnnnngannnnnatcttgaacaacannnnnncaatcttcatgaattgctcttcaatctcatacactgcattc

SEQ ID NO: 58956 - DNA, 178 bp, Glycine max
  Clone ID: PAT_MRT3847_24249C.1
actctacgcgaacgtgtttaagctgattatgtgaggctgcactgatgctaataatgtgttgaaggagcttcaatacgctaagactgcctaccccaacggctacatccatataatgtaattatacaactttcgccatgtgcagttcatcagcttcatcgtctacaagcctccacgcttt

SEQ ID NO: 58957 - DNA, 5753 bp, Glycine max
  Clone ID: PAT_MRT3847_2424C.1
ccacgcgtccgcggacgcgtgggggagtttgtcaaccatggtaagcaattgctgcctatttatacattttttactcttaaatgtgtaggagccaatcatgatacacatgctattttatttctggcgtaggaggtgttctcttcaaggtttatatagttggtgatgctataaaggttgtaaggcggttttcgttacctgatgttagcaactgggaactctccaaagatgctggtatagatcgctttccaagggtttcttgtgctgcagcttctgcggatgatgcagatctggatcctactgttgccggtaagtttgtattcttgaccaaggctttctatagacctttacgttttcagacttaagacaggttttctcattctcccccctcgggaaggcaatcatcagagaaatcgtcattttactttgttgtgttccggtcggtttgtactgagttcaatttttttcgtgcaggaacaagggaatactattcgtggctgttgaccacaataggcctctttcagatcaaggtccttttgatattgtcttgcataagttatcagggaaagagtggcgccaggttcttgaggattataggctgtcacatccggaagttactgttctggatcctccagatgccatacaacatttacgcaaccggcagtatatgcttcaggctgttgcggatatgaacctttctgattcctatggcactgttggtgttcctcggcaattagttatcaagagagacgcattagccatcccagagttggtcaacaaagctggcttgactttaccccttgttgcaaagccactagttgccgatggaagtgcaaagtcccatgaattatcccttgcttatgagcatttttcccttcaaaatcttgaacctcctcttgttcttcaggagtttgtcaaccatggaggtgttcttttcaaggtttatatagttggtgatgctataaaggtcgtaaggcggttttcgttacctgatgtaagcaactgggaactctcgaaagatgctgggatatatcgttttccaagggtttcttgtgctgcagcttctgcagatgatgctgatttggatcctactgttgctgagcttcctccaagacctttactagagaaactggctaaggaacttcgatggcgattgggtcttcgtctattcaacctggatattaatccttgagtatggaaccagggatcacttttacgtcattgacattaactacttgcttgatgaacgaaggggtcatgaaggatttgtctctgttaatttaacggtaaactgcttgctttaaaatgtggggtgaagtgacatgcttgccattgctttatttaatcttcccttactgtatacaagaaatcgcgtccggctaattccatttcaaccgacacgccactacccttccttctgatctctcaaatctatttccattccattccttcggtgagagcaaaatcacccttcttgaaacagattttagcaccaaacaaaaacactctatagagggtgaagattttttagaacagaataagaattaatatggcccttacaaaacaaataatgggttcttcattgctagagaggtccatgtttgttccttcttcttcttccccttcatcattttttaactcaactcggttcttagttcctttggagaacagagagttgtgaggatgagagctgcaaatctgcagctaagatttgcttcttcttctcatcatcttcattctagattaggaggaacaagatcaaagaggatttcaaagagaccattgtgaagcatattgatgctcttactgacaggattggaaggaatgttgtccttgaacttgactgagattgatccaaagaccaaatctgcaaagaagagtaatgaacagtgttgaaggattggtcaaagaagtcaattggcagagagagttaattacacggaattcatagttgactctagttttggggaagctattaacaaactaacgattcgcttggtccgagtaactgtgcagttacatttgattttcctttctctgttagcaaatttcctatctctcgttcttaatcagccaatcgtttacctccatttttcgtttccattttcccttacacttaactcacctatttgcgactccttggtgtccgtttatcttcaaagtgacaggcctcggtatggtttcgctagcatatctatttcgttaccattccgtcagagagagcaagatcacccttctaaagagagaaaacacacacacacacacacaaaacaaaactcttaaagagggtgaagattttttggaacagaataagagtatggcccttacaaaacaaatcttgggttcttcattgctagagaggtccatgtttgttccttcttcttccccttcatcacttctcaaccaaactcggttcttagttcctttggagaacatgagagttgtgagggtgaagagagctgcaaagtttcctgtggcaactataagtgaggatttgatgaagtgtttttcttcttctccttcatcatatacatctttaaccttttcttcgtcttcttcatcactatcgacagaaatttcagtgtaattcaacatcaataatgtgatatgtgtaaaaagaatcaataacgctcatatgaaagccacagcaaagaagcatattgacactcttactgacagtattggaagatggcgatcattgtcaactcattcgaagtgacaatcaccgcaaccgagctcgaaacggatacggctgctccggcatcgggtcccggtgtgggcaacggagtcaaatcctgagcgggggcgacgtcggcggagaagaaaattgctactatgctatcgttggcgaaggacttgaaggttattgcttgagatcacatactgagagagagagagatggaaagcgtatcaaaatttaagatttgaagtggtgatataaagatccttaggccggtcttcagtacctgatataaaaagatcttcatggaaagaggattttcttttacaataggtcataattaccctgggatacacctgctggtgttgaattatctagggagaatgagctgggaaatctgagtggtgatggccaatgactattgaaactacctaacagaattcatgagcgttatatatacaatcatttcaacatggcaattatacgtaattaacttacaagaccaaatcttggagtatcagaaatatataaccttaccggatatggcaaaatgccagaatatgaacatatatttacagacttcctgttgagcttggggcaggggaagtacaagaaaaaataggctaaaataactgtttccagcccttttatttatgtcccccacatgacgtaagcccccttgcctctcagtttgaagctcaaaactatggctgtaggaaagtatcttagaaagcattagtgataataactttttcagttatgctgtgtgatggaagtgccatggaaaactatcaagacttgtgtttcaggaacttcgacctgtacagaacaactgctagtattttattgtgcgggaactttcggctgtccttccaaggtaacaaatgctgttgcaaatcctctgaagttctataagctggtagcttgatgaacgaaggggtcaagtctgcaatttgaaggatttgtcttcgcaccgcagtggatgttaatatgaccgtgttggataagttgacggatttcaaatgtactgacccgttctttgctgtatataaggcataaattcttgacactaggaatctaaagcaaattttcgtcaggcaataaacgaaaataagctgtttatgattgattatcatgatatatatctacctttcttagaagggatcaatgcccttgatggtaggaaatcatatgccacacgcaccatctttttcttgacaccacgtggcactctcaagcctgtggctatagaacttagcctccctcatgctggacctaattcccggtcaaagcgcgtggttacacctcctgttgatgctactactaattggatgtggcagcttgccaaggcccatgtttgctccaatgatgctggggtgcaccaacttgttaaccattggttacgtacacatgccaacttggaaccatttatattggcggctcataggcaattaagtgctatgcatccaattttcaagttgttggacccccacatgaggtacaccttggagatcaatgccttggctagacagagtttgatcaatgctgatggaatcattgaaaattgctttactcctggtcgctatgccatggagattagttctgctgcctacaagaacttttggcgctttgacatggatagcctccctgcagatctcatccgcaggggaatggccgtacctgacccaacacagccacatggtctaaagctcatattggaagactacccttatgcagctgatggaatactaatctggtctgcaatagaagactgggttcgaacctatgtgaaccattactaccctcactcaagccttatatgcaatgacaaagagttacaatcttggtactctgagtcaatcaatgtaggccatgctgatctcaggcatgaaagttggtggccaacattgaacaatagtgaggatcttgtgtccattctttccacattgatttggaatgcatctgcacaacatgctgctctcaactttggccagtacccttatggtggctatgtgcctaatcgtccaccactgatgagaaggttaataccagaagagggtgatccagaatatgcaagtttccatgctgaccctcagaagtattttctgaatgcattgcctagcttgctgcaagccacaaagttcatggctgtggttgacacactctccactcactcacctgatgaggagtacttgggggagaggcaacaaccttcaatttggtctggagacgccgagatcgtcgaggcgttctacgatttctccgccaaggttcgacagatagagaaggtcattgatagcaggaaccttgatcggactctaaggaaccgttgtggtgcaggggtgttgccatatgagttgcttgctcctagctctgaacctggcgttacatgcagaggggtgcccaatagtgtgtccacataactatactaaactaataaataagggagtcactcccacattttgatacgcattaatatatatgtaatggttggcttactatttactaccatggacagtgactctcagtggatgcccattttgtacctagatttaataagttgttatagtatatattggtaacctagggctgtatagactgtatatgaaaatgagtttggtggggttggaggatgtgtgactgtttataaagttattatcacaatttatagttttcttttgcactattatgtagttctttttttcatcgttgcaaatatttgcatattttagtatgaaataaagttatcaattagatttatgcttctttgttatatgcttattacatctatcatcatcgcctattcaacctggatattatccgtgagtatggaacaagagatcccttttacgtcattgacataaactacttccctggtaagacgatatattgaagatcttgtttacttaaatcccatatcacactaatagagagtatgccaggttatttggtatgcccaatgagatttcacctgtgttgacaagagtatatgtcagaagagttcgtttataaaaatttcttttgatattctactttgagttgacatataatcctctcaccttcccatcatcatcgc

SEQ ID NO: 58958 - DNA, 268 bp, Glycine max
  Clone ID: PAT_MRT3847_24250C.1
tgctaatacaccaaagacagcggcacccgttgtgctaacaccaatagtgaagcccacaggatctctgcctccaatgattgaacgacaaactacatcaacaccaccaacggcgaatggacgggacacatgatgtacaccaccacagtatctatgacatgctacatgccttattgacacgctcaaactaagtgcttgtgtagatcttgttggtggctagggttacactggctctggaggacctgttgcgaaccaatgctgccgcgtgctt

SEQ ID NO: 58959 - DNA, 411 bp, Glycine max
  Clone ID: PAT_MRT3847_24251C.1
aaccaaaaaacaggtttaaaaagaaatctttaattttaatttttcttcccccctttaaaaaaccttttttttttttttgggacaggtttgggtacattacccctaatttcaacatctaaaaaaattaaggaaaaaacaattcacctttgggacttgggaaaaactgggcaggccaaaaaaccgggggtttgggaccttttttttttcataaggcacaaaaacccccgaaaaaaaaaaaaaaaaaaaaaacctaagggaagggtacaaagcaccaaaaattttagggttttgggtacacttaaaagaaaacaggtccattttttttttttgggcatgggagcacccacttggattattggtatggccaacaaaagtatcggaaccgggtgggttcaaaagggtaaccccaaa

SEQ ID NO: 58960 - DNA, 641 bp, Glycine max
  unsure (1)..(641): unsure at all n locations
  Clone ID: PAT_MRT3847_24252C.1
ccacgcgtccggcgagtaaagctttctctctcttgttccttcgtggtctatgttcttcttctacccttcgcgaatggattctttctctccctttttcgcgcattcgatccgtgtatttcacgccttgtgtttagcctctcaccccaaagcacttcatcacaatgcaaatcaccaaatcttcgtgttttttttattcctctattgtcatgaatttctctaggtatcatgtgacactgacgtaatgcaattatatgcgaatcacttgtcacttgccagcacttacttcatatttgatcaaagaacacagttaattatttatatgcctacaatttaatcgaacacgtgcttttgtgaactcttcctagttcttagtttcttacactattttgtttcctcatttgatctagcaaaatatacaatcacgcacatgtagggatataaatatcaggatctctaattccagattttagctgatgatgttctatgtgccaattggaattgatattgtcaggtggcactttcataatgtgatggaatctgaagctcgtttctcattgctcatatttagttcagattgagtgagnntggntgttgntaagttgatcaatgaataaaattagttttgtaatgaagttttggac

SEQ ID NO: 58961 - DNA, 455 bp, Glycine max
  Clone ID: PAT_MRT3847_24253C.1
gttgagattaaattacaagttgtgaacgtgtttattgaattcttgattctcttaggaagcaataaggacatggcaaagatatcattagctttggtatttgcattggtggtgactgtaccatttcattcagttatgggtcaggatgatgcatggaaaagtataatagaccaagcaaaagatgaagcaagcaaagcaggtctctctgaagatacaatattcggggctgagaaggctataacagatggttctgccgaaaaggttgctgaggatgccttgggtgaaggatctttggatgattgggttaaacaagccaaagatatgaccaacggtgaaagttcaccctctggggcaccagaagatttaccagatgatgaagaagaggacaatcttctagagacaccagaattggcaccaaaaattgcaccatcaaaggcacccgtaggagcaccaacaga

SEQ ID NO: 58962 - DNA, 223 bp, Glycine max
  unsure (1)..(223): unsure at all n locations
  Clone ID: PAT_MRT3847_24254C.1
ggtgttttctttataatcattacctttttttttttcattagaccggcctctttnnnnccaatcaaaattaaaaacaaatcttcctttcaagcgaaattaacgttggaaacatacttaaaaattgcgttggttacggccttttttaccttccaataaagggggcaaatatattgataattaaaggggggatgattatccccgtccttaagaccggcctgggggg

SEQ ID NO: 58963 - DNA, 329 bp, Glycine max
  Clone ID: PAT_MRT3847_24255C.1
gggtgttgctggtactctgtggtgtgttaaaggtctacaatacacctatctaaagctgaaggattgacacagtggttgctttggcactcattttttaatgtatatcggagatcatcggtgtagcaagatcattctgaggtatttttttaagctttatgtggaaataagggttattgtataactggggtcgattcttgatcaaagccgtctaatcgctgtggaaaaccgggccaatggtagcgtagccgggattttgagaaagccgttgtgaaatatgtaattaacctgactagatatcataagggctagattgaaactgcttgaaatgt

SEQ ID NO: 58964 - DNA, 308 bp, Glycine max
  Clone ID: PAT_MRT3847_24256C.1
tctcgagccgaatcggctcgagacggctgcgagaagacgacagaaattgtttagtctctcatatgtcatggagactttacaagtgtaaaatggaaatatttagtaaaggggaaaaagataagaaagggaatgaagggaaaaaaatgactctcattgcttgcttttcctttttctagcctttgccctctataaggaattatattctgttagaattattgtgtgtcttctccttcttctctcttcttctgttataggctgcaattagtggacttctgaataaatctgatgtccttaatactcattcttcc

SEQ ID NO: 58965 - DNA, 3905 bp, Glycine max
  Clone ID: PAT_MRT3847_24257C.1
cccacacgtccatttacgctttggcccactcgtccgcccacgtgtccggctgcaggggctacgttctattgtgagcaaaaattaataagccttagaggttaacgaggaaaaggaagcatctctggaacttaaagaagtatgtaatggataagacttggaaattgtacgggaaagtatgaagattctattagagaagaataccatggtggagcagtcacggtatgttgcaaaaattgagcttgagctttttgcatacaaaccaagtattacttcttaattttgcaatttactgaataataaaaaacacaatctttttaatgaaagaaataacttaggatctaaattagagagtgttgaagcaaaacgtggctgacaggaaaaaagaataagaaaataagaatagaaattttctgagatggagaaagacataaacaacaaattctgtcaaatagaagaagagcatgctttgcttttggccaacaaatgaaagcatgctgatcaaaaaaattgaaggatatgctcgaatggacaatttggagaatcgtgtcattcgaggatgtgattaaatgccatgagtcagaaaaatgtttgaagaagtcttcaaaattggagacaaagaaggaattaagggttgaaaagctcaagaggctgaagaagacttggaacagaagaacttgggtttattaattgaatgtcaaaaacacatggaggcatcaaaattttctgatgaagatatctctgaggtggagagtgaaaaccttatgcaacagatggagctagagtatcttgatagaggaaaacgagaagtagtatgtggggataaaaagacttcttgcagctcttgaggtagatgtcatgaggcggatatgccaaagggatcaactggcaaggaaatgccaatagcgcatatcctcaataatgtacacgagcacgaaggagttggtaatgaaaggcggagaaacgcaaatgaaaaaacctaaagaaacaagctcgaagagaatttgaacatatgggacaggtgtcagtttgaggtgcagaacatccagaatattctgcccaaactggatgatgtgaaaaacaacaaatgcaaaaacaaaagctctagaccaacaggtgtgtagctgaaggactttattcgcattggaaggaaaaatagcagaaggcgccgtaaagggtgtgttattgtggatcgtttcaaagggctttcaaacgtaatcgaccactttataaagaaccagtatattgtgggtggaaaaaaaatgtgagctatttgaagaaaaaaagttaccacatcgggagtgatgggggagttaaaagatggaaagtttgctgtttaagttgaggataatctagtccattatgaggcactggctctataaaaccataaattaggtctaaaacgaactttttcaatcaacaggtttttggaacagcgtgcacttgctgaatataacgaagatttacacaatgcgaactaagggcttgtcctggagcttgtcctatcctgcaagaagtttgagctgaatgaatctgaaaatgtttatttgaaggagtcagttgagaggatggacaaagatctgcatgaagccaaaactgaaaatgaccatttcaattgtcagattgagagttcagagcatcttcttgagaagaagaacgtggaactgttagaaatggagggaaggctaaaggctgcagaaatgttgagtgcagagttttgcagagatattgagaaattgaagatggaaaaacaacaatcaagactgatcaacgaaaatcttgaaaggcagattcttgaactatcagaaggttgcatgaatcacaaaagagaaattgagcaccttaatgaagcaaacagaagtttacagtcagagatgagatgcttacgtcaagaagttgaacaacagagggctagggaggaaacactgagttcagagctgctggataaaacaaacgaatttgaactttgggaggctgaggctgctacattctattttgatcttcagatttcctccattagtgaagcattgttggaaaacaaggtcaccgagcttactggagtatgcatgagacttgaagatgaaagtgatgcaaaaagcttggagattaaacagatgacagaaagagtctgtctactggaaagtgaaattggaggactgaaagggcagttatctgcatataatccagtcattagttcattgaaagaggattttgcttctttagaacacactgccctagttcggataaacaaaatgcctgttgaatgcaatcaagaacaaaaggatgcagtaattgaaacttgtctccaaggaaatggctatcaaagttcaacagataacaaaagcgctttgataccagatggggtttcagatttgctgagtatgaaggcaaggattagagcagttgaaaaattaatgatggaagaacttgaaagacatgtgaaggaggaaagtttgaccacaaatgtcaaagcagaagctgttacagaaatgactgagcattcaaatttggaagttggcacgtatccagaaattgacgacagaaaagtggtgatgaaaattaagaaagacaacagcaaacgtggcaataatgcatggagaacaaaatctcagaaaaggttgataatgatagacattcctcttgatgactacaaggatgatccagactccaacaagtattgcaagagagatcacactaggtgcaatgatcatatgcttgagttatgtgaaactgatcagcatgatgttactgaagaaagtaaacataattctgtttcaatagaggatgtaattacatgccatgagtcagaaagatgtcaaaattactcttcagaattggagacagagaaggaattaggggttgacaagctagagttgtggaagactcgaaaagagacgacaagtgaagatagcaagaggaaaattttggagaggcttgcttccgattctcagaagcttgccattcttaaaatgacactacaagacttgaagaagaaaacggagaccaagaaaagacgacagaagggagctggcactgaatatgaaacagtcaaaagacaaatagacgaagttgagggagctgttgtgaaattagtagatactaatgatcaactgacaaaggatcttgaagagagcgccccgtctctgaacaggcagacttcggttgagttggaaaagagtagacacatccagagaaaaagaataaccgagcaggcacgaaaaggttctgaacagataggaaggttgcagtttgaggtgcagaacatccaatacactttgctgaaattggctgatgagagcaaagggaagagcagattcactggaaaaacagtggtcttgcttagggactttattcacagtggcagcaagagaactagcaaaaagcgcaacaaggggttctgtggatgctcaaggccttcaactgatgagcactaagtgagaaaatgtagaatatcattttgttgtaagtattttctttaattgatatgtgtctaatcttagcataataatttttaattttagatggtaaagatgctattaggctttatctgatcacagtaacttatgtcagatctgtatgttctagctttcagaggacataacatgtactgagcgacattttagctaaggagttgtgctgtcatgtttgacaatgtttaagctatgaaagcacagagcacttcaacatttatatgtctagtgtgatggaaagtttgtttcactttaaggcaatctaaaaaaaaaaaaaattgctaaaccaaaaaaaaagagggggccctgtggatgctcaaggccttcaactaatgaggactaagtgagaaaatttagaatcattttgttgtaagtaccttctttaattggtatgtgtctaatcttagcataataattttaattttaaaaaacaaaacc

SEQ ID NO: 58966 - DNA, 1188 bp, Glycine max
  unsure (1)..(1188): unsure at all n locations
  Clone ID: PAT_MRT3847_24258C.1
ccagcgnccgctaatttttcacgagtgattgcactctagtcccgtaaaaacatggcatcaccacctccgccaaaaccaatcgaagagccacgcccaccagaatcaaacccctctagtgaaaaaaaaaaggccttgatcattaaccaaaaaaccttatccaaactccaatgactacaatcaccctctccctcccttgcacaaacccctacttcctctcttcttctccaaaacgattcagattcaacactcaatcagcacaactttccccttcctcctcctcacctctccaatccccaccactccccaaaaccaccggagtcatcgtcatcggcgcgggcctcgccggactcgccgccgccacccacctgaactcccagaacatccccttcctcctcctggaagcctccgacgccgtcggaggccgcgtgcgcaccgacattgtcgacggcttcctcctcgaccgcggcttccaaatcttcatcaccgcctacccggaagcccaaaagctcctcaattatcaatccctcaacctccagaagttctactccggcgcccgaatcttctacgatggccaattccacaccgtcgccgaccctctccgccacttctgggactccgcgaggtccctcaccaacccaatcggatcccccctcgacaagctcctaatcggatccaccagaatccgcgccctcgtcaaatccgacgaagaaatcctcaccgcagaggaagtccccacaatcgaactactaaaaaaactagggttttccgattccatcatccgaagattcttccgtccgttcttcggcggaatcttcttcgaccctgacctggaaacgacgtcgcgcttgttcaatttcatcttcaaatgcctcgccctcggagacaacactcttccagcgaggggcatatcggcgatcccggaacagctggcggcgaggttgccgtccggttcgatcctgctcaactccaaggccgtttcggtcgacctcgataattccgattcgccgctcgtgagactccaaaacggcgacgttttgaagagcgagctaggagtcatagtagcggttgaagaaccagcagcagttcatttattatctggaagaaccggtccggttcctaaaaagccggttcgaagcacggtctgtttgtacttcaccgcgaatcgggaccagatcccggtacctgacc

SEQ ID NO: 58967 - DNA, 109 bp, Glycine max
  Clone ID: PAT_MRT3847_24259C.1
tgcatgtgcgtgtacacatgcgcactctagcgcacacgactgtgcgcatgggagcgcgtacatatatgcgacggtgtgctcgtgtacgtatgcgcgaacgcacgtatac

SEQ ID NO: 58968 - DNA, 600 bp, Glycine max
  Clone ID: PAT_MRT3847_2425C.1
attcccgggtcgacccacgcgtccgctaaatttgacagaatcaaataaggcgtgaatcgaaataaaaagtggttttcttcttctctctctagactccaatgtcggctctcttctccattgcctccttcgtcttaccatcctggttataggctgaaaagggaaggggggagagagagtgtttgcggcaatggaggaaccgagcaaactgaagcgtgccatgattgattccttggctggggcaatttctggtggaatatcacggactgttacatcgccccttgatgttattaagattcgattccaggtccagctagagcccacatcttcatgggcattactacgcaaggatttggcttcagctacggctgcagcatcaaaatacactggtatgcttcaggcaaccaatgatattcttagagaagaaggcgtacagggggtttggcgactctatgtgccggcattgctcatggttatgccatatacagctatatcttttacagttcactctctgctgaagactgatccgcctggttcttccaagacagagaatcacattaatttaagcccttatctatcctacatcagtggggcattagctgg

SEQ ID NO: 58969 - DNA, 1361 bp, Glycine max
  Clone ID: PAT_MRT3847_24260C.1
ggctcgagggccccagttggaacccatttccgtagtcaaaaccccagagaacgtagccacaagggcaaaacccttccccccgccatggcacgcgtatcccggtcctcccccccgcgcctcctctactccctctgctgcaccactgcatcgcggtcaccggcgtcgtccctcatcggcggcgccttccatctccgccacttttcagccgggaacgcggcgcgcacgaagccggacaaggagccgtggtggaaggagtcaatggagcggctccgcaacatcggaatctcggcgcacatcgactccgggaagacaactctgacggagcgggttctgtactacactggtcggatccacgaaatccacgaggtcaggggcagggacggcgtcggcgccaagatggactccatggacttggagagggagaagggaatcaccattcagtctgctgccacctactgcacttggaaagattataagattaacattattgacacgcctggtcatgttgattttaccatcgaggttgagagggctttgcgcgtccttgatggtgccattctcgttctttgtagtgttggtggggtgcaaagtcagtccattactgttgatcggcaaatgagaagatatgaagttccaagacttgcatttatcaacaaacttgatcggatgggagcagatccatggaaagtgttaaatcaggctagatctaagcttcggcatcatagtgctgccatacaagttccaataggattggaagatgattttaagggactagttgatcttgtgcagttaaaggccttctatttccatggttcaaatggtgaaaatgttgtcactgaagaagtgcctgcagatatggaagccttggtggcagagaaaagacgtgaactcatagaaaccgtgtcagaggttgacgataaacttgctgaagcttttcttggtgatgagaccatatcagctgctgatcttgaggaagcagttcgtagggctaccatagcccagaaatttataccagtattcatgggtagtgctttcaaaaataagggggtacagccacttctggatggtgtaattagttatttgccatgtccaatagaagttagtaattatgcccttgaccaaactaagaatgaggacaaggttgagttgcgtggaagtcctgatgggccacttgtggcattggctttcaagttggaggaagggcggtttggtcagttaacatatctaagaatttacgagggtgtgattcggaagggtgattttattattaatgtaaacactagcaagaagatcaaggttcctcgcttggttcggatgcattctgatgagatggaggacattcaagaggctcatgctgggca

SEQ ID NO: 58970 - DNA, 423 bp, Glycine max
  Clone ID: PAT_MRT3847_24261C.1
ccagaaatggggtctaaaatcaaatttctttgaataataatccctgcccataaaaattatttttcttcaaagcccgaagttgtaagcaataccccccccaaactgaaaaagagggccgcaaaataaattttcacatgtaataaacttaaaaccaccggtggagggaaattttccccttccttaaagggacttaaccttgattagaaagcttacccctactgggacataggcttgaaaattccctttactggtggaagaacctgaaaagtctgataaatgttggcctaaaggggaagtaaaaccaggaatttcaggggaaggaatgactggaaaaaatgtaggactttctaaatgtgtctggaacaatggacttggggatgaggaaataatgccttcaggaaattctgcaggggaagaattaaa

SEQ ID NO: 58971 - DNA, 247 bp, Glycine max
  Clone ID: PAT_MRT3847_24262C.1
acggctgcgacaagacgacagaaggaggacacactagtaatcagacagttcgtaatcattcggtacagtcagatctcaatgaaggtactgatagacgcaggggaatagcaggtagaatgcctgccaagtcataagcatgaaagcgatgacctcaagaacgaacctaggatatgggggactaagtgcgggcgagaggtgcacccatgcattgcacttggacgtgatagtcagtctcaagcgcgagttc

SEQ ID NO: 58972 - DNA, 262 bp, Glycine max
  unsure (1)..(262): unsure at all n locations
  Clone ID: PAT_MRT3847_24263C.1
tatggtgtgacangacacagaaggaggaacatggactcactggggtgatgggcaatgttctggcccggcgcgcctccctgtttggggccggagggcatgcgcctgcgcggcgtctgcactggtaaccgtctcttgcttcttacctgccgggaattggcatctcttggcttgtgatgtcaacgcgtttgaaaggatacatcccttttctactgtgacaaggcgacggagactgacctgggctctcattgatatgatgcatcct

SEQ ID NO: 58973 - DNA, 297 bp, Glycine max
  Clone ID: PAT_MRT3847_24264C.1
catttttgtggggttgcttttgtctacgttgagataagacatttaatagcaggctctatatcctgtgcaaagatactatgaccagtcacaaggccacgaactacagttctagggaaagacccttggactactgtctacagacacattcaacagttttttgaaagcgggggggatccaggaggaccgattattacactccatgctgcatatattggtccaactgcacatatgttaaagaaaggatatctctatgggcgaaggatgccgaagaactagcgaaaggagattacctaccat

SEQ ID NO: 58974 - DNA, 1794 bp, Glycine max
  Clone ID: PAT_MRT3847_24265C.1
cccacgcgtccgccttcacccaatcactgggttagtacggacacaaactaagaagccatactcacatcacacaacacaaccatcctcaagccaacaacaccttctcagatcttacaatgatatttcaatcgtgttttatgatgactgcaactctgctattatttgttatagcacaatgtgttgtgggagttaattcactttcacaagctgataagataagcactttgccagggcagccaccagtcaaattccagcaatatgctggttacattacagtggacgacaagcagaagagagccttgttttactactttgttgaagctgaagtggaaccagcttcaaagccactagttctatggttaaatggagggcctggttgttcttctgttggagctggagcttttgttgagcatggccctttcaaaccaagtgaaaatggtcttttgaagaatgaacatagttggaacaaagaggcaaatatgttgtacttggaatcaccagctggtgttggtttctcctactctgccaataaatctttctatgactttgtgaatgatgaaatgacagcaagggacaatcttgttttcctacagcgttggttcactaaattcccagagttaaaaaacaatgatttctttatcacaggggagagctatgcaggtcattatgtaccccaacttgcacaactcattgttcaaaccaagaccaagttcaatctcaaggggatagcaatagggaatcctcttgtcgaattcaacacggatttcaactccagagctgagtttttctggtcccatggactaatatcagattcaacttacgaaatcttcaccaaagtatgcaactattcccaaattaggagacaacatcagggtgggacgcttacccccatttgttccggagtaaataggctagtgtcaacggaagttagtaggtatattgatacatatgatgttacacttgatgtgtgtctttcatcagcagatcaacaggcttatgtgccgaatcaactgactcaactgcaagagggtgccaagatagatgtttgtgtggaagatgaaactatcgcatatttgaataggaaagatgtgcaggaagctctccatgctaagctcgtagggatcacgtcatggtcaacttgcagcgatgttcttaaatatgacatgcagaatctagagattccaaccatttctattctaggtgcacttgctaagtcaggtatcagggttctggtatacagtggagatcaagattcagtcatcccattaactgggacaagatccctggtaaatggattagccaaggactttggactcaacacaacagtgtcctatagagcatggtttgagggaagacaggtggccggttggacacaagtatatggagacatcttatcatttgccaccataagaggagctgctcatgaagctccattttcccaaccagagaggtcactggtgctgctaaaagcatttttggaaggaaagccacttccagaaccattcctttaaaaatggaaatagataacagaggggttgttcctagcacagtaaaaatacacccattcaaacccctcacataaactgattattcctaatggatcacttttcaattgttataagcattccttctatctttccctacattattttttttttttctttttgagcactgagtgaatgttacatgtactggcattgacattattatatagttcaccaaaacaaagtgatcttccaaatgtacttactaataactaattcgttggttctgtgcctcgaaacattaccaaaa

SEQ ID NO: 58975 - DNA, 500 bp, Glycine max
  unsure (1)..(500): unsure at all n locations
  Clone ID: PAT_MRT3847_24266C.1
nnnggggnngttttttttatttttttttttttttttttttttttttttttttttttnggggatttaaaaaggggcaaccttattcggccccatacattttcttgtttgactgaggggctttttaaatccaaatcaggggggggcttgtttttgggccttttttgaaaaaatccaaaacaattcattcttcttgtttttttttgggggggaaaaaaaaacatttttttttaattctttttttttccccccccttcagcaataaaaatccctttcaaagggcccaaattaccccataagggcttttttaggtctttgacaaatttgtttaaaagaaaaaaatttttttcccaaactgcttgcaaagtcaggtcaagctggtttttttaaaaaaatttccaaacagttttttcccaggcaaaaacgggaaaaactggcattttaaaaaaaataaacgtttttggaaaccttcttcaccttcaaaaaacagcgggaattttgtc

SEQ ID NO: 58976 - DNA, 826 bp, Glycine max
  unsure (1)..(826): unsure at all n locations
  Clone ID: PAT_MRT3847_24267C.1
ggtccggattcccgggtcgacccacgcgtccggttgaatgcacatggccaatccctgagatgctaaaaaagaaggtttaagtgaactcgctcttgtgttcttgttctgggagctgctgaaaaagcaaactagaaagcttgacggttatgaataatagtttttataggagttttcaatcataagtctgagaggaaggtcctacaactttttgcaggcaaagtttttattttacatctgccattcattgtgtaaacgggacttaacatgactggaaaagcatcagcttcaaaacctaatataggtctgagtggatctgatggtctttcacatgcttacattcagtatccgccacttcggttcaatgttcctggatcaagtggattattttatgatgatggaaataagtttctactctctccaacagctgaccaggttttttcttggaaagttggtccctttgatcctctcagtgatccaaacactgattcaataagtgaaggccccattatagctattcggtattctttagacacaaaggtaatagcaatccaacgatcaaaccatgagatacagttttgggatagagagactggggggacttttagccataaatgcaagccagaatcagaaagtatacttggattcttttggacagatagtcaacagtgtgatattgttcttgttaagaccagtggtctagacttgtacacatataattcagagtcaaaatcactgcaactggtgcaaacaaagaaactgaatgtgagttgggtatgtttacacccatgaaagtcgnctggttcttcttgcttctggcatgcagtgc

SEQ ID NO: 58977 - DNA, 471 bp, Glycine max
  Clone ID: PAT_MRT3847_24268C.1
ctcgagccgatcaaaactaaacagtttaataattaccactaatttttcaagtggtaagatgaaacccaaaattgagcatgcttgtttttttttatgccaaattactattattgtctctgatagtaatcttttactcaatgacagttaatttagagacctaagaatcatggtatttttgcaacctattagagttgttaaccttagagcaaccatttgatgtgagggagatatgtttattttggttatatttctgaattctgaccaactattgtaagttaagaatggaggtgtgagaatgatcaataccttatcacgtcctttcaactaagagctgtgtgagcttgaaatacagatgacaaggatcaatgtttttaccatgatcatataaggtttgattaatcgattcactatcaagtaacccactattctaaaagataaagtaggtggagtcggataacatggagatgattt

SEQ ID NO: 58978 - DNA, 615 bp, Glycine max
  Clone ID: PAT_MRT3847_24269C.1
cggacgcgtggtaatgctggtggtgtatagtgagaggtggtgggggaaatgcggtatctgtggcgacggtcggtcaacttgtcctccttaagtttcgccaaggcggcggcctgaggtaaagaaagtggttgtagagcaatgacctcacggcggatctccggagagaggccggagataaaacagctgagttggaattgcgactgaagcccgacgatgcggttagcaagacgctcgaagtccgtaaggtaatcgttgacagaacctcgttgggagagtttgaacaacgcacctttgggatcgtcatagtaggacggggcaaagcgtgtttcgagagcttgcaaaaggccattccacgaggtaataaagccgttgcggtacatccgttggtaccagctcagggctggaccatccatgtaaaacgaggccatggtgatgcggtcctcgtcgggagtgctatggaaattgaaaaatgtgtgatcataaaaatccaccctagtggatcagtgccgtcgaagcgaggaacgtcaagtttgactggcggtcggtgctgagaagacatcggcgacgacggcggagggagcgaggtcaattgattcaagcggtcccaaatcgaat

SEQ ID NO: 58979 - DNA, 510 bp, Glycine max
  Clone ID: PAT_MRT3847_2426C.1
ttccttctatatcttcagagtagcatagcatatcatatccatggaaacttctcagcctctttctatagaaagcttctcatacagttggttagtgaacctaaggccatcagcactagaaagcctagaaagctccctaagaactccccttgatgcatctgatgaaacttcttccttcattgagatggacccaagaatgccaccttctaaaagattctttaagaactcacaggactccaaatttgacttcccaatttcacagtcccctctcactcttgtccatgcagatgagctcttttccaatggctacctcatgcctctctttgttgagtcattgcaaatggaagaatatgagtcctcagactccaacacaagcttagtttcatcatcttcacatgcaccaaagagtgaggctcctacaggcccttctagatgcctttccttaaaaaggtgcagaacattgtcaaggagagtgtttcagaagtatctgaatttcttgaggcccttgtgtag

SEQ ID NO: 58980 - DNA, 364 bp, Glycine max
  Clone ID: PAT_MRT3847_24270C.1
gccagacgaccacagaagggcatatgcgaacaatccattgcatagattgtgaaccgtgacggctgggcgtaacatgatcagttctcaagcggatgacttgtcaccacattgcctgagttgttatcataccttcgccagagagtttgctgggacccggaactgtgacacccaagacgcttctggatcaattctgctatttggttagatcatactatctgctgaaagtgatttgcatgatggtgattgcatggatcgtgattgcagccagggcagtattaaacttaagacagttggggcatgctattatttatagtatttatgcagcataatgcacttaaatacttgttcatggatgcttatatat

SEQ ID NO: 58981 - DNA, 714 bp, Glycine max
  Clone ID: PAT_MRT3847_24271C.1
actactacagctctgctcgcttccccattcagaataccgttttcctgcaacaaatgtttctaattttctctcttttactgtatagcatgtttgggatgatggcaaggtaagtaaaaattaatgtgaatcaaaattaattttaaaattatgttgaagataaaataacacattattgtttggaaaaaattatgatgatactgtaattttgagttagttatcatgattttaatagtatccaaacgtgttatgtgtaaagggtataagttttctctcattcatatattaacaaaacgttttttattaaattgttttaatgacttactactgaatgctttttagcttctaacatattaatttcccttgttttttttaattaataattcatattggtaggtccttaatctatatgtctttactagcaattttacttttataaaattcaatagaatattacattgaaatcattttaaaaaaacttattacttacttttttaaagggatttaaaaacttattactttaaacatataataagtttataaaatacattctgttataatcaagaggtatttggattttattttttttgcattcaactaatcatccttctacttgggcgactcattttttagtacacacttttaaatttcaattacaacttctatccaagccaacgatcgattttaggattggtaaaaacattttaaattacctat

SEQ ID NO: 58982 - DNA, 533 bp, Glycine max
  Clone ID: PAT_MRT3847_24272C.1
ctaggctagagggaattcaaccaaaagtttgctcttcaaatggtatttctagcagttataatgctagggaaattaagctggtggctgttaatcccaagaaaagtagtccaaagcataaaagttcatcaaaggagacctttctttttggaggatgcatggcagtgtgacatatgtggttctaaatctggaaggggatttgtacctaatgaagtcagtgctgaccaatgaccacatttgatgcaatcctacccccaaggacattggatagaacactctaagaagattgagccagagatgcaagagaaggccctaaggttctcatgagccttagggtagattttgggcccatgggctaagtatgagcccacttatccttgtacatattagattaggatttaattatttttggtccttgtatttagggatccataatgtaggtaggatatcctagaaatgtaggatttttcagcccttgtattttagggcacctagactatagtttttgtattaggggtagttttgtaatttcacat

SEQ ID NO: 58983 - DNA, 476 bp, Glycine max
  Clone ID: PAT_MRT3847_24273C.1
atttttatcagtaaaaaaaaaatacaggggaaggatggaccttggcccagttcatggagcgaaaacaaagaaattgtggcccgcccaggtttccatgatcattgttttcttttcttatgtcctattggtttgaacaacacacccattcgttgaactgatgatgtcgttgtcatcttcttaggaactccgaacaacgcagcgacacgacacgccgaatgggtggccacggtgaagttacaatcttcgccgacacaaacttgggcactcgcattgctttcaatgcccctcctgacattacagctgcatctctcaaaagagactttgagaaagcacacttcagttgtttacccgatataggagagatacaagttaaagggttaatggtgaagcgaaaatcatgcttctactacctgcctgattcgttccctatacagtatgctttccctgcaatcagaggaacatggtttcttcatgtg

SEQ ID NO: 58984 - DNA, 257 bp, Glycine max
  unsure (1)..(257): unsure at all n locations
  Clone ID: PAT_MRT3847_24274C.1
gagactagcaggagacactgnganaagtacagcactgncnggctgtacncggattncgctatcaaggaccgcagctnctagangangcnaggtgccangtancnagnncatcatcnatgggtttacagagacaggnacntggggtttcaaaantgcaaatgcnagttcataacctggagtacatggaacacttccanantatgaaaaatgagatcagcaacttgnaaccanggnaggtatggtctngagtgtaanng

SEQ ID NO: 58985 - DNA, 238 bp, Glycine max
  Clone ID: PAT_MRT3847_24275C.1
ttttctgaaaaaaaattcaggaattccccattttatattacttcagattcctgaatttaacccaatggaaattcaccatcattaaacaccaaagagggaggggattaccccatggaatcttccaccgagagagagaccatgggtcttgaaacttatggaggggaccctgaattaaggtggagcaaccaaagaatgggacttggaactggactggactttgatcactttgggacttttt

SEQ ID NO: 58986 - DNA, 467 bp, Glycine max
  Clone ID: PAT_MRT3847_24276C.1
tggaacctttgggctgatttatgtgcttgcagatgatagaaggggatctgtagacctaaatgcccttgaggcgaggtcgaggtactctggctcggccctcagaacgggagtcgggtgcggagctcttactctatccgacggggcgagggataagaattccacgtagtctaaaaagtctaactctgtctccccttttgcctgccataacgataaacatcacgctgacgtatctgtccttggcgaacccgttaaatcagtccatcacagcgacacccgcgccggagtaaccgtacgttggtcggagaagaaggaaggcggggggtaagcctgggcccatactacgatgccaggcgccccggcattccattgcggatccggcaccggaataaagccaccgaactacgcctccgactcccgtcttaagtaaaataccctcgaggcccatccgtacgcgtagataaataacg

SEQ ID NO: 58987 - DNA, 502 bp, Glycine max
  unsure (1)..(502): unsure at all n locations
  Clone ID: PAT_MRT3847_24277C.1
ggcaacctatgatagatagtgatgctttaagtgtcctgttggacaaaaagctgcaagaattggcatctagaattaacttacctcaatgtaccttggccacagaggggtcttctactggtttgagatctagtgtgcaagatcaagttcccagtgtgtcaagcaccacgcctaaggaacaaaacaaaagcttttgcagtgacctgtctagtgataaactggatagcatgcataactctcattattgttcaagtgatgacccagtgcttaacatgaatcggcaactgctgacatcagaagtaagtgaagatcctagctgcagcagcaacagtgaaagtggaaatgatctagtttgttggcattccactgctgttgcaggttttgaaactccttttgtctgcgaaagttacttggatagtgaagacagtgcatatggcagcacagtttattcccccacacaagntgaagccctatctagtttnncccagataggtgactntggtcc

SEQ ID NO: 58988 - DNA, 283 bp, Glycine max
  Clone ID: PAT_MRT3847_24278C.1
gagcaaacagcaacagagttatgcggagactgcggcttcgaaaaggggaactttttcaccgagtatcgacctgatttgaaaaaaacgacggggaactccgacgaccatactggccctggacccctacatcaacagcaccattgtttgatttcctcgacatgttcgatctcggtcgctgcttcctcatttgtaaactctggaattgccatcgtgagttccagtcgaatcgaaaattctgtgacacgaagattcacaagtcttgtgctgaatttaccaaaaagcc

SEQ ID NO: 58989 - DNA, 381 bp, Glycine max
  unsure (1)..(381): unsure at all n locations
  Clone ID: PAT_MRT3847_24279C.1
agaangcgggtcgagtcaagaagcataaccacgacccgtctggatccttttccaatatggacattgacatgcgaggggcctatctacgggggaggaggcttcacctacctccaacgatatctatgttaatgacgctaaaggactgaaaatgcctaacctgctatcgccaatagcatccccaatatgacacggaaaaaactatggattatacacccttaaccatccgaccattttacacatcaaccaaatgctgctagtattgaagccacagcattagcattgcatggatcttcaactccttttcctttacgaacatgtaactcaccgaaaatcaacatatattcggaccactggtgagattcataataggcatactcttgc

SEQ ID NO: 58990 - DNA, 2617 bp, Glycine max
  Clone ID: PAT_MRT3847_2427C.1
ggctcgaggcaaagaagagtaatgaagcagtgttgaaggattggtcaaagaagtccaatcttaaggcagagagagttaattacacggctgaattcatagttgactctagttttggggagccaggagctattactgtgacaaacaaacaccagaaagaagtctttctggaaagcataacaattgaaggatttgctagtggaccggttcatttcccctgcaattcatgggtacaatcaagaaaagatcttcctggaaagaggattttcttttccaataagccttatttacccggggatacacctgctggacttagattattgagggagaaagagctgagaaatcttagaggtgatggcaaaggagttagaaacttatctgacagaatatatgactatgatatatacaatgatttgggaaatccagataaaggaattgaacttgccaggccaaatcttggaggatcagatatgtatccatacccaagacggtgtcgtactggccgcgaaccaagtgatacagatatgtacgcagagagtcgtgtggagaagccattgcctatgtatgtgccaagagatgaacgttttgaggagtctaagcagaacacattcactgtgaagaggctcaaggcagtgctgcataacttgatcccaggtcttaaggctagcctttcttctagcaaccaagacttcaatgaattctcagatgttgatggcctttacagtgaagggttgctcataaagttggggtgggggttgcaagatgacgtgttgaagaaaattccatttgtcagcaaaatccaagagtccagccagggtcttcttaagtatgacactcctaagatcatttccaaggacaaatttgcgtggttgcgagatgacgaatttgcccgccaagcaatagcaggagttaaccctgttaacattgagaagcttcaagttttcccaccagttagcaaactagacccagaaatttatggcccccaagagtctgctcttaaagaagaacatattttgaatcaactcaatggcatgactgtccaagaggaaatcatatgccacacgcaccatctttttcttgacaccacgtggcactctcaagcctgtggctatagaacttagcctccctcatgctggacctaattcccggtcaaagcgcgtggttacacctcctgttgatgctactactaattggatgtggcagcttgccaaggcccatgtttgctccaatgatgctggggtgcaccaacttgttaaccattggttacgtacacatgccaacttggaaccatttatattggcggctcataggcaattaagtgctatgcatccaattttcaagttgttggacccccacatgaggtacaccttggagatcaatgccttggctagacagagtttgatcaatgctgatggaatcattgaaaattgctttactcctggtcgctatgccatggagattagttctgctgcctacaagaacttttggcgctttgacatggatagcctccctgcagatctcatccgcaggggaatggccgtacctgacccaacacagccacatggtctaaagctcatattggaagactacccttatgcagctgatggaatactaatctggtctgcaatagaagactgggttcgaacctatgtgaaccattactaccctcactcaagccttatatgcaatgacaaagagttacaatcttggtactctgagtcaatcaatgtaggccatgctgatctcaggcatgaaagttggtggccaacattgaacaatagtgaggatcttgtgtccattctttccacattgatttggaatgcatctgcacaacatgctgctctcaactttggccagtacccttatggtggctatgtgcctaatcgtccaccactgatgagaaggttaataccagaagagggtgatccagaatatgcaagtttccatgctgaccctcagaagtattttctgaatgcattgcctagcttgctgcaagccacaaagttcatggctgtggttgacacactctccactcactcacctgatgaggagtacttgggggagaggcaacaaccttcaatttggtctggagacgccgagatcgtcgaggcgttctacgatttctccgccaaggttcgacagatagagaaggtcattgatagcaggaaccttgatcggactctaaggaaccgttgtggtgcaggggtgttgccatatgagttgcttgctcctagctctgaacctggcgttacatgcagaggggtgcccaatagtgtgtccacataactatactaaactaataaataagggagtcactcccacattttgatacgcattaatatatatgtaatggttggcttactatttactaccatggacagtgactctcagtggatgcccattttgtacctagatttaataagttgttatagtatatattggtaacctagggctgtatagactgtatatgaaaatgagtttggtggggttggaggatgtgtgactgtttataaagttattatcacaatttatagttttcttttgcactattatgtagttctttttttcatcgttgcaaatatttgcatattttagtatgaaataaagttatcaattagat

SEQ ID NO: 58991 - DNA, 367 bp, Glycine max
  unsure (1)..(367): unsure at all n locations
  Clone ID: PAT_MRT3847_24280C.1
cacgcatncgtattaatggaaattatttctttccggtttggtaaagntacttggggggatgttgtaatcttaaacaatcctcaacaccctaggcactttatgaccaaacttgtagtcaaattttatggtgatacccttacatacatttccaatcctaaaacctattaatattaacgccatatttatacaacacatttccttttcttattaacgggaataattttaaaacaattttgttcccaaaggttcccatttggtttaaggaaaataccaattttaccaccattattcaaaaaaaatttgtccttttccttattaccttattgattgcaaaattttcttgaagataaccccactttaaaaattt

SEQ ID NO: 58992 - DNA, 1554 bp, Glycine max
  Clone ID: PAT_MRT3847_24281C.1
tacggctgcgagaagacgacagaagggggaagcagtggaacaaagcaaggaagagaaagaaatttgtttctctctaaagagtctccgctgaactttttggtttcttgaagatgtcgttactctccgatcttatcaaccttaacctctccgacatcaccgataaggtgatcgccgagtacatatgggttggtggatctggcatggatatgaggagcaaagcaaggactctctcgggactggttaatgacccttccaagcttcccaagtggaactatgatggttccagcactggtcaagctcctggacaagatagtgaagtgatcttatatccacaagcaatttttcgggatccattcaggaggggtaacaatatcctggttatgtgtgatgcttacactcctgctggggaacccattcctaccaacaagagaaataaagctgcaaagatattcagtaatccggatgttgctgctgaagaaccctggtatggtcttgagcaggaatatacattattgcagaaagatgtccaatggcctcttggatggcctcttggtgggtttcctgggccccagggaccatactattgtggaactggtgctaacaaggcttttgggcgtgatattgttgactcacattacaaagcatgtatttatgcgggaattaacataagtggaatcaatggagaagtgatgcccggtcagtgggaattccaagttggtccatcggttggcatctctgctgctgacgagttgtgggttgctcgttacattttggagaggatcaccgagattgctggagtggtgctttcctttgaccctaaaccaattcagggtgattggaatggtgctggtgctcacacaaattacagtaccaagttgatgagaaacgatggtggctatgaaatcatcaaaaaaagcaattgctaagttggaaaagaggcacaaagagcacattgctgcttacggagaaggcaatgaacgtcgtttgaccggacgacacgagacggctgacatgaacacctttttatggggtgttgcaaaccgtggtgcttctattagggtagggagagacactgaaaaggcagggaagggatactttgaagataggaggcctgcctctaacatggacccttatgtggtcacttccatgattgctgagacaactattctttggaaaccataagcaacgtcaaaacaatcacatggtgccttccgcatagcattgttgtttagatggtcaatttgtttttctatgtttttgtgtgcattctagttgtgactacctcgcctgttgttaggtattgtttgttggtggtactcatgattaccaagcgaggaattgttgtttcattttcttaatgtacgttttaagtgttccaataatgtgtaatggccctcaagtattgttatttgctgcgaatttatattgtgaagcatctcatgatttctctttgagcaatcaagttcttattaactgtaaaaaaaaaaaaaaaaaaaaaaaaaaaaaaaaaaaaaaaaaaaaaaaaaaaaaaaaaaaaaaaaaaggggggacaat

SEQ ID NO: 58993 - DNA, 1433 bp, Glycine max
  Clone ID: PAT_MRT3847_24282C.1
tcgatccgggaagagaaagaaatttgttctctctaaagagtctccgctgaactttttggtttcttgaagatgtcgttactctccgatcttatcaaccttaacctctccgacatcaccgataaagtgatcgcagagtacatatgggttggtggatctggcatggatatgaggagcaaagcaaggacactctcaggactggttaatgacccttcagcacttcccaagtggaactatgatggttccagcacaggtcaagctcctggagaagatagtgaagtgatctatatccacaagcaatttcgggatccattcagaaggggtaacaatatcctggttatgtgtgatgcttacactcctgctggggaacccattcccaccaacaagagaaataaagctgcaaagatattcatacatccggatgttgctgctgaagaaccctggtatggtcttgagcaggaatatacattattgcagaaagatgtccaatggcctcttggatggcctcttggtggtttcctgggcccccagggaccatactattgtggaactggtgctaacaaggcttttgggcgtgatattgttgactcacattacaaagcatgtatttatgcgggatttaacataagtggaatcaatggagaagtgatgccaggtcagtggggattccaagttggtccatcggttggcatctcagctgctgacgagttgtgggttgctcgttacattttggagaggatcaccgagattgctggactggtgctttcctttgaccctaagccaattcagggtgattggaatggtcctggtgctcacacaaattacagtaccaagttgatgagagacgatggtggctatgaaatcatcaaaaaagcaattgctaagttggaaaagaggcacaaagagcacattgctgcttacggagaaggcaatgaacgtcgtttgaccggacccgacgagacggctgacatgaacacctttttatggggagttgcaaaccgtggtgcttctgttagggtagggagacagactctaaaggcagggaagggatactttgaggagaggaggcctgcctctaacatggacccttatgtggtcacttccatgattgctgacacaactattctttggaaaccataagcaacgtcaaagaatcacatggtgccttccgcatagcattgttgtttagatggtcaatttgtttttctatgtttttgtgtgcattctagttgtgactacctcgcctgttgttaggatattgtttgttggtggtactcatgattaccaagcgaggaattgttgtttcattttcttaatgtacgttttaagtgttccaataatgtgtaatggccctcaagtattgttatttgctgcgaatttatattgtgaagcatctcatgatttctctttgagcaatcaagttcttattaactgta

SEQ ID NO: 58994 - DNA, 1503 bp, Glycine max
  Clone ID: PAT_MRT3847_24283C.1
aactccctataaaggattaaatgtaccactttctctcaagggaaaatcttttatcttttaaaaagttatcttaaatatcttaattttattttcgtaattcagagataacactataaaacctacgcaacaaccttacatcgaagcagaggaacaaagaaaggaaaagagaaaaaaatttctcagaagagtctccgctgaaagttttggtttcttgaagatgtcgttgctctccgatcttatcaaccttaacctctccgacatcaccgataaagtgatcgccgagtacatatgggtaggtggatctggcatggatatgaggagcaaagcaaggacactctcaggaccggttaaagacccttcgaagcttcccaagtggaactatgatggttccagcactggtcaagctcctgggcaagatagtgaagtgatcttatatccacaagcaattttcaaggatccattcaggaggggtagcaatatcctggttatgtgtgatgcttacactcctgctggggaacccattcctacaaacaagagaaataatgctgcaaagatattcggccatcctgatgttgctgctgaagaaccctggtatggcctagagcaagaatacaccttgttgcaaaaagatgtccaatggcctctaggatggcctcttggtggttttcctgggccacaaggaccatattattgtggtactggtgctaacaaggctttcgggcgtgatattgttgactcacattacaaagcatgtatttatgcgggcattaacatcagtggaatcaatggagaagtgatgcctggtcagtgggaattccaagttgggccatcaattggcatctctgctgctgacgaattgtgggttgctcgttatattttggagaggatcaccgagattgcaggagtggtgctttcctttgaccctaaaccaattcagggtgattggaatggtgctggtgctcacacaaattacagtaccaagtccatgagaaacgatggtggctatgaagtcatcaaaaaagcaattgctaagttggaaaagagacacaaggagcacattgcagcttacggagaaggcaacgaacgtcgtttgactggacgacacgagacagctgacatgaacacctttgtatggggtgttgcaaaccgtggtgcttctattagagtagggagggacactgagaaggcagggaaggggtattttgaggataggaggcctgcctctaatatggacccttatgtggtcacttccatgattgctgagacaaccattctttggaaaccataagcagcctcaaaaataatcacacatgccttgttttttcatgttttgtgtgcactcttgttgtgactacctcgccttttcttaggcattgtttgttggtagtactgaagtgaagaattgtcgtgtcattccattaatgtacgttttcaaaggaattgtttgtgtgccaaaaaaaaaaaaaaaaaaaaaaaaaaaaagcggccgctctagaggatcca

SEQ ID NO: 58995 - DNA, 441 bp, Glycine max
  Clone ID: PAT_MRT3847_24284C.1
tactagcgtacgcccacgcgtccggataaagtgagggaagtatgtgctgctgtgggctagacatcaagatacactccaactgcattgatggaatctgggtggcaaaaaagacagagggataattgaggaataatttggaaggatgtcatacgtagctcataccgttcatcagacccaagagaaagattcgttggagggaaatatttactttgatattaaatctcgctctagattggaaaaagttgcctctactgaagcacaatttgttagtggaaaaacctacaaatgtgatatagttggtgctggttcacattcttcagaagattttcctgaaaaagatgagcaagaaagactcatgaagattgatcccagagtgagacaagaaatagatcctcattccaatgaggtgcaggctcagatggaaacaaattcggtaaatag

SEQ ID NO: 58996 - DNA, 472 bp, Glycine max
  Clone ID: PAT_MRT3847_24285C.1
ataaaaaaacgggataccctctataaatggaaaatattacatatttcttgcataaaacttgggagaacatttttttttggttgacgatataaaagatatatgttctgaaagaacacatacatgttcacaaaaaaaaaggggggaatttatataataataccgaaaaaaaaaaaccgatttgcgtctgagggaagggaacatagagaaaattttagcagtctggttataagaagccggtggtggtgcaaaagtgccttgccaagaggggtgggaccccttttatttaaccaggggccttttgccccttgaggggcttgaccacttaccatgtgaaagcaggggcatttttgtcaaagcggccctttgcagccagtgttaagaacctgccatttccacccctcttgagatcaagggtgatggagatcatgccaggcctgaagccaaaactgtccttacaatggttgggattttc

SEQ ID NO: 58997 - DNA, 1094 bp, Glycine max
  Clone ID: PAT_MRT3847_24286C.1
ggagaggaattggctcgagtttggctaagatcaagtgtagtatctgttcttatcagtttaatatctgatatgtgggccattggtccacacgatattaaatgtattttttgagggggatggttcaccgcagtggcttgctactggaatcatcaagtgtcgcctaagcgttgcactatagcttgggcctggcactcctcagcaaaacagttttcaggttttggctttcattgttcactgcattttgtttatataggttaaggttttttgattaaggttagtttttcaaaatttgcagtatgttcagaaaatgaaatatcttgggcttttaagaaatgaatgccaactatttcaagatttatgcggattaaattttatatttactcaataaatattatataagtaaaaaagactttagaaacgttcagccttctcatatttgatgacgatgatgcggtcagcagcagtggactggctccaattatagacaaaaaaaaaaaatggcatctttatctgcacacacacactgtaacatgttaaagatcctcctttcttcaaatatgtatgttttttttaatgaaaaattatcaagttatgctttccctacctccgtataattccgaaaacatggaattcaactttcgaagtctctattggtaacttttgaatccaggttatccacatgcacacgagtcaccaagtataattaaaccaaggtccagtttcttctacctactttgctttcagatgttgagatctaaagaatgtaataataataggcaagacaagaaaatcagatgaaagatgaagtatttttatatgcagcatgttgagttggggggcaccaggaatgagtgaagctgaatgactcgtgggtgtatgtttcgaaaacaaagcccacatcgagcaatgtactaagttgaaccaagttttatgctataaaaagaaagagttatttttgttaaatctctcggagccgtgtgataattacaaagcgaactattctttcgccttttactaaagaataccgtgtatttgtcacctacagcggcatacgctaattttgtaatagggtctttgaaagaggacctgcattc

SEQ ID NO: 58998 - DNA, 1103 bp, Glycine max
  Clone ID: PAT_MRT3847_24287C.1
ggaagacaaagtttacctaattaagagccaaacttaaaaactttttgtatgtattgggaagttatggcaggaaacatggggtggagtgtgataatagaagaggagggatggaggaagggaccttggacttctgaggaggacagattgctcattcagtatgtcaagttccatggtgaaggcagatggaactctgttgctaggcttgcaggactgaaaagaaatgggaaaagctgcagattgagatgggtgaattacctgaggccagacctcaagaagggtcacataacaccacaagaagaaagcataattcaagagctgcatgctaggtggggaaacaggtggtcaacaattgcaagaagcttgccaggaagaactgataatgagataaagaactattggaggactcacttcaagaaaaagactaaaaccccctctgatgctgctgagaaggcgagaatccgttcctcgaggaggcaacaatttcaacagcaacagcagcagttgaagcagcagcaggttcagcagcagcaacaacaacaacaacaattccaattcaacttggacatgaaagggatcataaacttgcttgaggaaaataaccatagagtgccttctatatctcaagaggcacaagaaatggccagcatgtaccctaacacttcagaacatcaggactacttctactctatgttcaatgtcaatgacaataatgtctctgcacctgagtgcttaaacgaagaaattttgtgggatggactgtggaacttggacgatgttctttgcaatttcaatgcagctagtgccacaagcaaagctagtttacataatttagttgctcctttctgttaaaggttttatttagccttcaaaattgttaggaagaatattagtactaatgtgagtcacggcttgataaagctccaaaatcttggagcttagagaaaaaaaatatcattaaatgttccttgttagtttttgttagtgagaaatttaaactcacaacctctccgctcctccttgaagcttagagttagggtagtgaatgatattctgaaggcgtgttattgtgtaacccattaataaagtgtctcgattttgcttat

SEQ ID NO: 58999 - DNA, 381 bp, Glycine max
  unsure (1)..(381): unsure at all n locations
  Clone ID: PAT_MRT3847_24288C.1
taccccaattgaggggttgcctcactatggggtgcttaaggaggattatattatgagcaagggatgctccgtaacttcccaataaaagggggataacatttcagcctttggggggggaagcagactggtgatgaggggtgtgnatnagatcagcctcaatttaatttatacctcttgaaagtgtgggcgtaagcttattactaccacacaggagaatcagaagttgtttgaacgcctcggtagataattccattaattgagatgagaatagctggggggttattaggggggcgctaggggtactaagagcgttgggggagttgggggggaggggcgtggaagggtgggggggaggggggggggggggggggggtagagggg

SEQ ID NO: 59000 - DNA, 260 bp, Glycine max
  Clone ID: PAT_MRT3847_24289C.1
ccaaacaccaacagttaaaaatttcccgagacttttcttaactttatcgatcccacttaaatcctaccttaacttcttgaccactgataatataacgccttactataaccagttaacaccaacaaattgctcctcttttcaaaataccaaacaaactataaccccctttttcccttaccaacatgatatttatgctcataaacaaattaaaacaatcccctaatttccctaaactaatttaattacattttaacaacaaa

SEQ ID NO: 59001 - DNA, 1517 bp, Glycine max
  Clone ID: PAT_MRT3847_2428C.1
aattcggctcgagacggctgcgagaagacgacagaaagagagacatatgatttgcataatctttaaccacagtataagattgggaagcaaaagcgagtatcgtattgttctgacccgtgactactgaccctacaatctctccacttttcaatcaaatcaattccaatgtcggctctcttctccttcatcttcccatccagctgaaaagggaggagagagtgtttgcgttgcggcaatggaggaaccgagcaaactgaagcgtgccatgattgattcctgggctggggcaatttctggtggaatatcacggacagttacctcgccccctcgatgttattaagattcgattccaggttcagctagagcccacatcttcatgggctttattacggaaggatttggctgcagcatcaaaatacactggtatgtttcaagcaaccaaggacattcttagagaagaaggcgtacaggggttttggcggggaaatgtgccggcattgctcatggttatgccatatacagctatacaatttacagtattacacaagttgaatacttttgcctctgtttcttccataccagagaatcacattaatttgagcccttatctatcctacgtcagtgtgggcattagcttgttgtgcagctacattcggttcagatccctttgatcttctccgaactatattagcttctcaaggtgaaccaaaggtatatccaaacatgaggtctgcattcatggatatcatccatactcgtggattccaaggcttgtattctggattatcgccaactttagtggagattataccttatgcaggcctacaatttggcacatatgatacatttaagcgttggggcatggcttggaatcatagatactccaacacttctgcagaagataacctctctagctttcagcttttcctttgtggattggcagcgggaacatgtgccaagcttgtctgtcatccactagatgttgtcaaaaaaagatttcagattgaagggcttcaaaggcatccaagatatggagctcgagttgagcatcgtgcatacaggaatatgcctgatgccatgcaacggatatttcgattagagggttgggctggtctgtacaaggggataattccatcaactgtcaaagctgcacctgctggtgctgtgacatttgttgcttatgaattgacatcagattggttagagtccactttcaattgattttttcccattttttcttcatgattagtgatcatattcttttttgaaatacaagttgattccctcgtagtataggaagaaagtgtgagggatatgctaattttttgtaatgatagtggtagttgataagattgaacttcctttaagatggaagatttgtccttgatgcttgcgtctgatttggaattctaaatgtaaatttccaaaatggtgcaaaagcctatctaggaacaagttgtgtttcgtttcaacctatatttggtctttggtagtaaaattcggacataattaatggc

SEQ ID NO: 59002 - DNA, 514 bp, Glycine max
  Clone ID: PAT_MRT3847_24290C.1
cccttgcgtccgattgcaactcctcacatgaatgtgaatccaatgcaagaattcaactttaccaattgtattgctcacaattaaaagaattgaaagaattaaaacaattgtctcaaaaagtaatgatggaaaattcatctctagactattcaacaactgttggttctactcaccaaacagttgtgaatgctgaaaaaccacttgagggttcaaatgtggtggcgtccttagttgaccaacatttaaatggacagaaagttaaatctcgtccttcaaggtatttaaatgttggtggtactcattttcatgaaaggaaacaaccttcattcaacgatgaggattatctttctttgagtgaatttctatcagactcaaacaatgatctaactttggacgaaattcagaaaatgaaacaaaacgaatccatttctgtcagtatcatttccaataatggaaccaacattgctcaagagagatcttttatgcatcagaaatctctcaccctttctagcac

SEQ ID NO: 59003 - DNA, 376 bp, Glycine max
  Clone ID: PAT_MRT3847_24291C.1
cctcatacagatcatagtttccctcctcttctgcttttggcaattgccttaatttgtctttttagaatacaaagacatacattcaattaaatttattgctttgtgatgggaagtcatcatcattttctatcatcagataatacaaaaaactagtcgaaaagtaaaggcaattaagaaaagcattgccattataaaagttacaattcgcaagaggcatgagcattaggaacaaaaccctctgcaaatacaataaagtcttaatttctgatgatgctcactaaggtaattagcagaatgagttaaagccattacagttcaagtccttttgcagaccatcattcgagttctctcctttaactatctgaagccaactttg

SEQ ID NO: 59004 - DNA, 250 bp, Glycine max
  Clone ID: PAT_MRT3847_24292C.1
cacagttggaaaaaaaaaaaaaagttgttcaagttggcccttacaaagcaaactggtcgtaattccacaggaggaaaggcacctaggaagcttttcgcaaccagggttgcccttaagtctgcaccactactggtggtgtgaaaaagccaaatcgttatcgtcctggtaccgttgctcttcgtgagtttaggaaatcccagaaggttaccgagcttttaatcaggaagctccccttccagaggctggttcg

SEQ ID NO: 59005 - DNA, 435 bp, Glycine max
  Clone ID: PAT_MRT3847_24293C.1
aacccgcccatctcgggattcactttcccaattatacaaacccggaattattattcccacaattattaacaacaagggccgggggggaaaaaaaggggaaaaccattttgccctcgacgggggccatccttattaaaaattttttttggggaaaaaaaatttgggggttggggggggggaaaaaacccaagctaactgaccaacctgtttggttagggctgggggcccccagtaaaaaaccccaacccgagatcgggggtgaccaaccccaatgcccttgtaaacagcccgccaattgggtttaacaaagggggattttacacccgggccaaaaacaaaaaccaccccatttttagcctgggttaaagattgcaacaaaacaaaaaaaggtgggggagcatcacccttttaatacccactaaggcaaaagggggg

SEQ ID NO: 59006 - DNA, 182 bp, Glycine max
  Clone ID: PAT_MRT3847_24294C.1
acccgagcctaggctcggatctaggcgcgagctagagccgcatggctgctgcgcctccggggtgttcaccagactgcagcagcactacatagagggatcccctagtgctgcatatgaagactagatagtggagttgctcagattccctgagcgagcattatggagggaatatcctgggataa

SEQ ID NO: 59007 - DNA, 418 bp, Glycine max
  Clone ID: PAT_MRT3847_24295C.1
gtaaactggtacaattcttaccaataagaagcatgtaaggccctatcatgcgtttaagcgttcaataagcctatcatgctgagtgtttaataatcgtaagagttttacatggttgactaataagaaattatcctacatatgactcttaaaatcattattacgaatgccaatagttaccaatgatataaatgctctcacacatccagatgaaagaaattctgtcttcttctgtgaaccagataagcttgtatctaaaaatgataccattgattggataaagtagttggagactgactcaattgttgtgtcagatgcactagaatgctctagctatgatgataatggctgagcttcctatctgtcgcagattactgatggttatgggctttatgattactgcctgctgaagtatggcatg

SEQ ID NO: 59008 - DNA, 563 bp, Glycine max
  unsure (1)..(563): unsure at all n locations
  Clone ID: PAT_MRT3847_24296C.1
ggctcgaggtgtacaaagacatgggagaagaccagcctgctcaattgccgactccagatgttcctcctcatcacatgaaggcgctcgaagagctgaaaggaattttgaagggagagattccctcttcgttcagcgatacaaggttgctgaattttttgagggccaaaaaattcaacgtcgagcaaacgacggaaatgttgagggcggattttaaatggcgtaaaagcgagaaagtggaagagatatttgagtttgcaaaaacagagcatggaaggctagcgactgagtattggccgaaccgaatgcatggattcgacaagtatggaatcccagtggtctacgataagactggatcgtgtgatacgaggtctctcctccaagttctcagcaaagacgaacttttgaaaacgcacatctactttcaagagcgtcaacaaanaagtgtggacgaagcagcagctaaaataggaaaacccttaaattgtggcattgtctttattacagatttggaaggattgggttngaaacacatgtacgcccctggtctggcagtagctagagag

SEQ ID NO: 59009 - DNA, 399 bp, Glycine max
  Clone ID: PAT_MRT3847_24297C.1
ctcccccccctccctttaaagaatggcacatctggtgatggaaccactcatctaaaaattcaaccttgcctgcctctctaaactttaatgttagtttggatccttggtttgagtagtcatggatttcataagaatttactttcaacttttgtaactagtaactacatatataatttcacattttgttactcatgtttccttttttcaagggtagagtaactgcaaaagtattgaaatgtgcactaaatggcttcaactgggtttgatatacgacaaaactttgtacatgtgggagttcatcctatttttggtagagataaataggaaggggcaaaaaagaagaaaaaaataacttaacaataataatggattggataaaatatactatttgttagggta

SEQ ID NO: 59010 - DNA, 294 bp, Glycine max
  Clone ID: PAT_MRT3847_24298C.1
ctcactatagagctttctctctgcagtgtgtgtttttgttttagcttccacttcttccatcctttaaacaaaacctttcagttataagttccacgttcctttgggtataaaccaaaaaaagcttctcctttgatccacactcagccttctctctccaatgctctcattgctgcattgaagagagctcaggctcaccagagaaggggctgcattgagcaccagcagcaacagcctctgctcaccatcaaggttgagctggaacacctcatcatatcaatccttgatgaccctagt

SEQ ID NO: 59011 - DNA, 268 bp, Glycine max
  Clone ID: PAT_MRT3847_24299C.1
gcgaggagatagatggctgggaaggagcaggatgtgtcgttgggagcgaactagttccccgagatacagtcaattgggacggcggcgctgagccaagacgacggcaaggactaccaggagtcggcgccggcgccgctggttgacccgacggcgtttacgtcatggtcgtttttcaaagcaggggtagcagagtttgtggccacttttctgtatctctagatcactgtcttaaccgttatgggattctccggggctaagtctaagtgta

SEQ ID NO: 59012 - DNA, 399 bp, Glycine max
  Clone ID: PAT_MRT3847_2429C.1
cccccaaaaaaaaaggtttaatttcaaaaaaggggaaaaaaaaacaccccaagggccaaacaaatccccatttttaatgtccaagcccccgttgacaaaagggggttttaaaatttgggccctttggatagcagcccctcccgttttttttttaaagaacacactgggccttaatcctttaaaaaactcccaataccggggggggggcaaaattcaaaaggaaccctcccaattttttaatttttccccccaaaggtgaaaaaaactttgccccagtcctaataattttcctcccgggaatgggatctttttgaggggtgatttttacgggccacaaaaagactttttttcttttaatgcaaataaaaagttgcccccccaacaggggaatctttttcc

SEQ ID NO: 59013 - DNA, 476 bp, Glycine max
  Clone ID: PAT_MRT3847_242C.1
ggccgccctttttaccgtttttttatcatggtaccatcccctatgacaagtaagctcttgaagcatattcactagagtcgacatctgcaacatactgtttgaaagtacataagtcccatctaaaagaatgagtgctttttgctgccctaagctggagcttacctcaacaaaacgtggtatcatcgataggccccaataggatgtgtagaaacgtgaacataagttatgctacctgacaaacctaaccgcccactgaaaaaagtggctgcacagactccttgtacatctagactttgaaaaagagatagatgaatacaatgactgacctcaggatgactaccaaagccgcaactgcggaccgtattatgcaatagggagactactgacgcttaataacagcttgcgcaataaaatctgggtctatagctcgctccctggacctgatgccactcttcttttggaccttgtgcttgact

SEQ ID NO: 59014 - DNA, 822 bp, Glycine max
  Clone ID: PAT_MRT3847_24300C.1
aaagctggacgcctgccggctctcggtccggatttctgagttccgaggcacgcccacgcgaaatatttctagttcctaagtaaaatcaaacaactacacacgtgtttatttatttgtttgttcagaaaaatgatgaggggtgcggaatacgagcgtgtgctaaggtacttcgatgaagacggtgatggaaagatttcaccctcagagctaaggaacagaatagcaatgatgggtggtgaggttatgttgaaggaggctgagatggcgatcgaggcgttggattcggacggcgacgggttgttgtgtttggacgatttgatgaatctgatggaggctgctggagaagaagagaagttgaaggatttgagagaagcctttgatatgtatgatacggagaggtgtgggtttattactccaaaggccttgaagaggatgctgaagaagttaggggaatctaagtcaatggtagagtgcaaagtgatgataagtaggtttgatttgaatggggatggcatgcttagctttgaagagttcagaattatgatgaagtgactacgatgatggtggtgatgattatgatgctacatgtacattgattctggcacttgctggctagttcatgtgtctatagtttggttagtttggtgggtttcaatttgattgattaatctatttgtatgtacattgtgcctaatttgtttctggcttattcttttgttgattgatacaaatcatggatttgtaaatcgctttttgattattaggaataacatcttggttaaaggaaatttcactaaaaaaaaaaaaaaaaaaaaaaaaaaa

SEQ ID NO: 59015 - DNA, 547 bp, Glycine max
  Clone ID: PAT_MRT3847_24301C.1
tgatttttcttttcctaatcttactagatgtagcaaatgtgtgaagtgacataattcaaaacctgattgaattccctaaatgatgccaaatgataacaatataaaaatccttacatttttatgttactgtatacaagacaatttatgttagttgtccctggttactcaagctttgaaattcagatattgggaaaatttattgcatctggatgctatttttacaatttacaaatgcataataacatgattctagtgataataaaaggcccattttttaatgcaccaaaaaacaaggttcaattttctccttgccagttttgctgtttaacagttaggattgagttttggacaggttggttacgattaggatatattaaatggagaaattaccgattctagaaaaaggtagagacaccatattaaatttaatgtaagtcatttaccaatgtaatagtagtatagttcaaaaacgattgtgaaccatgttacagatagtgttaatgataggaaacaggtagagttatgcattaatagtctgttaagaaac

SEQ ID NO: 59016 - DNA, 349 bp, Glycine max
  Clone ID: PAT_MRT3847_24302C.1
atttcattcttgattttgatgcatacttgtccagtgtcggtagataaaatattaagttgcctcttatctttagtgttttgaggattgacagcgatacaatctgtaatacactttttataacacactttctattattaggtaaaatttattgaaaaatacaaaattaccagtaagggtcattaaataaggtgttagatccaaacaagattgtgattctcaataaatttcggccaataataaggattgtgtttaagagagtgtgtcgctagcatttcttatgcattattgagttatgaactgaagctgtttctagctggaaaagcactggagatcatgacacaagaaacat

SEQ ID NO: 59017 - DNA, 1796 bp, Glycine max
  Clone ID: PAT_MRT3847_24303C.1
ctcccacacgcccaataaactccttcctcatttctcatttctcattcaacaccatggcaagaaaaaccaagtccattttcttggccttcttactactatgctctttctcactgggggtagtggtagtagcccaagaggaggcaatagcaaaatccgaaagtgaagcattaggggaaccagagaaaagagaaacacttgaaatcatcattggtggaggtggttcacctgctccttctccctctccccctacatattgcccacctcctccaccaaaaccactgagccggttggagaaagcaaaacgtgttcttctcaaattcaaaaccacaatcgacgaccccaattgttacacgcaaaactggagccaggacacagacgcgtgtaaattcaatggggtacgatgcgccaatttcccagacgatcagcagcgagcagtagctggacttgacctaaacggagcaaaactcgccactaaaaacggtggcaatttgcccctcacgggtctcctcgacagcatacccgagttaacattcttccacgttaactccaacaacttctccttcgtcggtggcttccccaacaacattaccagcttccgtttcttcttcgagcttgatctcagtaacaacaaagtcagtgggcaagttcccaacgcaagcaattcagaacaaccagttagtcttcctggacctcaggttcaaccagctcaccgggcccattgacccgaaactcttcgagagggacctggacgtgatttttgtgaacaacaacaagttcacggggtacctcccggagaatttcgggtccacgccggcccggtacctcacgtttgcccacaacagcctctcgggctcgctccctaagagcgtgggctacgcgccgaacctcaccgaggttctcttcttgaagaaccagttcgaagggtgtctgcccttcgaaatcggttacctcaagaaggccgtagtgtttgatataagtgaaaatctcttgaccggtcccatcccgctctccttcggatgcctgaagaaaattcaatttctcaatttggcgcacaacaagctctacggctgtgttcccgacaacctttgccaaattccttctatccgcaacaatgggaatctctctttggcgaacaattatttcaacgaaattggaccttcgtgttggagtttgataaagtccaaggttttggatgtgtcaggaaactgcattccggggcttcctaaccaaaagtctcccaaagaatgctaccagttttacaaaacaaagaaaacatgtccgaacccgaattcattttactacgttccgtgcaaatcgtactgggggaggcagagcaagcccactagtccaccttctgagccagtgacttacaagactctcaaaccacatcgtctcagattgtgatcagatatcataggatagctcatattagtcccttgtgcaggcgggactttgcctttgtgttgggtttcattttttatttttctcacaacaatcctctggtcagatagaaacctctcctctgatgcgttgattcaaatcctgttcactggtttcatattattactgtggttatgtttgtatgtttttctttcatgattagctgttgttattttgtattttgtatgccccgtgaataagcgctgtcgtggagttgggcatcttgactattacaagtttggtgtcactcaaatgtaatttcccaagttgtcgaataaaattggtactatatttggatgaaaccccaaaaaccccaggggggccgtttagaggaaacagcttaggtaggcgtgcat

SEQ ID NO: 59018 - DNA, 499 bp, Glycine max
  unsure (1)..(499): unsure at all n locations
  Clone ID: PAT_MRT3847_24304C.1
ggctcgagtgtaaatgcattgacaaggccttagagattttccattctactcttgagaagaatattgtatcttggacatctataatccttggtcttcgcatcaacaaccggtgttttgaagctttatttttcttcagggagatgattcgtagactgaagccaaactctgttactttagtttgtgtcctttctgcatgtgctagaataggagctttgacatgtggaaaagagatccatgcccatgcattgagaactggagtaagctttgatggttttatgcccaatgcaattttagatatgtatgtaaggtgtggaagaatggaatatgcttggaaacaatttttctcagttgatcatgaagttacctcatggaacattttgctaacaggatatgcagaacgtgggaaaggagcacactgctactgagcttttcagagaatggtagagtcaaacgttagtcctatggaagtacatttatctncatattatgtgcttgcagc

SEQ ID NO: 59019 - DNA, 255 bp, Glycine max
  Clone ID: PAT_MRT3847_24305C.1
gatctaaattcctatttattgggcatacaaaacaagttatcgatacaatacttggttgcccactcccaagtagctcaacaagaacccgcaaactggcggactagatgacacacccaaggaaccctgacggccatatgaccgcagaccagcgtacccacatgtggcctctaaacacaaattggtcacctcgtgcgcataaattctatcttgttgacaaagacaaggccatacagaatgacaatgcttacaacccac

SEQ ID NO: 59020 - DNA, 401 bp, Glycine max
  Clone ID: PAT_MRT3847_24306C.1
cttgtgagagtttttgttttttgcacgagaggatcgtttctggtgccgcatggttatttacacatgaaccggatgtagaacagtaagaggctgagaatctttatacactaggagggagccggtcgttatttataatgtactcaactctgtaggcaacagagcttgtgtgtatcgtactaggcggataatatacgcattgcttgaagagtccttacggagatgggggtgcgtgagttaacataaaaaaacagcatttgttacaaccgatggggttgatgccctcaattccgttaaataataaatttgaccagcctgggacccagggtgggccgagggctcgttatgctattgccccggaccatttgattgcatactattgtgactattgtagcttttttatt

SEQ ID NO: 59021 - DNA, 362 bp, Glycine max
  Clone ID: PAT_MRT3847_24307C.1
ctttgtttctcgtttttctgttgttgtttttcgcgatcgcggtttgctctttgtttagctccgaattttctttgttgtgtgcgatttctttgcttgtcttgtggggtcgggccgtgcgcgggatgattggtttttttttgagcctcccccccgcgtgacggggcgcggctcgtcttgttttccgtccgccatcgcgggcaggccgtagagctccgccgcgcgtgcgctcgcgccccccccggtggcgtggtgatttgtgctggggccgaactcggcagcgccgggggtgtcgtccacggtctcgcgcgccgcgttggggccgcgtcccgtgggagtgggctcgcgctgggcgagggcctgcg

SEQ ID NO: 59022 - DNA, 634 bp, Glycine max
  Clone ID: PAT_MRT3847_24308C.1
cgtcccgtgaagaaatctgcatactttttggtattaaggttggacacttctgacattaaacaaatttctgagctgatttgttgctcacattccctgctgcagatttgagaattgagatcttccttctcttgattcctaatgttgtaaaattgtgaaataaagatactgggttataaggtgtgagaatttagatcatttgctttaatttgatttgtttattttcccaggtaacgtctccttatggaaataaccttcaccacaatgaaaatgccacgcaaggtcaatttgcatttacaacagcggagagtgggaactatgtggcatgcttttggatggatggtaaacatcaagaagaagcaactgtaagccttgactggaaaacaggaatttatgccaaggattgggagtctgttgcaaagaaagaaaagatagaggtaaactgatgagtttcattcatgttctgtcgttgcctttgtaatatgtacaagagttttgtaggcatatctaaatgaatcaattagatatcatttgggtgtgtcgtgcgtttggtaaaattaacttataaactagctgaaaacttatctgcatcattagggggctgaaaagcttataagctactataaatgacttgctg

SEQ ID NO: 59023 - DNA, 123 bp, Glycine max
  Clone ID: PAT_MRT3847_24309C.1
ggctcgagagaactctgatccccctccacccacgtaccgcctgaacctttcctctcaatcaatagggaccgaggcctctgtcctctactcagagctgttggatcgagacggtcatgacaaaaa

SEQ ID NO: 59024 - DNA, 279 bp, Glycine max
  Clone ID: PAT_MRT3847_2430C.1
gaggccctacctttgtgtccgctactctctctaccccttccttttttctcacccttttgaaatttgagcagtagcactgttgcgacacaacaacatcatgaacatgaacatgaacatgaacatgaacactaagagcaggttgatcaccctttgggttgtgctctatttttggtccagcacagactcactagctgcttcaaagcagtgccatttccctggcagcttcaacgtgtggtgactccaattcagacactgggggtcgctctggtgcctttggac

SEQ ID NO: 59025 - DNA, 1350 bp, Glycine max
  Clone ID: PAT_MRT3847_24310C.1
tgaagaaatctgcatactttttggtattaaagttggacacttctgacattaggcaaatgtctgagctgatttgttgctcacattccctgctgcagatttgagaattgagatcttccttctcttgattcctaatgttgtaaaattgtgaaataaagatactgggttataaggtgtgagaatttagatcatttgctttaatttgatttgtttattttcccaaaaaaagttaacactaaacttcctcatacaaacgcaagagacattacaatactcaaaatttgacaaattgcagatctgctctgtaacaagacagtgtctgattccaaggtcaaccttcgccaatggctagggacagaaactctcgaattggaatttctgtggtgatgttgttatgcttcgcggctcatttttatgtgttgcccctggcagaggctgtgtggttaacactccccacttcggggactaagtgtttgtctgaggaaatccagtcaaatgttgtcgttttagccgattactatgttgttactcaagagggtgggcttcaaacactttctgtcaaggtaacatctccttatggaaataaccttcaccacaatgaaaatgccacacaaggacaatttgcatttacaacagctgagagtgggaactacgtcgcgtgcttttggatggatggtaaacatcaagaagaagcaactgtaagccttgactggaaaacaggaatttatgccaaggattgggagtctgttgcaaagaaagaaaagatagagggtgttgaacttgagctcaggaaacttgaaggagcagtggaggccatccacggctatctagtttatttgaaggataaggaagcaaggatgagggaagtcagtgaaagaacaaatggtagagtggcttggtttagcatcatgtcgcttagtgtctgcattttggtttcggtattgcaagtgtggtatctgaagcgcttttttctgaagaagaaactcatatagttgttgctttctcatgagcattcacaacacaacatttttactcaagttttggacaatataggatgatttctatgttgtatagtttttcatttgttgatacttatcatgtatcattaggggtaccccttcaagggaatgtgtacttcggcgttaaattacatagatatgctgatatgcagaattgaagagctgttctattggggctaattacaaaggaacgagactgatttttttttttttttacattaagcatcagctatatatgtgacagtgaatctcttcaatatgtcacttaaaaatattatgcatcattttcaaagtctttgttgcaaaaaaaaaaaaaaaaaaaaaaaaaaaaaat

SEQ ID NO: 59026 - DNA, 1146 bp, Glycine max
  Clone ID: PAT_MRT3847_24311C.1
ggaattaaaggctcgacccacgcgtccgattcaacccacacacttttctctctccgtgcttttctctgacactccctcacttcatccttctacactttcacaccttctctgaacacaacaaagtgagtaataagcagtatccttgcagtaatagtaccgtacagaaaactagaatagccaccaaaattcttccaaatttggaaaaaagtaacaacaacaaaatctcattcgattttcatctgtttcatctttttctccaaccgaatcgaactcataaacttttttttatctcttttcattttataactcaaaaaatctcattccactaggcgaggcttggctaactgaaaaagaaggaaggaagaaggaaaaatgataacgtggaaagacctatacatggtcttgaccgcagtggtcccactctacgtggcgatgatcctggcgtacggttcggttcggtggtggaagatcttctcaccggaccagtgctccggcataaaccgttttgtcgcgatcttcgccgtgccgctcctctccttccacttcatctccaccaacaacccctacgccatgaacttccgcttcatcgccgccgacacgctccagaaaatcatcatgctcttcgccctagcaatctggaccaacctcaccaaaaccggttcgctagagtggatgatcaccatcttctccctctccacgctccccaacaccctagtcatgggaatccctctcctaatcgcaatgtacggcgaatattccggctctctcatggttcaagtcgtggtccttcagtgcatcatatggtacaccttgttactcttcttattcgaataccgtgccgcgaaaatcctgatcatggaacagttccctgaaaccgctgcctccatcgtgtcgtttaaagtcgactccgacgtcgtttcgctcgacgggagggacttcttggaaaccgacgccgaagtcggtgacgatgggaagcttcatgtcaccgttagaaagtcgaacgcctcgcgtaagtcgtttatgatgacgccgaggccttctaatctcactggggcggagatttacagcctcagctcgtctcgtaacccaacaccacgtggctcaaactttaaccatgcggatttcttctccatgatggggtaccag

SEQ ID NO: 59027 - DNA, 729 bp, Glycine max
  Clone ID: PAT_MRT3847_24312C.1
ccacgcgtccgcacacttttctctcttcgtgctttctctgacactccctcacttcatccttctacacattcacatcttctctgaaacaattacaaagtgagtgaaagtagtgtcctagcactagtagtacagtacagaaaactagaagagcaaccaaaattttccaattagcactagtagtacagtacaaaaaactagaagagcaaccaaaattttccaattgaaaaagaaataacaacgagaacaaaatcttatcgtgagatcgaataactgaaaaaaaaggaaagaagaacaaaaaatgataacgtggaaagacctatacacggtcctgaccgcagtggtccctctctacgtggcgatgatcctggcgtacggctcggtccggtggtggaagatcttctcaccggaccagtgctccggcataaaccgcttcgtggcgatcttcgccgtgccgctcctctccttccacttcatctccaccaacaacccctacgccatgaacttccgcttcatcgccgccgacaccctccagaagatcatcatgctcttcgcccttgccatctggaccaacctcaccaaaaccggttccctagagtggatgattaccatcttctccctctcaacccttcccaataccttagtcatgggaattccactcctaatcgccatgtacggcgactactccggctcgctcatggttcagggtcgtggtccttcagtgcatcatat

SEQ ID NO: 59028 - DNA, 292 bp, Glycine max
  Clone ID: PAT_MRT3847_24313C.1
ctctaggcagcatctgctccagggcttctatcggcctcataagcatagtttaatcatttatagaatactatactggcattggctgagatactagcatgagtgtgacgagcaccagcatgacttcatggacgatttgtgattatgaaatctgccaaatatagttcactgactatgaggcacacactttccacagcagctgcacgctcttgtcagacattaattacacagacatagtgctctgaaagaatatcttcggcagcattatgctcccagtgaatctagcatactacag

SEQ ID NO: 59029 - DNA, 544 bp, Glycine max
  Clone ID: PAT_MRT3847_24314C.1
ataggcaactttattatcataacgtatatcagttaccttattcttgaataacacagagcaattagttccctagaggaatctaatcccagtgatgaataattagtaactgctggcaaaatatatttttttggggaaactggcaaaataattaattatcaagaaaaagagacacgtaaacctttttactagcatgccatttataagtcactgtgctgattttgatttttccataataggaacattattatagaactggaattactcatacatgttctctatgaaaccatagccattagaacccaaaatgatcaaagaggcgggaaaatttgctttaaattaagggctaagcttaaaaataaaaacttgattagtaaccaaagtttctcatttcttttggacaacaaagttctgcagtaacatgaattcttttttctttttttaaacaaaaaacatgaattctttttttaagacagtggttttatagtaagtactgcacaccttgtagacgcaatcattgccttctataatgcttaatagtggacta

SEQ ID NO: 59030 - DNA, 524 bp, Glycine max
  Clone ID: PAT_MRT3847_24315C.1
ggctcgagaaagttataaaaatgtccttttatataaaaatggtggtacacgacggaaaagttgtgatccatcctttttccacttttccttcatttacttttatcaattcattaagtgtatctctcaataaataaatagtagtaaaaagtcgaaaagtggtacttatatttataatgaaaataattattaaaaattcatattcctaacattgggtgtgatgtcagtgctgtatacagttattggtaattcccattgtgtctctcttcggatatcatgccatagccattagcgtgtactttctacatgaggccttcggtgaaagtacataaatatacatgtttatgtttgttatagtcaactacaatatctttcttgaattggcacaatgctaacccatctctgctattactgctgactggtgcaagaaaaattcattggacgatgaaactcattttaggtattacagctggagtaatgggaggaatcatgatatgcatcataatttgctctactaaatgtatgtc

SEQ ID NO: 59031 - DNA, 694 bp, Glycine max
  Clone ID: PAT_MRT3847_24316C.1
tcgaccacgcgtccgtgaaactctgatcggagcccaattcctctcaaactcttaaagccaccgtttttccaaattattcaggaaaaaaaaaaaacacagagagctttctcaactcaatttcccgctacgcttcattcgtgtgtcttcttccttcagggtttatcgggcttctgtaattgaatgaatcatctttattgtgcatgtggagttgtcgggttctgggtatcaatattttttgttgggtccttcctccttgttggtatcaccctgatgtatacttctaaggaaggaaataaagaagagtaattagtgacatttgcagaaacacactggctagcatggaatttaataaagatggtgccttaagggctaaaaaacttgctgagaagatgcttttacagagggaatttggaggggcaagaatgctcgcaatgaaggctctagaattatatcccaatcttgatggtcttcctcaatttctagcaactattgaggtgtatatctcttccgaagatagagttaatggagaacttgattggtacaggatccttggtgtgcaacctttggccgatgaagaaactattccgagacgatacaggaaactggctcttactctgcatcctgataaaaatagatccgtgggtgcagatggggcatttaggcttatctgacaggctgggagtttattatctgg

SEQ ID NO: 59032 - DNA, 376 bp, Glycine max
  Clone ID: PAT_MRT3847_24317C.1
gaagaaactgccccatcttctcccttccctcctatgtgaagcatccaagtctgctatgcctgccacaaagcatatacctgctccagttcgctggggatatcctgcttacatgcccgtcgatagacttccaggagaccgattctgtgaacggatcccacttctttttgccacacccactaggcgctacaatctgctacagaggactcatgctgcctttgtttcaccagtaccttgcgaatacccaaccctctacacactcctccaatgtgcatacttcgtggctcgatttgtagtgacatggattcccatagctggcatactgttccccttgcctttcttttagctgatcaccttgaggcagcctttactccccaag

SEQ ID NO: 59033 - DNA, 425 bp, Glycine max
  Clone ID: PAT_MRT3847_24318C.1
tccgctggtagaagacaacagaaggggactcatcattctatttgttctttacctgggggtggggagaaaaggatggataagtttcctactggacacacgctttcgtgactgatgcacacactacacaggatccaaggtgacttgcaaacgcacacatctctgatgatagaagaagctcaagacgaagagtggccaggctcttaccaggacatcgttgatctgcccgttcatgtcttacgtatctgacattcttgcccaatacgctcactcttgtatatcttatcagtacctaactgtgcgattgacttcagttacatccttcctggaacaacaagttcacttacgactggtacaggcacgccttttgctactattaacgcaccaggtccagttcttgtgtggttgcagatcattcatttggctga

SEQ ID NO: 59034 - DNA, 475 bp, Glycine max
  Clone ID: PAT_MRT3847_24319C.1
gtaggactgtcgaaacctgcagataggccggatcatgatgtcgatgatcccctatatctgatgacattgaccatcccacagctttttctaaagccgttgtaggttatgtgggatgctaccatgtttggggtctttaatgacaacttccccttgtacataaagcatgaagatctatctgaaatagcacacggtggtcaatgtctcagcatctctgttatacagttgtggattttctaagtcagtttacattattgtttactacctaacttattgttttaaattcatatataatttactttattttaacaataataggcatatgaatgagacaagtatgcgagcggggaatgctgatgtgtatggattcctcaagccacagttcatacaaagatctgggcaatcacaatttgaatcaaaaagttatattaagaactggatgcaaaattcaaggagggatgtgtacctaggaacctac

SEQ ID NO: 59035 - DNA, 345 bp, Glycine max
  Clone ID: PAT_MRT3847_2431C.1
tacggctgcgagaagacgacagaaagggcgtcctattgtgtagatagtgtgtcagctgtaactcgatcttcttctttagcagctctgagtttgagttagttttttctctcacctgaaaatggcttgctgaggtggtaacctgtggttcgcggaagctcctacaagtgcggcatcgtgctgcggaggctgaaagatacacccatacttgagcttcactgagtcaaccaccaccgagaccctggcatgggagaggcacctgtttaagctcaatttgagggtgctgaaatgggtgtgcccgctgagaacaatggctgcatatgtggaccaaactgctcctgcaacccc

SEQ ID NO: 59036 - DNA, 1309 bp, Glycine max
  Clone ID: PAT_MRT3847_24320C.1
ggctcgaggtctcttcatctcgagaaagagacagagaaaagacagagagatggggaagaaagaaaaagctaaggaacgaagagaacaacgattgcaagagatacaccttcagaggaccattccctattctcatcaccagaggtggtggtccaaggaaactgtggctgtggttacaggtggaaatagaggaatcgggtttgagatttgtagacaacttgccactcatggattgactgtcatactgacatcaagagacgctagtgctggtgttgaatcagttaaggctttgcaagaaggtggtctcagtgtggtttatcatcaacttgacgtagtagactattcatccatcaaccagtttgttgagtggttgcgggaaaattgtggtggtttagatattctggtaaataatgctggtgttaattttaatcttgggtctgataactcagtcgaaaatgctcgtaaagttattgaaacaaattattatggcaccaagcgtatgactgaagctattatttcattgatgaagccatcccttgttggtgcgcgtattgtaaatgtaagctcacgtcttggtcgactaaatggaagacggaatagaatcagcaatgtagccttgagggagcaactgagtgatgtagaatccctttcagaggaacttattggcatgactctgtctacatttctacaacaagctgaggatggaacttggactacagaggggtggcctcaagtatacactgactactcggtgtccaaacttgcagttaatgcatatacaaggcttatggcaaggaagctttctgagagaccagaaggtcaaaaaatctatattaactgctattgcccaggttgggtgaaaacagctcttacaggttatgcagggaacaatactgttgaggaaggggctgatactggagtgtggcttgcccttctttctgaccaaacattcatgggaaagttttttgcagagagacgagaaattaacttttaagctgttgcctattggggggattacaagaattttaagtcattctactgaattttgcaaatttttcaaaggaaaagaaatactgaatttgtatgttggcattagttcactagcaggtttaagtttccctcctgtaccatgtaattttagttgataagctaattcttttgaatactttatgcttagctagttgtaaccgcatatgcaggtgcacgtgcactcgcatatagggaacaaatagtgagaaatgaaaacagtaaattgggatcatgcatacatatgaatgtcaatggttaaaagatgaatgtacttggctttttt

SEQ ID NO: 59037 - DNA, 828 bp, Glycine max
  Clone ID: PAT_MRT3847_24321C.1
acggctgcgagaagacgacagaaggggagaaataaagagcgaaggacaacatatgaaggtgaagagggttgagttcagagttgaaacttgagagagtgtcgttgattccaatttacgacggaggagtgaggaatcacaatctccaccggcgaaacctgtaactgttggcgacgctcaacactcgcactacgccgatagtgatggagagtgcttttgcaagcgcctctgcgattactgaccagaggcagaagatagagcagtataagcaaatacttgctgctgtcatttcatctaatgacattgttcaggctaggaaattcatagatcacatgttatcagatgatgttccattagtagtgtctcggcagcttttgcagacttttgctcaagagttgggaagattggagcctgagatacagaaagagattgctcattacgcccttgcccaaattcagcctcgtgttgtgtcattcgaagagcaggttttagttattagagagaaacttgctgagctttatgaatctgagaagcaatggtctaaagcagctcaaatgctcagtggtattgaccttgattcaggaatgagggtgatagatgatggattcaggttgtcaaagtgtgtccaaattgcttgtttatatcttgaggatgatgatgctgtctatgctgaagcttttattaataaagcatcattcttggtcagcaatagtcagcatgaagtactgaatttaaagtacaaggtttgctagaggatattgggagtcatagcaagccacacaagaacatgagtatccatatctataatttttagtcttaaagcatgcccta

SEQ ID NO: 59038 - DNA, 234 bp, Glycine max
  Clone ID: PAT_MRT3847_24322C.1
agctcggaattcggctcgagattcgaattggaaacaaccatctagtttgtaccattccaaagaccattggaaatgtggggggcctaaggtactttgaagcctatgataatgatctttctggcgaggttatgtatgaatttgctgagagttcttatctgacactcctgaagttggcgtcacatcacatgacggacacgattacccaccactttgtacaccttatgaacctggggg

SEQ ID NO: 59039 - DNA, 474 bp, Glycine max
  Clone ID: PAT_MRT3847_24323C.1
ccccaaaaaaccgaagaaaaccttgggaatggtcatcaaatatttttttcctatgaaatgaccttgattatgatatttatgcctatcaaatggtttgaattatcgaaaagaaagtaaccttgaataaaaatttaaaaggcactttttaaattagaaaaaaaatcaattaatggtaaaaattaatttcatttttttcaaattttaatttaataaaaacctttagcttattaaaaattagtggaaaaaattttaatggttattaaagggaaaggggcctgttcccaaccatccaaatccaaagaagatttaaaattttgaaaccaattccattggagtaaaatatttaaatttgaaattattccaccaaatttttccaattccaataatattggcggacattcaacattggtggcttgagcctttacaatgaaagccatttttctttgaatgacttgcgaagggacacacaaaaca

SEQ ID NO: 59040 - DNA, 200 bp, Glycine max
  Clone ID: PAT_MRT3847_24324C.1
tgagcttttacacggttattcaatcacacattggttaaaatgatttttaattgattaataataccaaattttactggaaccatgccttaaaattaaaccctttaacataattaggtcatgacctgggtggttaagcctcatttttgtttcaaggaaccagctaagcctttatcaagattgggtcaagacacatcattact

SEQ ID NO: 59041 - DNA, 280 bp, Glycine max
  Clone ID: PAT_MRT3847_24325C.1
tttcctcttttttttttttttttttttttttttttgggtttttttattagcccggggggaataaaacttcacaggagaggatttctcgggccactaatttggtgcatttagctaaaattgccccacccaaaaaaaaaagaaattgaattgcaaagcaagctaaaatttcaacaatggattgtccccaaaagctgaatgcaggaccgaaaacattttttacattattcccacaataaaaaatcaatgtattacgtttttgtattttatcgaggtgggggaa

SEQ ID NO: 59042 - DNA, 408 bp, Glycine max
  Clone ID: PAT_MRT3847_24326C.1
aaaaaaaaaacaaaaccccaaatttttcacaatttttattattaaataccgaaggataccccgaattttttttccctgaacaaacgggcaaatggggatttcttttccaaatttaaggaaaacctaccgggggaattcgtttgttttatacaaactcaaaattttccaaatttaaaactttaaaggaaaaaatatttcctttaaaaaagtaaaaaaaaaatggggggaatttttgggggataataatttttttttttccccctttgggggggttcaaatgaacgaggggggggggacaaaaccctcttccacagatccgacgggggggaatccttttgaaacggggggttttttggacggggggggggctttgggcgggggggaaaaaatcccccaccggaaaatgga

SEQ ID NO: 59043 - DNA, 173 bp, Glycine max
  Clone ID: PAT_MRT3847_24327C.1
aaacccctataaaaacaaaattcaattttttttacaacgttgaattcaggccttttgggttttgaagcaacaggggggggcttgacagatgaatacagaagcgggcttcacagatgaatcccggaagaaaaaggttaacaacattcttaacacacttattagggactgaaatt

SEQ ID NO: 59044 - DNA, 485 bp, Glycine max
  Clone ID: PAT_MRT3847_24328C.1
cccacgcgtccggataaaactccctttataacttctgagttactgatactcgagcacaactcttcatccatgaaaatcagttttgtttataaacatatacaaataattaggtggtgaaattgaaacaagtaaacctccaaaaaccagtaaccactccgtatattatcttattggcaaagtactcaatcatcagcactagcaacagccatgggagaggtagacccagctttcatccaagacctagaacacagaccaaagctctccataatccaagctgaaggaattcccataattgacctctctccaatatccaaccacacagtttcagatccatcttccattgaaaacttagtgaagcagatagggagtgcatgcaaggaatggggtttcttccaagtaaccaaccatggggtgcccctcactctaaggcaaaacattgagaaagcctcaagattgttctttgcacagaatttggaggagaaaag

SEQ ID NO: 59045 - DNA, 282 bp, Glycine max
  Clone ID: PAT_MRT3847_24329C.1
cccacgcgttcgacttgaacctgaccaaaggttctctcttatccattttattactatcgggggattgtttcacactgcacatatcgcagacttgcacgcgctctgttacagcctgaactgagaatctcattgaggctctagaaagtggtgatcagtatgtcaaagaatccaatagattgctttgatcttctaattggaaagatgctagctggactagtagagactgagtcgtttgcctaggcagcccctatgacaggtgtcaactttatggctctcttgact

SEQ ID NO: 59046 - DNA, 373 bp, Glycine max
  Clone ID: PAT_MRT3847_2432C.1
ttgaaacgactgatgaatatggagacggttatcttaattgacaggctccaacctttggcactctattgagactccggggttcaaaaaaccctattagagcacctaacacactttatcacttcaacacccatgctgaagatctccacattgcgaactaatacaccatatcaccctccacttacgcttctactcacccagatgtatcagaatctgcatggccaaatcgtggtggagcatttcaaccacatgctactacaaataattgtaataccaacaatactaatgcaagaccaagagaaacaaatgcataatgtccgcccaaagatgcaacaatagccatctataccttcctttatgaattattcaatgaaaa

SEQ ID NO: 59047 - DNA, 238 bp, Glycine max
  unsure (1)..(238): unsure at all n locations
  Clone ID: PAT_MRT3847_24330C.1
gccgcagcttgaaacagngcagagcgaccttganaagctatggctntcgganagcataagaggatttcnaagggaaagaagggtggcaagaagaaagccgctgatccctttgccaaaaannnctgngacgatataannggacccnttnccctcttccnngtcaagaaattggnaaaacctagtctntngaacccanggaaccaggattncatccgaagactcaaacatcgggtttttg

SEQ ID NO: 59048 - DNA, 281 bp, Glycine max
  Clone ID: PAT_MRT3847_24331C.1
cggccggcctttcctttgtttgcttgtatcctgcggatcttgtagctgaagtggccagtgttgccattacataaggcacctaagttaccacgtaattcacgctgtcgttcgtctgctttcatctgtagagggattgaccgctaatcgtgcctttctcaaccgttgcaaagatatccttgtaacaggacgtgactcctacttcccctggtgccattcgacatctgcttatctggagagcgaccacatatatgtttcttgcccatcagatcgatgctagaatt

SEQ ID NO: 59049 - DNA, 1665 bp, Glycine max
  Clone ID: PAT_MRT3847_24332C.1
tccagttaaacacgctgactcattttcagtcaaactcttaacccagtggctgacttttcctttcttttttcttttgagttttttcttgctttatcttggtgcttaatttggttgacatttaatcagagttttactcacaactaagaaaatggttaggcaccacaccattttagaaagcctgaaaggcttatctgtgtctatcattatgctttcaagtttcagcatgatttatattattgctttttatactagaattataatcacggagctgatttagtttcaaaatttcactaatgatcaactgactagttccgtatttattcgaggagttagagcatcagattttggtcccaaagcaagcttttggatggattttcctaaagaaggttctcaattaacacctactcatcaatcagatgattttaaatggaaagattattgtcccatggtgtttagaaatttgagagagctgttcaagattgatgctgccgattacatgatgtccatttgtggaaacgatactctgagggaactatcttctccggggaaaagtggtagtgtcttcttcctgtctcaggatgatcgtttcatgatcaagacactgcgaagatctgaagtcaaggtccttctaagaatgcttccagactatcatcatcatgtgaagtcatatgaaaatacacttatcacaaaattttttggtctgcacaggattaaaccttcaagtggtcaaaagtttcgctttgtcgtgatgggaaatatgttctgcacagaattaaggatccataggagatatgatttgaaaggttcatctcttggacgttcttcggacaagatagaaattgatgaaaacaccactcttaaagatttggatctgaactactgcttttacttggaaccatcttggcaggagtctttattgaagcagattgagattgacagcaagtttttggaattacaacagataatggattacagcctcctcctaggtgttcattatcgagctccccagcagctgcatccatacaaccaaaatagaactgcagatggattgccaattcttgcagaggaagaccctctagaggatgaaggatccaactatccacaaggccttgttctggtccctcggggtacagatgatgatagtgttgttgtagggtcacacattaggggtagcagattgcgagcttcggctgctggggatgaggaggtggatctacttctacccggtacagcaagactacaaatccagctaggtgtgaacatgccagcgagggcagaacagattccaggaaaagaggaaatgcaaatgttccatgaggcttatgatgtcgtactttacctgggtataattgacatattgcaagagtacaacatgactaagaagattgaacatgcatacaaatcaattcagttcgattcattgtctatctcggcagtggatccaacattctactcgcgtcgcttcctggattttattcagaaagtgttcccaccacatgaaatggcaggataacagtttggggattaagttcaaccagttggtttattcagaaagtgtcattgtcacattgcctccttttgtgcatgctgtataattgacttgaatatgtttagattttataaatatgctaaatattaattttggtcttttctaattaaataaaa

SEQ ID NO: 59050 - DNA, 251 bp, Glycine max
  Clone ID: PAT_MRT3847_24333C.1
aagatgcccatcttgagttcgactattagcgaatgcaggacgaagtgacgaaccgcaccttacctttaccacacatacccctaccaacgactttcttcagccggacgcgagcactcttacaagggctgctaactcgtggtggatttggggaagaaaatacactggctgatgcgatacctctttttcattactattttcattgttctttttttttcccattccctgttttttttagcacctgcaaaattctc

SEQ ID NO: 59051 - DNA, 471 bp, Glycine max
  Clone ID: PAT_MRT3847_24334C.1
ctcggctcgaggccatagagggtggtcatggggctacctatggcactattcttactgctatgcctactgccatcagaaatgttgtcagaggtggagcccgcagcgctctcgggggaggtgatctgacaacataccttctctacatgctcttgaccgtaggttgtgtcactggcgtatgcggtctgagaccacttcctcagctaacacctatccatattttgcgcccccatagaaaaccttggtcattattacattactatcactcagtactcttgattgtacaacaagtggtcgctcggctctgcccctggacgccctacatagaacattgaggtgtactgaagtatacagtatcccttttattctgaaaggactccagatgtgtatgcctgaatttacgataacccttgagattgtgacatgctcttataataatgactttgcttgatgccgcaaccgatgaattcaatg

SEQ ID NO: 59052 - DNA, 384 bp, Glycine max
  unsure (1)..(384): unsure at all n locations
  Clone ID: PAT_MRT3847_24335C.1
aattgccattctagggaccttggcgattcatataagaacggaacgctggctcctatggtggtaaatacacactccacaacttgattattaccctgggccttttttgntattactaaataaaagaaaccctcgctagatatgtataaaagagaaaattttatcggccttccaattgggattatctaacttgatactctggttaaagacttctaatgtggacccaggaacaagaaagggaaattagcctttaaactgactggcctaaacgagcatctttaaattaggttggtacaaagcactggctcttctcaggcatttaacattaaaatttttgctatacggcttgcgaatgcggcacaatgatttgggaaaacactaacatac

SEQ ID NO: 59053 - DNA, 172 bp, Glycine max
  Clone ID: PAT_MRT3847_24336C.1
gaaaccaatttaggcactcttattttagaaactgatgatccaaaccctcaaatcccttccataatccaatcctttcacagtaaatccacctattcctctttcttttatatctttttcacctacaatgaaaccagtgaccaaaatagttacaacatcatcaaatgcaacagat

SEQ ID NO: 59054 - DNA, 208 bp, Glycine max
  unsure (1)..(208): unsure at all n locations
  Clone ID: PAT_MRT3847_24337C.1
ganaagggtccattggagaatntngccgatnaccttgctgancntgtcaacaanaacgcctgggcctatgccagaactttcgtccccggaaagtggagcgtaaangaacggaattgactntnnacagttttaagattggtgtncgtgaagtacttcagataatgtgattatcctgtggttngatccaactcaatgttacttgcttttc

SEQ ID NO: 59055 - DNA, 328 bp, Glycine max
  Clone ID: PAT_MRT3847_24338C.1
ggctcgagcaatatattccattctctctttgtatttccctacctctcccttcaagatggggaggtgtgtgaagaccctcaccgtccagaccatcacccttgatgtggtaagctttgacaccatcgtctacgtcaaggtcagtatccaggacaaggaatgcatcctcacggtatattaacgtctcattttcgccggaaagcatctagaggacgcgtctgcccttggtgtctacatcattcgaatggagactactttgttgcttttacttcgccacctcatcggcaggcacatattcgttatgacactgacctttgtgaccatgatccta

SEQ ID NO: 59056 - DNA, 153 bp, Glycine max
  Clone ID: PAT_MRT3847_24339C.1
acgacggcgacctacgcgtacgcccactcatactcttgtatgagatgttaatatctaatcctccttcctcgattgaagaggggggcattgaggatgagctcatctacatccctctttttgccgacaatgattttctatcacatacgcatacac

SEQ ID NO: 59057 - DNA, 1400 bp, Glycine max
  Clone ID: PAT_MRT3847_2433C.1
gcacgcaaacatgtaaatcatatataacgtgtagacgagtacgttgttttaagtgaaggggatacaccagcacgaatggggaggggaataacaatgacggggcacctaagctttccacttattaatatactgcgctgaacacaagggtgctatctcgctcgatgatttctgggtgacatgtttcttgtgttctcttataatgaatgcacataatggtgtggaacgatgagaaagagggatgccattcctaatgcgatgccttgatcacatttgaggacaattttttacagcaaacatacacaaaccccgtatagtgcattaagcgatatatttgttaatatatacattttttgtagtatgtacggctacttaaggatcacgagcctgaaaagtaatgacaaaacataatataaagcatgaaatatattccacgcttatgcctgttaagtattgcactaagcaatgcaacactagagatgatccaactcagcggtcttcctttcgtacagcatttggatcagacatcatgtccatcatcattttctcaggtgaatcctcccaactcgcaaatgtcttcaagtcaacttttcttctttgctcagtgaaaagctcttctctcttcttgtaagagttctgcacttcctttgctactttcccaccaagtccccaaacttcaacttcagaaatcagaccctcgacaggaaggaaaccctgatctggaaagagagatccactccggtaagttttgtcaatagcatgatggcgaacagtcacttttgcaaaatcttcatcaataaatattctctcatttcctggagttcctccaaatgcaactccaaccggctttggatgcggttggtatactttaccagtaggatgcaagtggctataaacaaaattcttttccttaccagttggtggaaacacatgaaacactgggtcaatagaatataaacatccagagtttccatagaagatatctttattttcaagaccttgatctgttaaggcacctataacccatttcctatcaatggaatttccctcgtgagcatctcctgaacttgcagctatcaaaattaacaaaggacctttgtaaccttcaacatgagaccaaaatctgccaaggcctcttccatgagtggatgaactataatgcagtatccattcaatgtccattagcatttccttttccaacaggtaagtctaaacaaaattatgaatgttgcagttcaagcaacatatctactctatgccaaaaaataaaaataaatatgaaagcatacctaacccctaattttaacaacaaaaaattgaaaagaaaattgaccagtgtccaagactgttaaagcacaattgtgtgatgaagttatgattgaggggtcagacatgctcgagcc

SEQ ID NO: 59058 - DNA, 1847 bp, Glycine max
  Clone ID: PAT_MRT3847_24340C.1
tgagcgtccggaagaagaacaagagatgagtcagggtggtcaggcttcaagtgaataagaagaagaagaagagatgagtcaggttggtggtcagggaggaggaggatctcattcgctggcgttccgcgtgatgcgtttgtgccgcccttccttcaacgtcgaacctccactccgcctcgaccccaccgacctcttcgtcggcgaggacctcttcgacgaccccgctgccaaaccccactctttctcctccgctgccgcccacgacgacgactccgatcccaactaccgtaaccgcttcctcctccgccacttctccgacgccatgggcctctccggcctcctcgttctccctcagtctttcggagccatttatttgggggagaccttctgcagctacatcagtataaacaacagctccaattttgaagtcagagaagtccttatcaaggctgaaattcaaacagagagacagagaatacttcttttagacacatcaaaatcgccagttgaaacgatacgtgcgggtgggcgttatgattttattgtagaacatgatgtgaaagagcttggacctcacacgctggtctgcactgcattgtataatgatggtgacggtgagcgtaaatatcttcctcaatttttcaagttcatcgttgctaatccactttccgttaggacaaaggtccgtgttatcaaggagactacctttttggaagcttgtattgaaaaccatacaaaatcaaaccttttcatggaccaagttgattttgaacctgctcagtattatagtgcaacaatacttaaaggtgatgggcaccattctgagaaagatagtcctacaagggagatatttaagccaccaatactaattagatctggtggaggaatttacaactatctctatcaattgaaaacgttatcagatggttcgcctcaaacaaaagttgaaggaagtaatgttcttggtaaactccagataacatggcgaacaaatttgggtgaacccggtcgtttgcagacccagcaaatattggggacaccagcaacaaagaaggagattgagttgcaagttgtagaggttccgtctataattaaccttcaaaaaccattcatgctaaaattgaatcttacaaaccagacagatagagagctgggcccatttgaagttggcttatctcaaaatgtttcatatggggagagagttgttatgattaatggccttcaatcaatggttttatcagaggttcaggctttaggatctacaaatttccacctgaatctcatagctactaaacctggaattcagagaattacgggaattacagtttttgatactagggagatgaaatcttatgaaccacttccagatttagagatttttgtggacatggattaaaattgtggctaccgcatccaatttggtcagaagtggttgacagcaacattgatctgctgctgttatcctcagttaaatgtcctttgtcatcaatgtgcctaatcagacctaccaagttcccaattggtggctctgatgccactaggcttagaattctcttccggttagggccaatgaatcctgcatgatcatcaaagccttattggactaattacaaaattctgtaactaaattggagtgatgagtggttgattacgtgctgagagaccaagtacttgcttctattggttcaagtggctcggttattttgattgtcttgaaaaccaatccactgtcacaatagatggtttacattttgcagtttcttttattgtggtaaatggtcaatatactaatgtatcttatgtactgtgaattatattaattattagaaattatcaatttagtatgg

SEQ ID NO: 59059 - DNA, 503 bp, Glycine max
  unsure (1)..(503): unsure at all n locations
  Clone ID: PAT_MRT3847_24341C.1
gaacaagagatgagtcagggtggtcagggaggaggaggatcccattccctggcgtttcgcgtcatgcgtctgtgccgcccttccttcaacgtcgaacctcccctccgcctcgaccccgccgacctcttcgccggcgaggacctcttcgacgaccccgccgccaatcccccctctttctcctcctcctccgactccgatcccaactaccgcaaccgcttcctcctccgccacttctccgacgccatgggcctctccggcctcctcgttctccctcagtctttcggagccatttatttgggggagactttctgcagctacatcagcataaacaacagctccaattttgaagtcagagatgtcattatcaaggctgaaattcaaacagagagactgagaatacttcttttagacacatcaaaatcgccagttgaaacgatacgtgctggtggccgttatgattntattgtagaacatgatgtgaaagagcttggacctcacacgct

SEQ ID NO: 59060 - DNA, 121 bp, Glycine max
  Clone ID: PAT_MRT3847_24342C.1
actgcattcctttgaccacaaatggaagctaagagccaccgcgcatccaagtgttgccgggatgaactcggcctaaagacgagccgctgacttccttatcccaacgggtggggtatcatat

SEQ ID NO: 59061 - DNA, 340 bp, Glycine max
  Clone ID: PAT_MRT3847_24343C.1
aaaatgttgataaagacgaatgggaatcgctgaacagatgaaggaagtgtggtttgtggacactgacaagatttcagtattatatgcttttcgggaaattgaatgaaatggtaccttatattattacaacaagcgggtagggggcgcatatacgttgctgattgtcgctcaaccaccatgatcttcaaattatttgaagccacgaaagtcaatctacccaaacccaagcatgtttgtttattactattatttccggcagtattggttctgccaagtgactatcatggcactggctaaaacttgaaagaccacactttccatatggcaggctaacttgtta

SEQ ID NO: 59062 - DNA, 454 bp, Glycine max
  Clone ID: PAT_MRT3847_24344C.1
aggatcccgaaccaccaccaacgatacccgctgctctgctttgcctactctacctcctcgcgtatccaacaccaaaaccactcgggacgcaccgtacccagaacgaacagttcgggggcccgaatgacttctctgcctcaaaccagaacatcttcagaggaatcatcctcacgtagatgccaatgaggtgctcgcagatttgaagggaaagagggatgctcaggaaaacaagtccacagaacatcattatggtggaggggacttacttgctaattgcatatagacaaagctcgtgagcgccatcaactcagttccctagcttacaaagaacatggtaaaggcacggccagcatacactgagcggattgtctaccgaaaccttgtggttaagcgtagcatgaatgatctaggtacaggcatagtatcaccgaacgagaacgcacaggcacgtgag

SEQ ID NO: 59063 - DNA, 261 bp, Glycine max
  Clone ID: PAT_MRT3847_24345C.1
cagctgtctgctgttagatctgtactccctagccatttatttggaaaattccaatttcaaggattgagtactcttcagagtgatgctctaagagtagctatctcaggaatcattgctgattccaaggataagaacaggaaatttgtggagaccattgaactccaaattgggttgaaaaattatgatccccataaggacaagcgtttcagtggctctgtcaagttccctcatattcctcgccccaagatgaagatttgtatg

SEQ ID NO: 59064 - DNA, 354 bp, Glycine max
  unsure (1)..(354): unsure at all n locations
  Clone ID: PAT_MRT3847_24346C.1
ggggggttttttttttttttttttttttttttttgccggcccaaaacaaatgggattttctataaaaataacttctccggatttttttaagttcccttgggcggggggaataatatttggaactggcacaggtttgctggtttacaaccccggaatttggggtaaaaggtttatcaaacaggggccttcctcccattttttcctccccccttgggcttgctcccgggaagaaaaaggccctggaaggggggaaggggttgtttcgatttttcatgggcccgttttcaagaccttttgggtttcntaaccgaacagaaaagggaggctgctttgttgggggggggctgttttagc

SEQ ID NO: 59065 - DNA, 194 bp, Glycine max
  Clone ID: PAT_MRT3847_24347C.1
gccgtgcaactttgaggacttacttgtcttctcatgttgtactcaaggagaggtatgacggtgtgtttcatattgacaaaggagggggtctcatcacacaatatatacattcatactaacgattcacaatcttctgggttcatgcaagtcgaaagaacagatgtactataattgatgttactgaatattatttt

SEQ ID NO: 59066 - DNA, 1458 bp, Glycine max
  unsure (1)..(1458): unsure at all n locations
  Clone ID: PAT_MRT3847_24348C.1
atacggctgcgagaagacgacagaagggggagggaacaacaactgacacattcaaaacacgtgtaaacttttttttataccttgagatttttttctctcgaaaaacccccctcacctgccccagggaaaatggcttcattgaaactgccagaggttgttccttctcccacacaagacagtgaacgactcagaaaggctttccaaggatttgggacagatgagaaagcggtgatattggtattgggacacaggaatgctcaacaaaggaagaaaattggagaaacttatcagcagctttacaatgaatcgcttgtcgatcgtcttcattctgaattgtctggtgattttagaaatgctgtaattctctggacctacgatcctccagaaaggcatgcgagactagcaaaggatgcattgaaggctaagaaggggattaaacaccttcaggttctggttgaaatagcatgtgcatcaactcctaaccatttggtggctgtgaggcaggcttactgctctctctttgattgctcacttgaggaggacatcatagcctctgttgctccagccctcagaaagcttttagtgagcctagtaagctcattcaggtatgataaagtggctgtaaatttggaggtagccaaggaagaggcatcaaaactacatgaagctatcaacagcaagcaattagacaatgatcatattatttggatacttagcaccaggaatcttttccagctccgggaaacttttgcatgctacaataacctctatgggaatacattggaacaggacataaaaaaatgtggtaatggtgatttggaatctctcttacatacggtgatatggtgtatagactgccccgagaaacattttgcaaaggttgtaagagattctatagttgggtttggaaccgatgaagattccctcaacagagctattgtaactcgagccgaaattgatctgttgaacgtcagatttgaatatgctaacgtgtacaagtctagtcttgatgatgatgttattggggatacttcagggtactacaaagattttttgatgactttgctagggaaaggtccagatggagagtgatacattataaccaacaagcacagctcatggtattctaggattgcttgtaatctgcatttgatggtctagactctgtaatatatatgttgctcctttttatttcaaaagaatcagaattcaagattgaaaccaaaaccatttatttgttattctgcattgactttgtgtagattaattgtagcttgatgtcttggtgtatagtaaataacaagggatttatgatgtgaaacacagaatttgtatcttggttgcaattataatattattttacacatgcataaaagaaaaaaaaaaaaaaaaaaganttaaaaaatgtggtgtcgttgactagtgagtttttgttcccgggaattaaattcagagcgg

SEQ ID NO: 59067 - DNA, 429 bp, Glycine max
  unsure (1)..(429): unsure at all n locations
  Clone ID: PAT_MRT3847_24349C.1
tgcgnntccgaaaaaaaaaaaaaaaaaaaaaaaaaaaaaaaaaaaaaaaaaaaaaagggagaaagggtgtgacggtttaaaggatcacaagctcactgcctgcgagcgtgctaacgtcttatattgtgctatcgtgaaacaaaaaactagttcactggcctacaactttacaacctgggaaaatggtaaaaccttgcagttacctaagtcatgtagcctagtccccctattcccctttggccagatggcgtaataggccaagaggccctcgcccttcccacctttccaacagttgtgaatggctaaatggcaaatggcatcgcgccctgtattaaggcattaagcgcgggggggtgtacgcggcaacgcgaccggtagactggtacacttgcctagcgccctatcgctccggttttttgctttctttcc

SEQ ID NO: 59068 - DNA, 377 bp, Glycine max
  Clone ID: PAT_MRT3847_2434C.1
gcggcatctcgtccgacacatctctgacaggggtcttatacctgagtcgaaactggaaggcatgggtcactacaaaaggcacctgattctgcacagaataagtggtcagcaccttaagtgctcgcatgttatgatgacaccatcgaaaagtctattgagtagccattaccagtgatgcaaaccttgacccaaaatatattccctacccttgatatgcatgcttagaattccgaacaggcattcatgctgggataggcagatgcaattctacttctgcagaactgtgtctgccaactttgcaatacttctaaaaggtaatatgccccttgagctgatacgcgctatggtataatttcactgggagcaacagattatga

SEQ ID NO: 59069 - DNA, 690 bp, Glycine max
  Clone ID: PAT_MRT3847_24350C.1
aaaaagtaagctcctcaaacaagttgatgatactctagcagttttccacacccatgccgtggctggtagcataggtggcattttggctgttttttttgctgaccctaagctttgttatctcttctatggagtagaagattccctacattatacgggtcttgtttatggcatattcaatgggaggccaaatgcagggttcaggcaaatgatggttcagcttcttggcattgtgtttgtgatacttctcaatgtcaccacaactagcattgtgtgcttgttggttaggatcatagttccacttaggctgagtgaagatgacttgcaagttggggatgaagcagtccatggcgaagttgcatatgcattgtggggtgatggagagaagcttgagactgctactgagcctttgacatctgaaaagaatcttgaatggccaactgtggaactaagaacttaattcgagtgatgctcaattaatggaatgaactcaatgaaggataaaatattctagctcttttgttggttttgtgattgtttgagagggagatattaaaataaggatcagtaatctagtattactagtaagaagagaatttggttcctctgtgattgttgttgcaatgccaggatgtcaattgcaagatgacccgttgtagatttgcttaatgaaataatgatgtttatttaagt

SEQ ID NO: 59070 - DNA, 729 bp, Glycine max
  Clone ID: PAT_MRT3847_24351C.1
ccacgcgtccggccaaggaagaggcatcaaaactacatgaagctatcaacagcaagcaattagacaatgatcatattatttggatacttagcaccaggaatcttttccagctccgggaaacttttgcatgctacaataacctctatgggaatacattggaacaggttttgcttcaaaattttaggttcttatataagattgtaattttaatcagctaacattgttaaattttacattgctgctgatttatatctggtcacttgtttaaaaacagctaagttttttaacctaaaagtaaaatgctttagttactacaatgatgcgacagtatcctgttcattaatagtttaaaaatttacatttatagtggattagatatccacacatgattattttatgtatccataagaagtttggatgattttcttgacaggacataaaaaaatgtggtaatggtgatttggaatctctcttacatacggtgatatggtgtatagactgccccgagaaacattttgcaaaggtgattaattttcttctactgaagctgacttactaaatcaatacactattacgtagaaaacttaaatggtaatgccttatcatactaaggtgtcaattcattagaatctactgatcaagtacattctcaagattaatttaaaatctgcttttacagaaatatgtcaactaaaagaaactgtgtatctttaaatgttcagccacttt

SEQ ID NO: 59071 - DNA, 554 bp, Glycine max
  Clone ID: PAT_MRT3847_24352C.1
gttttcttcaatggaatggagtgttcacttcctccaattagacctgccaaaagttcagggcgcaaatcatcttccatcagtgtcattgcactcgttttcacagcttttgtgactttcttgatgatctaaatgattaacctaccttgacacaagagagagagttactggcttgaaagggtttatttttcttctcttcggggctgcttttttatatatatcagtctcatcaacgacggggtgcttatacaaactgagcagagagataaagatgcatgtgatgagggatgcagcctttttgtgtaaaagtgcataacagtgtatatctgatcgatacaagattgtgtgtggaacttattataagttcagtacgtaactagctcatattacgattagattgccttgtctgaacaacgttactctagtgtatggattgttaggtcatgtagatacgtttctcaagcaaagttctaccttctgattaattaataggttcattttctaactgtcatgggattttaatttaatttgggatttttgggggggggggggggggg

SEQ ID NO: 59072 - DNA, 972 bp, Glycine max
  unsure (1)..(972): unsure at all n locations
  Clone ID: PAT_MRT3847_24353C.1
gaaaattgtaaaactgaattctgttgtgatttgagttatcaatgaatttaggctgcaagaattgtgttaaaaaaactgaaattttgtagttttgttttttgggggtaatggggtttccacaaacattattatgtctgcaattctatgaaattcttggttatatcgttccaatggaatgtaatgtttgattttataacaaagttttatgctttcttagtattggtaggagtttggataatggggcatttgaggcattgccaatgcttttgcttgttatttagtccttatggtaatttgtgtatgagttattttttggcattaaatggttggtggtgatgattatgattttgggaaacttgatgtaggatttgggacagatgagaaagcggtgatattggtattgggacacaggaatgctcaacaaaggaagaaaattggagaaacttatcagcagctttacaatgaatcgcttgtcgatcgtcttcattctgaattgtctggtgattttagaaatgctgttattctctggagttatgatcctccagaaaggcatgcaggactagcaaaggatgcattgaaggctaagaagaaggggactaaacaccttcaggtttctgggtgaaatagcatgtgcatcaactcctaaccatttggtggctgtgaggcaggcttactgctctctctttgattgctctcttgaggaggatatcatagcctctgttgctccacccctcagaaaggtaagaacttgaaaatttcttagacacacagaacagaaacatttagctttgtctaggcaggcttaaagtgttcatcatgtacaaagtagctatttgttaggtaaatgtgcatggntaggttccaaaattcttagcactatcattntaaagtagctgagtgtgtgaaatgggcaatgcttttgcagtaacacggaataaaacaagagtgaaaagcatactacacaagaacttg

SEQ ID NO: 59073 - DNA, 332 bp, Glycine max
  Clone ID: PAT_MRT3847_24354C.1
cctttgttggcggctgaggattccaaacgagcgaccttcttcgtttctcgcaaagtttcagtcatcatgggcacggaaaagacttacatcaacattggcgtaattggacatgtcgactctgggaagtcaactaccactggtcatttgatctacaagcttgcaggtattgacatgcgggtgatatgagaggtattgcgaaggagagctgcatgaggatgaacacagaggtcattctaagtatgcgctgggtgacttgacaaggctcaaggctgagcctcgaaagagtgaattatccatacaatatctgctttagtgagacgtgttggaaccac

SEQ ID NO: 59074 - DNA, 426 bp, Glycine max
  Clone ID: PAT_MRT3847_24355C.1
tccggaacagcggacgcccccgcccttttttctaatttaaacttatattttcgccagaaaatcattgcacttcgcaggcggggggttttccacaaaaatttgacaagctataaaaaacatgggagattatgtgactcaaaacctcacccccaaggaggactagaagaagcgccaccagacccggaaaaggatcacgacaactataggtaagcaacatgtgacatttctgccctatatatcaggccaaagcactacatagaggccaaatgtcctgaaagtagccgcctaacattggcattacataccacaatacatgcacataggccggagcccgtaactcaagacctgcgtggctaaagcccagggagccccaccgatattagggtccaaaggtagatagatactccctactcggctctgaacaag

SEQ ID NO: 59075 - DNA, 310 bp, Glycine max
  Clone ID: PAT_MRT3847_24356C.1
tggcttggaacctttgggctgatttatgtgcttgggtacggagagatccccgaagactatacctggccccccgaggggtcccgacgacccaccccgcaagaaagaagggcggagaaccaccgcgcacccggagcccgaactcccttccgctaacgaacgtacgatctccagtctcgccctccttgcctcaaccgaacgccgatatctccgacaggaatagagaacaaagccgaccctagcccagcccccatatcgtaaaaaaaaaataaaagaacatacctacggtgaataacacagactagatcctaag

SEQ ID NO: 59076 - DNA, 360 bp, Glycine max
  Clone ID: PAT_MRT3847_24357C.1
acggcttgttgaaaacaaacaaaagggagtgtttgcttgttctctgctcgtgcctctaggggggtgatatatgcatttgcgtgtgctctctctcactttccaagaatctgatgctattggaaagtcttaccccaccgtgagcgctgattaccacaaggccgccgagaaggcgaagaagaacctccgaggcttcatcactgaaaaaagatgctctcctctaatgctccctttggcatggcactcttctgtaacttactacgcgagctccaagaccggttgtccctttcgaaccataaagcacccctcctaactcgctcacggggctaacaaccgtcttgacatcactgttaagctttttga

SEQ ID NO: 59077 - DNA, 168 bp, Glycine max
  Clone ID: PAT_MRT3847_24358C.1
gacccacgcgtcgtcggctccaacaaaaagacacatttgatcagctctacaaatcaacagaagggacggtttcagaagatacatatcttactattcaaactaaactacacatggatacggctgcaaaaatactacataggggtaccgatgctaaaatacttcacaatg

SEQ ID NO: 59078 - DNA, 478 bp, Glycine max
  unsure (1)..(478): unsure at all n locations
  Clone ID: PAT_MRT3847_24359C.1
gtttggggttacccacggtgactctactcgggatttagatgntcttntgaaagatagtgaacacctagnagacatgattgaaaaagtatcatctgtagatagctcggattttatcatggaaagtgatgctcttggacaaaggggaatggaccagagacaagggcatgagacgtgacgtgaagtcgctgttttttttacccgggaggaagaaaattccgtcggtgcccacgtgttcgaccccaaagatgattgtgcaaagcctacagcgtcacttactgcaataattgaaggccggagttctaaaaaagttaacatgagggaggcggtgacaatcaagtcccgagataaccactgaaacctcggaagccataaagctggactgcatgaagctaatcagcgagagcctgaggttgaggggccgaaggagcccataccctcgacacaggtagacgaggtgaaaaagttgtgccagccgggc

SEQ ID NO: 59079 - DNA, 431 bp, Glycine max
  Clone ID: PAT_MRT3847_2435C.1
aacataacttttaagggaattattattaaactcaacaaatttatcggtcatacatttataagtaatgacagtattacacttatcggtgcatttccaaattggtctaaatttattatacataatcttatcctttccggcttttttaagttttaaaaaaaaatcttatcctttccattctggttcaactatttcatgacaccagcaaggttggattggaccttcataaggatttttattaagccctggcattgggccagaaagcaccccaatatgcacctacatttttcgattcccatgaaacccggccttgaaagtatttgatctctggcactacgactgagagaaataaaagcttcattaatggagctcatagcccgttacacccactttgactttctctctgacgctggcaaagtgtttgatgcaatccc

SEQ ID NO: 59080 - DNA, 193 bp, Glycine max
  Clone ID: PAT_MRT3847_24360C.1
gagacttaaaaactttaatagcatgttacatgtgatgttggagcccaacacttactaggatccagtgaaattaacacaacaatatttgtgatacatattacactcccttacaataaaaaaaatgtgtaagggggatccaaaaccataccaaaaaatgatgctaagaaacagagattgaaaacactcctacacc

SEQ ID NO: 59081 - DNA, 361 bp, Glycine max
  Clone ID: PAT_MRT3847_24361C.1
aagtccagcaaccaaatatccacttccaaagtatagtcagtatcaatagtctactgcagataagctcattttcaatgaccactctgcactaacaacatacacccactgatgacatttacataaaaaaaaaaaacctgcataacatctagtctacctgctttttctaaactttccattgaaacatggaaaagttggacagaagagggttttccctctttgccgtgttcttttttaccccccaatttgtcagcattatcacctgcattttacaaaagaatcatagacatagagataccagtgtgacaacatatatcagattctctgcctgacccttctaccattcgtgtcaccaccatctgaa

SEQ ID NO: 59082 - DNA, 291 bp, Glycine max
  Clone ID: PAT_MRT3847_24362C.1
ctggggcttgtttgttctttttggttcgcaccggttccttgttttaggctgaacggtgctatgtacaaatgagcttagttaagtgccttctagcattgctttttggttgaggtatacacaagggcttccgaacccactttggcccgcgtgagccactgacacctggaaaaaactttgttaacccgtggatgaaccggcgggaacaactcgttgcgactgtatgagtagaggctgacagccattgcaaccccctgttggttaacaagtttgcttaaggaatctcgctcttca

SEQ ID NO: 59083 - DNA, 171 bp, Glycine max
  Clone ID: PAT_MRT3847_24363C.1
tcgcgtactcgtgcggccgctcgtaaattcaatgggcaggcgctacctaaaagatctaccgatcgactcataattttgcaaatcgaaattgttcttggcgcaccaagatacttactcattaccaggggtgtggtcctctctttttccaaggcttcacaccattcatattcc

SEQ ID NO: 59084 - DNA, 1865 bp, Glycine max
  Clone ID: PAT_MRT3847_24364C.1
cttcaagacctaggttatatgcgatattggttgtcaaggacaacaatgatgcaatcaaggtttcctgaaaaagaaaaaaaaaaacatcttgggtttcttcttccttggactcctcgaacatcctcggtgtcaatggaaatcaattctctatcactcccctcttgtcgtatgccttctctgctaaaggactctcgcagcagtggttcccctcagcaacaaaacaagctaatctggtggcagaatgacaaaggagtaatcggtggtaaggacagcagtgtagattgctcttcattagttcaaaactcttgtaggaaaagaatgattcatcaatctgatggggtttttcatgatatgaatgttgaaggttacatgccaaaacagacctctttgtgtgttttgatgctacattacacagagaatggcttttttcctcaagcacagactgtatgggagcagctcctaaatagctcttttgttccttctgttcaattcatttcaagattatttgatgcttatgcaaaacatgggaaattcgatgaggtgatcgataccctacgatatgtagatatgaggaatttcagtattttacccgatgtttactcgttgaccatatcttgttttggaagagaaggacagcttgagttgatggaagatatggcaaaggaaatggcttcaagaggtatccatatctgttctagaactgctaatgctttccttttgtattgtagtatttttggttctttgaaagagatggagaatgcgtatggccgccttaaaaaatctagatttctgatagagaagggagcgattcgcgctgtggcctctgcgtatataaaggagagaaaattctacgaattgggtgagttcctaagagatgtgggtcctcataggaaaaacgtaggaaaccttttgtggaaccttatgttactttcttatgctgccaatttcaagatgaaaagcttgcagcgagaatttgtcagaatggttgaatctgggttccgtccggatattacgacctttaatattcgtgctctggccttctcaaggatggctttgttctgggacctccaccttagcattgaacatatggaacatgagaatgtcattcctgatctagtgacttttgggtgtgtagttgatgcatacttggatagaaggcttggaagaaacttggattttgctctaaacaaaatgaacttggatgattctccgcgattattaacagatccttttgtgtatcaggccttaggtaaaggggactttcaaatgagttctgaagcattttttgagttcaagacacagaggaaatggacttaccgtgttttgatacagaagtatctcaagaaacattatcgaaggaaccatatattttggaactactaatacatagttccattcaaattctaggcaagtagttaattggaatactcttttactgaattgctagcaaaacagtgctgcattcactatgtagttgactcgaaacgatacttgatctaaaagtttttgatttcgtttataaaagttttttttaaaaaggatttaaaacgttttgtctttaacattgtattggcaacgtcatatttataaacttcatttgaactttcaaaaaaatttgcaaaattagtatatatgttattctatacttgaatggtgcatcacttcctgcctttcttcctcaggggacccgtagcttggtatgaaatactcgttgcttaaccatatgtacattttcaatgtaagcaactcttatcaatacaagcttgcttagttcgcccatgaatttgtccaggcatgcatagtttctttcttagtagattgtgtatttcacatcttattattaattgatatataaaggtacatga

SEQ ID NO: 59085 - DNA, 539 bp, Glycine max
  Clone ID: PAT_MRT3847_24365C.1
ggacaaggaatactcatttaacattacatcatgcataatctacatcgggcattaacaggacgattttcctttttcctttccaacacctaaaggcattgatggcattatctatgactaaaaacatcctcagcaatacagcaacacttcccacatcacaatctgtaaaaccaaagttaccgacataaacagggaaagggtccaaagaaagaaagaaaaaaaaaaagataaaagggggccgaggcaacttttataagggccatcaaaaaatctcttctgttctttgggttttggggggaggggaaaccaaaaaagaaaaaaaccctaaccctgagtattagtatcctagaaagttacagttcacattcaaagaattgaagggcggctcctctcagggctattttgaaaataacgggtattcccccaagaaaatggtccaccaaagaagaaaataaaggatccactttaaatcagggcccaccaatctctgttgggggggaacaaggggccagggtgttatgaggcaggttaataccaccccc

SEQ ID NO: 59086 - DNA, 770 bp, Glycine max
  Clone ID: PAT_MRT3847_24366C.1
gttaacaaagactctttgattttaataaggaaaagaaagaaccttcaggctttcccattgctcatgatgagagacactgcatctcgtttcatagctacatacacataaatgacataatttacacaacacatacaaatttgcaattggattactttgggcttggaccagcaattggcctttgattctttctcttttttttagacctcaacaatagatttatataaattcagaatcatggtatgaacctaagtagatatttacaatgtaatgaattaattttgtttctcaccaacttacattgttcttccacaaagacttctgaggacatataacagtctgagattcaaatacagtaagcatgtctgtcacgaagtacttgtctatctgatatatgcttgtttgacttgggcgtgtatcttgatgggagaggagaggttaaacccatcatgggttttatttcttataagagtatgattatgatgtgagtgtgaccccataggagtaactctattagtactagttccagatgatgaggttggtaatggttctggggctggtgccgaggccagttcctcttcagacttggctagcggtgatgctgtttttatgctataattatgagtgtacccgatcattcgtccaagcttcactccttcagttatatttccatttggatcgaggtcaacctttgaattctctgacaagagaatgagtgtaggggtgattattgtaaggaaagcccaaaagacgaatattggaactagagttct

SEQ ID NO: 59087 - DNA, 345 bp, Glycine max
  Clone ID: PAT_MRT3847_24367C.1
tcactatcgtagggaggtgtactgcaaaggcgaagtcaatgacggacaatgcgcggtatcaaaaggatattaaagcccgctcacactattgatcacaagcgcttgaggtaaagaaaatgtgcctgtggacaggccgcaaagtgaaaggatcattgtcccatacatagtgatgccaaacggtgctcgctcaaccatgatgagatatgactgccagtcagaccaaaaccatctctgcttggtggaaaaaacggtagtggatattaaactcatgccatgaatatctattaacactgttaaccatgaactgtataacttgggaaattttgggaggaccagcttacaagg

SEQ ID NO: 59088 - DNA, 261 bp, Glycine max
  Clone ID: PAT_MRT3847_24368C.1
agggagggaagaaaaggcattaaaaaattaaagggggggtacaacttataatcataaaaacccccttttttttctcccccccccggcagtaattccatgggggggggggttatacacacaacccctttaaaagtggggcctttccctcctgaggggggttaaaacctccccgggggaagttcgtttattctcttaaaaagggcctaaaaaaattttttttaagaaacaaaaacccccccctttaaaggccaaaataaaggg

SEQ ID NO: 59089 - DNA, 265 bp, Glycine max
  Clone ID: PAT_MRT3847_24369C.1
ggggagacgtggggtagagtgaccatgacgaaattagcgcagtggctttggggactagcgatcctgggctccacctgggtggccctgaccacgggagccttgggcctggagctgcccttgtcctgccaggaagtcctgtggccactgcccgcctacttgctggtgtccgccggctgctatgccctgggcactgtgggctatcgtgtggccacttttcatgactgcgaggacgccgcacgcgagctgcagagccagatacaggagg

SEQ ID NO: 59090 - DNA, 494 bp, Glycine max
  Clone ID: PAT_MRT3847_2436C.1
ctcttcattctgccagtttaccggaatacaaagggcacaaaaccatttaggccccccttatgtgcctagaccattcttacgtggaagagggaataatattcccccccataacaggaaattaaaacacatgcggacaaacacaccttccttttttacataggccttaaataaaaatactcctggtaaggcctcccacagtggaaacctactcactacaaagattgggctcagtttattgcattttttctggaccaaaacgggcacccctggtttcttacttgttcttacgcctaaactcatgttccaaaccttgaaactccaatccaaacctaaaaaaggcctctatttgggcaggattaaacaatccttggtctccaccaaatatctccccaagggccagctccaaacacgcctacctcggccgggttcctgtaattgtgaagaaaatgaagggcaccttcttgccttaaaggctttttaaaatctccttcaca

SEQ ID NO: 59091 - DNA, 1917 bp, Glycine max
  Clone ID: PAT_MRT3847_24370C.1
cggctcgagcggctcgagtaacattttaaagtagataagccttccccgcccactagaaatagagagaaggtaaggagggtttggttttgggtactttacaaattacaataattagcgaaagagagaagacatagcacatagagtcatagagacatcatcatcgtatgggaatggaagaggagagtagcaacaacagcagcatcatagaaggtggtgcttcgctgccatcaacgggttcagacgccaagaagcgaagagtgacgtacttctacgagcccacgatcggcgattactactacggtcaggggcacccaatgaagccgcaccgaatccgcatggcccacaacctcatcgttcactacgccctccaccgccgcatgcaggtcaaccgccccttccccgcggcggaggccgacatcggccgcttccacgccgacgactacgtcgacttcctctccaccgtctcgccgcaaatcctctccgagaattcccactcccactaccgtcagctcaagcgcttcaacgtcggcgaggactgccccgtcttcgacggcctcttcgacttctgccgcgcctccgccggcggctccatcggcgccgccgtccgcctcaaccgcgaagacgccgacgtcgccatcaattgggccggcggcctgcaccacgccaagaaggccgaggcctccgggttttgctatgttaacgacattgttctcggcattctagaacttctcaaagttcataggcgtgtgctgtatattgatattgatgttcaccatggagatggcgttgaggaggcattttacactactgatagggtgatgacagtgtcatttcataagtttggggattttttcccaggaactgggcacattaaagacattggggtgggtgctggaaagaattattctctaaacgtcccactcaatgatggattggatgatgagacttttccgtggtctgtttcgccccatcattcaaaaagtcatggatgtttatcaaccggatgcagttgttcttcaatgtggagctgactcgttgtctggtgatcggttgggttgcttcaacttgactgtgaagggccatgcagattgccttcgtttccttagatcattcaatgtccctctaatggtcttgggtgggggaggatatacggttcgcaatgttgctcgttgttggtgttatgagactgcagtggcagtaggagtggagcctagtcctaagttgccttacaatgaatattatgaatattttggcccggactataatcttcatgttgagccatccacaatggaaaacctaaacacacccagggatctggaaaaaattcggaatacattactggaacaactttccaggcttccccatgcacccagtgcaccttttcaaacaacaccatcggtcatcgaagttccagaagaggaagaggaggacatggatgtaaggccaaaacgtcgtatatggagtggtgaagattttgattcggatcatgatgatgacatggctagttcaaagaactctgatttaactgcacaaacgagcaggtctgttgcagatgacatggacgaagataaagattaaagcaggagtgcatccctcatcttaataatgatagaacagagcaagtaccagatttagcattttacaaattagtgggaagcttattgctgtttgatctattgcatattttctctagactttttatggataaagtagggagcagtgttgcctttggcttgttgggggatggtgccctagtaatggcgggtttctactttttagaacacaccaccccccgaaaataacattgccttgcatgtttgctttggcggaccggattttaaatttcaatagaaaaatatacacaattaccattttacccttttggttattttaaaaaataaattaatttctattctt

SEQ ID NO: 59092 - DNA, 426 bp, Glycine max
  Clone ID: PAT_MRT3847_24371C.1
attttgggcgcgagcccgggcggagcggacaacggagcagaggcgtggggtagtagcaaacattcaaatgagaactcccaaggccgaagaggggaaaggggccatgtgaacggcactagcacatgggagagaccaacctaagggacgggggaagcccgccagaaagcgctctgagcggcgactccgaaagggaaacgcgagaaaattcctgaaccgggacgcggcggctgacggcaacgtgagggagcccggagacagcggcgggggccccggaaagagagatctgttctggggaacagcctgcccaccctggaaacgggtcagccggagggaggggccaccggcgggaaaaagcacccgaagaagagcaagacaacactgaaaatgctgaggacaggaaagaaaatgagggcagcacagaaacag

SEQ ID NO: 59093 - DNA, 492 bp, Glycine max
  Clone ID: PAT_MRT3847_24372C.1
ggctcgagcccattagctgctactggatgttaaatgtcagatcggcatgcggcgcgcggtcgggtttgccgtatctacaaaaacgatggagaaacaggtggtgccgatactaccagtgttcctggcgctactcccctggcagatcatgattatacctggtctccggaaggactcgcccacgaagactgaccacatggtatgcgaaaagtgaatcgtggccactcttttggtgctggcactcacgcgcacctacgcgtatgaccaaacactacctggagaaggacaagctggctcacacgtactgaactccatgcggagctgatcggataacctcctacatggtggccttggtctcgttgacccacccaataatgagactctgatgaaactagctttaccgaatggtgcttgaatgtcatgagtccgagcgttagacacgatgacagtggagattgatggtctgctcatgcagccatattactttatagctat

SEQ ID NO: 59094 - DNA, 375 bp, Glycine max
  Clone ID: PAT_MRT3847_24373C.1
tccaaacattctgatgaacatgaacgagcttgtactgttcattgatgcaattttggtaggatgtccatgccatgcgtgcgagatgaaacctttccgaatgaacactggctatcgtgcccgtactccggaggttaaatgcgcatgttggaggctggatgtggaagcacacaacatattgggctttgacaccattcctgtagagtgcgttgatgcaacaaaagaatacatccatggcgaacaatatatatcagactacaaaacagctaaccaacaagcttacttttatgccagagacctggaagtccataccaaggacacattagcgttcagtgtacatggcaccgtactgtctaatattccatactacaaacaaca

SEQ ID NO: 59095 - DNA, 936 bp, Glycine max
  Clone ID: PAT_MRT3847_24374C.1
gccataaagaagtttaatgttgcgaagaatgcccttgcacaagttgcatggaactgggttaatgatgggctgaggacatcgctctgcctgcaatttaagccacatcatattgcggcaggtgccattttccttgctgccaagttcttgaaagtgaagcttccatcagatggtgagaaggtttggtggcaagaatttgatgtcaccccacgtcaattagaggaggttagcaatcaaatgttggaactctatgagcagaatagacttccaccagcacagggaagtgaagtagaaggaagtgctggaggaacaagagctgcttcaaaggctccttctgcaaatgaggagcaggcctcaaagcaaatatcatctcaagccccccagcactcatctgtagagagaactgcggtaccacaaagaggaactgagaaccaaagcaacgatgggagtgcagaaatggggagtgacatcactgatcacaacttggatattagggagtcacagaattcagaacagttgactcagcaagataacaagagagaagtgtcaaatagatctaaatctggtactgaacgagaccaagacagaatggttgggactaaggagggtgcagaagtaggaaggagagatgaatctgcattaaacaattctggcagcaatgttggccgaaatctggagcgtcgggaagttccactaggtcattcacccaatgaagcaatcaagattgacaaggataagttaaaggcactggcagctatgggaaagaagagaaaggaacaacgaggggaaatggcattaaagaaagatgtaatggatgaggatgatctcattgagagggagctggaagatggaattgaattagcagtcgaggacgagaaaaataagcgtgagagaaggcagaactggtctagcctgatggtgaagatcaccatggggggg

SEQ ID NO: 59096 - DNA, 399 bp, Glycine max
  unsure (1)..(399): unsure at all n locations
  Clone ID: PAT_MRT3847_24375C.1
ggcggagagaattaaagatgggcctttccttcttcccttttttggaccaaataccccatttttagacttttcaccctcaaaatcatctttaaattttttattgggatttattgttcctcctcaaacaaaaatctttgacccaagagtagtatctccttgaaatgacttttcaaactcagcattcaggcgagcaggctcattttctgctctttttttctttgcttcctcctctttttttttcttctggaacggggtctttttccgcgtgatagaaaaacaaactcatccttgcattaacaaacaaaaaattggtgttgggcttggatttttgttcacaccttccttccttttttccttccccggagtcgggggtaaaaactgaatgatgcccagnaacac

SEQ ID NO: 59097 - DNA, 423 bp, Glycine max
  Clone ID: PAT_MRT3847_24376C.1
agcgaatactctttattcattataacgcaaatctttgtcaagaccctcaccggcaagacgatcaccctcgaagtcgaggcgagcgacaccatctagaatgtgaaggcgaagacccaggacaaggagggtatcccaccggaccaacagcgtctcatcttcgctggaaagcagctggaggatggccgaacccttgcggactacaacattcagaaggagttatactctccatcttgtcctgagttttcgtggaggaatgcacatcttctgtgaagactctcaccgttaagacgatcaccctcaaagttgaggcgagcgacaccattgagaatgtgaatgccaagatccaggacaaggagggcatactaccggaccaacagtgtcttatctttcctggaaagcagtttgaggacagtcgaaccctct

SEQ ID NO: 59098 - DNA, 376 bp, Glycine max
  Clone ID: PAT_MRT3847_24377C.1
tttccgcggtttcgtgggcggacgcgtgggtgcatctgaagattgtgtgagttaattagttaaagcaatgaggaaggggaacatgaagaagcataacaagttggtgtggatcataacgacgccgttgagaatgttgtggaaagcgagggacatgtacgtgagaagcataacgaattgcggtcacaagatgaactatagcaaccccgtggatgctgctggcagactccaggccttgcccaggagctacagtgctgccacgtcacgctccgacaacaacgaggatttcgccgagcttttgcgagcggctttcgccaggactctgggcaacagaatcgatgtggatatggttctcaaacagcaagcccaagcccgggcc

SEQ ID NO: 59099 - DNA, 665 bp, Glycine max
  unsure (1)..(665): unsure at all n locations
  Clone ID: PAT_MRT3847_24378C.1
agatcctcaatcctcatccaaccttcccatatcaantaggactgtccaaactctttcagaagtggaagctttcgctctaaaagccgatgacttgaagttcgttgcatctcaattccggcgccttcatagcaagcagcttcgccacactttcaggttttatccgcaccaatggcgtacatgggctgcatgtttcatacaagcagcgtggaggcgctatggtaaaaagaagctggaagagtctcttagggaagaggagaacaggctgcaagatgcattgtccaaagcaggtggtagttccccaagtctaggtgccccaatatatgcttcaaggtttgcagctaatgcccttagacttttacgtagaaatggcccaaggaaggccagggtgccagagagaatatcccccatgttgctgcagaagcctgctgagcctgattttacatctgaagaacaatagttgtggaaaaaattggtggttctgtaataagaaaagaagggatgagagtgaaggaaaattcccatcaaatgaccttttttgatagagggccaaaatggcatttcgtttatttattttattttttaagttagtgtaaagatgtctgtaaaatataaactatgaagttgtatatataaatatatgattgttgctgaagtatttcattcgt

SEQ ID NO: 59100 - DNA, 150 bp, Glycine max
  Clone ID: PAT_MRT3847_24379C.1
gccctgggtttttttttttttttttattttgtacttttgttaggccttctttctccgacagcttgaattgcgggccgccttcttcgttatgagcccgcgccccgccttattatcagccttgcctcttgcgtgcttttgcccttattgccc

SEQ ID NO: 59101 - DNA, 1154 bp, Glycine max
  Clone ID: PAT_MRT3847_2437C.1
tctttgttaaaatggtaaaggattggtgcctcgtaccagacatcaagcactatggttgtgtgatagatatgctggggagggctgggaggttagaagaagctgaaaagattgctttacaggtacctcatgaggttgccaatgctgtgatgtggaggacactgctgggtgcttgtaatgttcataacaatgttgaaattggtcatgagggtgaccaataaaatactggagatggagagaggacacggtggagattatgttcttatgtccaatattctggttggtgttgggagatttaaggacgcagagaagttaagggagatgatagataagagaattgcctttaaacttcctggctacagttttgtctagatgatatatatgtgcacgcctgaaaacagatagttcaagtgcatgttcatggcacccatgagagacattggctctgataatggagctccacaaaagaagattgtgtagtccctcaaaaggaaggattgcatcaaacactttgccagcgtcagagagaaagtcaaagtgggtgtaaacggctatgagcttggtggccaagaagagcaaactatgcgcagtggtgaaaaccaactgagagtgaagttagagagcttgttggagagtgaggcaatattgaaaaaaagtgttgaaggagtcattaagttcatcattatgggtgactaagaatggttgcatgtggatgtgggtggttgaacgagagatgataaaaatgggttggaatcgttaaaagagtttgcagaagcgctcaagggctggattgagcattaatgaagcttttatttctctcagtcgtagtgccagagatcaaatactttcaaggccaggtttcatgggaatcggaagatgtaggtgcatattggggtgctttctggcccaactgcagggcttaataaatatccttaagaaggtccaatccaaacttgctggtgtcatgaaatagctgaagcagaatggaaaggatgagatttttttttaaaacttttggaaggcggaaaggatgagattatgtataataaatttagaccaatttggaaatgccccgatagtgtaatactgtcattacttataaatgtatgaacgataaatttgttgagtttaataataattcccttaaaagttatgtt

SEQ ID NO: 59102 - DNA, 1245 bp, Glycine max
  Clone ID: PAT_MRT3847_24380C.1
tgcagacatatttgcagtcaacaaccaccagattggaggaaatgagggtgaaaaggagagatgcagaacagtggatgtcccatcgattactccctgacagcctgagagaaagaatcagacgacatgagcagtacaaatggcaagaaaccagaggtgttgatgaagacagtttgattcgagatcttcccaaggatttaagaagggatattaagcggcatctttgcttggctttgctgatgagggtgccaatgtttgagaacatggacgagcaacttttggatgctatgtgtgaccgactcaagccagtgctgtacacagaagaaagctgcattgcccgggaaggagatcctgttgatgagatgctcttcatcatgcgcggaaagctattgacggtgaccactaatggtggaagaacaggcttctttaactctgaatacctcaaggctggcgacttttgtggagaggaacttctcacatgggcactagatcctcattcctcatcgaaccttcccatataaactaggactgtccaaactcttacagaagtggaagcattcgctctaaaagccgatgacttgaagttcgtcgcatctcagtttcggcgccttcatagcaagcagcttcggcacactttcaggttttattcgcaacaatggcgtacatgggctgcatgtttcatacaagcagcgtggaggcgctatagtaaaaagaagctggaagagtctctcagggaagaggagaataggctgcaagatgcattggccaaagcaggtggtagttcaccaagtctaggagccacaatatatgcttcaaggtttgcagctaatgcacttagacttttacgtagaaatggcacaagaaagacgagggtgcctgagagaatatcacccatgttgctgcagaagcctgctgagcctgattttacttctgaagaacaatagtcatggaaaaaattggtggttatggatgcctggttccgtaagaaaagaaaggatgggagtgaagtaaaaattaacatgaaatgaactttttgatagagggccaaaatggcatttcgtttatttattttattaagttagtgttacatataagatgtctgtaaaaatataaattatgaagttgtatatataaatatatgtttgctgctgaagatttttcattcgtgaatgaaaccgagaaaaaatgaacaatttctttcaaaaaaaaaaaaaaaaaaactcgagactagttctctctctctctctc

SEQ ID NO: 59103 - DNA, 294 bp, Glycine max
  Clone ID: PAT_MRT3847_24381C.1
ggaaagcccccggatgtttattacaaaggtaaaccctgatccttgaaactggtttatcggtaggatttttgggaccgggcccgggccccgggaccgccaaactttttggttttcaagcgacgggggtccgctacaaacaggggccaaacgaactggatgaggatttttttgatctcctttttaaaggcttcaaccccatatttttgggaataaaccaccaaagcttttgaaataaactgccggatagcataaatttgggccaaatgaaccccaccctttacaagggccggggtt

SEQ ID NO: 59104 - DNA, 1203 bp, Glycine max
  Clone ID: PAT_MRT3847_24382C.1
cggaagatctagcctttgatgtcatggcctctctgggtagaatcaccactttctcccaccgtcaggtttcacttttggttatcgtcaggattcaccttttcttatatcagttggtggaaactataaattgtggctggagttggataggaacggagcagaacagaactatagtatctcatctctcttgatagtagaagtggtgctgactttcttgtgatcagtgatgctggtgaaatctctctcacttcattctcatgccttctcaagcgttgttctgttgcagttgcagtttttctgcaagtgaaattggaacaaacccaagttgggttcccttaaagtccttaaatagcctctgctgttcctccaagcctagaaatttatgcagatttttgtgtctgagcactcaaaatggtggcttcagagaaaactctggtgaagttggacttggagatgcagtgataattgtggatcatggctcgcgtcgcaaagagtcaaatctcatgcttaatgaatttgtggagatgtttaagcataaaactgggtatgagattgtggaacctgctcatatggaattagcagaaccatcaataagagatgcttttcaatcttgcgttgaacaaggtgctcatcgcattattgttagtcccttttttctctctcctggaaggcattggactcaggatattccttccttaagtgcagaggcagcaaaggaacatccagatgtgtcatatatatttgtcattttaaactataaacatcttgtgctgcaggatgttgtgaatgatagaatcaaacattgcttaaagcatgtggctggagatgcagatgagtgttcagtttgttctgggactggtaaatgcaggctctattaatttgtgaaactagattgttttggatgctattaaatgaggctggaagtcgaggaatctgtaaattgggttgcaactgttctgaagttgttattacgacgcacttgaactttgcttcatgtttggttcgacgtgacttcttgaggagcttcgtttatgtttcttactccaagttgtatcagtatttaacattaatgttgaggtttcgcttacccatttgcaaatcatcaagaaactacccatctttctctctatttatttgtgatttgtgtcaaaataaataaatgaaatgaaattaagagaaaagaaaaagcgctagggcacacattga

SEQ ID NO: 59105 - DNA, 107 bp, Glycine max
  Clone ID: PAT_MRT3847_24383C.1
gatttcagttccaacaaaacttctccgcatctcatatactgattcagttctatacataaccatcgcgacgtcttatcaaacgaaaaattctcagaatctcttcacct

SEQ ID NO: 59106 - DNA, 339 bp, Glycine max
  Clone ID: PAT_MRT3847_24384C.1
aaaaaaaagagcccccattatccataacaaggggggggcttgtttccaaatcctgaaagggtggaccgaaattcaattctgctttggcaacatggatgggtttggggggggggaaaatgcttttttcttataaatatagggggagggaataccagggtagcctctaggggacccacttattccacttcgttctaacagtgcaaataaaggcctaatatttggtagagctagattaattataacccaaccgttttgaccatacacttggggggatatatgaaaaaaacttacaaaaatgggagcgtagaagaaaggaactttcttacggtcgaaggggga

SEQ ID NO: 59107 - DNA, 295 bp, Glycine max
  Clone ID: PAT_MRT3847_24385C.1
ccaaccccaattttggggggtggggccttcaacaaaaaaaaaaacccttggtttaggagttttttccccacaaaaggggggcccaatttatttgggggcggggtttaaccctcctaagtaaggggtctttttgacaattcccctcatggaaatttcatgccaacggtggacgtttttgaccttttaaatggggggggaaaaaaattttttgatcgaactaaaccttccaaatttttaaaagggaagcctatggcctttttttaaaaaaaaaccaaaaccttccaaaaactggggt

SEQ ID NO: 59108 - DNA, 202 bp, Glycine max
  Clone ID: PAT_MRT3847_24386C.1
ggcgaagttcaatgtggtgcagaagaaaataagagctctaatagcagataataagatacagtttcacttcgaccctttaaccggtaagtttaagatctaggaccaaccccttttcctatccggaaaacgcaaacgcaagctcttcaaaaaatggcgccgggaccaaaaggtcgccttgcatattggtttggtaaccatcgaa

SEQ ID NO: 59109 - DNA, 218 bp, Glycine max
  Clone ID: PAT_MRT3847_24387C.1
cattaacaccttattctaatgtggttttttcaacaccaatcactaacattaccccaaatccatcacacacttaatacataggttcttatctacacaataatctcaaatcctcactcctaattaaaacctatctcacctttcaccttgcactaacaacacctcacttccactttcataatatatactttcattttcttccacatcttcaagcatccctc

SEQ ID NO: 59110 - DNA, 362 bp, Glycine max
  unsure (1)..(362): unsure at all n locations
  Clone ID: PAT_MRT3847_24388C.1
tttttattaaaagaataacatgaggcaaataagccatttaccatgtttccatgtgacacacagagtgggtgtntgtgtttgaatcgcccactatcctacacatgaacagctctctattatctcctctgcgataaggactagggaaccattcacatgcatggttacatgatttgtgctgagatgagcacaccagggagagcaagacgtgacctcgagacacacaaactccacatgacctctataccatactataccagcgcgagaaccaactctctattcatgaacacttgaccggaagggtgtcacacatgcttgatgtcaataaagaagaggaggtatgctctcactatttcttctcctac

SEQ ID NO: 59111 - DNA, 405 bp, Glycine max
  Clone ID: PAT_MRT3847_24389C.1
tcggtcacgcgtgcgaattttgataaaccgtgaacataggttgacgcaccataaaaccggaaacaaaagcaatctgtacttgatttcaagaatctctcaatgtattcctactttcttgtgtaccattgtttaagggaaggagagtcactctctgtgctggcacacagacttcgtgaatcattctcttttccattcttagatcatttgctgaacactctcctattcgatataggacttggcgttagatgtaaacttgttgtgagactttttcagttctatgattaattacaagtgcaagctggtgaaatctagcattagtgctcccactctactatctggtataggactttgtgggtagacgtttatatttctctcctttctgttactctcttcttctaactgatc

SEQ ID NO: 59112 - DNA, 158 bp, Glycine max
  Clone ID: PAT_MRT3847_2438C.1
tctcgagccgattcggctcgagatttacagagcgtacacaagtatattgctcttggagagtgtacatcatatgctagaactatgagtacaaggttatgagtaccgacgctttctgaaaatgctgcaacgacaaaaatgcttgtaccaactaatttagg

SEQ ID NO: 59113 - DNA, 722 bp, Glycine max
  Clone ID: PAT_MRT3847_24390C.1
taacaatagatagtttttggttgtagcctcttcatacctacacaaattacattggatacaaaataaatatagattcaaatcataactcgtcggatgtgaaaactagcctttcacctgtccttgagctaacaatttatcatatagcaagaggtattcttcctagatcccatcatagtgattgttacaatgtatcatgcaactttgggtgttttgacgcacaacaataatgataaaaatgacgagggtgagggtaaccggtaaccaaagtcagcatcccatgaaacaggtaagattaaaaaaggagagaaagtattaatattgattaaaagtaaagaaaatgagttggtggaaggtggcgttggaaatagacaactgagatgaaaatacaaagtttgttgaggggtggtgtggtgggatgaaaaatgagtgggctgaaagagcaccttaaactggcaagagaatacgcggtggaagggctctacgacacctccgtgatcttcttcgacaacgccgttgcacagatcaacaagcaccttaacagcaacagcgtggaggaccctttggtgcgagccaaatggatgaaggtgaagaaagcgctgtgcgaggaaacggaagtggtgaagcagctagatgctgagagaagggcgtttaaggaaacaacacgatcgccatctcaatcctcgtcctttgtttttcaacccttggataactatcccactacc

SEQ ID NO: 59114 - DNA, 422 bp, Glycine max
  Clone ID: PAT_MRT3847_24391C.1
cagctgatcgataccagtcataagtatcatcaatcaatcaatgggcgaagagaatcgttcgaaatatatatacaataacatacacaagcaaactgcttgcttacttttccgattttcagtcgaagaaagatacaaagatccaatgtaacgaatgatcgtccagataagtcacacccagatcgcaggcagtaaacaattcctccaaaagaattgttgatcctccccatccgatcgatcatgcgctgctgccgctgctagtgctgcgcaaagacgcaaaatgaccgccgacgtgagtgttcaagagcagcacaattcaagccgagtatcgggattcactcacttggtcgttgctccggactggccaacagagtggctggctagtggaccatgtgtgtattgctatgactttgcacgatagcggc

SEQ ID NO: 59115 - DNA, 444 bp, Glycine max
  Clone ID: PAT_MRT3847_24392C.1
cccacgcgtccgcccacgcgtccgcccacgcgtccggtgactcgttcttcttcgtggttatcttcttcttttgttgttcgcgtgtttgttttttctctcacctgaaaatgtcttgctgcagcggtaactgtggttgctgaagcgcctgcatgctcggcaacggctgcggaggctgcaagatgtacccagacttgatctacaccgagtcaaccaccaccgagaccttggtcatcttagtgtcaccagctaaggcttaattctcgagtgctgaaatgggtattcccgctgagaacgcttgcttcacatgtggagctaactgctcctgctaccactgctcttgcatgtgaggtgttagagagcttaatcttcaagcacagatggcccatatgaaccattgttacatctatatcttagccaaaacttcaaaattatgtaatatgcatt

SEQ ID NO: 59116 - DNA, 432 bp, Glycine max
  unsure (1)..(432): unsure at all n locations
  Clone ID: PAT_MRT3847_24393C.1
gctcgagactgtctagtgcataaaaaccttagtgtttgctatcattcattctgtagccaatggcttacagtttctgtctggtcatctggaacttgaaaaatcctcaaatgccttcactcttttacctaactccctagtctttttgggaagtagttaagatatgcctgctatctttaactttggaggtagtatcaaaattttacttctttggttgtttagtgaattaatgttgaatattttctactgtcatcaaaacatattcccaaaaagtattaaaaaggaaccttagcacatttattttattaaaacaagaaaacccaaaatatataaaccttttcttattatgataataagcttatatatgtgaataagttataacctagtgtataaaaaaattatttctaacaaactgtgnttaaaaaaaataaattt

SEQ ID NO: 59117 - DNA, 344 bp, Glycine max
  Clone ID: PAT_MRT3847_24394C.1
attggagggggaatataatttaattgatatccagggaaaaggaagtttaatttcaaaaaaaaaaaaaaaatataggggaacaaaaaaaaaggaataatgggggggcttggtttcacttatataggggggaggggtgggattgctggccccccccttttctttttctttgggaaaccaattccccctatttcttttacatgggggggcaatttttccaaagggattaggggggacggtttaaactgttccaaagggggggggggggtccaatgaagcaacaagaaacgggggcctaattgaagttttgggactaacgcggaaaggggccctgggtcttttggaaa

SEQ ID NO: 59118 - DNA, 318 bp, Glycine max
  Clone ID: PAT_MRT3847_24395C.1
ctcgggtggaagaagaccacgcggggggaggccacagaggacggacctgtaccgcactcacttgatgtctctcgaaccatggtatacatggtcttgaacacccatggatcgctctctgaactgtcgatactcttgatgcgcgcggacccaccaaggatgaagagcccgacgcagatccactccatgtaccacaatccattaggagggcatgatcgtgaacacaggtgctgaatactcgagccatcatcgtgcgagggagcacaagcacctgcgccttggacgactttaatgctggacggtgtttctaccgaagatcca

SEQ ID NO: 59119 - DNA, 304 bp, Glycine max
  Clone ID: PAT_MRT3847_24396C.1
agctaaaaagaagggggatcataggtccggaggttatgcgatattgagaggccttagaaagactgtctataggaacatgctatcgcatgagaatttatagcacataaaggaagcacggaggatgacgatgatgaacatagagaagggtgctgacaaattatagggttgcgaataaaaaggcttagactgtatgggactaagaactctactcggtaacatgacattctgacccaccccttggtggtccgcgttgaccttctcagggaaaaaaagaccattaaggggcaaataacgaaccttcctt

SEQ ID NO: 59120 - DNA, 1287 bp, Glycine max
  Clone ID: PAT_MRT3847_24397C.1
cgcacgcatacgtgaggctcgggctcgagactgaagcaagcagaatcctcagataacatgaacataatcaaactgtttaaaacgaaggctgtgaggagaggtttggtggcaggaatggggcttcaaatcttccagcaattcacgggcatcaacactgtcatgtactacagtcccacaattgttcagttagctggttatgcatccaaccagacggcattgctcctctccctcatcacttctgggcttaacgctttcggttcggtcgttagcatctacttcattgacaagactgggagaaagaaacttgctttgcttagtttgtgtggctgtgttgtagccttgacccttttaactttcactttccgccacaccgcaactcattctccaatgattagtgcgcttgagaccgttcatttcaacaacacctgccccagtttcggccacgctgtcaatgctaatcaatgggattgcatgatgtgtctcaaggcagaatgtggctattgtgcatccggtgtctctagcaagagcttaccaggggcatgtttgatttctaatgatgcaacaaagggtatgtgtcaaaaagaacatagagcatggtacacacagggatgtcctagcaaaattgggtggcttgcaatagtgggacttgcactgtacatcatattcttctcaccagggatgggaactgttccatgggttgtcaattctgaaatctatcctctgaggtaccgtggggtatgtggaggaattgcttctacaacttgttgggtttcaaacctcattgtttcccagtccttcttgactttgaccgtggctattgggacagcatggacattcatgttgtttggatttgttgctctcattggcatcttcttcgttctcattttcgtgccagaaaccaagggagttccaatggaagaagttgagcaaatgctggaggaaagagctgtgcacttgaagttttgggagaaggcgagtcctccccagaagggttgattaagtttgaattgaacctgtgtttaaagaataatatttcaccatccgtgatgtgagataattatggcttcttcttaggttaagtagtgaagatgaataagtttagatgttttctagtttttgtttgtagatttttctctttagatttgcttttttattttagttagtgtttggctagtatgtttttatgaaatccgaacggatgaacaaatgaatatattgtttttataaaaaatatatgatgatcataaattatacaatgatgagtgttcagtcaaaaaccgcagttta

SEQ ID NO: 59121 - DNA, 407 bp, Glycine max
  Clone ID: PAT_MRT3847_24398C.1
gtgttactgcgcatccttccgtttctaccaccgactccggggaaggaaagaaggaaggaaggtgtgaacaacaatcccagcccaacacccattctttgtctgctgatgcaaggatgagttcgttctccatcacgcggaaaaagacgccgttccagaagcatagagaagaggaggaagcaaagaagaagagagcagaagatgagactgctcgcctgtatgctgagtttgtagagtcatttcaaggagatactactcctgggtcaaagacttttgttcgaggaggaacaattaatcccaatgataaatttaaagatgattctgagggtgaaaagtctaaagatggggtatctggtccaaagaagggaagtaggtatgtaccatcttttattcctccgccaatggcaacc

SEQ ID NO: 59122 - DNA, 128 bp, Glycine max
  unsure (1)..(128): unsure at all n locations
  Clone ID: PAT_MRT3847_24399C.1
gtgtttcttctttcctgccagtatgactcattactagagatgatataatgctctcatactgtaatgatcaatagcnacagatagaattacgtcaagatgcagccagccttcctaaaagacttacaaac

SEQ ID NO: 59123 - DNA, 863 bp, Glycine max
  unsure (1)..(863): unsure at all n locations
  Clone ID: PAT_MRT3847_2439C.1
tctctcatcactttgcttcaaagtgtttttctttttcctatttgcagtgagtgacattgattcagatgagcagctcatagagatagagtacactcacacttggaattgagggtttggattggaccctttggtccttcctctctcttttttcttttctctttctacaatctaatggtaacccatgaatcttgatcctctacatgtaatctcaaaataacttccctaaaccctaatttgatctccgtcgccatggccaacggatcccctccttcagttcccggccaacgatcctcgccggaacccaatcctccgaaccatgtctccgattcgaaggaggaaaccgccgccgctcctcctccgcccaccaccaggagcacccgcccctcccgcgcgtgcaccatgcgcgccgcctctcgcctccattcctcgccggcgccggtaaagaaggaggcgcctgcgaagaaggaggattcgccgccaccgccgccgtcgcaatacagcaagattgtgactccgctggtggagccaccgtcgccttcgcagttgccgcggtggaacctgcggtcgatgtgggaagttcgcttccggccgaatttcatgcatctggttangcctcttttgaatatctcggtggaattctctgcagaagagttcgagacagcttcttcttaccccaacgagactttggttcatatacatatgcctttgctnaaggcaatcccttctattcacgaatggnacttacacgcgatacttggataaccgnattatgcaggaaattgagagatggnggcattgggttgcccatgggactttcaatggtggttacatgggggggaaaatgagaattaaatacttganca

SEQ ID NO: 59124 - DNA, 186 bp, Glycine max
  unsure (1)..(186): unsure at all n locations
  Clone ID: PAT_MRT3847_243C.1
gtcgcangcacgcgtacgtaagctcgggaattnagngaccggnnacntgncaggngtacacagctttngccatagtnagtcgnattagangcttcngngnaannatggncatcanctcgnatcctgnggtgaaattnggtatccgctcnacaattccncacnccatacgaacgnnanngnggatnn

SEQ ID NO: 59125 - DNA, 491 bp, Glycine max
  Clone ID: PAT_MRT3847_24400C.1
tgcagtgttactgcgcatccttccgtttctaccaccgactccggggaaggaaagaaggaaggaaggtgtgaacaacaatcccagcccaacacccatgagaaacgagttgttcgtcgttggattcatgttttagctgctcctcactctctcactcgctttttggtctttgtctgctgatgcaaggatgagttcgttctccatcacgcggaaaaagacgccgttccagaagcatagagaagaggaggaagcaaagaagaagagagcagaagatgagactgctcgcctgtatgctgagtttgtagagtcatttcaaggagatactactcctgggtcaaagacttttgttcgaggaggaacaattaatcccaatgataaatttaaagatgattctgagggtgaaaagtctaaagatggggtatctggtccaaagaagggaagtagaaagaggaggaaaagctaaaaaaaaaaaaaaagggcgcgccggatcgcga

SEQ ID NO: 59126 - DNA, 497 bp, Glycine max
  Clone ID: PAT_MRT3847_24401C.1
gttaaagcatagcatcgtctctgcaagaacaagaagagaggagaggagaaagttgaagacttttctcctttactattgttacaacaatctccttctctctcttcttggagtaattctttgaagaacaagaaaaccactctctcgttgtgggggagtaagagggactctgaagagacatgtttgggtgcaagagtttatgctgggattctgtccctgaattcactgaccctgatccacttcccttttctctgccttcaccccttcctcaatggccacaaggtggtagttttgcatgtggaagaatatgccttggagaaatagaagttataaaagtaaacaagtttgagaaggtttggagatgcacaagtttgaatgggaaatcgcttggtttcacattttatagacctttggaaatccagaaggctttttctgccttgggcactattgccagtccaatgacccacccttgagaggatattgttcttggggcccgggac

SEQ ID NO: 59127 - DNA, 180 bp, Glycine max
  Clone ID: PAT_MRT3847_24402C.1
ggcagttggcttggcccccaggagtctaatcactggagctgctgctgttgtcgagcattttgcagcgacgcattctgatcggaactgttgacatggacaatttgatggctctaaatgcattgtatggatgcttgtgcgtatgcgcacattgatgacactaaacgcaatgcatggatgctt

SEQ ID NO: 59128 - DNA, 576 bp, Glycine max
  Clone ID: PAT_MRT3847_24403C.1
atgaataaactaaaacccatccttccctaaaacaaatagcaacttgtttatccttaatctcccaatcaactcctccctcataagtcataacaccaaaatttgatcacctttttgcaacctatcttgctgtgctgtggtagcttctttgatgtagtcaatcatcttgtgctcaatcttgattggttgcaagtgaatccctgaactgaattacaatggctgaggaagatgtttacacaaaagatggaacagtagattaccgtggaaatcgtgctaacaaaaaggaaactggaacttggagagcctgcccctttattttaggaaatgaatgttgtgagagattggcatactatgggatgagcacaaatcttgtgacttatttcaatactaaactaaatcagtctggtcctactgcttccaagaataatgcaaattggggtggaacatgctacatcactccgttgattggagcatttgtggctgatgcctatcttggaagatatcttaccatcctttgtttttccatagtttatgttattggaatgacactcttgacactgtctgcttcagttccaggca

SEQ ID NO: 59129 - DNA, 500 bp, Glycine max
  Clone ID: PAT_MRT3847_24404C.1
aattcggctcgagacggctgcgagaagacgacagaagggggcatccttacttcagtgcatagtccttcaggtactgaggcttgttcatttccctttttgacctctgcatgctctatttttgctgcctcttctacatctttcgattttgtattttgttttgttgctgcataatgttccttgttctactccccttccataacaattgcaaacgtgattttcacataagaaccaaagttactggttgtagtgtgtgtttagattacagttgaaaaagtaaaatttgattaaacttaaatttagttaaaaataagtttaatataacttgatttatatttaattttttttacgtttatctgaaaagtcactttaaaaataattttcaatttaagtaaaagttacattcaatttaactgattttatttttccaaacaagcaagtgtaactttccacgaagaataaacctgactttggttctcaaacatcaaatcaaacacacccct

SEQ ID NO: 59130 - DNA, 690 bp, Glycine max
  unsure (1)..(690): unsure at all n locations
  Clone ID: PAT_MRT3847_24405C.1
tttataaatattgggtatgagatagtatataaataatccaagattttacgcatgacatatcatggggtcttaaatgttttgtatatatcattctcaagtaagttctaaataggtttctaagtacttgcaaaggggactatgttggttattcctattttatgctggttattcctatttgtttgttcatagttcatacacatgccatatgncctatgattcaagtttcaacgtaggtgccctaacatgttcatttgttccccaacatggataaagtttctattttgttaggtttacttccgtccttttccttaattcttgaatcagataaataccatgcttgggttaatgctgaattcttattggaaaaatgctttgtgggtaccttagatgaaggtcagtgaagatttcattctaataatgcataaacacatgaagatacccttggctccaatccgttatacctcttcatgggccctctctatttactgaccagaggccatcaagcaaggaggaataaattctgtaggtatacacgtttctgtttaaagatctcaatgggagtttgttctacaattatggatgattacagttatcttgtaaactagaaatttggattaacaatgtaacaattcatgagtgattgttgactctgttaacttatatgaaatcagagctcaagggtaagatggt

SEQ ID NO: 59131 - DNA, 445 bp, Glycine max
  Clone ID: PAT_MRT3847_24406C.1
atggtggggaaaacaaatgcatactatgtggaatccactggagcatctttcactttagattgtagtgttagtctcatccaccgatactgtggaacactccctcgagataagtactcctgtgtaaagcccaattttgagtttctgtctgtggaagggggttatcagtgtaaattaatattaccatctaattcagctttccaaacaataattggtccttctggaaaagatatgcgtttggcaaagcatcttgcatgtttcgaagcttgtaagaagctgcatcaaatgggtgccttaaatgaacatttggttccattaattgaagattcttcagaagatgaccatattgtgaaaaataaagaatcaagttctggtgcagggaccacataaagaaaggagttacatggaaaagctaacattcatgcattaaggtgtgcatggggagaca

SEQ ID NO: 59132 - DNA, 206 bp, Glycine max
  Clone ID: PAT_MRT3847_24407C.1
gttatcaagttgattcacttgccacacttcatcgctggacgacagactgatcaggcattttatggcagaaataaccgtgttctttaatttgcattcatatgcagatgtgtagcagctgctcaagatcatgtgtaagctcctcaatccagctgacatcaaatgtctgtatttaggagcaattgctcactataccgcctattactagg

SEQ ID NO: 59133 - DNA, 1011 bp, Glycine max
  Clone ID: PAT_MRT3847_24408C.1
cccgcgattgggggtttttgacgcacagtggttggaattcaacgttggaaagtgtgtgtggaggtgttccaatgatatgttggcctttctttgcggagcaacaaaccaattgtcgattctgttgtaaggaatgggggattggattggagattgaagatgttaagagggataaaatagagagccttgtgagggagttgatggatggtgaaaagggtaaggagatgaagaagaaaggtttgcaatggaaggaattggcaaaaagtgctgcttctggcccaaatggatcttcgtttcttaatttggagaatttggttcttctgtgcagaaatgctaaaaattagtatatctgagcaatgagtgagagaggatacaactttggcagtttaagaaataattgacagaaagcaagaaaactcatctgctcatgctgctcaagtgatttgttctgcaacatcttttacgccttggtctagtagaatcccaattggtgaaggattttatcaatttctttagttatatgcttctcactatgacatttgcacattatttggttgattaatcttcacaaaaactctactttctcgtgaaattaaaaaaaaaaaatgctggttttccagaggtatgttggcctttctttgcagagcaacaaaccaattgttggttttgttgtaaggagtgggggattgggttgaagattgaagatgttgagagggacaaaataaagagccttgtgagggagttgatggatggtgaaaagggtaaggagatgaaagaaaaagctttgcaatggaaggaattggcaaaaagtgctgcttttggccctgttggatcttcatttgctaatttggataacatggttcgtgatgttcttctgggcaaaaatgttaaatattcgtattagaagaactcaaatattttaacttactccattgttgtgtgaagacttttttttttaataaccttttcttcatgggaaatgaaatgtaccaagtaccaacttatcatttgttt

SEQ ID NO: 59134 - DNA, 707 bp, Glycine max
  unsure (1)..(707): unsure at all n locations
  Clone ID: PAT_MRT3847_2440C.1
cccgcgtccgaccaaccaagctgtgttatttctatttggcctggctatatctctatggcactagtcgaagacctggctcgagcttttttctccctctaaatacaaattttgagattcatattcatcagtctgtgtacaaaatggcagggtaggaagactgctatggtctatgtgcttctttttggtttctaattgcacagcttcaaattcagcgtgaagcaagtaacaggaaaatcatgtcattagttaggtctgctgatctagctccaacatcatatgaaaatgctaagctcttctcactgaagggaactgatgttcgaccggggctgtcctcacaaatttttggtcctgataagcataggagcacgtacatgacggatacttaccccagcgagagttatgagaagtacttccatgactcacaaacagaagaaataatagaaccatctagttccagcatctatggaagttcaattcaccctgatgtagcctcttcttaccagatcagagccatttcaggagcttctatggttgccaacaacccatttgattcttctttcatgtctacaaggcatcgtgatgcttatcagtcaacctctggatcagatttgatggagaatggaagcctggattcacgcacgatgatggtctaatgagattaaaactacaagcattgganagggcattgcttgatgatagtgatgctg

SEQ ID NO: 59135 - DNA, 486 bp, Glycine max
  Clone ID: PAT_MRT3847_24410C.1
aaatcaatcatttttgaagcccaaataaaacgagtggcaattctcttgaaagctacagtttgatagcaatgaagggtccctggaaaggtcttattttggattgctcaatctgaaatgttcgatcctttctagccattttggatctccaaattgtttattgtccttccagcgcgagaatccggaagtagtcctgatgtttgttgtcgttgtggattcaccatctgcatatatgggattagaaaaaggctgataacaaagagaaaatgttaaaaactaacatccctccctatgcatacaatgcacatttgcgaatgtgtcaaattcaacttaaacgcaagaaccatggacatcgagtattgtacagtggcatgccattgcccttagttttcttattctatcacctttatttgttgtttaccttcccaactctgactaggcattttcttgattgaaacacaaatgagatcatatctttttttttattta

SEQ ID NO: 59136 - DNA, 184 bp, Glycine max
  Clone ID: PAT_MRT3847_24411C.1
aattcggctcgaggccaattaagtagcttgaaattgggtgcaagagaactataagatagtatactaggagtgaatttataaatttctttgatttaaattactacaattttaaagtcattttgctttgaagttgtactgcactgatatatttatgaacttatggctgcattccattgtttctgca

SEQ ID NO: 59137 - DNA, 654 bp, Glycine max
  Clone ID: PAT_MRT3847_24412C.1
catccataatttctgttatttgcatctacatattaccaagtaataacgaaattcaccaaaaaatagttataattctgtagtacattcttcagcaacgaatagatcatttgttaaagtaatctctaatttttcctgcatccttttttatttcacttgcaatagtgataacttatctgacgtatccccttttatgaaggttcatgcattgtatggatttggcatatgcagcggcagacttaattgtttctagagcaggcgcaatgacttgctatgaaatatcggcaactgggaaaccatctatcctggtaattaaatattgtgtttactcgttcgtttcattccttctgattttcattcaagctttgaattattaaaaaaaatactattagtcaatatattcaaaactgaatgtaataattcagcaaaaagtagaagaaattggaaccaaagtagaaaatttgggtaaagaatgacaagattggatgaaaattttgagttgtttttagaaatgaggaaaactatatgatgggtaagcatgcgaatgaggcagatggaagttcgaatcatcatgaagaagggactattgcagatggatctactccaaactatcatcattctatggacgagtatcgatagaattagctgctataatgc

SEQ ID NO: 59138 - DNA, 1159 bp, Glycine max
  Clone ID: PAT_MRT3847_24413C.1
agcccacgcgtccgcccacgcgtccgcccacgcgtccacctcgtcttccaaaatatccacgtttcttttcccacacactatcttaaatcttaaaaacattttttttttcaaagcaattagaatttagaccacaaaaggaacaccgaagagatgtacggacagagtagtagtagcagtagttcttacgaatcggatttggcgctgttggattcgattcggcaccacttgctgggcgagtccgaatccatattcggcgccccgaatttcgggtcgggtcggagctccagtttcagcagcttggactcgtgtttgagcgacaattggggcgagcttccgtttaaggaggacgatacagaagacatggtgttgtacggcgttctccgtgacgccgttaacgtcgggtgggtcccatctctcgatgccgggtcgcccgagagcgtgtcgtcgggttttccggcggtgaagctggagccggacttgatgccggcgctgatacgtctcgagtgaagtgttcggattgcggcggaggagaagaaggttgttccggcgaaggggaagcactaccgcggcgtgcggcagcggccgtgggggaagttcgcggcggagatccgcgacccggcgaagaacggagcaagggtttggctggggacgtttgagacggcggaggacgcggcgttggcgtacgaccgcgccgcctaccgggtggggacggtgcaagagcaagtggggagtcaagtggcagagtgtacacgtggcgagcagttattggttagctgaggtggattctaaaactggtgttgtgtttattaaatacaataaatacaatacacttttgtaattatgtgatgtgcgtgtgtgtgtaaagcacttagctatattatagccatcatccaactcaattttggaacaaagaaaaaaaggtgaaggatgaggatagatgattttagcacatcaaatggtgagtggtgtgaccccacgggaagaaaaaaaaaaaagagggggagaaaaaaattcaaagaagttatggaatttggaagatgatgaggaatgacggggtgaggaactgaggatatgtaatttggctttgtgaatactaccaaatttgttatttgtttgttcaacattatgaactatgaatgggttaattgttaattgcttg

SEQ ID NO: 59139 - DNA, 273 bp, Glycine max
  unsure (1)..(273): unsure at all n locations
  Clone ID: PAT_MRT3847_24414C.1
gcttagtattcaattctgctatgtattgaactataaatagcctgtgctagtgcactacaataatgagaggcaaactggcaaagtgcatatctactcattaagtagtttagcccttcctaaagagcatatatatctacatgtgatgaaatgggttaaactagctagcaagtagcaagaggcaagaatcttgcacgcatgagatcaggccatgtggacttgatgtagtgtaaattgtctgatttttggcaaaaaaaaaaaanaaaaaaatacaaa

SEQ ID NO: 59140 - DNA, 410 bp, Glycine max
  unsure (1)..(410): unsure at all n locations
  Clone ID: PAT_MRT3847_24415C.1
gcagccctttttctcttcaaccaaggaggcgaccgaccaaccgtgcgctgcgatattcactaacatgaatcgccagatccaaggtgatggccagagacattgatactgcactacttgcggatgtggtactgaaatgccttatgtagacagcacaccacatgataagggtctaaaaacacagccgacattcacaacatcaaacttgaggactatgaaggccagaggtgtgatcccgcatcgcacgcagaagatgcctgaggcgtcctacaggggcagtgcacaggcagaccaacacgagatcctcaacaagagggacaaccctcttggtgtgcaaaaaggaatcnacactgttttgctctggaagcttacacgcccgcgaattcagtgcaagacccaaccgggtggatgga

SEQ ID NO: 59141 - DNA, 227 bp, Glycine max
  Clone ID: PAT_MRT3847_24416C.1
atcctctagagcggccgccctttctttctttttttttatataaaaaagatcccttaattaggagcaacatccttatctaacccaacctttaaaaacattatgaacattctatttttctttcttaaaattaaatactcttcctatacatttaggtttgataaaacacctttgtgatataaaaaatgcagtatttcattgcttagtctctttcctctgatattttttta

SEQ ID NO: 59142 - DNA, 829 bp, Glycine max
  Clone ID: PAT_MRT3847_24417C.1
cccacgcgtccgtacggctgcgagaagacgacagaagggtacggctgcgagaagacgacagaagggtacggctgcgagaagacgacagaagggtacggctgcgagaagacgacagaagggggacaacataaccctcttctcaataataacggttatgtcattcttgttatcagtacctgtaactttgttgatggagggtgtcaaatttacccctgcttacctgcaatctgctggattaaatgttaacgaagtgtacatcagatcacttcttgctgcactatgtttccatgcatatcagcaagtttcttatatgatactgcagaaggtgtcacctgttacccactctgtaggaaattgtgtgaaaagggttgtgatcatcgtgagctctgtcatcttcttccaaacaccagtatcaccaattaacgcactggggactgctatagctcttgctggtgttttcttgtatttcagggtgaagcgacttaagccaaagacaacttaattttcagtcgtaaaatttttgccagttgcatgacacacttgctagttacatttctgaatttttttttatcataggtcagatataggcattaagggttcttgaccctttattttttcttttaaacagttaggtccccgattttattgtacatgtcttagtggcgcctaatggttctgctataagaaatttttatcaacgtttcaattttgataaagtatgacatccagttacttttatcacactgtcatttgttgtttattaggaatgtacctttgttttgatgaaggagaaatatcatagagaaaagaatgattagaattagggcgg

SEQ ID NO: 59143 - DNA, 138 bp, Glycine max
  unsure (1)..(138): unsure at all n locations
  Clone ID: PAT_MRT3847_24418C.1
ttattgattaatatcatcaatagggcttctccaaatgacaggcagaccagggangcaggtngnactttctnagggcngagcatcgngccgtttgtcttgtctccagggntanatntatgaggcagcccacaccncttg

SEQ ID NO: 59144 - DNA, 322 bp, Glycine max
  Clone ID: PAT_MRT3847_24419C.1
atatgttgtccactcacgcctttttcctagcgggggggttcaaaagctacttggggtagaatgacattatcaagtttgttgataagtataatgcagttgtgactgactctgagccagcaaatgatgctgttaccggtgatgaaagtgctccaacagatgcttcggtccaagagcctgaggacattcatgttgctgaagatggtgctgctagccaaactggtgacggtgatgctgacattattgtcatgaaggatatgactcaaccactgaccaatggaaatgtataagttaccgaaaaggcgggggcagtcaaacatgttaa

SEQ ID NO: 59145 - DNA, 636 bp, Glycine max
  Clone ID: PAT_MRT3847_2441C.1
actaaccttttttctccctctaaatacaaaattttgagattcatattcatcagtctgtgtacaaaatggcagggtaggaagactgctatggtctatgtgcttctttttggtttctaattgcacagattttatagcattatactggctaataagtcaaggttttgatacagcttcaaattcagcgtgaagcaagtaacaggaaaatcatgtcattagttaggtctgctgatctagctccaacatcatatgaaaatgctaagctcttctcactgaagggaactgatgttcgaccggggctgtcctcacaaatttttggtcctgataagcataggagcacgtacatgacggatacttaccccagcgagagttatgagaagtacttccatgactcacaaacagaagaaataatagaaccatctagttccagcatctctggaagttcaattcaccctgatgtagcctcttcttaccagatcagagccatttcaggagcttctatggttgccaacaacccatttgattcttctttcatgtctacaaggcatcgtgatgcttatcagtcaaactctggatcagatttgatggagaatgcaagcctgcattcccgcaacgatgatggtctaatgagattaaact

SEQ ID NO: 59146 - DNA, 337 bp, Glycine max
  Clone ID: PAT_MRT3847_24420C.1
aaagtttcttcctttctctgctctttgccttctctgacacatttggcgccttgtaaagcgtgtttgggcaagaaggtggtatggcgaaagacattcaggttgctgagcgaggctccttctctgggaaggactaccaggaccctccaccagcaccactcattgatgctgaggagctcacaaagtggtccttttacaaggctatcattgctgaatttattgccactttgctcttcctatacattactgtgctcacaaccatagggaacaagcaccagactgacctcaaggaaaatggtgaaatctgtggtggggttggcattcttggcattgcatgggc

SEQ ID NO: 59147 - DNA, 429 bp, Glycine max
  Clone ID: PAT_MRT3847_24421C.1
gacaacaacacattaacacaacacagacacagaagcaaggagagagaaagagaaagagaaagagaaagagagacggctctaacttccaacgagtattcatattctacttttcagaccactacgcttacttcttccctttccctcttctacgttacccactctcattctaatcacattttctcccaaattcacctccctctacaacaaaaaaagcttttcattggatcacgtcacccatctttccttttgctctctcctgcctctgaattgagcatttacgggttccattgggctctgatcgaattgggtatgtgcaagatctgcggcttcgtttgttggtggcaaaaagatatgatcttggtggtgggaccaacccaattatcggattggatacgatcggggtagaaacaacgccatcagatggcgctg

SEQ ID NO: 59148 - DNA, 128 bp, Glycine max
  Clone ID: PAT_MRT3847_24422C.1
cagctctcactcttacttcctcctacgcaggtaattgcatcatagaggttatttaagatgaggcagaggcgtgaaactgcttcagcttcatctaaaggatcaagcagtggcgaagcaagcgaagaaga

SEQ ID NO: 59149 - DNA, 1104 bp, Glycine max
  Clone ID: PAT_MRT3847_24423C.1
accgtagtcgcgcgtcagctttctccgaggaatcaccgtcgtcgttggtgagcgagggggatgaagatttattagaaccatatgaaactgagatctctctaaaatgcttgcttttgcttcttctctctaaaactgcatccttggaatcaggcgagacagagttttcttcattctcattggcaaaggtaggtagttagttatttgcaatgatagaaggtggtagcatccggctgaagacatggcagcaggcagctgtggcagtgggttcggcggtgggggcgttgttggaccctcgaagagcggatttgatagcagctcttggtgagacaactggaaagcctgcttttgagagagttctacagaggatgaagagttcccctgaagggagggctgtacttttggagcgccctcgtgttgtttctgcaaaagtaggacatgcttgggatctgccagcaaacacatttggtgctgcctatgcaaggtttatgggatctaggaacttttcgccagatgatcgacctcctgtgcggttcatggacacagatgaactagcctatgtagccatgcgggctcgtgaagtgcatgacttctggcataccctttttgaccttcctactaacttgattggggagacagcactgaaggttattgaatttgagcagatgggccttcctatgtgtctgctgtccgttatagggggcacggctagattcagtgaaaagcagagaaaattgttttatcatcactacttcccctgggccattcatgctggcatgcaatccactgatcttatgtgtgtatattatgagcggcattttgatgaagacttggaagatgttcgccgaaaactgcaaattgttcctgctcccactgttcattagccgtatgtattcagaccagataaattgtactcctatttagttttctggataatagcagtgtgctagagttttgcaatcaaaatcatggaataaaatccagtgtacaagctttgcctctaatatttagtcaatgagcattgtataggttggatttgatcatatgatcagcaaaataaacttatcatcacattctattttttcaaacaaaaaaaaaactcctcgt

SEQ ID NO: 59150 - DNA, 216 bp, Glycine max
  Clone ID: PAT_MRT3847_24424C.1
cacggacttgcgtactcaacttaggggtgctgctggggccattgcttctgatgaaaagatcgtcttgctgggtgccatgcaggctttttttgaccgttcaacgtacacctatgtgtttctatggactcctgcattgagcctaaatgatgaatagattctggatgagactcatattgtaacatttatgttggcttcaaagatgagaagctcgcttga

SEQ ID NO: 59151 - DNA, 1463 bp, Glycine max
  Clone ID: PAT_MRT3847_24425C.1
cacgcgtccgcgcttcaacaccaacaccacctagaaagcacaaaaagctggtcccaaaatataataagaactccaccagcccagcaccaccgccaaaagcacaattttcaaaacccacgcgccgccgtgacgcgcggcctgtatgagtcatcgccgccatgggcggagtcacctcctcgatcgccgccaagttcgccttcttcccgccgcacccgccgtcctacacggtggtcgccgccgaggttggcggcgtctcggaccctccgccggcgccgccgcgactcgaaattcctgaggtgccgagcaaggacaacgtggacgttctcaagcttcgcacgcgccgaggcaacgaaatcgtggcggtgtacgttaagtaccatagacccacctgcaccatgctctattcccacgggaatgccgcggatttgggccaaatgtttgaacttttcgtcgaattgagtaacaggcttcgcctcaatgttatgggttatgattactctgggtatggacagtcaacaggaaagccaactgaatgtaatacatacgcagatattgatgctgcatataaatgcctaaaagagcaatacgctttaaaagatgaacagttgatattggatggtgaatctgtgttatcttgctcccacacttgatcttgctacacggataagagatttaccccgtattgccttgcaaagtccaattttgtctgggcttagagtactataccctgtaaaacggacatactggtttgatatttataagaatatcgacaaagttggtgcggtcaaatgtcctgttttggttatacatgggactgcagatgaagttgtggatgtgtcccatgggaagcagctctgggagctttgcaaggtaaagtacgaacccttgtgggtaagtggtggtggacattgtaatcttgagctttacccagaattcattaaacatctaaagaaatttgtacagacaattggaaaatctaaagcaactgcgaatggttctaaaaaggatactgtagaatctgagaatcaaggcaaagctagcaaagaatctgaaagtggaacttccggtacttccgaattgagtacagaaatccctgaagtttctagaaacagtttagatagccgtctcgagaagtctaaaaaaccaggcaaaccggaaaaatctcgtatgagcacagaccatgttgataggtttaggagaagaaaggggttagtttggtagtctctcaaactgtccagaataatttatctgctaggattcacttggcaggtaatctaattccacttttcaggtaatgatgccacttctaaatgaatatactgagtgagttttcggtttcctttcctccttaggtccataattcagctgtatgttaaattattgaaagtaatatgcatttgtatggcctgtaaaatcaacagcttgatataaatgcaatcattaagataatttgtttttggttt

SEQ ID NO: 59152 - DNA, 976 bp, Glycine max
  unsure (1)..(976): unsure at all n locations
  Clone ID: PAT_MRT3847_24426C.1
caatcaatttaatatattcatatccttccacctgagttcttagtcctgaatgtccttgtctgtctcagtgtctctcttcacaacctcaccgatctgccatttcacactcataacaactttgtacaatttgactcgatatgttgaagtttctctgcagctaaattgaccaatagtttggtgcacttagatctaaaagctagaaagatgtcttttattggcactcaacaaaagtgcgaggcttgtgacaaaacagtgtaccccgttgatcagctttctgctgatggcactgcttatcacaaagcatgcttcaagtgctctcattgcaaaggaaccttgaagctcagcaactattcctccatggaaggtgttctatactgtaagcctcattatgagcaactcttcaaggagacaggatctttcaagaagaacttccagtcacctgctaagcaagctgtcaaaacaactcctgagctgacaaggtctcctagtaaagctgctagcatgttttctgggacccaagaaaagtgtgctacatgtggcaaaactgcttatcctttggagaaggtaacagtggaaggtcaggcctatcacaaatcttgtttcaaatgttcacatggcagctgtcccataactccatccaactatgcagccctggagggcgttttgtattgcaagcaccatttttcccagctttttaaggagaaagggagctataatcatcttattaaatctgcatcaatcaaacgggaagcaaactctgttccacaagcttgagtcatggtgttgtcttttgttgttattatcatctttggaataagtgtttgtgtttttttcattttgattctacttaccatgacaagtttccttcttgttcactttatatgtgggtgtcgctagtgtgcaatttacagtgtgtgatgtatttgaccaatgcacattcagtaataatagtgtgatttgcaagatgtcgcgtnta

SEQ ID NO: 59153 - DNA, 211 bp, Glycine max
  Clone ID: PAT_MRT3847_24427C.1
gaagaacagcaggtggctttgcattttggtggttgttcttctattgttacattggcctctcacttatttttactaaagctgcagcagatgatgaattgtcaactcttctctcaatcaaatccactctcattgacccaatgaagcatctgaaggattggcaactaccaagcaatgtgacacagccaggtcacctcattgtaactggactgga

SEQ ID NO: 59154 - DNA, 305 bp, Glycine max
  Clone ID: PAT_MRT3847_24428C.1
acatgagggatgccctcgtaagctgattggtcgagctgggcctaaagtttaaatttggggtattatgaaaagggcagcttattgtagtgaataacatactcatggaatggactgttgccataatactggtaggcaagattttggtggatatgctagttgatggttgtaccaacaagtatgacagaggcaaagataaagctttggggggatgaaaatgagcggaagccactctgtggctgtgtcaagatgcattgtagaagagttggaagtgatgggatcctttgattcgtcaagtattgcataca

SEQ ID NO: 59155 - DNA, 317 bp, Glycine max
  Clone ID: PAT_MRT3847_24429C.1
gctatggataacgtggtgaggactcatccaaagttggactggttctgtagtgaaagcaccgctgacactataatgaagcatggttcaaattcgttcatggcaaatattgaggattcacgagcaatcatggaatccaaggacggcaatgactgcatggtggcaatcaacttgaccattgattggaagcatgatctgccaagggcagcaaatcgaatgacacagtgcatgggtagggcattcgcattacaagatgagccataagttcataaggtatggctgacttttgatgatgcaccatgactagcaatggctagagc

SEQ ID NO: 59156 - DNA, 760 bp, Glycine max
  unsure (1)..(760): unsure at all n locations
  Clone ID: PAT_MRT3847_2442C.1
gagaacagaggagcagaacgaaatattccaccacctggagtttctagcaactcggttcttgtttcagtttacacagttgtactccattttctatctgagggatttgccttgggtgacatctgtggctggttgaagagctgcaaagcagatgttggtttccttcatagaggtggtgaacaaacttttcctgtacatttatttctgaaaaatgatccccatagagctgatatttccaggcttgggggatcctatagccatttatcaaagctacacccaacaattgatcatgaaatggaagtgattcaatgggatgaaggttgcatggatagtgaagaaaccagggtcacccattcaaccaggcagaagccatgctgttgttctagttatgattctgattttacaaggaacttcaaggttccagctaaatacctggccaaaggttctagtggtcattgtagctctattccggaaagacctgctcatgttgctgctgaatgcagtgatgggagtttgaacgatgagataactgataaaccaagctccagtgatcaatctgaacctgagtatggttaccgccaagtgcaccatatgaagtctgtaccaaaggatactaatatgtctacagatacactacaagaagaagagctacttgatgctntgctatgggttgtatcatggttggtcttgctccgaattttaagcangcatcatactacatgactcatcaggcacagtcaatttcccttttggaggaaactga

SEQ ID NO: 59157 - DNA, 243 bp, Glycine max
  Clone ID: PAT_MRT3847_24430C.1
gttaaagcatatatttatttatggaaatccaattccaaaggtatggtttcaaactttgatggaactattacaaaatcttattcttttaatcaattcattcctttatttgtcaaatatttacacaatctattatataatgcttttctgtgctatcaatgaaaatttataccaactactttttcttaatacccatacaattatttcagtcatatttaatcttaaactattttcttaaccttaaac

SEQ ID NO: 59158 - DNA, 257 bp, Glycine max
  Clone ID: PAT_MRT3847_24431C.1
aaaaaaaaataactataaaaaaaaaataccaaaaaaaaaaaacaaaaggcaccatatcgagtacatggaaaaactttgatgcctacaacaactactgggacgcccccttttctttccctttgaccgccccgactatttactacgacaccttccctggctgggtgccgctactttttttttacaagacgattatgcgccggccgacatattgccattaatctctccttcgccgagttgccggcgatctactggttcac

SEQ ID NO: 59159 - DNA, 694 bp, Glycine max
  unsure (1)..(694): unsure at all n locations
  Clone ID: PAT_MRT3847_24432C.1
gaggctgtttccccatggagatctcactgaaataggtgagaggggagttaacttgagtggaggtcagaagcagcgaattcaacttgctcgtgcactttatcagaatgctgatgtatatctcttggatgatccatttagtgctgttgatgcacatactgccactaatctgtttaatgaatacatcatggatggtcttaaagagaaaactgttttactcgtaactcatcaagttgactttcttccagcgtttgattctgttttgttgatgtcaaatgggaaaatcctagaagctgctccttatcatcatttgttgtcctcaagccaagaattccaagatcttgttaatgctcacaagaaaactgccggttctgacaagcctatgaatgttacttcttccaagagacgttcgacatctgttagagagattacacaagctttcaaggagaaacatttaaaagaagcaaatggagatcagttaataaaggaagaagagagagagataggagacacaggtttgaagccttacatgcagtatttgaatcagacgaaaggctacatatacttctttgnggcttctctttgncatctcttgtttgncatttgccagatattgcaaaactcatggatggctgctaatgttgaccatttccaagtcagcacattgaagttgattgtagtttacttcttgatcggg

SEQ ID NO: 59160 - DNA, 443 bp, Glycine max
  Clone ID: PAT_MRT3847_24433C.1
gcattcgagggaagtgtgctatgcgagcatgaggtgttgaggtgctaacataccaggtgaattgtggagtgctgtgaaggctggcacaccacttaacaggcacgttgtgcatatctggatcgacaactggcatactgaggtacatgcgtttgacgtgcaccatgggcaaagtccattgaacaggaaactgctgggaatcatatggcgccagctataacaccatcgaagctagagcctagcaagtagagaatgcggaattctctattgactttaattggaggatattttggtggacacaactggagaatggaacacaacgaaaacaaagacttgtccaatctggtaagcttgttgctatgtcgatgctaggaagaaaagacgtttaatggttaacatagtgatgtctgaaaatgctgtccttctaaagagtgaatgggcctcat

SEQ ID NO: 59161 - DNA, 384 bp, Glycine max
  unsure (1)..(384): unsure at all n locations
  Clone ID: PAT_MRT3847_24434C.1
cgccgcggggcagagccgccgaacggaggacgcaagagcgaggggggnggaagacggcgaccgccggacctcatgccaggaaggtcattatgaagatcctcataggagggggaagggtgtgagcattcgacagaggctgccttagggaacttgatagtgggtggggggctgcactatggccctcgttctgtgaaaagggtcaggatgatgaaggagggctgtctgaattctagactgatgaggagcaaggaatctgaggccttgacagatctgtgtcggctatgactaagggtgaggtagcattgctgactatcgcacctgaatatgcgttggggccatcagggtctgaacgggaacttacacatggcgcagctgactgcacat

SEQ ID NO: 59162 - DNA, 1009 bp, Glycine max
  Clone ID: PAT_MRT3847_24435C.1
ctcgagccgttttttcttctaataatggctgcgacaacacgttcccttgcatacaactacgatgtgttcctcagcttcacagggcaagacacacgccagggtttcactggctatctctacaaagctctttgtgacaggggaatctacactttcattgatgatcaggagcttcccagaggagaccaaataacatctgcactttccaaggcaattcaagagtccaggattgctattactgtgctttctcaaaactatgcttcttcctcgttttgtttagatgaacttgtaaccatccttcactgcaagaggaaagggttgttggttataccggtcttttacaaaatagatccttctgatgtcagacaccagaaaggtagttatggagaagcaatggctaagcatcagaagagcttcaaagctaagaagcttcagaaatggaggatggctttgcaacaagtagctgacttgtctggctatcatttcaaagatggagattcatatgaatacaagtttattgggagtattgttgaggaggtctctaggaagattaatcgtgcttatttacatgctgtggattatccatttggtcaatggtcacaagtgatggagaatcaaataaacatgggttaaagcaccttcaaagcatcctactttcaaaattacttggtgagaaggacatcaacttaacaagttggcaagaaggagcttcaatgatacgacataggctccgacgaaagaagattctcttaattttagacgatgttgacaagcgcgagcaattaaaggctattgttggaagatctgattggtttggtcccggtagcagagttatcattaccactcgggacaaacatctgctaaaatatcaccaggttgaaagaacttatgaggtgaccaaatctctagtgaatacaagtatattggtaatatcgttgatcaaatctctagtgagattaattggtaggataacaggaataggaaacaacaaggcaccagtaacaggaagcac

SEQ ID NO: 59163 - DNA, 1170 bp, Glycine max
  Clone ID: PAT_MRT3847_24436C.1
atggctgcaacgacacgttcccttgcatccatctatgatgtgttcctcagcttcagagggacagacacacgctatggttttactggcaatctctacaaggctctttgtgacaagggatttcataccttctttgacgaaggctcgacaagcttcacagaggagacgaaataacatttgcacttttgaaggcaattcaagagtccaggattgctattactgtgctttctcaaaactatgcttcttcctcattttgtttagatgaacttgtaaccatccttcactgcaagagggaagggctgttggttataccggtcttttacaaaatagatccttctgatgtcagacaccagaaaggtagttatggagaagcaatggctaagcatcagaagaggttcaaagctaagaagctgcagaaatggaggatggctttgcaacaagtagctgacttgtctggctatcatttcaaagatggagattcatatgaatacgagtttattgggagtattgttgaggaggtctctaggaagattagtcgtgcttctttacatgttgcggattatccagttggtctagagtcacaagtgacagaggtaatgaagcttttggatgttggatccgatgatgttgtccatatcatagggatccatggaatgggcgggttaggaaaaacaacacttgctctggaagtttataatttgattgctctccattttgatgaatcctgttttcttcaaaacgtgagagaagaatcaaataaacatgggttaaaacaccttcaaagcatccttctttcaaaattacttggtgagaaggacatcaccttaacaagttggcaagaaggagcttcaatgatacaacataggctccaacgaaagaaggttctcttgattttagatgatgttaacaagcgcgagcaattaaaggctattgttggaagacctgattggtttggtcccggtagcagagtcatcattaccactcgggacaaacgtctgctaaaatatcacgaggttgaaagaacttatgaggtgaaggttttaaatcagagtgctgctcttcaattgcttacgtagaatgctaatatcgttgatcaaatctctagtgagattaattggtaggataacaggaataggaaacaccaaggcaccagtaacaggaagcacaacccac

SEQ ID NO: 59164 - DNA, 699 bp, Glycine max
  Clone ID: PAT_MRT3847_24437C.1
tcccagcgtatcaaccattatcatactgaacttttttcttctaataatggctgcgacaacacgttcccttgcatacaactacgatgtgttcctcagcttcacagggcaagacacacgccagggtttcactggctattcctattaagctctttgtgacaggggaatctacactttcattgatgatcaggagcttcggctcgaggacgaaataaaacctgcactttccaacgcaattcaagagtccaggattgctattactgtgctttctcaaaactatgcatcttcctcattttgtttagatgaactagtaaccatccttcactgcaagagtcaagggctgttggttataccggtcttttataaggtagatccttctcatgtcagacaccagaaaggtagttatggagaagcaatggctaagcatcagaagaggttcaaagctaacaaggagaagctgcagaaatggaggatggctttgcatcaagtagctgacttgtctggctatcatttcaaagatgggtatacaatcatactaatatatattactttatggtttttattggattaggttttacttgtctattgatttaactagtcaaatttaaatatggatgcaagggttttacgctgacttcatcagaactttttttgtttgttagaaacagagattcatatgaatacgaggttattgggagtatt

SEQ ID NO: 59165 - DNA, 2006 bp, Glycine max
  Clone ID: PAT_MRT3847_24438C.1
cctacgcgtccgggccactcttcttcttcccacgctcctccttctcatacccttcgccaccctcgtctccgcccgccctcacctcgccggagactttctccgactgccctccgaaaccgataacgatgacaacgtccagggcacccgctgggccgtcctcctcgccggttccaatggctactggaattacagacatcaggctgatgtttgtcacgcctatcaaatactaaggaaaggtggcctgaaagaagaaaatattattgtttttatgtatgatgacattgcattcaatggggaaaacccaaggcctggagtcatcattaacaaaccagatggaggtgatgtttatgaaggagttccaaaggattacaccggcgaagatgttactgttggtaacttttttgctgctttacttggaaacaagtcggcacttactggtggcagtgggaaggttgtggacagtggacctgatgatcatatatttgtatactatactgaccatggaggtccaggggtgctcgggatgcctgctggtccttacttatatgcggatgatctgattgaagtcttgaagaaaaaacatgcttctggaacgtataaaaacctagtattttatctggaggcatgtgaatctgggagtatctttgaaggtcttcttcccgaagatatcaatatttatgcaaccacagcttccaatgcagaagaaagtagttggggaacatattgccctggggagtatcctagtcctcccccagaatattcaacctgcttgggtgatctgtacagtgttgcttggatggaagacagtgacagacacaatttacgaacagaaactctgcatcaacaatataaattggttaaagagaggactatatctggagattcatactatggctctcacgtgatgcagtatggtgatgtacggcttagcagtgatgttctcttccattatttgggtacagatcctgctaatgataatttcacttttgtggacgaaaactccttatggtcaccttcaaaaccagtcaaccaacgtgatgctgatctcatccatttttgggataagttccgcaaagctcctgagggttctctcaggaaaaatgcagctcagaaacaagttttggaagcaatgtctcatagaatgcatgtagacaacagtgtaaaacttattgggaagcttttatttggtattgaaaagggtccagaagtactcaacgctgttagaccggcaggatcggcacttgttgatgattggcactgccttaaaaccatggtgaggacttttgagacacattgtggatccttgtctcagtatggcatgaaacatatgaggtcctttgcaaacatctgcaatgtagggataaagaatgagcaaatggctgaggcctctgcacaagcttgtgtctctattccttccaatccttggagttctctgcaaaggggtttcagtgcataataattcctgtaatgtgcaccagtaaagaccaaagtatgattattgttacattatgctatatgattgtacttgtatatacatattttgtcccgcctttgtaaatacaattgggacactactaggattgggaagaagggtctttacatttttagtttggcaaatagatattgcaactacctttgtataaatctatttctgaagaagcaattacaactttcaagggatgatagcattttgtggcataaggattaaggaggcataaaggaccaattgctttggaatattcactcatgacaaggcacaaggtcatgcgtgtatgccaacacatagtaatgatgtgtgtttttattcagtaggcaactggcagatcgggttttcccttgtcacttttgtataattattttggaagaatttatgatgtcaaagttattgtttaatattaatggcgacattgtatttattatttgtaaaatattgggactcaactatgctttggtacctttacaacagagtcattaggataaagtacgactattctattagttgtgat

SEQ ID NO: 59166 - DNA, 2003 bp, Glycine max
  Clone ID: PAT_MRT3847_24439C.1
agccaagcaagaagtgtgtatttgaacaaaagtttaatttttttttagccaaaacactttttaactcttattttgaagcaaaagaaacacacaataaagagagaaatattgcagtgatatttttctgggggttgagaaagagaacagaagaaaagacagaaagctcaacgtcagagttagccgtataaggttcgcttattgtgtgtttgtggttttggactagctgaagtttgtcctttggatcccagaaacctttccagcatttgaaaaaccaagatctatggcctataccacaaccttaggtttctaaaacttgcaagttgcaagtatatatatggagatgaagggttttatgttctaccaacaacagcaacagcaacaaatagtggaggagaacatgtcaaatttgacttctgcatctggtgaagctagtgcttcctcaggtaacagaactgaaattggaaccagctacatggctccaccaccaactcagattcaaccaccaaagaaaaaaagaaacctccctggcaatccagaccctgatgctgaggttatagccttgtcccccaagagtcttcttgccacaaacaggttcatttgtgagatctgcaacaaaggatttcaaagagaccagaaccttcagcttcacagaagagggcacaatttgccatggaagctgaagcagagaacaagcaaagaggtgaggaagaaggtgtatgtgtgtccagagccaagttgtgtgcatcatgacccatcaagggccctgggggacctaactgggatcaagagcacttctgcagaaagcacggtgagaaagagtggaatgtgacagtgctcaagagtatgcagttcaatcagattggaaagctcactccaaaacctgtggcactagggagtacagatgtgactgtggaaccctcttctcaaggagggacagtttcataacccacagagctttctgtgatgcattggcagaggagagtgcaagagccatcgcaaacccacttcttcccccacaacaacaacaatcttcttcctctcacatgagtactctccaaacccaattcaaccctcaaaacctccatgccttcccattgaaaaaagaaatgcccccttggcttggcccaccagcaacagtagttgttgatcatcatctgtcttcatcctcatccataatgttctctcctccacaccaagaaaacgataaccctccctagtcttggtcccactcttgctgcctaccaaacagtccctaatccacacatgtcagccactgcattgctgcagaaagcagctcagatgggtgcaaccatgagcagaagtggttccacaccagccatgactgggccccaccatcatgctcacgtgtctcattttggcttgaacttgtcctcacgtgaagacaccaccaccaccaccccttcaacaacaactactaatgctaacactgctacagtgttcagccatggcttattatcatcatcaccattggggaataaagctgctgctgctgctgctgtgtcttcttccgcaccatcccttcttcacgatgttatcaactctttctcttctccttctgcctttgaaggaaccccttttgaggatgcattcattcagagctcaaagaaactagatgatgatcataacttgtatttgcatgacacattctcaaaaacaagtggtgcagctgggaataatattaatgaagggttgaccagagatttcttgggtcttaggcccctctctcatgctgatattctcaccatcgctggcattggaaattgcatccatgatcagcagaaccagtctcaaaagccatggcaaggttagctatagctatgtagctccatatatatatgtggatcttctttttcatcctttaattaatcatctatatatataaattttttcccttttaaattagtgtaacttttgtttatgatcttttcgatcttcccaaagggaaggacctttctgaatcgatcccaatgtttttattcctt

SEQ ID NO: 59167 - DNA, 4059 bp, Glycine max
  Clone ID: PAT_MRT3847_2443C.1
ccgggctcgatcttcgacccacgcgtccgatcatacacacttttttaccttttgaaggcaaccaagtttgtcaattagaaaatagtgaattatcatctctatggtttatgataattagacaatgtttatctgttaactcagaccacatatctattcatcggtacacttcttctctgtggtgatttaactttagttactgtctgaatgttccagatgatatgttataaatagttgactttggtttattctttttagtctatggacacagtcatcctagaagattcaacaagattacatcactgagagactctgcctggtttactatttcttaagccaaaaattcacgtgaagcaaataacaggcgaatcatgtcattagttaggtctgctgatctagctcctacatcatatgaaaatgctaagctcttctcactgaagggaactgatgttagaccaggcctgtcctcccaaatttttggtcctgataagcataggagcatgtacatgaccgatgcttactccggcgagtgttatgagaagtacttccatgactcacaaacagaagaattgatagaaccatctagttccagcatctctggaagttcaattcaccctgatgtagcctcttcttaccagctcagagccagttcaggagcttctatggttgccaataacccatctgattcttctttcatgtctacaaggcatcatgatgcttaccagtcaaactctggatcagatttgatggagaacggaagcctggattcacgcgacgatgaaggtctaatgagattaagactaaaagcactggaaagggcattgcttgatgatagtgatgctggggaggatgaagaggaggaggaggaggaagaggaagacatatttgaggctgcacaaagcatggaaattgatcctgacattgctgagtgggctgattcaattcataatatgctgctccatggttcaccaaaggagtcctcttcttcagattccaataccagcagcatcagcagcaccaaagaaatatcacaaacttctcagacccccaagaagttgctttatgaatgtgctattgcactttctgaaggaaatgaagtggaaggatcatctatgataaacaatctccggcagatggtctcaattcagggagagccttctcaaagaattgcagcctatatggttgagggacttgcagctcgcctggccgaatccggaaaaagtatttacaaagctctgagatgcaaggagcctccaacttcagatcgtctagcagctatgcagatactgtttgaggtttgcccatgtttcaaatttggattcattgctgctaacaatgcaattacagaagcagtgaaagatgacatgaagattcatataatagattttgacatcaatcaaggaagtcagtacataaatctaatccaaacacttgcttcaaggtcaagcaagccaccacatgttaggttgactggagttgatgatccagaatctgtgcagcgatctgttggaggcctacggaacataggacaaagactagaaaaactggcagaggcacttggtttgccatttgagtttcgagcagtggcatcaaggacttccattgtcaccccatcaatgctcaactgcagtcctgatgaagcactagtggtaaactttgcattccagcttcatcacatgcccgatgagagtgtttcgacagtaaacgaacgggaccaacttcttcgcttggtgaagagcctgaatccaaagcttgtgacagttgtggagcaagatgtgaacacaaacaccacccccttcttacctagatttgttgaggcctacaattactactctgctgtgtttgagtcacttgatgctactcttcctagagaaagccaggacaggatgaatgttgaaaggcaatgcttagcaagggacattgtcaatgttgttgcgtgtgagggcgaggataggatagagcggtatgaagttgctggaaaatggagagcaaggatgacaatggctggcttcacttcatccccaatgagcacaaatgtcaccgatgaaatccgaaaactcattaagacggtgtattgcgacaggtacaagattaaggaggaaatgggagcgcttcactttggttgggaagacaaaaacttgattgttgcttcagcatggaagttaccaagataatcaattgtgttaggcgatagactcattctagtatcagtaatctagtgtttgcttgcatgcttgtttagtctgtagattacttctgatattcctattgtggtgttttcttgcttttccacatgtatactaacgtacaatcttaagctaataacgaactttgattttatgtaagtgcttttcttaacgtggctggaggacaagggagcaagaagcaatgaagcttatgcttaagctaatgactattttctagtttgataatttgttaaaataaaagagttgattaaggcaaagggtgtgatgagattagttttgagaagaaaccagcaatcggcgattaggagtgagagagatatggagggaattgaaggaaatagcagcagatacagtctgaaaccctcgcgaatttgcaacgaagatgttctgatctgcgtcgacgtcgatcctcagtgcctcgtcgaaatgaaaggtgccaccggtcccaatggcagacccctcacccgtttggactccatcaaacaagccatcgttctcttcgtcaatgccaaactcaccatcaaccccgaacaccgttttgccttcgccactctctccaacaccctcgtctcttgggtcaggaaagagtttagcagtgaaattgagtcaacacttgcagcaatgcgtgttctttcagcttcttcttcttcttccaccaccgccggccaacccgatctcactcatttgttccgtcttgccgctcatgaagccaagaaatcccgtcttcagggtcgcatcctaagagtcattttgttctactgtagatcatcagagcgaccaaagcatcagtggcctgtgaaccagaagctcttcactttggatgttatgtaccttcatgataaacctggaccagataactgcccccaggaggtttacgatacactggtggaggcacttgaacatgttagtgaatatgagggttatatcttggagagtggacaggggttggcacgtgttctattccgtcatgtgctgatactattgtcacatcctcagcagcgttgcatccaagagtatgttgacataccaaagtcaattgcaaagaagcctccccaggtggagcctatggctactgaagatagtgctcccatatcaagccaataatactatgtaattgcacagttacttctctcgtgtcatttaagttgttggtttcatgtgtatgtatgtggtgattgcttcttatatatgcaaagggtattgatttggtgataatgttatataagtaatgtttaacatgtcttgaacccattccccactagggtcagtctaatgggggaggggataagagagttttttgtctaaggtcttaattcaacccttattgtacccaaataaaaataatgtttaacatgtcctgttaaattttctttatattcacattgtagaaaaattgtcaccagagaaaaattttctgtaaattattgggtatggattgccacttggtcaattcactggtgttttaattcatagtttttgcatctggctggcagactatgtctatgctgacaccaaattttctacctgatttttccttcacttcaatttcaggagttgggaagtggatggcagttgcatgtggtcaacctcttaaggggaatggaatatgatcataattcagcaatgttcaagttggaggttagtgtcactaggttgacaagggaatgattgttactagcgtaacagtttctgaaattggattcgattcctacaaccctctttcgttctcaagttgataccatttactattttgaatcaaatgtatgaaaagtgtactttcaaacatatccatattcattagtaatcaagcgtttaggtctggtaatgaaagtgagcaagggatgtgattatcccc

SEQ ID NO: 59168 - DNA, 2133 bp, Glycine max
  Clone ID: PAT_MRT3847_24440C.1
cggacgcgtgggaaaatgcccactttttttcttccaacgctcctcctccttctcatagccttcgccacctctgtctccggccgccgtgacctcgtcggagactttctccggctgccctccgaaactgataacgacgacaacttcaagggcacccggtgggccgtcctcctcgccggttccaatggttactggaattacagacatcaggctgatgtttgtcacgcctatcaaatattgaggaaaggtggtctgaaagaagaaaatattattgtttttatgtatgatgacattgcattcaatggggaaaacccaaggcctggagtcatcattaacaaaccagatggaggtgatgtttataaaggagttccaaaggattacaccggcgaagatgttactgttgataacttttttgctgctttacttggaaataagtcagcactgactggtggcagtgggaaggttgtggacagtggtcctgatgatcatatatttgtatactatactgaccatggaggtcctggggtgctcgggatgcctgctggtccttacttatacgcggatgatctgattgaagtcttgaagaaaaagcatgcttctggaacatataaaaacctagtattttatctggaggcatgtgaatctgggagtatctttgaaggtcttcttcctgaagatatcaatatttatgcaaccactgcttccaatgcagaagaaagtagttggggaacatattgccccggggagtatcctagtcctcccccagaatatacaacctgtttgggtgacttgtacagtgttgcttggatggaagacagtgacagacacaatttgcgaacagaaactctgcaccaacaatataaattggttaaagagaggactatatctggagattcatactatggctctcacgtgatgcagtatggtgatgtagggcttagcagagatgttctcttccattatttgggtacagatcctgctaatgataatttcacttttgtggatgaaaactccttatggtcaccttcaaaaccagtcaaccaacgtgatgctgatctcatccatttttgggataagttccgcaaagctcctgagggttctctcaggaaaaatacagctcagaaacaagttttggaagcaatgtctcacagaatgcatgtagacaacagtgtaaaactgattgggaagcttttatttggcattgaaaagggtccagaagtactcaacgctgttagaccggctggatcggcacttgttgatgactggcactgcctgaaaaccatggtgaggacttttgagacacattgtggatccttgtctcaatacgggatgaaacacatgaggtcctttgcaaacatctgcaatgtagggataaagaatgaacaaatggctgaggcttcagcacaagcttgtgtcagtattccttccaatccctggagttctctgcaaaggggtttcagtgcataataactccctgtaatgtgcactagtaaagaccaaagtatgattattgttacattatgttacatggttgtacttgtatatacatatcttgtcccacctttgtaaatacaattgggacactactaggattgggaagaagggtctttacatttatagtttggcaaatagatattgcaactacctttgtataattctatttctgaagaagcaattacaattttacaagggatggtgccatttacggcataaggattaaggagggataaagggaccaattgctttggaatatccactcattacaatgcatgtatgacaacacatagtaatatgatgtgtgtttttattcagtgggcaactggcagatcgggttttccctggtcacttttgtataattattccggaagaatttatgatgccaaaattattgtttaataaaaaaaaaaaaaaaaaaaaagggcggccgcccttttttttttttttttaattggattttaatcgcatgatttttgttggatgggattcaaactatttttcccttctgatatgaacgttgctttaagcattatgttatttgcgttattttcattattagatggtatactcaattgttatgcactttacctgtaggaattattctgtcttgttaaatgacatatcttgtctttagtcatc

SEQ ID NO: 59169 - DNA, 436 bp, Glycine max
  Clone ID: PAT_MRT3847_24441C.1
tttttacagcttgatacttaactttatgcttccaatacaagcattgctttcaagaggggcattttgaaacactgttctgtttttaaatgctataaaggtttagctccaaagatttccaaaccagtttttttgcgcccagcaatgaccaatgttcaccaagccctgtagttttaaaagctccacaagcgccaacacccttgggggagagcctatcaagaaaaggaaaaaaaagatgccccgcacccatgaagcaaatgcattataagctttttgctcgaaataaaagtctgatgatttaacgcctagaaaagcttccagggggggggtcatgggagaagggacatcaatctcgcgcattaaaaaaaaaagggcagaaaccaaacgctcaatgccattttgagcacaaaaaaaccgcggccgctgctcctgtttttga

SEQ ID NO: 59170 - DNA, 459 bp, Glycine max
  Clone ID: PAT_MRT3847_24442C.1
agtgaagaaattctagccagtatcattgattaaaatatcatcaatacactttaatgtactaattttaatatggagtaataatttccaattaaacctttttttatcattaattcctttctcagtagtcatcaccccaacaagacacggctaacatatatggaacaatttcccccttcttttttttacccttttatccacttatcctccacctgtttcgggtaatcagttactatcacaagttccaagaacagaaagacgctcactaaaaatccaaagtttgcaatggcttttgcatttacttcactgggcaataatacacataatcgcatatctaaaccgacgcctgtttaaaagaggagaaagacaaagaaacacgttcgttctaactgcgacattatattatttacacgaaaactggtccttcattcactgattcatataatgactccattcacattc

SEQ ID NO: 59171 - DNA, 164 bp, Glycine max
  Clone ID: PAT_MRT3847_24443C.1
gatcatgaaccagatcattatcctagtacaccgtattaaagaatttaagatatactatgatgagagcgcggtttccatgactgatgctgagagctggtttactggcatcagtatctgtctcatatggcatcgcatattgagataagtagaaccccattcacaac

SEQ ID NO: 59172 - DNA, 266 bp, Glycine max
  Clone ID: PAT_MRT3847_24444C.1
ggcaaggggctgggccaaccttttgttagggtagtccaagttaagccacctagtgttttcaatttacacaaagaggggagacaaggtgattcccaccaacttggtgggcaagaacagattaaaatttaacttgggactttattctaaaagtttggaacaaagcaaaatgtgcttaattttttttatgaggaactagcctttcctattctacctacatgccatacctaggcattcctgggggattaaattgggctaaatcggccccc

SEQ ID NO: 59173 - DNA, 273 bp, Glycine max
  Clone ID: PAT_MRT3847_24445C.1
agtgtttgaactattcataagagacggccatttaactgcacgcgacgggattttacatagtcaatctatgtggctcactgttaaaatgccaggcgccgactcagctggaataattcctcctttagagcctatatgtgcaaactcaagacagccagtaatagttggtcctctatatgtcgcatttgctcatataccaaacgttcgacgttccgactgcagcgaagctagctcagtggcactgagtgcaactgacaactggatttcacttggtgg

SEQ ID NO: 59174 - DNA, 154 bp, Glycine max
  Clone ID: PAT_MRT3847_24446C.1
ttattggttcattgctttttaacctatgggaggaggcgggcaaactaacgaaatcacaacaaactgattcctttaattttgggtaaaacataaaatcctcttatttactgcatattttaatgatgtctttatctatccaattaatgtgcaaaaa

SEQ ID NO: 59175 - DNA, 386 bp, Glycine max
  Clone ID: PAT_MRT3847_24447C.1
gatctatattggtaattatttcgcaatggataaaagcccccaaatgccattattgaagcccaaattttttagggtaatgaattaccaaaaatggcctgccgggtattttgaccaaaaattgggcctgcctctaccaattatttttctttttaggccttttagggaaaaagggaaaccgtttgggggggattattttaaggcccttattacctaccccacttttaaccactttttattaattttactgacctaaaatgccattaaggcctcgatttttttcctttggctttattaaaagggtggcttctgaaaagcaagaaaatcttttcacccatgaatgggttgaagacctttgggatttttaacccatttttcctttgggtggt

SEQ ID NO: 59176 - DNA, 226 bp, Glycine max
  Clone ID: PAT_MRT3847_24448C.1
gggcggcagcgctcgtttcgacgccagcccagacgcactcacccacgacacctctaactcttaaccctaccgcgatctgttgtcgttgtacctgcaaagttttaaatacctaaagagggacaagacattcactatttacctcaaacacagggaacgagggacaccctgacgagctctgcgacctaatactacatgctggactcgacgcttgcctaaatcccgaccc

SEQ ID NO: 59177 - DNA, 300 bp, Glycine max
  unsure (1)..(300): unsure at all n locations
  Clone ID: PAT_MRT3847_24449C.1
gggncactcaactaaaaatatcacatgaaccacatccatcaatgtttatattcccattttctggggattttcgtgtagtcaacagagggataaagtactttaaccttccataaatcattctttatatttttaggactgctacttatctttaattctactacgacaccacaaatttatctagcattttatatattcatcctttctatgcatgcttagatccttcatcaagctattaccaatcaatgagtacattcactattctcccttagctgaaatctttcatgataatccacatgcatt

SEQ ID NO: 59178 - DNA, 328 bp, Glycine max
  Clone ID: PAT_MRT3847_2444C.1
tattaccatcacaaggcttgatatcctggttgtcctcataataaaagctcacaaacatcctgatgcatatgcactatatgttcaacatattcacttctgttaaaaacaaaccacaactgttgttcaatgactttttagatttataccactctatgaaattcacaacccaaatgtctgtgttctttgcagcctaaagccagtcaccatgaccggcattaaatctcaaacaatcattcttgctgcttcctatcgcgatcacaccaacgttgagttgcttgagcctcctcgtactactcaaccagcagcaataattaccttctctctctat

SEQ ID NO: 59179 - DNA, 1036 bp, Glycine max
  unsure (1)..(1036): unsure at all n locations
  Clone ID: PAT_MRT3847_24450C.1
ggctcgaggtatggcacaaaccacatgagcctaggccttggtgctcaacttcagaaccaccaaatctcagccactaacagcatattgagccttggaagcgaaccaaagtttgagcacttgatctcaccaaatctgcaccactcatcatcatcatcatttggagtgcaatcaccccagtcatcatcgttcttcatgactgatccaaaccatgcatttcaagacctccaatctcagaaccaaggacacttattctcaaacaagcaacttcatggtctcatgcaactccctgatcttcaaggaaacaccaataacaactccactacttctgcttcatcattgtctgcttcagctaataacaccaatctcttcaacctaagcttcttccctaacaccaacaccagtggcagcataatcaatgatcaattcagcaacataagtggaggtaacaataaccaaggaacagcaacactctacagcactaatagccccgtgagtaataaccatgttggtaactcaagcttgtcttcactctttggaaatgcatcagtgccacaccataagatgtcccctcacatttatctagggcgaaaaaattgcatctctttctctgaccttatatcaaaggtcatggaagatatcattcaacgtcggtaatgttgtcttgttaaccttttttgttatggtgtcctgtgtttggtcttgtggcactgtgatgcctcaaggtttatttttgttagccattatgtttaaactcgatggttatgggnaatcatttgaagaatggctagtttagttttgcattcaaataatttgggccccccatacctaatgtattggcataattgctagcggaaagtttgcttttggtngntaaaacctgctaccggaggccgcctttatttcttccaaaaaaaaaaaaaaaagaacatccgagtgctttatggtagggcgcttaattctaaataaacaaccaatgtcgttgtcgtttgctaataaaattaatctgtgatgattgtgttaaaaaaaaaagaataac

SEQ ID NO: 59180 - DNA, 484 bp, Glycine max
  Clone ID: PAT_MRT3847_24451C.1
accaggtgatttgtagagcttcattcaaaatctttggaaaattcttggggcgagtgcatcaatcagagtcgacactaaaatgttctagttttcgttaaaatctgatcagaatcaaatcctcgagtgtgctttgccttgtaatcaacatcatctcacagttctgtgtttcttctctctatcagcaactttttctgccctatattcccattttacaatgtttgtactgataatcagccaatggcatgtcaaagttcgcataaaggtttcctgcgtcctgcgtgtattatatctgtccaatatttaaagtttgatttagcatgtattatcaaaagtcatgatgtaactcgctagcagctttattcacgcttttattttttttattgatgtaattgggtagtcttcagtggtgatcaggataggggtttacaaggatcaggataaaactaaaaaaattcagcttgtctgcagttaaccttgtttttat

SEQ ID NO: 59181 - DNA, 367 bp, Glycine max
  unsure (1)..(367): unsure at all n locations
  Clone ID: PAT_MRT3847_24452C.1
acgtaattgatcaagctgttgngataagagagcggcatctaatcaagataggctttttaagtaccacactacaaattaaataggaatgtgaagcatattacctagtcacaacaaattccaccatctcattgagcatttaattcaaaatattaactttaaaacactacttctgcattttggagatacattgggacatatacatgctcccactttctattgccattagtttaacatttgcaccctgtttagtgctttttcaaaaacctgcacctttttctacagtttcggatttttttaaaaaactctatcaagccgtctattgggcaagttgacctccactggcttcctggttttgtgggataatttt

SEQ ID NO: 59182 - DNA, 311 bp, Glycine max
  Clone ID: PAT_MRT3847_24453C.1
acgcccacgcgtccgcccacgcgttcgcccacatcgtacgcacacgcgtacgagactgccgaccgttttgttttataggaaattaagatgaatgatatatcaatgttacagaaagtatatataactgttgaactaaaaatgactcgtatcattctatttgttaattaactataattaacaatagaatggagagaacacaatattctgtagatgttaatgaccgagataactttagtgcgttttattttctgactttaccacaaaataacactctatctatctagaaaatggctgattgcatattcatggtg

SEQ ID NO: 59183 - DNA, 2174 bp, Glycine max
  Clone ID: PAT_MRT3847_24454C.1
ttttttttttttgaagaaaataataatattcttatgcgcggttcggcttcggctccctccagcgtgccggcccgggccgccactcactcactccctctccctcccccccactcccccaccctcacgtcgccccctccccctcacgctcccctcgcgcccccttaccgcagcggagagaccagggtcaggttggatatgtagcagaactgcttcaccttcttctcttctctccgcctccaccaccactccctcactctccactccctcaattcacaatcctcacgttgcctcgttcacatgaaactcctctcgccctccgtgttctcgctctctctctgaatcactcatccttataataaataaataatttctcgaagaaggagaaagaggttttcattgttgtggttgttgtagaagaagaagaagctgaagaagaatggagtccacagaatcttcatacgtgtcttctcccgagggaccgaggaagcacgctgcatcgcctcctccgaaatcgccttcgctagattctgaggagaagccaacatacattaggtttctagtatcaaactctgcggctggttcagttattggaaagggcggttcaactatcactgattttcagtcacaatctggagcacgaatccagttgtcacgtaatcatgaattctttcctggaactactgataggattatcatggtatctggcgcaataaatgaaatacagagggctgtagaacttatcctttctaagttgctcagtgagcttcatagtgaggatgacaatgatgctgagccaaagacaaaagtgagactcgttgttcctaatggttcatgtggtggaataattggcaagggaggtgctaccattaggtcattcattgaagactctcaggctggcataaagatatctcctcaagataataattactatggacagaatgataggctagtgacgctgacaggatcttttgatgaacagatgcgtgcaattgaattaattgtttcaaagttatctgaagatcctcattatgcacagtccatgaattctccattttcatatcctggtgtttacttctcaggttatcagggtgttccatacacatatgtgcttccgtctgttgcaccaccggcatacaatgcagtgaattacagaccaaatggtgctgctggaggaaagctccagaacagcaaggaggagcggagtaactcattgaccatgggtgttgcagatgagcatataggattggttgttggtcgtggtggaaggaatattatggaaattagtcaggctagtggggcaaggataaagatatcagatagaggtgattacgtatctggaacaaccgataggaaagttaccataacaggatcccagagagcaatacgtacagctgaatctatgatattgcagaaggttgcttatgctaccgagaggggggtgatggagtagtttgctactgcacttgtctgctgttagatgcttaatgaatctgcttgctaattgcttatacatttgctgaattttgggatttgtttgcataaattatcatcacttattatacctttgaagatttttattgtagcgggagagggcaggaatttttttttttcttgaattgagagcggtcttctagaatttcttctcaaaccccgtcatcagacaagttcgattggaaagtgcatttgcacatttccaaaatgtagtatttagaactaaattcttttttttgtaattcaacaggtgctaatgtcatatatgatctgtgtatcctcaatcactagcctgagataggatatgaaaattgttttgtgatagcaactgagaatcaagaattcacttgtgagttgtcagaacctcaggcccgtgttgtgtttctagtttttcatagattaatatgatgacgacttataggccactataaaatctttgtgtagcagttaaggctattagatgcacatgctagtgatgttatctcgctactttcaaacggtgttatgttcccaccaaaccatggacttcactgttttgtccgaggtcgttgaccaattgcaccatccataaatggatcctgggttgtctttccacatctacgactaggggttttcgattcagatccgaaatgggagaaaaatggtgctttgattctggaatagcaactttaacggtggtgatt

SEQ ID NO: 59184 - DNA, 346 bp, Glycine max
  Clone ID: PAT_MRT3847_24455C.1
ctaggaaacaccactttctctctcaatattccttcatttctactcttttctttctttctacgctcactctcttatctcaacacacactcttctccttcttgccaaatggataacagcaccctgaacaatcccggcgacaacgccgaagacccgccaccgccgccggctcccatgcaagtctttgattccttccaaccgttccattacgccaacggttccgatgaatgagaagaagctgttcctgctccagtcgccaatgcttcttctgctatgcgcgccagagctagcgaactcaccatttcctttgaaggcgaagtttattggtttccccgccggttcacccgaa

SEQ ID NO: 59185 - DNA, 435 bp, Glycine max
  Clone ID: PAT_MRT3847_24456C.1
ggctcgagctcacctgatagatctactggcgcggtgtaacttgcacgtagggacactaccggaagtgagttcgaccactagttcgatcgcgaacgcgtagacagagatcgcgactacgagcacaatcgtctactccacaaccgccatcaacgtagagaattctcatactgagggtcatgggtaccggtcaccatagctttatccaccgctatcagacgatgtcgcagccgtctccgcggatcgcaagcagaatgccagcgtgttcttccgtataggcattccacgctgcagaagaactgcgttctaatagacaagtcagcgatgatcgcacaacagagcctgccggtggcgctgccgatgtcgacgccgctgccactgcctattcggcacacctgatgactatgtcgaacgggtactacggatgtaggaagatca

SEQ ID NO: 59186 - DNA, 625 bp, Glycine max
  Clone ID: PAT_MRT3847_24457C.1
ctctttcccttccttctcctctgtttcttctcttttcttttcttttttttttttttttttttttttttttttttttttaaaaggcaaaattaggaaattttccccttccagtgggccacccaaaaacatacccatagtggtttacaagggatttggggaaccaaccagggctttaaaataacccctttggggaacaaaaaaaaacaaaaccttttcctttactaaggggggggggggcaaaagcccccctcccccattttaatagggcacaaatataaaattcccctttttaccagttttaaaaaaaaaaaagggggaaaaagctttcaaaaaggaaaataaaaatcccccattattaaaaaaaggccccaaaatttaggaacccccttttgccccaataaaaatgggtcaagaccccttttaaaaaaagcccttaaccttttggggatccaattggaccccaccccttttttttccacaaaggggcatacttttttaaaccccttagatactagtctttttttggggggccttcctaacccttaaatggaaaatttttggcctatcctatttggggggggatctaaattttgggaacttcaactggggaacaattattaaggcc

SEQ ID NO: 59187 - DNA, 355 bp, Glycine max
  Clone ID: PAT_MRT3847_24458C.1
gggttgggaaaaaaaaatcctttttttttcaaatggtgttttaaacccatgaacatttgaatttccaggggcttttaatagtcaataaagggtttttttgatccaaaaccttaatggtgaaaacaaaatgcaaaccaaaaaagcctttgaaacttattgcccgccaaaggggtccttaaagaactgcaggggaaaatgggattgcaaaaaaatgactgggagggctgaagtttgaaaatcagaattttgttaaagattgttccacaggggctgggggggcttccttttgggggaaatttggggcagcgttattggggggggcatcctttggttgggatgcaggggcagctccttt

SEQ ID NO: 59188 - DNA, 764 bp, Glycine max
  Clone ID: PAT_MRT3847_24459C.1
ctgtcttccttggctcagcaacatcagtggctatagctatggcataggaatttccattggaattctcttgctcattataaccatcactttaacttcctacttctgcaccagatcacaggtgtcatttgctccagccactaggaataggagacgcaccccaaatgtccttgaaccacagcactctatagttgatgtaagtttagatgaagccacaattctgagttatccaacccttttgtactctgaagccaagctcaagaaatctgattccactgctacatgttgctccatatgtctggcagattacaagggtacggatatgcttcggatgctaccagattgtgggcaccaattccacctcaagtgcatagatccatggttgaggttgcatcctacttgtccagtttgcagaacttctccgattccaacaccactctcaactcctcttgctgaagtggttcctttagctagcagacaggattcataggtagggcaatagcataattttgactcaagttgatgtcctcatcacaagtcatcattgattcacaaaatatatcagatttggcaatttgataaaggtgcttgtttgtattcataggggattttttttgttgtcaattgcttgatcctttacttaattttttcttgtatacccttcgcatggtaaaagttaaagttgttgttcaaatattggccctatcaagagtacaaactctgtggggatgcctcatttcctaattttccggagggtcctgcatacc

SEQ ID NO: 59189 - DNA, 299 bp, Glycine max
  Clone ID: PAT_MRT3847_2445C.1
cgctattgtacaggaccaaccataaagagctgcgaactctgcatcacgccctcaatattcacgaggctatccctacatgccacaggcgctggatgcactgtagcagcctacatactattacctacataccatgtgcttctggaacttagatactacgaccgagtccttgagtgtcctatgggagtggcaatgaataatgagctgattcagctggtgggaatagtagcccctgcatcaggcatatgaagaaccactaccctatgctgattatactcaaggctgcaccgttggtacatatt

SEQ ID NO: 59190 - DNA, 588 bp, Glycine max
  Clone ID: PAT_MRT3847_24460C.1
aaattcattgctattccccactcacatattttcgccaactcctgtctgactcccagacttcttcttcaaaaatcatttcttctccaaaaatcatttcttctccaaacacccacgacccattcctttgggaaaaaacactctaaccgctgccaccataagttcacactcatcctccgactcaatcaacagaagcatgagttctcactcatcatcggagtcaatcgacacaagcatgacttctgactcaccctccgactcaacccacagaagcttgagttcagagtcatcatctggtactagcaagattcaatatccagtaaacagaaaatcattaattttgcaattcgcagcaacattccgcaatgacacggacaccatacaagtgccttccttttaccatgaacaatgggcaccgcaatatcctgcatttgtccgctttagatatgatggtacaatataccagatacgactaccacaacatcgccagaaagtgtactttgctaagggactaaactagtttcgaaaagatttggcaaattttcaatctgtaaccattaaattcttggcatgcgataacaaatcaacttt

SEQ ID NO: 59191 - DNA, 550 bp, Glycine max
  Clone ID: PAT_MRT3847_24461C.1
gtatgtcaacagctttattttattatatcatctgagtgactgattcaattgagctggtacactaaataaggtatcaagcttctatgaatagaagcaaatgacaatgtttattgaagtgaagctcgtctacaagtcaaatctcagcaagaaaaacaaatattgacatcagtgactccaaaagctcccaaaggtcttttgcttcaacagcactttttggtggaatatcaatgtcatcccagttggctgtaattgagattttcgaagggccacgattaagcaagacaacagctaccctgtaccctgaaagaggacctgcccaaatctcttgatcaccttccatcctaacctttttaccttgtacaccaagtggatcttggttaactgaaataacttccttgtttgctactatctccatgggctctttagtcatattcctaacatcacagccaagaagaagaagagccttggaaagggcccataaactgaagtgaacaatatattcattttttggcatccctccatttcccacctcaggcgtatcaggatcatt

SEQ ID NO: 59192 - DNA, 264 bp, Glycine max
  Clone ID: PAT_MRT3847_24462C.1
gagattattgccacttttttctgttttgtgtatagtttgaattcagatctgcaacatgcatgcttcttcggttgttccaaagtgctataatttgtgattttcttggcttggaatcggttgagtaagcataatcgactaagcatgtaagcataatcgattaagctcaaacaaaccgattacgcatgtaagcataatcgattaagctcaaacataaaccgattactatctgtataattactaattagtattttgagtgaatactaa

SEQ ID NO: 59193 - DNA, 233 bp, Glycine max
  Clone ID: PAT_MRT3847_24463C.1
gtttgattttcttgatgctgttttctgcgttatctatagattccttgatgaacgcgttgaaggggaggcttccccttgttgctgttctaaccgggaaatgctgaagaggaggatgaatgtgacagatgatgatggtctatcagatagcttgtatgagaggaaaaacacgtttagagaaatggggttccttcaatttgggagaaaatgtgaagattccaatagaaaccgtggta

SEQ ID NO: 59194 - DNA, 221 bp, Glycine max
  unsure (1)..(221): unsure at all n locations
  Clone ID: PAT_MRT3847_24464C.1
aagcaatattaccagctctattattttctctcttcgttctaagatgngaaaatttcacactgggttgttaccccctactgtgttgttctctccttctaaactcctctttcttggagccagtcattgcctattaagactcgtcttattgcacctacaattgttcgtacagacgctcatcttctgtatttaaggataggtgtctgccgttcttgtgtatattc

SEQ ID NO: 59195 - DNA, 719 bp, Glycine max
  Clone ID: PAT_MRT3847_24465C.1
acatgtcaacatgctttattttattatatcatctgagtgactgattcaattgagctggtacactaaataaggtatcaagcttctatgaatagaagcaaatgacaatgtttattgaagtgaagctcgtctacaagtcaaatgtcagcaagaaaaacaaatattgacatcagtgactccaaaagctgcaatccaaaaatttgtttcagaaaactcaagccactggcttcagcacgtacattttacacccatgtggatctactggggcagtcaatttatccacgaagggtctcatcaatgacttgtgctcccaaaggtctcttgcttcaacagcactttttggtggaatatcaatgccatcccagttggctgtaattgagattttcgaagggccacgatgaaccaagacaacagctaccctgtaccctgaaagaggacctgcccaaatctgtccaaagagggttaccatgtgaatgatcatgtattgttcatctgacactaaagacaaagccattgttgtgttccaaattcaactcacctcttgatcaccttccatcctaacctttttaccttgtacaccaagtggatcttggttaactgaaaaacttccttgtttgctactatctccatggactctttaggcatattcctaacatcacagccaagaagaagaggagccttggaaagggcccataacctgaagtgaacaatatattcatttt

SEQ ID NO: 59196 - DNA, 1627 bp, Glycine max
  Clone ID: PAT_MRT3847_24466C.1
tacggctgcgagaagacgacagaaggggacagcaagtgaagaggtggtgaagtgaacacaatggagagaagggttggctatgaggtgctggtggctttggtgacccttttggttttctcatttgcttgtgccactgcttcatcatcaggaccaacaaaactccaccaccgtgtggagcaattcaggaggaatctgcttgctaatggccttggtagaactcctccaatggggtggaacagttggaatcatttcagctgtcaaattaacgaaaaaatgatcagagaaactgctgatgcccttgtttctactggtctgtccaagcttggatacacttatgtcaatatagatgattgttgggctgaattaaatcgggatgctaagggtaatctggtagcaaaaaattcaacgtttccttctggaatcaaagctcttgcagattatgttcacggcaagggtcttaagcttggaatttattcagatgctgggtattttacttgtagcaaacagatgcctggttctcttggtcatgagtttcaagatgccaagacttttgcatcatggggtattgattatttgaagtatgataactgtaacaatgatggatcaaaaccaactgatagataccctattatgactcgggctttaatgatggctggtcgtccaatcttcttctcactatgtgaatggggagacttacacccagctctatggggtgctaaagtgggaaacagctggagaactaccaatgacattaatgattcatgggaaagcatggtttcaagggcagatatgaatgaagtttatgcagagtatgcaagacctggtggttggaatgatcctgatatgcttgaggtgggaaatggagggatgacaaaaaatgaatatattgttcacttcagtttatgggccctttccaaggctcctcttcttcttggctgtgatgttagaaatataactaaagagaccatggagatagtagctaacaaggaagttattgcagttaaccaagatccacttggtgtacaaggtaaaaaggttaggatggaaggtgatgaagagatttgggcaggtcctctttcagggtacagggtagctgttgtcttgcttaatcgtggcccttggaaaatatcaattacagccaactgggatgacattggtattccaccaaaaagtgctgttgaagctagagacctttgggagcacaagacattgatgagacccttcgtggataaattgactgccacagttgatccacatgggtgtaaaatgtacgtgctgaagccactggcttgagttttctgaaacaaatttttggattgcagcttttggagtaactgatgtcaatatttgtttttcttgctgagtgataacttgtacacgagcttcacttcaataaaccttttcatttgcttctattgatagaagcttgatacgttatttagtgtaccagctcaatggaatcagtcacttagatgatataataaaatgaagctgtttgcatgcaaaaaaaaaaaaaaaaaaaaaaaaaaaaaaaaaaaaaaaaaaaaaaaaaaaaaaaaaaaaaaaaaaaaaaaaaaaaaaaaaaaaaaaactattattgagagggcggccgccgactaataagctc

SEQ ID NO: 59197 - DNA, 484 bp, Glycine max
  Clone ID: PAT_MRT3847_24467C.1
acggctgcgacagaagggacccttggcctactcctgagtagtttagagccattgttgcatggccaagagataggcctattttttaggaggaggcaggtcctgcagatgcttaatgagctgcccaagtagatagaagaagagcaaaggaagatgaagacatggtggatcttgttgattatttcatgggaggaaatggagcttcccagccatgatcttcaaaaatttgtgacttgtctttattttcatttatcgctttcactcccttagttactgttttggatttttgtttacaaacttacgcttgtttattttgactaatttacgtgtgggttgatattctgttagtatatttatagattataactctttttggaaagaatcaaacaaccaatattttttaaacttatttttggattagaacacaacaaaagaattcttttgaaaacattgagaaggaaaaacaatgaaggaatttcctaaaacc

SEQ ID NO: 59198 - DNA, 251 bp, Glycine max
  Clone ID: PAT_MRT3847_24468C.1
tcgacgtgaaaacacagggggcggggtacaggagtgggtgactgcgcgcatggataaagagagaaaaaaggcatgccgaagtcctgtatgtttggatggcaaagacatgtcttaattttgatcccttctcctcaccaggaatcacgttttattgcccatgcgtggaatgaccagctatcgctgtttgctctaagtggaacatttcgcgtatgtattgtctgaaataacatgtcttctactccagaagtgat

SEQ ID NO: 59199 - DNA, 205 bp, Glycine max
  Clone ID: PAT_MRT3847_24469C.1
ttgcattcaattctgatggcgcaacaatactcacatccacggcggcaaactcctccgccatcgcagtacctggaggtcaaccacagaagctcacgcaagatacggcggtttgcggcgggcaccggcgcggggtttgccgtggcgctgatcactcggacgctgaagggaacggtggtggctgcgtcgcacatagaagcagtcaagg

SEQ ID NO: 59200 - DNA, 346 bp, Glycine max
  unsure (1)..(346): unsure at all n locations
  Clone ID: PAT_MRT3847_2446C.1
cggctgcgagaagacgacagaaggggggggttgggagaggagagagagtggtattcanagagcaaagtaaagcagcctattggactttgagtccgggtgttccttggttttnttttcttcaaatatttctctttttttcgctttttctgtcgcttcaccccaaacagatattttggtatccatacacacctcatctctacattttttctttaccagcagaacacaataaacacgttctgttcgtttcgttcccatggacgtctccatttccgccttcttccaaattgcttttcttaactcccaactcttcacacgctttctacccttactcgccttcacatttttt

SEQ ID NO: 59201 - DNA, 118 bp, Glycine max
  unsure (1)..(118): unsure at all n locations
  Clone ID: PAT_MRT3847_24470C.1
ggcgtgtgcgaattaactcgaaaatgattcccnttanttttggancgnatgcagataggcanaganttacgttcagtgttganatcacganaaatncanggctgcnccancggnnaga

SEQ ID NO: 59202 - DNA, 345 bp, Glycine max
  Clone ID: PAT_MRT3847_24471C.1
gttttgaaaactctcttgtaaatctctcaagatttcgaaagagcaggtgatactctaatgccaactttttctgtcccacaagctactgcctcatcttctgaaaacgcggaatgcgctgcatgagctggaattagagctgtctttcgatagagagctagtgttattgaatgtacgaaacatggcatgaccattttggtgagtatgctattcctatgggaaaataacaacacctcttgtaactgtcataatagagcgtgaagtgtgctctattcataaaagaaaataagtttataagttgccataacttatttaggatttgtggcgtgcgccaattaatgagctttt

SEQ ID NO: 59203 - DNA, 479 bp, Glycine max
  Clone ID: PAT_MRT3847_24472C.1
aaggtaaacttccatattgtatataaagggagttacaaaaaaaaggcttaatgagagtttagaccctgcaccaagagagaacaaactggaaactaaaacttaagttagtatataaccctcaccgagtgaagaataattaaatgaaacccgggaacgatgagaatcgaaacacaagttggcacctaatcacttgtaagattaacaatttgaaaagcctaagaacctgagaatattaatgcaacaataatctaaaatctgagttatatgcatgagaaatttagatatgtaaaagcacctaatttagcaaaattcataaatcctaaaagctttgtagtcttaaacgagcccaccaacaagacataattgataccccattccataggcaatagcttccagtgcctttagagccaaatgaaaatagtaatgtatttgaaactcaataaacattgtatggtaataggagacacccacttaaacat

SEQ ID NO: 59204 - DNA, 187 bp, Glycine max
  Clone ID: PAT_MRT3847_24473C.1
cccacgcgtccgcccacgcgtccgaaaagaggggacggtgaagccggggcgagttcacgaaggatggctagggtgcaggctcagcctgccaatgcacatggtctagtggagcaggcataggcataaggcggcagaagggagcaggacaattcagaagatcgaccaaaatgacgagagctcgacggac

SEQ ID NO: 59205 - DNA, 881 bp, Glycine max
  Clone ID: PAT_MRT3847_24474C.1
gttcttgaggtgttagaggattttccttctgtacaaatgccatttgagtggttagtccaattggttccacctctgaaacctagagcattctccatatcttcttctcaatcagctcaccccaatcaagtacacttgactgtgaatgtggtgtcttggacaacaccttacaagaggaaaaaaaaaggactatgctcgtcgtggctagctgcattagatccctgtgatgtaggtatccatgttccaacctggttccataaaggtttacttccgacaccatcaccgtcactccccctcatacttgttggacctggaacaggatgtgcaccttttcgtggatttatagaggaaagagcagtgcaaagtagaactaattccactgctccaattatttttttctttggttgttggaatgaagacggtgactttctgtatcgtgatttttggttgagtcattcacagaacaaaggggtgctttcagaagcaaagggtggcggtttctatgttgctttctctagagaccagccgcagaaggtttatgttcaacataagatgagggagcagagccaaaggatctggaacctattagctgagggggctgcagtttatatagcaggttcttcaactaaaatgcctgcagatgtaacatcagcttttgaggaaattgtatcctacgaaaatgaggtttcagcagaagatgcagttaggtggattagagcattagaaaagtgtggtaaatttcatattgaggcatggtcttagaacaaacaagtcttggactcccgatttttagaccttttgtagtgcaatttttgaccaatgaatatttttttgttataatgattattatcatgtggtttaatggcaattttgttctttcattt

SEQ ID NO: 59206 - DNA, 330 bp, Glycine max
  Clone ID: PAT_MRT3847_24475C.1
tgtcgacatagctgatccatttccctcaaagagggcgaggtggataaagatatttccattgtacagggcactttggggaaagagaggggcattcttttgggggtgaggggcggggtgcagaatgcgaaatttcttaatatgcccaatgcggatgtttccatgtggagaaattttgatggggagcgcgactttgtagatgctaaaaggacggttccctacatgaaaaaggcagggtctttctttatagaatttggaaaagtggctgatgacaccatcaatattgagggttttgcccacacactggggcagatttgggagagtcaggagaaa

SEQ ID NO: 59207 - DNA, 618 bp, Glycine max
  unsure (1)..(618): unsure at all n locations
  Clone ID: PAT_MRT3847_24476C.1
gtttcagtgtaacttcctaaaataaaacacgagacaagggtttcacatatgtggtgcgtgcctcagtgcatgaaagctggaatggcaacaagcagtggcaacaccaacacaaaatctcagaatgtgaatgtgaaagctgttgtgactattgaacaaagtgatggtggacttgtgccaaatctcattaattcagcggtagatgggatcaaagagttagctgggaaaacacttgttttggagcttgttagtgatgagcttgatccaaaaacaaatatagagaagaagacaccaaaaagttcggttcaaaatataggaaaaaaggaggatgagatacggtatgaggctcaatttgagttatccacggattttggaagtgtgggtgctgttacgattgaaaacgagcaacaagaggaggtctttctaaagagtatagttcttcatggcttccctgatattggccacgttcacttcacttgtaattcatggattcaacccaagcatgatggtgccatgaagagagtcttctttactgacaagtcatacctgccatcacaaacgccaagaagattacanagactgagagaagaagagctagttcttctaaaaggaaatggagaa

SEQ ID NO: 59208 - DNA, 767 bp, Glycine max
  unsure (1)..(767): unsure at all n locations
  Clone ID: PAT_MRT3847_24477C.1
gcanganggacatgcgtccgcggacgcgtgggttctatgactattacttttgaaaatattgaggaaatacaggcagccacaacactacaatctgtaattcgtgggtggctggttcggaggcatgctagtggattgcataagtcaaagaaatctcctgaaaatgcaagatctaggcgaaggtcacgtgtgaagatgcctgaagtaaaggatgtgtccagtgagcggggtcagaatctgccttcagctttagcagagctccaaaggcgggttatcaaggctgaagctaccatagagcaaaaggaagaggaaaatgccgaattgaaggagcagctaaaacaatttgagagaaggtggattgaatatgagaaaaggatgaaatcaatggaggagatgtggcaaaagcagatgtcatctttgcaaatgagccttgctgctgctagaaagagccttgcttctgagaatgtcagcggtcaaattgcaagacgtgatgttgcgtcacctttaggctatgattcagaagatgctgcttctgtgggatctcgaactcctcgaacacctcatgcaagcacacctttgaagtattcctagtagtcttactgaagctggagcagggagagatgttaaaagtactttgacttcagtcagcaacctgatgaaggaatttgagcaacgcagacatacctttgatgatgatgcccagactctgggtgaagtttaaaacaggtcaatctgctaacacgaattctgttgaagaaacttcggaactc

SEQ ID NO: 59209 - DNA, 302 bp, Glycine max
  Clone ID: PAT_MRT3847_24478C.1
ggattccagttttaatgactttgatggctggtgctggccgggttcgtcatcatattcggatactctgaacccggaaattaagtcctggggggctgataagatctctcaccccagatatgtggggttcacaccctttctctacacatggaaagacacgtatgaaccccttgtgtctaaagtggccctgaggcgacacctcctagagatgcaacacactgtggaggtgtacaacatcgggagctgcacaccgcctatggatattactaccacatggcgaccgataatgtactactgaagcgtgg

SEQ ID NO: 59210 - DNA, 365 bp, Glycine max
  unsure (1)..(365): unsure at all n locations
  Clone ID: PAT_MRT3847_24479C.1
tcgtccacccgtnagaacagctgctagaagaccatagacgggctggcatgacaacttctttagggggtgcttaatgaaaggccagaggcctctcactcaatgatcctgacaagtactctgcctaaaatcaatcctgagaaaaacctatatgtactatcatcatgatacatgaaacaccacgctatgaaccagataatctatgtctcgtgacctacgtatgcataactctttatatcctcgcatactcataacaatcatattgctctgcaagataagactattgattaattgtacaaaccattggctagttccaatgtgcatattgtttagcaatgtcccaattcatattctatttaaatgagcta

SEQ ID NO: 59211 - DNA, 359 bp, Glycine max
  Clone ID: PAT_MRT3847_2447C.1
ggaaacccaaccgaaaaccaaatctaaagaatgggcttttaaccccccataatgacgcgggaatttcccggaaaaagggggcgacaaaaaaaagggggggccccccaaaactggccccaaaaggggggcaaaaaaaggggggagtttgacaaaaattgcccctggaaaaagcaggggcccccaggggagtcaactaacaaaggggcaatcccgttttccgaggggcccaaaacccaaatgttccccaaaaacacatagggggctccgacaaggggaaaccaacccggggtaatcgcccaaaaggcctttcaacgggcgagaaccaaaatcattttacacccttcccaaatcctgaaaat

SEQ ID NO: 59212 - DNA, 259 bp, Glycine max
  unsure (1)..(259): unsure at all n locations
  Clone ID: PAT_MRT3847_24480C.1
tcgaggatatttgcttcagtctgtgcaagggttgtcacgatgcggggccggctctgtactatgcataatatctcagaaaatcttataccanngtttcagcttaccagtaatatggtggcgccgctcttagtngnaattaatgtgtcgttgcgtgcccagtttcgctcttgagtgatggttcnncattaaatgcccagtgcnnngcttctgttggagtgaagtcttaaaatcatggatacctnnctgggagcccgctggc

SEQ ID NO: 59213 - DNA, 453 bp, Glycine max
  Clone ID: PAT_MRT3847_24481C.1
gaaaggtttttgacaataattggagggttcaggttcctcgaattacctgggtgtgtttttctttgtaattttgtcatcaccagtgaatacactttctttgttacattctttctctttctttttcatcataccatgttccagttctatcacttttcaaaagtattgttgcaaaccctttagttcctatgatatatccacatgccatggagattctcatttgaactgtttaagaatgtgggaaaattgggtaatgtcagtgccgtgataagttagagaaacaaaatgtcatatctgtccgcaatagatttacctctggattattgcactgttgtttttaaaacacaaccctctccctcatctctgcaagagtccgtctaggcattttcaaatttcaaatataaggatgtattgacattttcaaaaatatttcaatttcaatttatttcttgctca

SEQ ID NO: 59214 - DNA, 1206 bp, Glycine max
  Clone ID: PAT_MRT3847_24482C.1
ctcgcgttccctgtggcccatttacactataaatagtacgtgcgggacgatgcgatgaagaagcgtggtttctgattgaaattccacgcgctgctcttcctgactccaaaatttccatggatttgaatcggtggtgttcttccaccaccaacccctactgtctcctcttccaagcgctctctctcattccaatctggcactacctactcttcttctccttcgtcttcctctccttcttctaccgttttctggagctccatttcctccaagacctcttctccctcttctccggctcctccgtcaccctaacctaccatcacggttcccaattctacgacgctgtggtttccaaatgcaggattctccacggcacctacctcgccacgccctggctctccagccctcatctccagaccgtgtttctcaacttcttcggcagacctcccctcttcaaatacagaagacaactgtttactactcctgatggcggaaccgttgctttggactggctgttgagttctgacgtttctgctggtgctatccatatggaagatgttgtttctacagatgaatccactcctattgttgtagtaattcctggtctaactagtgactcttcatctgcctatctcaaacatcttgcatatcatacagcaaaatgtggatggaaagttgttgtcagtaatcaccgaggacttggaggtgtttcaatcacgtctgattgtttctacaatgctggatggactgaggatgtccgcacagtggttaattatctacacaaagagaaccccagggcacctttgtttgttgttgggactagcattggagctaatattctgataaaatatcttggtgaggatggtgagaatattcctgtagctggagctgtggctgtttgctctccttgggaccttttgataggagacagatttataacccgtaggcatgtgcagaagttttatgataaagcacttgcaattggacttcaaggttatgcaaaattacatcagcctcatttttctcgccttgctaattgggaagggattgaaaagtcaatttccattcgagattttgatcatcatgccacccgcattgttgggaagtatgagactgttgacacgtactatagacgctgcagcagttctacttatgtgcaatctgtttcgattccacttctctgtattagtgctctggatgatccagtct

SEQ ID NO: 59215 - DNA, 270 bp, Glycine max
  Clone ID: PAT_MRT3847_24483C.1
atggagaagagattgaaacctccacttgtactgtcttcatacgattcctttttctccctccacgaatattatctcgcaaatcccaacgacagctctgggtttctgcgggaaagaaaaaggctacaatgcgaagggtttttctctcagttcagacatgatatcgaaattcccaacggtgagaatgctcggaattgtgttgcgaacatgatactaaaatttcacgacgatccaatggtgaacgggttcgagatcgtcatttttctgagactg

SEQ ID NO: 59216 - DNA, 140 bp, Glycine max
  Clone ID: PAT_MRT3847_24484C.1
gtggacaagagcgtcaactctttcaacatcgccatctttgtgctcaacttcctcaactccatctgtcttttcatcttcaccaatgttctgggtatgcccaggatgggtccttcagtcaccggcctcgtcctctttgtcgc

SEQ ID NO: 59217 - DNA, 486 bp, Glycine max
  unsure (1)..(486): unsure at all n locations
  Clone ID: PAT_MRT3847_24485C.1
actaataaggaataaaaaaaattcaaatattaattaaaagtatttttaaaacattttttttaaacaagtctttcaaaggggaaaaaggctcacattcattttcttctacatcatattcaaacttgtccaaataaataataaagtattctcgactcaacaaggtcttcatacaattaatatagaacctatatcctaatgtcacatcctatcagagcgttgtgttcccgtgtcctctagcatgaggttcttcatagtcatccacctattcatcgacggagaagagattgaaacctccacttgtgctgtcttcatgcgattcctttttctccctccacgaatattatctcgcanatcccaacggtgtaagtgtgcggaattgaatttcgaacaacatatccaaatttcacaataatccaacggttaactaaaccgggatcgtagttttaccaagacagctctgggtttctgcgggaaagaaaaaggcta

SEQ ID NO: 59218 - DNA, 1811 bp, Glycine max
  unsure (1)..(1811): unsure at all n locations
  Clone ID: PAT_MRT3847_24486C.1
cggctcgagcttgctaattgatgtgttattatatcttgatcgaagtgtgggattcttgtgtaatgtgattgataattgaaaagtgaattttgaatgacgaagtggtgaagttacgtgagctatgtttaagcaagtggtatctcatttatataatatgtatatttaattgtcttgtttctctattagctaggaatgtaataactcactcccagtttgctgtttgtgtttggatcctgtgatgatcttgaacttgcgttcggngaagcagatgaataggtggatgactatgaagaacctcatgctagaggacacgggaacaccacgctctgataggatgtgacatccacgcgtccgttctatattaattgtatgaagcttagacgaccttgttgagtcgagaatactttattatttatttggacaagtttaaatatgatgtagaagaaaataaatgtgagcctttttcccctttgaaagacttgtttaaaaaaaatgttttaaaaatacttttaattaatatttgaattttttttaaaaaaaaaaaaaaaaaaaaaaaaaaaaaaaaaaaaaaaaaaaaaaaaaaaaaaaaaaaaaaaaaaaaaaaaaaaaaaaaaaaaaaaaaaaaaaaaaaaaaaaaaaaaaaaaaaaaaaaaaaaaaaaaaaaaaaaaaaggggggggccctttttaagggaccaaattttaggtccggaattccgaaagtcgacctttttgtccgcaacactacaaaactgtagctgagtggagttcctgctgcctgctgcctgctgcagggaactcatagtatatcatttttgcattgcacaaatagtggctgaatagcaaccaaatagtggaggatagcaccattattccctgtctacatccaaacctttcatttttctgccaaactttgatagcccacagatatcccagccaaactccccccttttctggccaagctcgcgtccaacccctgttttgcagttcaagaaacagaatagagataacaggcctgagctgctgcaatgtaactgtggcatatacgagatgtctttgttttttcatgttcgtattgctcgaattttcaatacatatggaccccgcatgtgtttggatgatgggcgtgtcgttagcaattttgttgcacaggctattcgtaaacaaccattgactgtatatggtgatgggaagcaaacaagaagtttccaatatgtctctgatttggttaatgggctggtggctttgatggaaagcgaacatgtgggacctttcaacctgggtaaccctggggagtttaccatgttagagcttgctcaggttgtaaaagaaacaattgattcaagtgctacaatagaatacaaaccaaatactgctgatgatccacacatgaggaagccagatattagcaaagcgaaggaactgctgaactgggagccaaaaatcccactgagagaagggttgcctcttatggttaatgatttccgaaatcggattctgaatgaagacgaaggaaaagggatgaaataagcataatagcaaaccctgtatgtatatggagatgagcctgtctccttcattttttgttctaatttgcggtcagcatcaacagaaaaattctggtaacacgtcaagatatatctactgctggccttttacatttaatcatttatgcttgcttagcacacaattgatgtatttgttaaattttgaaagaattcttttcagtagtttttcttgtctattgtatcgataaaagttgtagtatttgatatttggattctggtatcatgagaatatatttttttagaat

SEQ ID NO: 59219 - DNA, 1947 bp, Glycine max
  Clone ID: PAT_MRT3847_24487C.1
atatatctaatcgttgctcttgcatgagaggaacagcaactagacgcacactatacacaagaacttcaatttatatgcacgaggaggggtactaagtgtaacatcccatttttttcataaataaatttaataattgtttttagtaaaaataataaaaataaataaatagagtaaataataggtcgtaaatgctcctaactataaatagcgctaggtttttcagattgattcctcagcctcctctgtctctcattttcgtttttccccttctcctctcaaaaccctttctttttcccgccgcccacaaaacctgtctcagaaaaatgatgatctcggactcattcaccgttggattgtcgtgaaatttgagcaccacgttcgcaacccaatttcgagaattctcaccgttgggaattgaaaaatcatgtctgggcttagaggaaaacccttcgcattgtaactttttatttttctgcaaaaacccaaaactgtctcggtaaaactacgatcccgatttctttaaccgttggattttaatgaaatttggatatgttgttcgaaattcaattgcgcacactctcaccgttgagatttgcgagataatatttgtggaggaagaaaaaggaatcgcatgaaaacagtacaagtggatgcttcaatctcttcttcgtctctctgatgtttgggaattctatcggaactatcggaggaataactggaggaatctcagggaaccgctagagatgtcgctatcaccatcgaaagacacgtgagtccgctcagaggggagcagatgaataggtggatgactatgaagaacatcatgctagaggacatgggaacacgaagatctcagaaggtatgacattaggatatatgttctatattaattgtatgaagcttagacgaccttgttgagtcgagaagactttattatttatttggacaagtttaaatatgatgtaaaagaaaatgaatgtgaacatttttcccctttgaaagacttgtaaaaaaatgttttaaaaatacttttaattaatatttgaattttttattccttattagtatatatgtgaggggtagaaggtgtcatagggaccaacaaagaagtgatatttggtagcactgtcagagaaaggttgcgtcgcgtccgctgactcgccgtgtttttaagttccagctctcttttttcgtaattttttatgttttgtgttgaattctgtgatcctttgttggcttacaagacgaatgtgatgggcacgcttaacatgcttggccttgcgaagagaattggggctaggtttctgcttactagtactagtgaggtttacggtgatccgttggagcatcctcagaaagagacttactggggaaatgtgaatccaattggtgagaggagctgttacgatgaagggaaaaggactgcggagacgttggccatggattatcatcggggtgctggtgttgaggttcgtattgctcgaattttcaacacatatggaccccgcatgtgtttggatgatgggcaggttcctatttaggaaccagtacaggctattagcgcaatatgttgtgcgtgcttatgacacgagtgtgaggtcgtgggtattgtataattcactagcagtgtctgtgtgctaaaatgattttaggggctggacctgaatcaggagggagaggccctgatagactcttcggagtgtacgccttgggggtcatcgggtttgagtgcttctttaagcctatgttgatcccatatggttggagcattctcgcaaaacatcgtgaccctgactggtctccctatgatcttacttagtgagagtgacctgacaaacccattgtgtggtgtgtcttgttatgtactcctaagcgccgcagggtggttattcactgacatggtaccacattgcatgtaggcttgagtcttagcataattgtctcatg

SEQ ID NO: 59220 - DNA, 1271 bp, Glycine max
  unsure (1)..(1271): unsure at all n locations
  Clone ID: PAT_MRT3847_24488C.1
gagaaaatgtaggtttcctatttaggagccagtgttaaatcatagtgcgattgtgttgaacgtgtttaaaacacgagtgtaaggtcgtgggtattgtataattcatgagcagtgtctacatgcaaaaatgattttaggggttggacctgaatcaggagggagaggccctgacggactcttcggagtgtaggccttgggggtcaccgggtttgagtgctcctttaagcctatattgatcccatatggttggagcattctcgcaaaacatcgtgaccctgactggtctccctatgatcttacttagtgagagtgacctgacaaacccatagtgtggtgtgtcttgttatgtactcctaagcgccccagggtggtttttcactgacatggtactacattacatataggcttgagtcttagcataactgtcccatgcgcttgctaattgtttattatgaaattgaggtgttattatgtcttgattagagtgtgtgattcttgtgtaatgtgattgatgattgaaaagtgtgattgatggatgaaaagtgaaccttgaatgaaaaagtggtggaattacatgaattacgtgtaagtaagttttatttggtttatatgatatgtatatctaattgtcttgcttctctattagctaggaatgtgataactcactccccgtgtgttgtttgtgtttggatcttgtgatgatcttgaactttgtgttcgggggagcagatgactaggtgaattgctttaaggaatcttgtgctgaaagatgtcgggacacaatgctctgatacgatatgacattggggcatatgtttttatattaattgcatgatgttagtctattttattttacctcactgatttaacaaattttttttataaattttgatggccttattttgagccgaatatgtttttaataagttttaattaatcatagtgaagtgaatgtgaaccttttatccacgtgaatttgtttaccgatatttttatatattttatttatttatatatatgtcggggtagaaggtgtcacagtactaatgattgacaaggacccaataaggcctaagtttatcaccaacaattgagtatggccaataagacccaagtgtatcactaataattgaccaagacttaataagaaccgagcgaaacacttatgattgactaaggcccaatgtagtactaatgattcatcaaggccaagtttaacactgataattgattatgaccccgatagacctaagtgncacatttattattga

SEQ ID NO: 59221 - DNA, 283 bp, Glycine max
  Clone ID: PAT_MRT3847_24489C.1
ctcacgcatccgaatcattccacttaaaagtttacaaacatatacttatataccctttacctgttcttttttaaccttatctctcactaaaaaacatatccaattataatccattcactcaatatactatcggtatctatatagggcgaatcatccaacatacccaatcttaaattcacatacctaccacctattcattcttctatatggtcacctatatacaaaaaatatcacttcattcaacatcaaacccacttcaaaaccctatcattacccaacttaa

SEQ ID NO: 59222 - DNA, 573 bp, Glycine max
  Clone ID: PAT_MRT3847_2448C.1
atttgccgtgctacatgtgtggagtgccgcctgcttggggggggggggggggagaggaaataggttaggggactaaaattaggcgaaattagtagtcgggagaggcgggccactaggatgtttaaacacccgcgtatgggaagagttggggtgctgttgctgattaccatgactgataggttgacacttcacgcaggtaccgcacgtagctaacgggtgtacattaccacaccaattgttgtcagcgataccacagctaatgtcatcgccacggttgatatggctggtatgtttgtgagagcttgtactggttacatggggcctggtggtttgtacaatgctgaattcaagggtaggtgtgtgtacgtcagtggcaacgctagggagactaccatggaaataagaggtaagtaatggctataaccaacttgcagaacggcaacgcgccgcgagcaaacgtacgccagctatgggtttagtttgtggaggggcgaacaacctggcaggagagctagggtctgttgtggtaagacgatagcggctacagtacgcgagcagcagacgcctcaagta

SEQ ID NO: 59223 - DNA, 935 bp, Glycine max
  Clone ID: PAT_MRT3847_24490C.1
gttccctctcacactgttctttatcttttttctaggcactacttcagttctgctactgtcttctgctttgtccaattatagtcattttgaacagtgatgaagcaagggtcagcaaacaaccaacagctcttttgggcaagagtggttatgcgcaaatggcttaacatggctagtaacgagcctgattacaccgctgaccctgatgatgataatgaggatgaccctgaaagtgactcagataatgaaggtgagtgtttacaatgatgtttctaaatttctattgttatgagtggggtttgtgtgtgttcatttgaagattggaaaaattgatcccagcatgttgttgaattttattagaatatggaaattgagcattatggttagtgccaaaaatgatatgaaaatttagaattgagactctatcggctcgatggaaaacttccacctgatgacctagatattgatgattggttaggcattaacgagccagctgatatctatgttcttggtcttcaggagattgtaccattaaatcctggtaacatttttggtgctgaagacactcggccagtactgaaatgggaaaacattattcgagatacactgaatagagctagaccaaaagcaccaaagatgaaatccttcagtgatcctccatcaccatcaaaatttaagccatcagatgatgcgccagatatagaacaagaaatattacttgaaagtgatggtgatattggtgaggaagtccatcctttggatgaagaatacaatgtttatgaaggaggcgcagataaaccaatcacagatgaagaagccctgaatactaatttgcaggcttcagttgctgcttgatattgccaacacaggagagccagttggcaatgattacagagacagttttctgatggaaagaggttgaataggctgaattgctt

SEQ ID NO: 59224 - DNA, 259 bp, Glycine max
  Clone ID: PAT_MRT3847_24491C.1
aaaacccggccgcaccaacccttccttttattaaaacccttttatttacttttttttttaaaaaaaaagacttcccaacatagcgcgcgggttttttcataaaaacctcccaacctttaccttcctcccaaaaaacaaacctatccctaattttcccttttttaatttttttcttaaccaaatcctatttctttcctttttcatttattcctaatcgtttccctcccaaattcttacaacttcttaccttaatcattta

SEQ ID NO: 59225 - DNA, 1072 bp, Glycine max
  unsure (1)..(1072): unsure at all n locations
  Clone ID: PAT_MRT3847_24492C.1
cagtgttatcttgagaaaagtgtaaatgcgcagtgttaaagagaaagtgtaggtttcttattttgganccagtgttaaagagaaagtgtaggtttcctatttatgaactagtgttaaattgtagcgcaatatgttatacgtgtttaacacacgagtgtgaggtcatgggtattgtataattcacgagtagtgtctgtatgctaaaatgattttaggggttggacctaaattaggagggaaaggccctgacagactcttcagagtgtaggccttgggggtcaccgggtttgagtgctcctttaagcctatgttgatccgatatggttggagcattctcgcaaaacatcgtgaccctgactggtctccctatgatcttagttagtgagagtgacctgacaaacccattgtatggtgtgtcttgttatgtactcctaagcgcccagggtgatttttcattgacatggtaccacattgcatataggcttgagtctcagcataactatctcatgcgcttgctaattgtttattatgaaattgatgtgttattatgtcttgatcagagcatgtgattctagtgtaatgtgattagattgaaaagtgtgaaaagtgaactttgaatgacaaagtggtgaattacgtgaattacgtgtaagtaaattttatttagtgactcggggcgacccgtctagttgtcttgtttctctattagttaggaatgtgataactcactccccgtgtgttgtttgtgtttggatcctgtgatgatcttgaactttgtgttcgggggagcagacgactaggtgaattgatttaaggacccttttgctgaaggacgtcgagacacaacgctctgataggatgtggcattggggtatagggttttatattaattgtatgaagtcttaaacggtcttgcttaaaccgagataactttattagaaatttggacaagtttgaatatgatgtagaagaaagtgaatgtgagccttttatccttttgaaaaacttgtatttacaaatgtaaaaaaaaaatactattaattaatatttggatttttaaacctttatcagt

SEQ ID NO: 59226 - DNA, 1444 bp, Glycine max
  Clone ID: PAT_MRT3847_24493C.1
gctactgtttgtttgcgcttttgttccctctcacactgttctttttgtttttctaggcactactacagttctgatactgtcttctgctttgtccaattattgccattttaaacagtgatgaagcaagggtcagcaaacaaccaacagctcttgtgggcaagagtggttatgcgcaaatggcttaacatggccagtaacgagcctgattacaccgctgaccctgatgatgataatgaggaggaccctgaaagtgactcagataatgaagagtggggcaaacggacacggtttggggacagcagagaggaacaagctccaattgagtcaaatgaatttcttccaaggctaaggaggcaaaagtcattaacttctaggtctcagtatataaacaagaaggaactgagagtatgtgttggaacgtggaatgttggaggaaaacttccacctgatgacctagatattgatgattggttaggcattaacgagccagctgatatctatgttcttggcttcaggagattggccattaaatcctgggaacatttttggtgctgaagacactcggccagtactgaaatgggaaaacattattcgagatacactgaatagagctagaccaaaagcaccaaagatgaaatccttcagtgatcctccatcaccatggcaatttaatatatgctggccttggaacgcattatgtgccatctggaaagcccaccaaaccagtctcaaaaaacgacaatctcgaacccgttcaccgttggatcgtcgtgaaatttgagtatcatgttcgcaacacaattacgagcattctcaccgttgggaatttcgatatcatgtctgaactgagagaaacacccttcgcattgtagcctttttctttcccgcagaaacccagagctgtcttggtaaaactacgatctcggtttcgttaaccgttggattattgtgaaatttggatatgttgttcgaaattcaatttcgcacgcttccaccgttggaatttgcgagataatattcgtggagggagaaaaaggaatcgcatgaagacagtataagtggaggtttcaatctcttctccgtctttttgacgtttgggaattctatcggagcagtcggaggaataacggaaagaatttcagggaaccactagagatgttgctatccctggctgaagacacgtgagtccgctcagagatgaataggtggatgactatgaagaacctcatgctagaggacacgggaacaccacgctctgataggatgtgacattaggatataggttctatattaattgtatgagacttatatgattttctttgagtcgagatgactttattatttatttggacaagtttgaatatgatgtagaagaaagtgaatgtgagccttttatccatttgaaaaggttgtatttaaaaatgttttaaaaatacttttaatt

SEQ ID NO: 59227 - DNA, 470 bp, Glycine max
  Clone ID: PAT_MRT3847_24494C.1
aggcatataatataagaagtcgggaaattttgggccttctaattgttacatgaacacaggaacgggtcttagtttccaattggaaaaaatacagaaaaagtatccgccctggacaaatgataacactggatactttttccatcactttgatcaacaacataaaaaacagcaagatcaagggtgaaactagaaggtaaagcatcacaattatctcataacttaatattttttttcaagggggaacccttgggggggtctgtcactctggcttttttttaccacacaaaaatgcaaaaaaaaaaaaaaaaaaacactcaagggggggagcctgggttttcctgcggctttggggactcttacatgggggaaaacttattgggatacggacttttctgaaaacaataaccttgggttctattaacgcgccctccccctgatctcgccccattaagggtataattctctttaac

SEQ ID NO: 59228 - DNA, 909 bp, Glycine max
  Clone ID: PAT_MRT3847_24495C.1
ttgtggtacgcgtggggtgccccgcgcgcggtatccaattaccgacaataacaacattgggtggtaacaaaaacaaaatccgtggttgtgcgtttttaaccttaattaataacaacaggatcatgaaacagctaaacgaaagtacactgccgttctagctgctaattaatctcatattcagaggcactacttcagttctgctactgtcttctgctttgtccaattatagtcattttgaacagtgatgaagcaagggtcagcaaacaaccaacagctcttttgggcaagagtggttatgcgcaaatggcttaacatggctagtaacgagcctgattacaccgctgaccctgatgatgataatgaggatgaccctgaaagtgactcagataatgaagagttgggaaaacggacacggtttggggacagcagagaggaacaagctccaattgagtcaaatgaatttcttccaaggttaaggaggcaaaagtcattaacttctaggtctcagtatataaacaaaaaggaactaagagtttgtgttggaacatggaatgttggaggaaagcttccatctgatgacctagatattgatgattggttaggcattaacgagccagctgatatctatgttcttggtcttcaggagattgtaccattaaatcctggtaacatttttggtgctgaagacactcggccggtaccgaaatgggaaaacattattcgagatacactgaatagagttagaccaaaagcaccaaagatgaaatccttcagcgatcccccatcaccatcaaaatttaagccatcagatgatgcgccagacatagaagaagaaatattacttgaaagtgatggtgatattggtgaggaagtccatccgttggatgaagacacaatgtttatgatgga

SEQ ID NO: 59229 - DNA, 302 bp, Glycine max
  Clone ID: PAT_MRT3847_24496C.1
gacacatccagtcatgacggggtagtcgctgtaattccgcatagcactctttatctctttctccgccgcaaactagtcgttctacaggatcgccactgtagtacccttgaattaaacatcagagcacttcaatgatgtgcttggatgccaattgacggcacctcaagcaacaacgacgtcactgccaacgccgaggggtccgtgatgagcctcatcatgaagcacatccgcgttgtccgaactaggctgatacgcatccacgccatggcagatagcgtttcccagggcttgcctctgatcaa

SEQ ID NO: 59230 - DNA, 630 bp, Glycine max
  Clone ID: PAT_MRT3847_24497C.1
ccttcgcgtccgcccacgcgtccgaaaacgcctccgtcgtccctctcactcagccaccaccgtctcgctcaattccgagttggctattaaacaaaggttgggttgtgaaaaatgagtttgatatcccaaaacgctagcactaaaaatgtggtcaataagagcaagagggaggttgaagatgatgttgagaatagtgatactctgaaagtgaagaagaagaagaaatatgacgagggggaacaattggcaatggaacaagtgaaagagatgaagaagcttgagaactttttgtttggttctttatattccccacttgagtttggaaaggaggaggatgaagttgaacctccgaaggctgctgaaaaggtttctgatttgttcttcactgaccgttctgcggatagcgttctcacggtttaccgggaagaagatgctgacttgtctgagggaagtcatgatgatgatgaccgcgctttgcagaagaaacctgtgtgggtggatgatgaagaagaaaatgccacagtgaacatagccaaggttaacagattaaggaagttgaggaaggtagaggatgaggatttgatctcgggttcagagtatgtgtcaagattgcggctcagcatgttaagc

SEQ ID NO: 59231 - DNA, 160 bp, Glycine max
  Clone ID: PAT_MRT3847_24498C.1
ttaagggactctcttaacatgcaatcaacacgtacaattagaaaatttttaacggccattaaaccattcctctctctaatactattgcttcctaccttattgcctctcttttccttctccaaaattcaaatccctatcaatcgtctcacatacaaacgca

SEQ ID NO: 59232 - DNA, 1335 bp, Glycine max
  Clone ID: PAT_MRT3847_24499C.1
aattccaaaagacgaaacaaaaaaatcacaaaccaagcttaattacccaagagagaaattaagaagctagtttgcttgtttttcggtgaactcagggagtcagatagataatactgatccctcgagatattgagattcatctaagagattaatatcatcctacccaaccacaagcttagattgaaacaagatggaagtggtggtacaaagtcctagtagtccaaccatggataatttcgattttggtggcaacatgggttcgatctatcaaagtgttccttcttcaccaaaaggttttggtaattactacctaagcgcacccgcgagtccatctaggatgtctgaattattcagcgaatttgaatattattcttcagcttcaccctcttcattcgaagccgccaacataattgatgatgatgacgacgacgaatacgtgaaccgcgatctatcattttattcgtctcgctccgcctccgagctcttctatggctgcaaagtcaagctcttgaacgagtcatcacgtgcgacttctgttgctgaacaaaattctggcagagacacttatggagctgcttcttaaagaggcagagaaagagagacgtcttcgaactcgggtgttcgtagggtgtcttcatcatcttctcgtcgtagggtgacacgatcacactctccttatagaaaatcatgggaagttgaacaacaacaacaacaacaacctcaacctcggagcagcaaagaggaatcaagtgcaagtgttttgtcctcgagtacttcttccaagggttcgaagaggtggtggctgaaggactttttgttgttccgtagtgcctccgaagggagaggttcaagcaaagatgcattgaagaagtactacaagaagaatagtaacgaagaggttaaagggtcgtcgagttttagatcctcggattcgtcgagatcaagaaaggaaccgctttcggcgcatgagttgcactacgccatgaagagacaagagtccgaggatatgaagaagagaaccttcttgccttacagacaagggattctgggaaggttggctggtttcggaatctagttttaattaccagatcatggtgatgatgatgaggtttccttgatgaattttcgtgtatacccggttgttgtttttgttttttagtgaaaaagaaaatgttgtattcttttgttaaattgtaatttctctcaagtgggtttaagctgtgtatgttgacccaatcatttgtcctttatgtaaaggccaggtaattatatattatgatgcgagttgcaatttgcgaatcaacgcggtcaattttaaactatacatcatttact

SEQ ID NO: 59233 - DNA, 815 bp, Glycine max
  Clone ID: PAT_MRT3847_2449C.1
tcgcgatctagaatcgtcaataatcgtggcgtaattgcggcaaatgagcaatagaaaaatcattctgcagcaattaaaatttgtttttaacgaaaaacatttcataaattttatagaattttcaactttcacgtaaccatcttagttcgaaacaaactttaaatgataaaaaaaagaaccgccctactctatcataattaatttaagtgccgtattcaaaatatgaccaagttagttttaaactcaatattagttaatttagttgaccatgattttttttttttttgatgcatgctttcactttcacagataaaagattgtcacggtcgaggaagatcaaggtttggaccatccaactacaactcattgaatgtgaataagtgtgggagttgaattagttcaagggcaacctcatgcaagagactcccattacgagagtagctatacatgtacaaaaaattctttagaattttaatttgtaataattacacgaaaacgatttttcttgagtgtaaactcatgacattctcaaataaaaattaaagacaaatctgtagaagtatcaaaaaaattcatttaagaaactgattttttctaataatttttttttatcagttcatataccatttaaaaatttaacctactgatcttatatttaaaagatgaagttatttatcacattttaataattactttgaatgattgaattagttgagttgatgaatgattgagttagttggaactgagaaaacaatgcaaacatgtgcaacatcaacaacaactaattaagtggagtgatgatgagagggactcac

SEQ ID NO: 59234 - DNA, 369 bp, Glycine max
  Clone ID: PAT_MRT3847_244C.1
gatttgttgagtgctcatagctcaaactgacattatcacatggatcttgctaaaacaagacttcacacccatgcttgtgaaagatggccaaattgctagtcttggaacccttacaaaagatatatggtttaaggatggacccagatcctcttatatggggctgattccttcttttctcttgtattataccttatgccagcgtcaatattgctgcatatcaaaccttgaccgatatgcaccaatcactatctggttcataatggtaaacctggtcctgtcatacaatttagatttggaactgcatttagagactcttgtactacatgtagctaccccctgcactaccgattaactagaatgcatgctcaa

SEQ ID NO: 59235 - DNA, 824 bp, Glycine max
  Clone ID: PAT_MRT3847_24500C.1
cccacgcgtccgaaaacccttggggcagtttttctctcctctcttaaacctaaaaccgtaaaacgtctccgtcgtccctctcactcagccaccaccgtctcgctcaattccgagttggctattaaacaaaggttgggttgtgaaaaatgagtttgatatcccaaaacgctagcactaaaaatgtggtcaataagagcaagagggaggttgaagatgatgttgagaatagtgatactctgaaagtgaagaagaagaagaaatatgacgagggggaacaattggcaatggaacaagtgaaagagatgaagaagaaaatgccacagtgaacatagccaaggttaacagattaaggaagttgaggaagggagaggatgaggatttgatctcgggttcagagtacgtgtcaagattgagggctcagcatgttaagcttaacccaggaactgaatgggcacgggctgattctagaatagatagatcctctgatgatgagttgacggatgatgaaaacgaagctgttttgagccatggttatgaggatgtgaatgatgttctcaggacaaatgaagacctggttgtgaagagtggcacaaaattgttgccgggacatcttgaatactcgagacttgtggatgttgagaactttttgtttggttctttatattccccacttgagtttggaaaggaggaggatgaagctgaacctccgaaggctgctgaaaagggttctgatttgttcttcactgaccgttctgcggatagcgttctcacggtttaccgggaagaagatgctgacttgtctgagggaatcatgatgatgatga

SEQ ID NO: 59236 - DNA, 284 bp, Glycine max
  Clone ID: PAT_MRT3847_24501C.1
attttaggtagaaaattatctgatttaaatacaaacatatttttctcacattgagtaatatgcataatgtagttccaaatgtatttcattactatagtcacaatatccaactaaaaattacggtatctagaattgtaccaaccaaaatctcgtattggcagatcttgacaggctggacctgcaagatgtggcttgaattttaaccatttattacataatctctagtgatcatgcatctagttatcataagaaataatttaaaaggttttgttgctgaaagcagt

SEQ ID NO: 59237 - DNA, 353 bp, Glycine max
  Clone ID: PAT_MRT3847_24502C.1
caatggaatccattttattcatatataaacatccttttcatctgaattctagacacattcttagactctatttttaacaagttacacgttaaaagcttacgaggtgctaagagcaatcaatgtcctgctacccacttgctgtagaaaaagagaacatccgtgcttgaatagcctgaaccaaaaggactgctgacctcccactgaatgtcatggaagaaaatacgatgccctggtatcgagcttgaaacgagtctactaacctcgaagctgaactttagagtatctggcctgaacctaacttaatgtttcaggaaatcgatggaatccattttaaatagataggacccgttctt

SEQ ID NO: 59238 - DNA, 390 bp, Glycine max
  Clone ID: PAT_MRT3847_24503C.1
caggaccggaccggaattgtttggtcttcccacgcgtttgttaaaacccaccacggaaggaaacagtggagggattcttgaagccagcacagaataacacgcatgaaccaacacaaatgattgaggatcatcggttgttgccaaggctggaaatcacaaacaaagtgttggttaccatgttactggtaacaaaggaagacagcgagatgctccattgataccatatgttgagccagtttaaccagctcaaagagctgaaggctactttgacttcttccctgtggaggttgattgggaacaaggagtcgctcacattggtgaattgaaatctggtgtctattgtccactgtctacaaaaactaaaatggtggaaactcccaaggaatggct

SEQ ID NO: 59239 - DNA, 250 bp, Glycine max
  Clone ID: PAT_MRT3847_24504C.1
aatggggagaaacattacttgttactggggttaccgggggaaaccttgcagagttccaatattcaaaggactgaaacaggcccctttgggtttccattttttttgcaaacacaatccaccttaaaattttttcacccagggactcagggctcaacctcctatttacattaattttcccggccctaaaggacgggccggttaaacattgtactaaaagagcatggaacgaccttttcccaaaacataaatt

SEQ ID NO: 59240 - DNA, 244 bp, Glycine max
  Clone ID: PAT_MRT3847_24505C.1
gggggtattaaaaaggccctgggtctctaaaataccaggcaccaagcctctgatttctacgagcatggacgaatccaaaaaatggaatacaactaaaacattataaatggcaccaagaaaaaaaggccgcgcctaattcacaaaaggacaaggctagcaaagtccctagccaatcgcgacctaaggaaagcaaggctacgaaacataacgaaccctgaattaccaagaaagcccaaagcgaggg

SEQ ID NO: 59241 - DNA, 572 bp, Glycine max
  Clone ID: PAT_MRT3847_24506C.1
tttgacattaaagcattgaccgatgcaatactaaataaaagagaaagaaatctactatcttaagagttatatttaatgagaactttttaagaatagaataaaagcatttttattaacttgttctcttttttaatatatttttaaaaattaataatagttataaataatcttatatcataatataaataattcatcataaatctaaaatataatttatatatttaaaaaattatttattaaaatttaattataatataatttatatgttaaaaaatattattttatataaactataaaataaatatgtgttctatatattgtagaggttaaaatactattttacatcaaattcagatgttgacctaatttatgtatttaagcatcatatggatttaaaattacatcaaattctactggtttgttttccccccgatatactcagtacttgtcacactcggctatcatgaaaggagtgcacaccgatttggacttacacgtatactacaatttatcagtcctatatcactttttcgcaatgattgaatccatattcattaattaaactttaaaca

SEQ ID NO: 59242 - DNA, 453 bp, Glycine max
  Clone ID: PAT_MRT3847_24507C.1
ataacttgcctaataaagcttaagggtaggggtacaccacaccagtaatagatcctgattctgatttgtgggtccacctaacccgacacacagaacttgtggccgtctcttttggtggttggccacaccatcccccctaccccaaccccaacgactacacacccaaattacccatccccttaattgtggatgtgaactaatgcatcaatctctctctctcacacacacactcatattacttactgcactacagaagtattctagttacattacaattttagtgacccttttacttcacacgaaacaaaaggaaaatgtgagaagggcaaaaatgccagtccaggacaaatgcttcatccaccaaaacattaccagcagaaatccaaaatcaacccttttctttttcttcccttcaagttatttttcctccaccaagttaaaacaaaaaccact

SEQ ID NO: 59243 - DNA, 1044 bp, Glycine max
  Clone ID: PAT_MRT3847_24508C.1
acaaaaaaattaataggtgaatcaatagagtccaaaatttacagtgagaaaagacagagactaggttgcatgtttttgtctaatagcttcacgtgacacccccgaatacacattagaaacaaaccgggcatgcacgcatcaaagaaacgtccctcgcaaatcgcaatcaacaagtggacccttcaatcacatgcagaataaaatgagaacgatcacgagcacaatccaaaacaacctcaacggcgacgatgaacccttgctcgtttcatatcgcagcgaatcaacggccaagggcatgttctcctggtccggactacacgtcgattcgtgtggatgcgcactgtacatcacagcccgcaacaccgccgaaacagtgggtatgtacgccgttttgttccgccctagaagccacgtcagcgccatcagttggcagtcccggttaaacatcttcttcgccctctcactctcactctccttcttgttattcccttttatcttttgtagggcgatgaggcattgggtgcagccagcgtaggaagcgttgcggcaattcttttccaagttgcgaacgatggcggtgggggtggcgttgtgggtgccgccggaggacgcgttgcgaagcgcggtggtgacgttgaaagcgttggggcaggtcagggaggttatgtggtggagcctgatgccacagaagcagagaatggcgtcacaggtggcgttgggctgtgggattcggatgctgcggttgcggagcgagtcttggagagagttgacgcatttttgggagtcgtcggcgggcatcatggggaggtcgccggaggggggaggcgacgatgcagcggagacttcgagggcggtgcgggcgtgggcggcgaagagccaggcggcgaggacggggcagcagcggctgcggtcaagggtggggccgccaccgcaggcggcgttgacaccgccgaagagctcgttggagaggtcgaggcggcagatttgggactgggtttgggtcgggtatgcggggacggtgtggagtccagagcggacgcgtgg

SEQ ID NO: 59244 - DNA, 353 bp, Glycine max
  unsure (1)..(353): unsure at all n locations
  Clone ID: PAT_MRT3847_24509C.1
cctttaaaattaataaccaaaaaatggtggaattgggaataaaactaatgggaaaataaaagttgttggaaaataaaaaaaaaaattaattataataatataggatttaattcatggatggggctaatttaaggatggccctttttccttgtaatttgaattgtgttttgtgaggaattttgttctgcctagcatttganaaaggcanagatggtttaattaaggggcaagngtggatgtttaaggtttacacccgccaatttcgtttgttgtgtggttcgtgttatgttatccacaattggaaaatganaaaaaaaagtgatattttctagcttagcgaatgagaatagaat

SEQ ID NO: 59245 - DNA, 376 bp, Glycine max
  unsure (1)..(376): unsure at all n locations
  Clone ID: PAT_MRT3847_2450C.1
tgntcgttggatggaaaagaagagggngagaaagagaaaagccaggttgacgcttctgtacgggacattgagatacaagaaaccacacctgaaggcgaaaaagatgatgctgaaatggatgctgggaaggaagcgaaagcgaagaagaaaaaagaagacaccgacaggaaggagacgaagaaagttactggacaggacaagaccacggatcctagagcgctgaagcagagactcgaaaaaattaacggacaattaccaccactccttgaaaagaaggctgatatagaaaggcagattaaagaagccgccgctgatggtcatgtactcaatgggaaggacaccgatgaggtacagccgctgattaagatacacccat

SEQ ID NO: 59246 - DNA, 659 bp, Glycine max
  unsure (1)..(659): unsure at all n locations
  Clone ID: PAT_MRT3847_24510C.1
ggattccttcagtcacttccctcattttttaacattcccctcggcgctgcgcacctttctcgatctccgatctataaaccccacaacaccctccttccttctttctcaaccttacactcgctctctctctctcaaaataaatctcgtttctctctcctctcgttgggcctcttcaacgggcttcccggcccaacgctacaacctttttttctgctctttcgattttttagggttttcgcgcgctccccctttcttcttctcctggatctgctaggagaagtgctgcatgctctgaacttccttccatactcttagagatggcgtcttcgtatcccggttccgttagtgccgcgcaggttggttcctacttcgtgggacagtactaccagattcttcgccagcaaccgaatcttgttcaccagttttactccgattccagcagcatgattcgcgtcgacggagattcagttgaaaccgcgcacgatgtgttgcaaattcattcaattgtatcgttactgaattttactacgattgaaatcaagacaattaattctcttgactcttgggatggaggtgtgcttgtgatggtctcaggttttgtgaagataaaggatatcagtgggaagcggaaggttgntaaactttctttcttgctcctc

SEQ ID NO: 59247 - DNA, 3452 bp, Glycine max
  Clone ID: PAT_MRT3847_24511C.1
ctgatcccctccctctctgcgctgcgcaccattctcaatctccgatctataaacccccaaaccctcctccattcccagccatctctctctctctctctaaaaccaagtctcgtttctctctcctcttgctgggcctcttcttcgggcttcccggcccatcgccgactccaacgccacaacctttttctgctttttcgatttagggttttcgcgcgctctcccttccttctcctggatctgctaggagaagcgctgaatgctctgagcttcaacggctgtttgttagagatggcgtcttcgtatcccggttccgttagtgccgcacaggttggttcctacttcgtgggacagtactaccagattcttcgccagcaaccgaatctcgttcaccagttctactccgattccagcagcatgattcgcgttgacggagactccgttgaaaccgcgcacgatgtgttgcaaattcattcaattgtctcgttactgaattttactacaattgagatcaagacaatcaattctcttgactcttgggatggaggtgtgcttgtgatggcctcaggtatttgtgaagatataggatatcggtgggaagcggaagtttgttcaaactttctttcttgctcgtcaggacaaggtagattctgcatggaatgatatgtatccacgcttaaatgatggagtaatgccccgcaatctggcaaaaatgggatccgaagcaaatcagcgacaccgacactgtccttgttgagttggtgggactccttcatggcggcgaggccgtaaaggggaacgaggacggagacgacgcaggctacgtgccagtgagcagtgatggagaagtgggcgacttcataggcaccagaagaagatacaaaaaaaacttgaaaccgaaattgtggtgtaggaaacttccgtacaggaggcatctccaccaattcatagcgttgcacacactatccaagaaccccctgttgctcttgtggaagagtcctttgaggagcctcctaagaaaacatatgcatctattttacgagtttccaaagggctgccagtgttgtcagctgctccaaagcatgctccacattctttcaaaagtgctccacctcctccagagttgaaccatgtagcacagcctgctgttcagcagtcaagctctgcatctatgtatgctcccgagtcagggaccgaggcagcagaagaaggctatgcactagaagaagatgaagtaacatctgtctatgttagaaacttgcctgctaatgttactgaagtggagattgaccaagaatttaagaattttggcagaattaagccagatggaatattcattagggtccgaaaggaaattggagtctgctatgcatttgttgaatttgaagacattattggtgttcaaaatgcacttcagtcttctccactccaattggctggaagacaagtatacatagaggagcggaggccaaacagtgtcggtgcagctcggggaggaagaaggggaagaggcagaggcagctatcaagcagatgctccgagagggcgttttggtggtaggagcatgggaaggggaggttattcaggatggtacagactacaccagactaagaggtgatggttatcttcagcgtggttcacgatgaggaaaatgtggcaaaagcatgcacagggataccattcaagggcttatacaattagcgaaatctgtgcttggtgtgggtatttactacagaacatttgcttctgtggtttcagataaagtaatcttaacgttttgggtgcgtctttttcaagtaaaagccattgagacttaaactagtttgttttgcaagcatagatcagttggttccccttgaatgttagttattatgccattcaggtgggaagttttggttatttgtatttgtattggattgtgggggccttttaatgagaggggtgttgaaagtaacaaagtggtttagacatcaatagaggtggtgcttaattatcagatgttgcggtgcatttctgtgtgcatcacctcgttacctttgacttgttttgagagtaccatgagaatcttgagaaggatgtcattcggctaagctttttctctcaacccgatggcccgctgatgggaaatggttcctttaagtcctcatcactagttccaggtataaaagaaggaatatatctcggtccaccaccaaaagaaaagcttcccaagaattctccacaaggatctgttttgctaggggcaatttcatatgggaagctgtcctttgttggtcagggagagaataaaagtcctgaaaagcaccctgcatcatatcagatttcttatatagttcccccaaataagattgatgaggacaagggaaaaggttcttccttatcttccaagaagaatgtttcagaacgtttaaaagaagaggtaagagatgcaaaaataaaagttctagcaagcctaaaacaagaaactgatgaagagcgtttggagtggaaagagctatctgccttgcttaaatcagaatatccaaagtacactccattacttgcaacgattttggaaggtttagtttcttggagtaatatcaaagacaaaatccatcatgatgagggaagaaggtggttggtgcagccggtgaggtgattaacagtattgacagagaagagctagcaaaattttttgctctaaaaaatgatccagaagatgaggaagcggagaatatcaggaaaaagatggagttaacccgagaccaattggcagatgcactgtaccaaaaggggcttgcgctggcagagattgagtctttaaaggacgtagataagtccccgactttggctgctacagaaggggcaaaagaagacatagaaaataaaaaatctacggatggtcgcagtcaaggagatttgtttgaagagaattttaaagaactgaagaaatgggttaatgtgaagtcaactaaatatgggatccttttagtaactcgtgagaggcgagctcaaaggcttgggactgcgttgaaggtactgtgtgacataattcaagatgacgcagagcctgccaagaagaaattctatgaccttaagctctctttgcttgatgagattggatggacacatttggctgcatatgagagacaatggatgcatgtgcgtttccctccaagcttacctcttttctaggacctgcccatcgggaagatgctggacagcaatgttaggactttggaaccatgtccttttcctcaatatttatgtaacactagaccctttacgtgacctatcctttctttttgtgaacatcttggccttggtatttcgaacatggcatgggaactttgccatgccttcagtgtggctgccacatcagtggcttcgtcaatcccatttatattaatttaataataacaaaataaagagtttttcaaaaaaaaaaaaaaaaagaaagaaaggggagggcggcc

SEQ ID NO: 59248 - DNA, 483 bp, Glycine max
  Clone ID: PAT_MRT3847_24512C.1
gttgttgattactcacttagtgctcatgaatctgtcaagccttactttaggggtgctcaattgcaaagctttttagctggtcataatatcaccattactgatgggtgttgacagaactagtgcgactgtgccgtttataaaggtagcagattgtgattttctgaagagacactctctgcagatgtctaatgttttgtggctggctcctgaggacatggctagtttatgggcacaacttcattctgttgcgtgtaataatctggaaatgcatgaggcttatcttgtcaatctgcgaaatgtgctacgagaattggatctgcacagtccagaagaagctcgcctattgagaaggaaagctctctctcggcttgaatggctgcaataagctgatgggcctaccatagcacagattgaagagtttcattcgatgcagaagatgatgaatgctcctgattcaaatgataatactgatctactggtgag

SEQ ID NO: 59249 - DNA, 334 bp, Glycine max
  Clone ID: PAT_MRT3847_24513C.1
tttaattcagaatagtattgtttcatagaatttctagatattgcaacgaaggagcacatttaagtcaatagcttattcaaaactgaaatggtaaaagatgttacccacttactgttttaatgacatctgaagggcttataatagctggtgctactcaagactcgtccttattattactaattaggtgcttaacaaagaaattggactctcgtttttggatactgaagactcttgaagtggtgatacatgacaacaggaggaaccttaaacctatcctccaccaccacttgcagcagttcagcacccatcattggtacatgacaacagggagaac

SEQ ID NO: 59250 - DNA, 254 bp, Glycine max
  Clone ID: PAT_MRT3847_24514C.1
aagtattggcggtgggcccattagggaacaaaggtattaagtttcaaccacaaaataaaccgtatcaattggaagatggtatacggaatatggcatctagaaaaaacccggaaatacaaacgagaagcgacaagaggataggactggagctccgtatagctggtaatgccatacacaattccgttcagtacgggaaaagtgtttggtatgaattgaggacccgataaagccaagggaacccggatttggtgttt

SEQ ID NO: 59251 - DNA, 348 bp, Glycine max
  Clone ID: PAT_MRT3847_24515C.1
acccacgagtcagacggctcctacatgacgacacaagggatcgacgaagcggtaaaatgagtcagtatgcttcatcatgatgaactttgggaataattattcggacgatgccttcacgcacctgatttggtgggcatattattggagcagacagttggaactcacgatccgctttccattttccctttagttcctaatgggtgtgacttctctctgctccgggattggctggttgaatttgtcagcgactacaagactgaaacatcggtcagacatggatgccatgctatcattcaggcagactgtgtcagtcgattgtgtcactattacaatgaggtattgcatggg

SEQ ID NO: 59252 - DNA, 348 bp, Glycine max
  Clone ID: PAT_MRT3847_24516C.1
gaagcctgggaaaggtctgctccgccagcagttcctgtttgtgtatcaagaatatacggtctatggcgaagccttatgaccacagtacagagaccctgccatgctgatgcatccagagaattccacggattccatcagatatgcctctctatgatatactaactgagttgctacacggaagctaccatatggctgctgctggaaggctaggggaactggcaaagaaactccacaattgatcgatgaatagaaagatgatgaccacactagcatggctggggatgcacagctgaccactccgatactacagactcacgatgcagaatcaagaagtgctgctgttgacat

SEQ ID NO: 59253 - DNA, 467 bp, Glycine max
  Clone ID: PAT_MRT3847_24517C.1
aattcggctcgaggctgcgagaagacgacagaagggattgaaactgtttgtagaaatgaggaaaaaaaatttgagtcctactgatcatactttatgtaccattttaaatgcttgcagcagccctgcagtgctccttcaaggaagacaaatgcactctcttgttattaaaatgggttcagaaaggaatgtgtttgttgccagtgctttgattgatatgtattcaaagggtggcaatattgacgaggctcaatgtgtgttagatcagacttctaagaagaacaatgttttgtggacatccatgatcatgggttatgctcattgtgggagaggttctgaggctttggaactttttgattgtctattgaccaagcaagaggttattcctgatcatatctgctttacggctgtcttaacagcttgtaatcatgcaggatttcttgacaaaggggtggaatacttcacaaaat

SEQ ID NO: 59254 - DNA, 863 bp, Glycine max
  Clone ID: PAT_MRT3847_24518C.1
cgaccactccctcgtctctctcatcaccttcgactccatggtctatctccaccatctctcttcttcccacttttcctctctcctcgtctttcacggcaaccgccatctctcctccaatcagatccgccacttccttaacccccaccgccaccaggcttttcttttgcctatttccgaatgccaattctccatcactactgccattgaagagatccattctacatccaactccaccatctccgcctctcgccctcccaggtgcaccggctctgcaatctccgtcgcccttggtcttttggagtcttgccccatcaatacaggctccaggatcttggtcttcacctctggacctgctactctgggacccggaatcgttgtcgattctgatcgccgccaacccatcagaacccaccatcacatcttcaacgcccaagcaacacactatgctaagtcttccgctttctataatcaactctccaagaggctatccggtgcatctgttgttctcgatctctttgcctgttcccttgatcaagttggggcagccgagctccgaggacccgttgagcactccggtggattcatcgttctctctgagtcttttgattccgatcagttcaagaattgtctgaggcagatgttcagatgtgatgaccagggccacttgagaatgaattttgatgcgactattgaaatagtcaccaccaaagacgtgaaaatctgtggagcgcttggtccttgtgtgtcccttgagagaaacaactgtttggtgagcgaggctgaggttggagaaggtggcacctctgtctggaagttaaacacgctcacccacaaaacttgcattgcgtttttcttccaagtga

SEQ ID NO: 59255 - DNA, 271 bp, Glycine max
  Clone ID: PAT_MRT3847_24519C.1
cgcacgcgtgtgtgaaagcgtggggtgtggtatttggcgtattggctagaagaactgtaacccctatctgctgattgtgatgaactcattatgtggttggacggggtttatgtgttggtgaagagagagcgcacgaaggttcttgattacgagataggaccttattggtgtttgtgtttcaactgttattggtaggcgtgcggattgtttgtgagcagggaataagacatacaagcgctgtatcttagtgtcggttgccaacgttaggaga

SEQ ID NO: 59256 - DNA, 115 bp, Glycine max
  Clone ID: PAT_MRT3847_2451C.1
ccttccttgacatagatcacgaatgagtctacaacgagtacgacgatgtttcccaagatatgacccatgttgtgatgattggtgagccaggactccttaccatcatcaccaatca

SEQ ID NO: 59257 - DNA, 328 bp, Glycine max
  Clone ID: PAT_MRT3847_24520C.1
aatagaaagggttagaatattttattatccaagattaaaacacttgatatcggatagtgcatgtgctataagaggcatgtaaatttgatattgcacggatgacatatctgaaattaaccccaccttggacaacatgcgtgcgctaagaggcagctaaaggcaaatgactttttttatgtctacatagaaaagggaatgcaaccttttttcaagccaacatctttcattggtccgtcagttaaaaatccttgacgtgcatcattcattaacgactaccgcctgcagctctccactatgtagtccgcatactaactcatggatttattaa

SEQ ID NO: 59258 - DNA, 447 bp, Glycine max
  Clone ID: PAT_MRT3847_24521C.1
tttcccggtccttcccaccctttcttccacgcgttcttacggctagaagaagacgacagtttgggccttccttccttcaactggtgggaattgtgggccacactaattatataccaccctccttctagacatatgtctagtacctctgttgtctattctctacactgtgaaaccaagatgaaggtagcactcacagctggtgtacttatatgccttgtcctcatttactcctcgttcgaggtgttaatagctggttctgctgtctgtaactccaagcgctctaagaggtagttttagaactgggatgaaggactaggacttgaagtagttgtggatttggtgcagccagtgcaactgtgtgccatctgggactcataggatcaagcattgatgcccttgttacagttacattaaaaacttcaagactatgccaagagcccttgatta

SEQ ID NO: 59259 - DNA, 255 bp, Glycine max
  Clone ID: PAT_MRT3847_24522C.1
ggataatgttatattggggggggataattttgtatggccaaaattcaattcatcatattattaattttagaaaaaaaaaattgttctttattttattaaattgttaatttgacaagatcttgattaaaaattaaaaacttgtttttcccataaagattatgataatgagaaataagttgtttataattttaatctaaattattttttatcggaaaattattgggaataaaacatcaataatccctttaaataaat

SEQ ID NO: 59260 - DNA, 269 bp, Glycine max
  Clone ID: PAT_MRT3847_24523C.1
atgagatttctaccgagcgttctcctttattgcttgcttatacggacatctttatcctgcgggcgttatgtttgggaatcgcttgcggctgaaacaacgatcaaatatactgatcccaaatcaccggacatattcggctcttaagacgcctagctctctcgttatattgcgcttgacagatacgatcacgctgaccacagactcgatatccacctctacttccactgatgaccacttgtcacgtcgaatgagccttatactaccactcc

SEQ ID NO: 59261 - DNA, 324 bp, Glycine max
  Clone ID: PAT_MRT3847_24524C.1
tttttacacagagaaaaccagattttatcacaatgaggaaaaatacaaactctttttaactttaaagaaaaaagccgaccggtgccccctttatttaaaccacactctctactctatcttctcaaaaatcaaccccaaaatttgtgtcacacaaatttttacacacacactatacacaatttattgtgggttgagacaagggcgtcttgtgccttaaaatgaggcaccacctggacttgttttgtcaaaaataactcgaaagaagcatgcatgctgctactcatttattgtggtctcagccacccccccatcatctttttgctt

SEQ ID NO: 59262 - DNA, 346 bp, Glycine max
  Clone ID: PAT_MRT3847_24525C.1
aaccaccacacgggggaatgggataaatattttcaccaccctcaaatccaacttcctaaaaataaaacacaaaaaacaaaatttgcagaaaacaccataaaccacccatgcttgctcactccataaaaacttccaaaccccacttatcaactaatatatatcacaattcataaaacccatttcccactttaaaaaccctataatccaaaaacatttattttctctaatgcaaaactgcttcacttccctggccatttttttatatcgatcatacaaaaaaaatggtcatttacccaatttaacttggttaacagcacatcccaattttttaatattgacttaacat

SEQ ID NO: 59263 - DNA, 356 bp, Glycine max
  unsure (1)..(356): unsure at all n locations
  Clone ID: PAT_MRT3847_24526C.1
acgtaagctnggaatccggctagaggaaggcgtttgatactaatgacaagacaatggataacgctgtagagtacacaaattatgcttctcagtgggggaatgaagccaacgacaaaaaaacctgttccaaggtcggagagtacgccaattatggatctcagaatgcgaaagaaacaaaagatgcaacgaatgaaaaagcttgagagtacacagattatgcttctcacaaagcgaaggaaacgaaggacaatacaatggaaaaggctggagagtacactgattatgcttcgcataacgcgaatgaaacgaaagacaagacaatggagaacgctggagagtacacacattatgctttt

SEQ ID NO: 59264 - DNA, 1451 bp, Glycine max
  Clone ID: PAT_MRT3847_24527C.1
aaaaacagcaacgagcaaacaaaagaagcaatgatgatgaatgtcatagggctgagtctgagtctggtgttaacttcactggcagcagcgagcaccatcgtcaaagaagggcacagagttgtcgtggttgaatacgaccaaggtggccatcagaacaccaaaatctcaatatcaccagaacaacctacgcatgctaatcttaaagatcccatttgcgacgcctatggaaaatgcaagcacaaaatcgtggatgcaatggagaagtctcaagaggtcatccatgagaagaaggacgagattgccgccaacaaggaggcagcacgccaagttgctggtaaaaccaaagagagagtgtatgataaagcccgtcatgtccacgaatacgcccaaaacactgtagaaacagccaagaaccatattgcctgtaacgtgtcaaacgccaaagatgcattcaagcgtctaatagcaggatctttggagaggcagagccttaattctttgatgggggtggctaacatgttggggtttgccacggcttatgggatgtgtgtgtgggttacgttcatctccagctatgtgcagtccagggctatggcaaggcaacaatttgcagtggtgcagagtaaaatatatcctgtttatttcagggccatgtcttatagcatcggggtcgctttattcgcccatgtcttggcccatagaaacaccttgctctccaacaagtctgacttattgcaagcatataatcttctggcctcccttgtcacacttttcttcaattctctttacttggagcctcgggccaccaagttgatgttcgagaggataaagatagaaaaagaggaaggaagaggcagatcagaagatgtgagtagcagaactaaagagccagcttccacgaccgcagaccaggatgcagtcagaacaaggataatcaagctcaatgacaagctcaagaaactcaattcctactcctcattcctcaatatcctcaatctcatgtctcttacttggcatctcgtttatttggctcaacgacttccccatatttgctaaaccaaatactacgttccttttgtcttttctactaatcacttgttttctgtgtttcttttctgtttctatcatgtttgttgatatttgcaaatacttcagtctctagatttttgtatcttttagctttgggaacaatacagtgtttaccactccctgtatttaatttgtgttaagtgtaaaactcttgttactttgctttagtctttcttaaatgtttttatcatgtcatgtgtttgatatttttgcaaatactttttcaatctctagattgtctctttcagctttcagcagcgcatatagctggttttgtttttcattagtgtttgccactccttgtaatcaagtatatatttaatttgtgttagtgtaaaactcttgttacattactttaatca

SEQ ID NO: 59265 - DNA, 731 bp, Glycine max
  Clone ID: PAT_MRT3847_24528C.1
agcaaccaaacaaattagcggaacgttgaattgaacaagaagagagaagaatgatgatgaatgttttagggttgagtctggtgttaacttcactggcagcagcaggaatattctctcccaatcccagaacagagaagcatggagccagcaccattgtcaaagaagggcatcgagttgtggtggttgaatacgaccaaggtggccatcagaaaaccaaaatctcaatatccccagagcaacccacgcatcaccatgatcatgatgatgatttgatcaaagaagctgcctcggttctccctaacttatgccaaggcatttcttcatcttcacaatattcacaccaaccgcagaatcacatggatcatgggcctttaaatctgcatgctcctaatcctaaagagctcatttgcgacgcctatggaaaatgcaaacacaaaatcgtcgatgcaatggagaagtctcaagaggtcatccatgagaagaaggacgagatttgtaaaactaaagagactgtgtatgataaagcccgtcaagtccacgaatacgcccaaaacactgtagaaacagccaagaaccatattgcctgtaacgtgtcaaacgccaaagatgcattcaagcgtctaatagcaggatctttggagaggcagagccttaattcattgatgggggtggccaacatgttggggttttccacggcttatgggatgtgtgtgtgggttacgttcatctcc

SEQ ID NO: 59266 - DNA, 716 bp, Glycine max
  unsure (1)..(716): unsure at all n locations
  Clone ID: PAT_MRT3847_24529C.1
cagctatgtgcagtccaggactatgcaaggcanncattttgcagtggtgcagagtaaaatataccctgttatttcagggccatggcttatagcattgcactggctttcttagcccatttcttagcccatagaaacaccaactctgacatgttgcaatcatataatcttctggcctcccttgccacacttttcctcaattatctttacttggagcctcgggccaccaagttgatgttggagaggataaagatagaaaaagaggaaggaagaggcagatcacaagacatgatgagtagtagaacagtagatcctaaagagccagcagatcaggaggatgcactcagatcaaggataatcaagctcaatgacaagctcaagaaattcaattcctattcctcattcctcaatatcctcaatctcatgtctcttacttggcatctcgtttatttggctcaacgacttcaccatatttgctaaaccaaatactctaccaaagccttttctttctagtaatcacttgttttctgtctttcttttctgtttttatcatgtcatgtgtttgatatttttgcaaatactttttcaatctctagattgtctctttcagctttcagcagcgcatatagctggttttgtttttcattagtgtttgccactccttgtaatcaagtatatatttaatttgtgttagtgtaaaactcttgttacattacttt

SEQ ID NO: 59267 - DNA, 494 bp, Glycine max
  Clone ID: PAT_MRT3847_2452C.1
gcacgaggtttcagacactcaccattcttacttagttccaaacacacacacactccaaacccactataagaaagaacaaaacaaccccatttcccatttcacgtgctatttgtgaaatcacctacccttttgaacattaactttattattgttattgaggcatggaaatggaagattttttatggggtggtggcattgatgttgatgtcaccaagaggaaaagtgatggttttgaaggaagcaatggcgtgattggaagtgggtggtgtggttcatctttctctctggtattggatagggagagaggggagcttgtggaggaacctgtgagattggaaaagaaaggggtgtccactgagagaagcattgaagctttgaagagccatagtgaggcagagaggaaaaggagggcaaggattaatgcacatcttgatacacttcgcagtgtgattccgggtgctatgaagatggacaaagcatcattacttggtgag

SEQ ID NO: 59268 - DNA, 390 bp, Glycine max
  Clone ID: PAT_MRT3847_24530C.1
tgggctaggtggtatggctcctttgtagaggtagtgattctgacacacccagcaaacatatactctatatcgttcaaggaaaaaagctccgacatcattagtatagatgccatatcggtgtataagaccgaggccattctcattaacgatcaggcaaacgatgagagatggtatcagaaacatcgaacatacctgcagtagctacatgcaatactgattttgattctattctctgacttgttccatattcaagatgaaagaacaaaatcaccatgtattaatcctctgccaattattgggaaccagaacatgctggtgaaactcccacattggtctcttcaagtctttgccaaacattatggacgcatattgtgcatagagctgggacat

SEQ ID NO: 59269 - DNA, 200 bp, Glycine max
  Clone ID: PAT_MRT3847_24531C.1
gagaaacatcagacacgcctatgtgacagtctgttaagggggcaaacgttaaagatttggtgcaacgggatgcaaatatcacgcacatgggggagacaccctgaagctagaaccgcaacttgttcagtggcatgcatagctaggctgatactaaaggacggatactccatcactacattggaggatagattaccttgcag

SEQ ID NO: 59270 - DNA, 493 bp, Glycine max
  Clone ID: PAT_MRT3847_24532C.1
tcggcggccgctctgaaattgaaattttctttccgaaaattttacattttctacaacctgagatcacgacatgggactggcacaaatcttgaaagagcattaacttttggctgatcatatataatatatacgacatgaacgaacacatacagagtacacataaaaaggggggacattcagcactaaagccacagctgaaagaacagaattgaataagagggaaggaaacatagagaaaataagcacaatccgatgactgaatgccaatggatgcgcaaaaggaccgtgccaagagtgtcggaaccccgatgagttaaacacgtaccttgagccccttgagtggctgacaccacttacgatgtgaaggcatggacattgctgccaaaacgcacatatgcacaagcccacaagaacctgccaattacacccctgttgagatcaatgttgaagcagatcatgccactgcctgaagtcaaacactctcgttacaatg

SEQ ID NO: 59271 - DNA, 427 bp, Glycine max
  Clone ID: PAT_MRT3847_24533C.1
caggagcttcaccgccatagcgataccttccagaatctctcctccttctctcttaagaaagcgggccaacattaccattttccgctactttgtagagacgaagcgcatatcctcgggtttctcgtatctcaaaaggttatcatctacccctgtagatggagatgcttactacaaattctggtgcgatgctacctcttctacccccagtgggtcagcattggggaagaatgaaggccaacaacttacctcttagatggtatagttcgcagcatcaaactcctaatagtaggagactatcaatggttgctaaagcaagaccagtatttctcaaaccaattccatctactcggacgaagggaggcgttctatgttcaagtagaaagaacaatgctttcatttgttttgctgctttgaatgctcgatgtgc

SEQ ID NO: 59272 - DNA, 710 bp, Glycine max
  Clone ID: PAT_MRT3847_24534C.1
gcagagcaaaaggcaaagattgaaaggtgatttgatttcatgtggatgagattttcgcctacacctaagtgcaatttaagtactatgtttacaccttcacaatttttttttggataagtttgtagcaaagtcaagttacattttgataaacatttgaaacataaataatttgtcgcacaacactttcacaatctcactccaaaaagaagactactctggtttaaaatataagagaggaggacgcaagacttggatgaacaagagcccctctaattggacaattgtatacttgtttccccttggtgtaaccacacccatcaacccaaacccattcccacctacccattatttcccctactacctttttgcaaagcaccatcccatatccaagatccctatacaaacaaatagcatcctcattccccacacacttaacactcttccctcccaacaatctcaaccccaattcaagtggcaccttatccactaagcaccatttgtccccttcattcagctcccaaatgcaagcagtcccaccacacgtgccaccaaccaatcccaatgccccattccgcggaacaagcgtggcaaattccagcttctcagccataggcacacccaactcactccatgtattttctaccaacatcaaatcccatgacactggaagctctagccgaggttacccaggaccaccggttccccaatgc

SEQ ID NO: 59273 - DNA, 317 bp, Glycine max
  Clone ID: PAT_MRT3847_24535C.1
tctccaatgaggtgctggcgcgcacaggatcttgaactaaaataggttgctgcaacatcacacatgctaacaacacttctggtgctacactatctgaaacctaatctgagagggggaaacacatcttggacagtcccgaccgtgaagcaaccatgctgtcggactgcaggttttacaacgttgcttactatcttcgaaaggaggacgaggaatcctacaccccctaatggatctcaatatgcccaatagacctccacagacaagatctcaagccaatgcatgagcacaatacaaggctcttccactgcttctggggg

SEQ ID NO: 59274 - DNA, 916 bp, Glycine max
  Clone ID: PAT_MRT3847_24536C.1
acggctgcgagaagacgacagaaggggggggttcacagttcacactatcgctgactgatacaataataatgatcttcctcctttccttcctccactgttcttaaactcgttaataaaccaaacacaggcaaaagagtggtattactgtgttagtgttaccttaccactcaggcaaaataatggggagtaagaaaaaaaatggtggaaagggagagattgtggatggttccaagattatggagttagttggaaacgagaaagttttcagcaactttgtggaccataagtttgatgaattggataaagacagagatgggaaactctccatgaaggagcttgaacctgctgttgctgacattggtgctggtcttggtttgcctgctcaaggcactagtcctgattctgataagattattgttgaagcctttaagatggtgaatgcagatgacaccaagacagttaaagaagacgaattcaagagattgataaggttattgttgaagcctttaagatggtgaatgcagatgacaccaagacagttaaagaagacgaattcaagaaaattttaagtgaaatacgggtagtatcacgttacagttagaggcaaatcccatatctgtttcttccaattcagttgtgcatgagcctttaggctcatcttctacactcttgcagccatctagtgaaacagcataattgtctcaagtttgtgacgggtcaaaaactaagtacaataagattttttattcatggaaattgttactgacatagtttatcttttaagaaatcactttgtatgatgtggattatttatgaatctgaaaattatagaatgccatggaaagaaccccccttttaagggggcaaaaaaaacccctttaaaacttttggattccctttttttaaacgggggggg

SEQ ID NO: 59275 - DNA, 376 bp, Glycine max
  Clone ID: PAT_MRT3847_24537C.1
aattcggctcgagaccattttctcactacggtaatcaactggcaaatacttggacattggcctcagaaaatggagacaaactagagcttgctttcagtgctgttcctgatcccaagcccaagaaggattgggtcattttgtcccttagggtggtcgcattttttgccacagcatctgctacacttgctatggcattcaacaaacaaaccataggcatggtagttgctaccattggcaccaaccacagaacaattactcttactgcaatgtttcagcacactccagctattatattcttcgtgatagtcaacgcaactgccagtttctataacttgctggtgataggaatggagatattaggaccccaatatgatta

SEQ ID NO: 59276 - DNA, 1359 bp, Glycine max
  Clone ID: PAT_MRT3847_24538C.1
ccacgcgtccgcttaaactcgttaataaaccaaacacaggcaaaagactggtattactgtgttagtgttaccttaccactcaggcaaaataatggggagtaagaaaaaaaatggtggaaagggagagattgtggatggttccaagattatggagttagttggaaacgagaaagttttcagcaactttgtggaccataagtttgatgaattggataaagacagagatgggaaactctccatgaaggagcttgaacctgctgttgctgacattggtgctggtcttggtttgcctgctcaaggcactagtcctgattcagatcacatttattttgaggtcttgaatgagttcacccatggcaagcaagaaaaagtgagcaagactgagtttaaagaggttctctcagacattctgttgggcatggctgctggactaaagcgagaccctattgttatactccgcatggatggggaagatctccttgagtttgttaatggtccaagttatgaagcagaaatggcatccattttctctcagattgagtcccctagtggatcccttcgtgaacatgtaattgaagcttttgggagactcactgttgatcaaggaattcctccaacatcagattcttgggttttcaacaacattgtggatccagcactatctcaagctggccctgctttggacaagcctgctgctcaagagacatttttggaagaatttaagaaagtggcattgaccgtggttgattttcttaaagagaaacctggcattgttgcccacagtgaaaacacatttgatggacgcggtgtcaagagacttttatccaacaagtttgaattagacagggtttattttattgtgattcattgcgatatctttcttgttttgaatttactttttttaaacatccatacatgaaatttaccactctattgcgtgatgcagacgttgaacttagctgtagagaatctgccgaaagatcgcaattcaagagattgataaggttattgttgaagcctttaagatggtgaatgcagatgacaccaagacagttaaagaagacgaattcaagaaaattttaagtgaaatacgggtagtatcacgttacagttagaggcaaatcccatatctgtttcttccaattcagttgtgcatgagcctttaggctcatcttctacactcttgcagccattctagtgaaacagcataaattgtctcaagtttgtgacgggtcaaaaactaagtaccataagattttttattcatggaaattgttacctgaaataatttaatcttttaagaaatcactttgtatgaatgtggattatttatgaatctgaaaatatagaatgccatgg

SEQ ID NO: 59277 - DNA, 304 bp, Glycine max
  unsure (1)..(304): unsure at all n locations
  Clone ID: PAT_MRT3847_24539C.1
ntcgcnngcttcgcgtacgtaatctnggnattcggctnngngncatannatantcntttttagnngatanntatccatnantagattgttngacttnnattgtcccnannntcntcncnnnccnaagnttttanagggatnntgtggtcgttcntnngnattcatgctgtggtggngggagttgntnancgnnttggtntttatgntntntnccantatgnnttagagtncngnngtnntatnntnnnntnnnntnnnnnntttccccnnnnntnnnnnnnnnntttnncccncgntganctgn

SEQ ID NO: 59278 - DNA, 258 bp, Glycine max
  Clone ID: PAT_MRT3847_2453C.1
gggcatcaagccgaaggaacaactcaccctggagccgtacgagcgagatcacgccatcgtcgttggaaggtacgagcgacacaccgcctaagtccgcaccggaaagggcgtcagcagaggaggcagcctcgttcgcattcacatacactcttgatcatttgttctggcttcggtttcggtttgctctctttcaatataccacgatgtgtaccagcatcaatgtacctatgactcgaaaaaaaaaacaaaaggggggcc

SEQ ID NO: 59279 - DNA, 662 bp, Glycine max
  Clone ID: PAT_MRT3847_24540C.1
acaagcctgcttctcaagagacatttttggaagaatttaagaaagtcgcattgagcgtggttgattttcttaaagagaaacctgtcattgttgcccacagtgaaaacacatttgatggacgcggtgtcaagagacttttatccaacaagtttgaattagacaggacgttgaacttagctttagagaatctgccaaaagatcgcaatggaaaaatatcaaaggactatctgcgggtggcactagatctggtgtctccatctgctggtttacctccagttggtgcaattgaagagattgataaggtcattgttgaagcctttaagatggtgaatgcagaggacaccaagacagttaaagaagacgaatttaagaaaattttaactgaaatactgggtagtatcatgttgcagttagaaggcaatcccatatctgtttcttcaaattcagttgtgcatgagcctttaggctcatcttctacactcttgcagccatcttctagtgaaacagcataactgtctcaagtttgtgacggatcaaaaaccaagtacaataagaatttttattcatggaaattgttacggaaatagtttgtctttaaagaattcactttgtatgatgtggattatttatgaatctgaaaattatagaatgccatggaaaga

SEQ ID NO: 59280 - DNA, 359 bp, Glycine max
  Clone ID: PAT_MRT3847_24541C.1
gaagctgtaaattgctgcttatagaattttgcgaaaaggacacatttacatgaggaaacttcctatataagcaatccctacattgaaaaggctgtctttgataaagaggatctgaggacacaatcaaggtacaaatgttaaaggcctttaaactatttgaaatgactttacaaagaacctttaacatgctggcggtcactctggatgacatacgcacttctcacttatatcggaagcatattaaagctgaacctcacactgctctatttgatgtaggatgcaacgagctataccagatatgccctgccatgggaaatatactctttatgcaggttatgtataaggatgatttcccaaat

SEQ ID NO: 59281 - DNA, 714 bp, Glycine max
  Clone ID: PAT_MRT3847_24542C.1
tttttgttcacttataataagtgatcccacgcgtccgtacggctgcgagaagacgacagaaggggatggaaagtgttcatttgttgagcaccgcaactacagaattgtgtatagacgctatgcatctttgtttttcttggttggagttgatgttgacgagaacgaacttgctattttggaatttatacatcttttagtcgaaacaatggatcgacactttggcaatgtgaatgagctagatatcatgtttcatttagaaaaggtacattttatgttggaggaaattgtcatgaatggttgcattgtggagacaagcaaagcaaatattctgtctccaattcagctgctggataaaacttcttaagagaaataaaacaagcattcctggtaatttctataccattgttggctctctctgcaattactttatgtgtaagataaagtgaaaaaccaccgcagttaatctccaattttctttatctataaaacaccaaagatcttaattcatttcatttttctccctcccccttgattgtattgaattgactattgatgtatatgggtttaaagggttaaaaaaacgtttcatggtacttggtcgaccatgagctgtaacatgtggttatctaatatcataatgcttaaatttcgtggaatggatcttaaaaggactttccagtatttgaataagagatgctccaatcccttgttagc

SEQ ID NO: 59282 - DNA, 1042 bp, Glycine max
  Clone ID: PAT_MRT3847_24543C.1
ctaaacttcattccagagccctacacggcccacgccccccacaagtctttggcgggaatggaagagggtgacagtgaggccatttttggtgctcttaatctgaacccgcaactcttctgtaacgaagttctcaacattgtcgacgatgtgctcgacgaagctttcaatttcttctaccaggacgcatccacgaagctcaacatcgaaggcacccaaaggtcccaggatctgaaaaagggtgttgattgcgttcggctgaatgttcaatctgttttggacaaacaacttgctgcttgggagagttacatcctccgtcactgttttgctcttccccaaggttttcgtatgccaaacaccgatgaatcaaatgagaatgccctagatccaggtgctccttttgatccagatatagatgcccagttagattcattgagagaaaaactaattgaggtggggaaggagtctgaaatgcttaatcaagaaatgcaagcattagaaagaaagtctgctgtcaatgtggctggacatatcaatgaagctgtacaattatatgagcaaaattctatgcatgaggtgtttcaggagattgtgacgaccgcctcagaacttggagcgaagatggcaaagctaaactctagcatgattgaagagactgaccaaacaaaaactaaaaggatttacagcacacaaatggatccatctgctataaatcctgttaaaggcctctcaaacatgaagttagacgatgttgaagaattttgtaagtgttatgaagagtatgtgaacttgtctttttcatcaatctagttggactggaatttgcctgttttacccattgttgtacacactaatcgttttccgcgctgatcgttggaatttgccccaataatgctgaaacgattgtgggcaatttcatgaatcgtataactacctacaaatttaattatgaaactgaatttgcgtgatttatatactgtatattaaaactattcagtggttgctaaatgagtttatgaagcagaactttctgttgctcattctg

SEQ ID NO: 59283 - DNA, 160 bp, Glycine max
  unsure (1)..(160): unsure at all n locations
  Clone ID: PAT_MRT3847_24544C.1
tgccacaaacagactccgcttatgctggcagcaatgctgggnacatcgctgtgtggaaaggntctnaagccggggctantntntgangttgaaactataagggaggcangntcaacanggggncanncnncatcagcagcttngtnngccgaagcgctna

SEQ ID NO: 59284 - DNA, 213 bp, Glycine max
  Clone ID: PAT_MRT3847_24545C.1
ctatacttcttcaatacatataatgtcaatgacaggtgtagttagagcttgctaatcagataccatggacggctacgacagctatgacttttggaaatctcaatgctcagctcgaggcttgaatctggtttggacaatctggctctgaatgattacttcattcggagcaacagatacagcttcaataagcctgatcagatgacgaactttgat

SEQ ID NO: 59285 - DNA, 212 bp, Glycine max
  Clone ID: PAT_MRT3847_24546C.1
gccagggataattttctaacaagtgttacaagttcgggggtcatcaataagttgtctcgttatcagaaaccacacgtggcagccctataaaggttctattctaccaccgtgccaatggtgtcttttctggatttggcccatttgcccaaccccccttataaaaaaagcatgcctccaaatcctaagagtcaccgacgaaaaccacttcaaat

SEQ ID NO: 59286 - DNA, 1177 bp, Glycine max
  Clone ID: PAT_MRT3847_24547C.1
gttttgccaagttaaacagatctatgctacttattcgccccatctgttttctgatagttttcccggggtctcagctaatgactgcaaggagaaagatgatgctggagaaaaacattgtgagggaaatcctgatcagtatggaaaccaccgcttgccaaagattgtatcactgaagcatcattggtggtggatgatgaacacggtatggaatgggttgagagagacaagggatcattctggtcatattcttttcattgaagaagaccacttcatatttcccaatgcgtatcgcaatctacaggttctaatttcactgaagcctaaaaagtgtcctgattgttatgctgctaatttagcaccttctgatgtgaactcaagaggcgaaggttgggcaactttgattgctgagagaatggggaatgttggttactctttcaatcgaactgtttggaagaaaatacacaataaggcgagagagttttgtttctttgatgactataattgggatatcacaatgtgggcaactgtttatccttcatttggcagtcccgtttacacgttacgaggtcctaggaccagcgccgttcattttgggagatgtggtttgcatcaaggtcaggaggagaataaggcttgcattgataatggcatggtgaacattaatgttgaagagcctgatacagtttctaacattgaattaaattgggaagttcacacctataagaatcagcctggttataaagcagggtttaaaggttggggaggttggggggataatagagatcgtctcttatgcttgagttttgccaaaatgtaccactccactggcacagcgtctccattgtaagagttagaatttcttgctgctgcatctctttcttcttcttcctctttatttttcatttggtctgttatatgatagaagattagatttttcaatacaggaattgatattagacattcatagagggtgttagggttcataattactttgataatcatcactgtcttatgtactagttgtaacattgaatggatattcattcatatcgattcttcctcacatgaaggaagtttttgtattatgtaaactgatctctctctctctctctctctctctgtctctctccatgtgaacatttataatgcttagtaatgggaaactgcatctttcccc

SEQ ID NO: 59287 - DNA, 823 bp, Glycine max
  Clone ID: PAT_MRT3847_24548C.1
tgcatgcctgcagtgtggtagagataaagcttggcattcccattggtggaaggaccttagaagactctataatcagcctgatttccacagcatccaccagaatatggtatggagggttggttgtggggacaaaatcaaattttggcaagattcttggttgagtgagggttgtaaccttcagcagaagtataatcaactctataccatcagcagacagcagaatctcaccatttctaagatgggaaagttttctcagaatgcttggagttgggattttaagtggaggagtttatttgattatgagtacgcgatggctgttgacttcatggatgaaatctcaggcatatccatccagaatcaggctcatgatagcatgttctggaaagctgaccctagtggtgtttattccactaagtcagcatataggctcctgatgccatccatcagctctgccccttccaagaggaattttcagatcctgtggcatttgaaaatcccccctcgagctgcggttttctcttggaggttgtttttggatagactccccactaggggaaacttggccaagagaagcattcctattcaggatattatgtgccctctctgtggctgccagcatgaggaggctgggcatcttttcttccattgtaaaatgactaaggggctgtggtgggaatccttgagatggatccgggttataggagctctttcagctgatccggctagccattttatccaattctgtgatggatttgctgctacgagtaatcacagtaggcggggcatgtggtggattgctctatctattacaatatggcagcat

SEQ ID NO: 59288 - DNA, 482 bp, Glycine max
  unsure (1)..(482): unsure at all n locations
  Clone ID: PAT_MRT3847_24549C.1
ggatgttctcgctattgtttatatantcttggaaaaacacaatccccaatattctctttatttgggttcttagttcttatcttacttgctagttttgggggatttgcgctttacgtagataaatccttgagaacaatgtgtctaacacaaatcttagacagtgtgttatggagccctatgagtcagagattaggttgaggttcatgttcagcaaagttcgcatgttcgtgagattgtggtttgtaattttgtttgtctagaacaacaatctcaaggatttaaggtaggtttttactcttaaccactcatgtgatagactttttacaatggttaataaaaaatattgtgggtcacaattttttttgtggtatgttcttatgaccttatgtgataatcgtgtttctctcactgtcatagtgttttaggatttgtttagaaatcttgtttgtgagtgtggaaatggtatttaaatttttaggagt

SEQ ID NO: 59289 - DNA, 243 bp, Glycine max
  Clone ID: PAT_MRT3847_2454C.1
tttcgaacgttttagaaaagccgaaaacaacgaagggtaaggagaaagcaaaaacaaagaaccgaagacaaagaggtgacggagaaccaaaacaccttactgaagggaagacgaacgaggacaagcaaaagtcagaaaaaaacaggagagcaggggaaaaaaaagaaacacaaagacccctaagggcacaggaggaaaatatgaaaactagggcaagagaaatgcagaaccgaaagggggagg

SEQ ID NO: 59290 - DNA, 277 bp, Glycine max
  Clone ID: PAT_MRT3847_24550C.1
aaattacccatcttcttactcatgacatcatcttccacttcacaaaactcagagccctctctgatcctttccacctcccccacgcctctctttcaaattcacctgcaattggactcgaaaccctacccaaccaatttcaaattcacctcaaggcagtgttctctgctacaatcggtgcttgatcttgcgggtggggttttcgtggcctgatcttgtggggaagagcccctctgacatcctcctctttaacagcatcaaccttggtgaggaaatcttc

SEQ ID NO: 59291 - DNA, 308 bp, Glycine max
  Clone ID: PAT_MRT3847_24551C.1
ctcattttcacaagatttctctatctgcattgtcatgacagaactaacttttccatgcacgtcatcctcatttttgaggtacccaaccagcggcgatggacccgatgcactagcccttcaagcactgcctctatccaatcccgctcttaatcttatccgacccggcgcaaaccataattccgaagcaccataagctactttagttattctccaatcaaagaagtccactcgccgctatcttccagtcactggaaatctgcattgagcacgccaggctcgtactccatactcttgccttggttctgcac

SEQ ID NO: 59292 - DNA, 146 bp, Glycine max
  Clone ID: PAT_MRT3847_24552C.1
caaaatgggtggatcaattttggacatgaaatccaatatcaacaacaacgagttcttggcaaatcattacatttattcaacaattctaacccttatgatcataatcttacaaacatcattatcaactattcaataaccattccact

SEQ ID NO: 59293 - DNA, 313 bp, Glycine max
  Clone ID: PAT_MRT3847_24553C.1
gtctaaaaataaaacgtctggcataaaagttgtggtttgaaaagagaaatccatgatgcatcttaagggaactcatgagtagctagctgctttgtactataggggagcatgcatgctttaccaaccaaccaagccaccctgctaatgggggtgagcctcgtgactaaatatgttttcacaggggaagctaaattaccccacctgacaccacttccccttggggactaggcactactgctggcactgtggtttttatttaattttggttgaccattttgaagacctaaaataaaaaaaaaaaaggggtttttaa

SEQ ID NO: 59294 - DNA, 347 bp, Glycine max
  Clone ID: PAT_MRT3847_24554C.1
acgcacccatctggtcggtacgcgggggaaaacacccacaccactatctgtctgtggatctctctctgtccgaatctgaacctgacagagctatagatagcaatacatagcgacagaacacgcatgtgaccaagaaacacagcacagcccaagcaaacccactcatagagagagagagagagaaacaccaccccaagaggaaaccaccacccacagcctaacagtgagcgaagaaaacaagggccaccgccacagccaccaacaccgacagcgcaagcgtcatcgtcaccgacagccaacagacgcaaatgacaaaggataccgagagtaccacccgacaacaccag

SEQ ID NO: 59295 - DNA, 238 bp, Glycine max
  Clone ID: PAT_MRT3847_24555C.1
gcaagctctgcattgatgagacttccaacttcccgtagagagtcacatagcggagcctgcgctcttccactgctcagctcactgacgatgtacactaggatgagctgctgctgcgagcagaccatacctgactcaaagacagtaatacggccatccacagaatcactagataactcacgtacgaacatgtcatcagactgactgctatcggtcaaataccgtaaaaatggccggccgc

SEQ ID NO: 59296 - DNA, 288 bp, Glycine max
  Clone ID: PAT_MRT3847_24556C.1
ttgaccacgcgtccgattcctagcctttgtatcgtcccggttactgctcccgcaccaaaaggactggttccagctctcacgaaatctttcaatgttacagatcactcacaagatcctggagcttatctttcccacaattgttccataaacaagatcaccaccgacatgacttttttgtgaaatctcacgacagtcctcttcttctggggtattaacgtcaccataaaaaccagttgcaagaccatcgtcagcacgatcggaggcctcttcatgtgcctaggtgacctt

SEQ ID NO: 59297 - DNA, 491 bp, Glycine max
  Clone ID: PAT_MRT3847_24557C.1
aaaaaaaaaaaaaattttttttttttttaaaaaaaaaataccattaaggaaaacaagaccaacaataataaaaaaacccaatttcctaagccagccctaaaaaaacaaaaaggatggggcggggctttagaaaggaaggggggaaaggcctgttcttaaaatttttttttccccccccaaaactttggttaaaaccccagcacttttaggtaagggaacggcaatttttttatcctaaaaactaaaatttaagggcgggagttaaaagcccgaccctggtttggtttaaaaaaaaccaaaacccactcctggagctgggactggggtctgttttttaaactataaaatggcaagcccctggggaagctgaaacttaaaataagaaaccccatttgtctcctttaaagcttgggtaaaagctggaatagctgtttaactcactgttccctttgccaaaaaaaacatgggggagagtttcgggagggggaaac

SEQ ID NO: 59298 - DNA, 262 bp, Glycine max
  Clone ID: PAT_MRT3847_24558C.1
gcactatccggtgagtatgattttttcagtaggctctaggctcccaaaatccacaaaagctgaatctgaaggcctaaagaattccattgaccttcttggagaaaattactacaccacttattatgccgaacatgctgaacctgtgaatgcccaccgaaccttgtacacatacatactagtcagcctgaggtcggtcaggattggtctacatgttggaaccccggctggtgggtattggctgcttatctatccaaagggaatc

SEQ ID NO: 59299 - DNA, 753 bp, Glycine max
  Clone ID: PAT_MRT3847_24559C.1
gggaactgccctaccctctttactttaattcactcacaacaagggcacaaaaaaaaagaaagaaaaaaaagaatgaacaagtcttctggtgctgtttttctcgcacgctctcggcatacgatgttttcgtttcctaattagtagcagcgagattctgaggttgtcgtgaccaaggccatggaactgaaatttgttctctttctgctccttctgcttgctgttgctggttatggactcgcttccaatgcgacactgaacgagacttgtggatacttcgatggttctctcaatagggaccctaaagtgccttgtccaattggttggattatggaccctaacaagaccaagtgctttctccatgttgggaggcctcaatcttggaatgactcagagacctgttgtagtaagtatggtggacatttagtgtcattgacatcgcttccggagctacaatttgcccagggcctatgcggtgaatctataaatagttgctgggttggtgggcaaagagtcaacgctacagctggtaatcagtggatgtggtctgacaattcaccttggaacaactccatattttctatgcgtgaaacaccaccccattttcttggaactatgttccaccccattgtaatggaactggaccgtcctgtcataggaacagtacagacaatttgtgtacagcagtgactaataattcaaactctcttataactgaatgatgcgacaatattcatgcttctttatgtatacttg

SEQ ID NO: 59300 - DNA, 610 bp, Glycine max
  Clone ID: PAT_MRT3847_2455C.1
aactcgcgcagtcctgtgcgtggccatttcagcgaccgtgaccgcagccggagtccaaaacgtagtcctagtccagaagacaggcgccctcccattagtgaccaattaaaatcccgacttggtccaagaagtgatgaacgattgccagacagggggaggtcaaagtccaaatctaggagcaatggctcttcttgctccagatccccagatgctacaccaccaaaacgttatgataaaaggacttccgtgtctcgcagcaggtctagatcgagctctccatctggacaaaggggtttagtttcttatggagatgctagtcctgattctgggtcagggtaaggtattatgctcagcagaagcttaaattgctaatacattctattacaagtctcaataggagttattccatagtcaagttctaatattatcctgaattctgtcggttcagtattgtgcattagcttaaaaaggagcattctatcatgttagttcaagaaatttatcggagccaaaacttgaatgatgcgtcgtaaattggatctggcgtttgtattcataagaaatatttgttaacagtaattttgttctttgaattgcatcattccttttc

SEQ ID NO: 59301 - DNA, 407 bp, Glycine max
  Clone ID: PAT_MRT3847_24560C.1
tttttttttttttttttttttttttttttttttttttttttttttttttttttttttttttgggcgggaaacccgattaaaaaaatacctgggaaaacaagaaatcccaggtttaagcaaaggggcccttaataaaaattttagtttttggcaaacaaagttttgtaataaatgtttaccccatccaaaatatagcccttttggcccaatttttcaagcacccttaacctacaataccccttttttttttttttgtttccccgccctggatttccaaaaaaaattggttattgggcaaaaactttgaagggagggtgttatttcccctttctcgggcccccaaaggaattactttaggaaaaacccccccccggggggcccttggcccttggggggggggggcccgc

SEQ ID NO: 59302 - DNA, 231 bp, Glycine max
  Clone ID: PAT_MRT3847_24561C.1
aaacatatatttaacgctttttttaatcgcatataaaacacgggcataaggggcaacttgtgtacataataaggactatttattatcatatacaatattatacaaccacaatttgaaaacccataagttcacgtttaatccattcgaacactgactaaaagatctttggttaacaccactttcaacatcaacaaactatgtatactcaactcatgattgcagcacaactgc

SEQ ID NO: 59303 - DNA, 360 bp, Glycine max
  Clone ID: PAT_MRT3847_24562C.1
gtagcagctgaagccacagtccaccggtgagttatgattttccacccgcgctctgccagactgccattgtcggatacgatgccaccaccttcgctctccttctatgcttccttctttgacaactctacgtcttttcagacctaggtcttgatgacagtttgtacttttgcctgtagtccaacacgtatctgaaatgaatggggtataaaacaaacttcattctgtacttttcactcattttcatctcagagctctgaactcttataaggagactagactttagattgaagatgggacactgataacatatatgttgacccaaaagcatttgtcaagaacagggctcttgaggtgatccat

SEQ ID NO: 59304 - DNA, 872 bp, Glycine max
  unsure (1)..(872): unsure at all n locations
  Clone ID: PAT_MRT3847_24563C.1
tgatgagatgatttctgggactattttgaagtcttacatgcttggtgggaaagggggagtagggaagacaagttgtgctgcttcgcttgctgttaaatttgccaataatggacaccccactctcgtggtttccaccgatccagcgcattctttgagtgattcttttgctcggatttgacagggggtgcattggtgccagtagaaggacctgattatcctctttttgctcttgaaataaaccctgagaagtctagggaagagtttcgaaatgccgcccagaaaaatggtggaactggagtcaaagacttcatggatggcatgggtcttggaatgattgcagaccaggtgggagaactaaaactgggagaattactggattctcctcctcctggactggatgaagctattgcgatctccaaggttatgcaatttcttgaatcacaggaatatagcatgtttactcgaatagtatttgatacagcacctacgggtcacacattacgattattgtccttacccgatttcttggatgcatccattggaaagatactgaagctaagacaaaaaatagcttctgctacctcagcaattaaatccgtgtttgggcaagaagaaacccgacagaatgctgctgacaaattggagaaactcagagagaggatgataaaagtgcgcgaactctttcgtgatactgattcgaccgaatttgtcattgttacaatccccacggtgatggcaattagtgagtcatctagattgagtgcttncctgaagaaggaaaatgttnctgtgaagagacttattgtcaaccagattcttncaccatctacatctgattgcaagttttgtgctatgaaaagaaaggatcaaat

SEQ ID NO: 59305 - DNA, 447 bp, Glycine max
  unsure (1)..(447): unsure at all n locations
  Clone ID: PAT_MRT3847_24564C.1
cgacccagcgtccggggcttggttccttttgcaactaactggtggaaacaggtgggaaaaataaaagctgtaactggtttgcaccaaaggaaggccgagatgggtaaacattcagatgcctttattgtcttaccagggtagcctgaactgagaaacttgggtgcgttagaaaaagtagaaacatcaaaggtgcttgaaggggggtgggtttatcatgtaccattgaccctatttcagtgtcttgttcttttgagaatgatagttgnatataatattcccattgatctccctgtgctattttcttattcagcattcaacaaactgggtgttctttttgttgaacctctgtatctagggcattgttataaggggtgcttaccacgcctaatcatgaatgttgttggtgttgactagggtttaacgattatggtcttgggagtgtgtggg

SEQ ID NO: 59306 - DNA, 565 bp, Glycine max
  Clone ID: PAT_MRT3847_24565C.1
tatcgttactggtgcgacctgggatcatctgatcacacaccagtcgatgcgctacctgactgctacccttacacagtatgtttctaatataagagatcactctaagatatgcgctcacgccgcgtcaggtgggaacagtgagggctctgcggagctcggattacacagatggaacaaaaaattcagttgagacttgagttcacgaggtccacgggacaaaacaggccacaagcctactcctaccccttcaaggtggatttgttcttaacttctagattcgatcctcaggagagcggagtcatgtgaaggttgacaacttccggacgaagcacctcaacaaaactacaaggatgcgattcagaagcctcaaaatttaaattggaaaaaaaaggactcaagagtcactctcgacaaccaagattccagacgtcaggacagattcttagcgactaggaaaatgacctaatagagcgatgggatcatgaatcaaaaactcatctggtgattcgttgactttgctataggacactagagactcactacccataatcaagaatcaaagaat

SEQ ID NO: 59307 - DNA, 372 bp, Glycine max
  Clone ID: PAT_MRT3847_24566C.1
tggcttggaacctttgggctgatttatgtgcttgcatggtcgtagaagatgatagacgggggaaaagaagagccctagaaaacggacgtataagaagtataagtagaagttctaaagagattattaggctgcggcgttatcgaagcgtcctactagagaaaactatccctccctaatcctataataacgatcacagtcggcccggacaccatagtcgtcgcgggacatatcgctccacacgcgaagaagaagttcgaagtcagtgtcaaggacgcagtaaaggccatctccggagccgtgaacttcgaagaagatcatttcaagagacggacaacacaccaccagtcggactacacaacagcccataatccc

SEQ ID NO: 59308 - DNA, 317 bp, Glycine max
  unsure (1)..(317): unsure at all n locations
  Clone ID: PAT_MRT3847_24567C.1
gttccgaaggtgggaatgggaatgggtgtgttaggttcgggttcgggttcgggttcgtcgcggtcgagaatgangatgtggatgatacgggcgaccacatcggtgttactgtggacctgcatcgttcagttaacggcgttgggtgacatgtgggggccgagagtttgaaaggttggccttcttgtttcactcacgagtctgccgttagagcaatngnatgtcgagctaccgtcaccgcgtcctcctcttctccctccaaagagagtttataaaaacaatggttatcttatggtctcgtgcnatggaggactcnacca

SEQ ID NO: 59309 - DNA, 363 bp, Glycine max
  unsure (1)..(363): unsure at all n locations
  Clone ID: PAT_MRT3847_24568C.1
tttttnttttacttcttttttttttttnaaagaaaaatgggttaaattttaacccaaccaagtttaaatttggaaggcacatttttacaaggctttgaatcaaaaaactaagggccagccctttggttgtggggggttggaaaaaaaaaaaaattggaaacaaataagaaaattgcaatggggttaacaaaattttttgcccaaaggaaaaaagttttgggtttatggaaaaaattgaaaaaagttccttaaggactgtttactgggtttttcaagaaattgaacttgaggggaaggtttgttggggaataaatttatctttaagagaatttccttggggcccttagggaatttgattaaaaa

SEQ ID NO: 59310 - DNA, 395 bp, Glycine max
  Clone ID: PAT_MRT3847_24569C.1
ggaggttcaaggaactggttggaaagtggggttcctaccttacaattgaatttctacaatggcactaatttccactgttagctataagttcctatgggacaaggggacctttaacttcaggggggcaccaagctcatttgggcgattgggctgagccacctctccatctgcaacggaagcttgccttcgttgcctgtgacgtggatacagcacagttaagaggcttacaaagagggtaagaatggtagaatttccctcctccaaaagcaaattctccacccaagcttctatttttggtttcagttaaggaaatgaataaattacctgtaccatgaaactgtaaggttagtttttaccaacccaaaggcttaaaataaccagcgggaccgggtact

SEQ ID NO: 59311 - DNA, 319 bp, Glycine max
  Clone ID: PAT_MRT3847_2456C.1
catgccaaataggtttatttatttaagtgctaacacatgcctacggtatttattgagatagctaaacgagacgcatgcatggagtaatgggtctcaaaaaaaattgcgctaaatggataaatacaaagaaattgatcgaggatcacaaccggagggcactctttgcaagattgcaactctcacaatcatactggggtagagaacaccctttaatggccagggcttatgcttagacgagatgccttctttaggccaaagcacggggagccccaaaccactgagatagccaaacactgtggatctcatgggtgacccctgg

SEQ ID NO: 59312 - DNA, 472 bp, Glycine max
  unsure (1)..(472): unsure at all n locations
  Clone ID: PAT_MRT3847_24570C.1
actagctgtcgatctatggctagnaatgtaccagagtcctgtcacctcactacggtgctggcaggagccagtctaaggtaacatcggttaacccgcgaccctagaggcactgcgagcagcgtagcgtgcgatttagcctaagactatgggtcccttaattgcggtggccgtaattacgcagccgcaacttagtacaactacaaaacaagcacccgtacgatataatagtgctactgaagccatgtatgccatggagacctttggaggtgcccccactaacaaactgcgagcggcctcagtactagcgtactagcatgcaactgcagagatgacccacgagcactagtgccgtaccggcactgacgttactgcatgagacacaacactccctatgctaaagcgggagcctgagcgctactagctatcttgacaacagctaacacagctgtacactgacaagccgtaaggccac

SEQ ID NO: 59313 - DNA, 169 bp, Glycine max
  Clone ID: PAT_MRT3847_24571C.1
cccacacgttctataaaaatatactatcttattctctgttctaccttcaccatccaggtcaggtcttataatttgtctacctttcttaacatactacaaccttatacaatccctacttactttcaaaaaccctatctttttatacatcccagcttatactccctaactt

SEQ ID NO: 59314 - DNA, 511 bp, Glycine max
  Clone ID: PAT_MRT3847_24572C.1
gggccataaaaaaccgggaaaattcccaaaaaaaattcaaaaggggggtggccccccgcccattaaaaaaaccccacccccaacaggggaaaaaagcaaagccttggccttttggcctttacccaaaaaaaaaaaccgttaaccctttttttttttaccaaaaaaggacccaatccccttttaaagggcaaaaaaaaaccgggggggggggaaaccccttttcagtggaaaccccgggggctttcaacaagaagataaaccgccccaaagcaaaaaaggggttttaacccctggggggggggccccccaaacccctttggggctccggggcccttttggggggggttttttttggggggaaggcaaccccctttaacccaacccccaaaaaggttaaaaaagttcccccccccgctttcacaaacaagttttgaaaacccccaactcttttgcccgaagagggaaacgacctgttcggaccccacctaaaaggggcccgggagaaaacccc

SEQ ID NO: 59315 - DNA, 2143 bp, Glycine max
  Clone ID: PAT_MRT3847_24573C.1
gcacgaccgaatctgcagtcgcaacttgaaagtcgaaattctctgttatgttgtcttggaacctacctctaaaacttctcttctttgtcccaaacaaacttcgttagtcattacaaatacattccctttctctctctcttctccaatttcaatgagatgagcaacaacaacagcaacagcatcctcgtcctcctcaacctgtaccttattattcacacactcttgtcacgcgcgcattagtgtctcaaatctcaattccgtttccccttcctcttctttcggagccacacacacgtacgtacatatatacgttaacacgtacgtaagttttatatagtaaaaagtattaattacgacatatacgacacgaatggcggcggcggcggctgcttttgttatctccgtcgcgctgttggcggcggtagctggcggatcgccggcgactctgactttggaaagagcgtttccgacgaatcacggggtggagctgagtcagctgagagctcgcgacgagttgaggcatcgcagaatgttgcagtcttcaagcggcgtcgtggatttctccgttcaaggcacctttgatccctttcaagtcgggccctactatacaaaagtgcagttgggtactcctccagtggaatttaatgtgcagattgacactggtagtgatgttctctgggttagttgcaactcctgcaatggttgtcctcaaacaagtgggcttcagattcagctcaatttttttgaccctggaagttcatcaacatcttcaatgatcgcttgttctgaccaaaggtgcaataatggaaaacaatcatcagatgccacctgttccagtcagaacaaccagtgctcctacactttccagtatggagatgggagtgggacatcaggctattatgtgtcagatatgatgcatttgaacaccatttttgagggatccatgaccacaaattctactgcgcctgtagtttttggttgtagcaatcagctgactgtggtcttgacaaagtctgatagagcagttgatgggatatttggatttgggcaacaggaaatgcctgtcatttctcagctttcctcacaagggattgctcctagactattctcgctttgtctgtgaggagatagtagtggtggggccatattggttcttggggagattgtggtgccatacctagtctacacttcacttgtcccagcacagcctcattacaatttaaatctacaaagtatctctgtcaacggccagacattgcaaattgattcttcagtttttgcaacatcaaacagcagaggtaccattgttgattctggaacaactttggcgtaccttgcggaagaggcttatgatccctttgtctctgcgattacagcttcaattccacaatctgtacacactgttgtttccaggggaaatcagtgttatttaatcacatccagtgtcactgaagtttttcctcaagtaagtctgaactttgctggtggtgcatctatgattttaaggcctcaggactacctgatacagcagaattccattggtggtgcagcagtgtggtgtattggctttcagaaaatccagggtcaagggataacaattctaggagatctcgtattaaaagacaaaattgttgtttatgatctggctggtcaacgcattggatgggctaactatgactgttctttgtcggtgaatgtctctgcaacaactggcacgggcagaagtgaatttgtgaatgctggtgagataggtgggagcatctctttacgtgatggactcaagttgacaaagacaggattcttggctttctttgtgcatctaacgctaatttactgttttggattcttatagcatttaacatcgttagagatattctttttcatacgtatattcttttgccggtatatatttgtgtcaatcggcaagaccacattaatttgaatgttgctttggtgcctcctttctgcacaatataggcttgtccggtttatcatcctcaagtgattctgttgaaggatgtagaatcagataatagctcattacttttggcagtgttgtaaattatttcacaggattactgattgaaacctacacacgttactataaattccagccttttcttcccctagtttaattgaaaaa

SEQ ID NO: 59316 - DNA, 208 bp, Glycine max
  Clone ID: PAT_MRT3847_24574C.1
ctgggccaaacaaatacaaattttggtgcaacatttaaataattgcaaactttttgccctttattgtatgtaacaatctgctgggatccaggaaacagggttttttacatacccatggggggtggggggataatgagtagcatgtttttttaaatctgtttttacggggcccccgattccaataaagttcccaccaaaaatttcattt

SEQ ID NO: 59317 - DNA, 529 bp, Glycine max
  Clone ID: PAT_MRT3847_24575C.1
cccacgcgtccgcccacgcgtccgcccacgcgtccgcccacgcgtccgtacggctgcgagaagacgacagaagggtacggctgcgagaagacgacagaagggtgggttgcaacgtgtactcaaacatgtcctagctaactcattaagaaaacacctttcctgaactttttccattgccattctacgagaacgttaaagttgatgtcgttgggtggagcctcccatagcattgtctattaatacgtctgaaataggtgccattaatgtaaaaatatacttgtgcagaaaccaaacttcagaattcagtttgttaggaggcaaataaatatcgttgctcacactcttccagggatgacaacttcttacgttatactcagttttttattatataccctcttgtatcttccaacttagaatgaaaagtcatgattcagtttctgtcaggaaaaaaaaactctctccattgctagtcaatcatatgtgttccctcattttttcaaaaaaaaaaaaaaaaaaaaaaaaaaccaaa

SEQ ID NO: 59318 - DNA, 340 bp, Glycine max
  Clone ID: PAT_MRT3847_24576C.1
aaaaaaggaaaaggccccaaaaaaaataaaaggggccccaggaaccaaaaatttttggggaaaccgggccaactagaaaaaattaagggggaaattcaaaaataaacattttttttttggcccaaaaaaattgaaaaagctaaaaaggggcccccccaggtccttaaaaaattttgaccctgggggtgacacaaaacctttcaaaaagagaaaattttcctggcccaattggtttcgcccccaaatgaaaactggaaaaaagtcccccccggaaaacaccccccggtagaatttcaaaagcccacccaggaaaaatccttggaacccaatggggcttttt

SEQ ID NO: 59319 - DNA, 552 bp, Glycine max
  unsure (1)..(552): unsure at all n locations
  Clone ID: PAT_MRT3847_24577C.1
ggctcgagtaaaccatatgctctctagttatcgttctttttctggtgatgatatcccctttagtaggtcattttccagccacagggatcttgactctgaatctggccattctgtattgcatgcagatactccagttgcagtactacaggaaattgcactgaagtgtggaactaaggtggactttatttcatctctggttgcaagcactgaactgcagttctccatggaggcatggttttctggaaaaaaaattggtcacagagttggcagaactagaaaggaagctcaaaataaggctgctgaggattctatcaaacatttggcagatatatatttgtctagtgccaaggatgagcctggttctacatatggcgatgtgagtgggttttctaatgtaaatgacagtggttacatgggtattgccagctctcttggtaatcagccattgtctanagaggattcagcttcattntcaactgcatctncatcaagaagtntagatcctanngtggatgtctctaagaggtcaatgggttcaatctcttccctgaa

SEQ ID NO: 59320 - DNA, 353 bp, Glycine max
  Clone ID: PAT_MRT3847_24578C.1
ttgatgcgtgggcggacgcgtgggttgtggttcattggaattgtccttggaatcgcatgtcccaagggtgggaaacttcttcttcaggactattgtgacaaaccgaagacgcgctgctaaactattcttcgcatggagtttagtctgatggggcaatagcagaggaagaattttgagaaggacattttgagaaaaaggttacaagctcaaacgttcatctggcaataacccatactgcatggcaagcacagatgaggccaattgactactgagattgggcatctcatattgtgcatggagaatatactcggtttgaaagataggtgaccagacaggatatgagcatacatggc

SEQ ID NO: 59321 - DNA, 897 bp, Glycine max
  Clone ID: PAT_MRT3847_24579C.1
gtttttataaaggacgtgtattctcatttaccagttctctcggtttttttattaacactttctctcctctcctttcgcatatcaattaagccaaatagacttttgttaatgcaggggcaaatggtgaaaagatattgcaagagggaactgagattaacttaattcaatagtcaataggtattaagattatattataatacaataggtggtgtatgttagcatgtacttatgtagctagtacccataggtcatcctcaattgaagttacaaacataaagcgtaagtaggcaacttcgatttctcataatacattttgtctttttccttatcatgcgtgacatgattcatgaaccttccgtgagacaaaaaataaataaacatgcgtcaagtcaacgtgcatgtgagcttcacatatgttataaatttctaatgtacacatagttcataacaaatatccaccgtaaatagttgaaattcccaatatctgcaaagtacaatttcttccttcataaacataattttgtccttgcagtcacacctggaggtgacaaaggaggagcaggcagagtcacattcaccgggctttctttcctcctcttattttgggtatctatgctgtttaattaggaaggtggttctttatccttcggagcctctactatgttgaagttatctttgtatttccacacgttgattattcggtgatcatatgattgtattttcttttcactttttttcttctttagagacctctgattcaattgagtaaaaagtttatttaaacgaaaaaaaaaaaaaaaaaaaaaaaaacaaaaaaaaaaaaaaaaaaaaaaaaaaaaaaaacaaaaaaaaaaaaaaaaaaaaacaaaccaataaaaataaatcgggataagaaat

SEQ ID NO: 59322 - DNA, 208 bp, Glycine max
  Clone ID: PAT_MRT3847_2457C.1
ccggatcctcaggaaagccccccggggggcgggaacccggctcacgcgaccggtaccaagccgataaataaaagcccaaaacccacccgagacgagggagggaaactagacaccaagaagcggcgaccacccagcaaccaccaagcagccgcccaggccgccgccagacaaggcgacaagccacaacacgacagccgccacaaaacca

SEQ ID NO: 59323 - DNA, 110 bp, Glycine max
  Clone ID: PAT_MRT3847_24580C.1
gggtcgtgtacgaaaaaatacaagtgcggtctaaccaggattcatgaactgaggtccatacgttgagtacaagctagctgcaaaagacgacgcccgagcacatggaccaa

SEQ ID NO: 59324 - DNA, 281 bp, Glycine max
  Clone ID: PAT_MRT3847_24581C.1
ccctttatctttttcttgtttcttattcaacaaaacttgtcaactatgaggaattttttccaacctatcatgacaatatattaatttcaatcataaattcactgaattttaagaaccactactcaaaatacactgttcgatttccccattttactcttcatatataggcatctaacgttcttccaaatctttttatcatatatacaatgaatattacacttatttttacattttggaagatttgctttttcttcattctaacattcccaccaaatacttcc

SEQ ID NO: 59325 - DNA, 299 bp, Glycine max
  Clone ID: PAT_MRT3847_24582C.1
tgtgcctgtgctgtccatgcacaccgtgcattcaccactttccctcatcctgctcattaagaagctcatgctttgatgttgaacacacttcgaggatgtgccctttcaagggctcagagaagtgaaaaagtgaaatccctccctggtagatatatgcctgcaaatagagagacttcaactttgtgtcttaaactcggtttgttttaatccccgaattgtgaaagctcgagacattttggatgctaaaactggcttgtacctagtaagctatttgagtttatggaaagacatggacttct

SEQ ID NO: 59326 - DNA, 428 bp, Glycine max
  Clone ID: PAT_MRT3847_24583C.1
gggatgtacacgtgttatatctgaaggagagtttgtatgtactctttaaaccaagcggggcgtcaagaacttgaaggtgttcttgggtcctgttgtaggggctaaacttcagattataattattcttcataacaaccttctaagcgaaattcatctaatactacccctcattataattgatattattcttttgacatacgcttcttactaactatcttccatgctcaatcataagatattcttgttaaatctcggctttttttgacttttcataccaaacttttgtcgatctttatactgccactttaaatgctctttgatataaaatttttaccctttccttagacatttaaaaaaattgttattttcccatcatggattcttcttcagtccaactgtaatagctaatacttttctcttaacttatc

SEQ ID NO: 59327 - DNA, 1228 bp, Glycine max
  Clone ID: PAT_MRT3847_24584C.1
gaccagtggcgatgcctatcttcatgtgacacatgggtgtcttaagcatcaggtcgagacaaagcaatgtaactttagagaagacaaatttggttgtgccacggactaccggtttcgctttgaaatttaagttgttgaaaatgttttacaagaaatcagggcagacagcgttcgaatatgagcttctgcaatctcagtttacaatcaatgttaatactatatttctcgcgcatagggtcgatgcatcgccatatcattatagaagcgcggagtactttattctctcatatatacatcaataaaggacaagattggaggtgataagcaaacatctcagactcttcgaccaatgcagaggccccttaatcgaatcttagtatttgctgggggtttcaaattaactatggggtgctgagctgacgttgaggagagggcctatctttttgcttttgtgcgtttgttatttgagactcgagattcaagtgggagggtatagattgattgacgtctgtacaagtacattttgttgaacttctgatttatctgtctagttatctgtaataactatcaaccgtttcgagtagctagttgtatacacaatgccatttcggtaccaaaggtcagtgttttcttcttctttgcaggaaacatttccagcacattcatggacagatatggtttaatatatgtacgagcacctgctgtgaagaaacatgttgatgatttaagagccaaaatgacatactcgtgttccttcacaccctgcctgtacattaacatggtggagtacgatatttcatgtgttaagtctgtggcaagctctctgtacatttacaaaattcaggggtgtccctccatactatttaattgttctgttttagattattttttttgtcctgttttcaatttctgtattttgtttaacccccatattgagggccccattgttagtggtgctgataagtaggatgaccgaactcacttgttgccatcctttcaagctgcttccctttagcagatgataccagttaatgtaattcttcaatgatccagcctctaagacgccaaacagattggggggcctaatgagtatcgcggcctattgttgccagttgtgaatctttggttgaaagaatgagaaaacatagtgccattaatggtggtaaatatgtctcccttcatcctcggggtgttgcggctatctttgcgggtggcttggagtgagttt

SEQ ID NO: 59328 - DNA, 934 bp, Glycine max
  unsure (1)..(934): unsure at all n locations
  Clone ID: PAT_MRT3847_24585C.1
tccctaggactgtactactgcaagaacatcacagatagggcaatgtattccttggcacacaggcaaggtgaacaacaggnatgtggggatctgtgaaaggaggaaatgatgaagatgggttaaggactggctcgagtagccaatgcactgcactcaccccatctgctgttcaagctgtttgtgactcattcccttcccttcacacatgctcagggaggcactcactcatcatgagtggctgcctcaacttgacttcagtgcattgtgcctgtgctgtccatgcacaccgtgcattcaccactttccctcatcctgctcattaagaagctcatgctttgatgttgaacacacttcgaggatgtgccctttcaagggctcagagaagtgaaaaagtgaaatccctccctggtagatatatgcctgcaaatagagagacttgaatctagttgaagaaaagatgtacatatatgtacatcttttcttcaactttgtgtcttaaactcggtttgttttaatccccgaattgtgaaagctcgagacattttggatgctaaaactggcttgtacctagtaagctatttgagtttatggaaagacatggacttttccagaggggttgatgatgtataaaaggacactttgatgaggaagtgcccttgaagggttttaaagttttaggggtcttctggataagtttatgttcaatgctgcatcatgtcatgttggttgtagaacagcttgaaccttggtgcttgagtctcttttggtctccgattttcatgtgaagggttaggatatttttggtgtcaaaatgtggtttattcctagcttggttatgaatttatggtcagccatggacttttatataatggtattattttatgccaggatgtgtgttttctctaaaaaaaaaaaaaaaaaaaaaaaaaacaac

SEQ ID NO: 59329 - DNA, 2196 bp, Glycine max
  Clone ID: PAT_MRT3847_24586C.1
tcctcgcgtacggcattacaggtatgaatgattgtggtatattagttggtttcataaacatagaagaattaagatggctttgaattatattcataacccattgagtaattcaaactttttcccaaatccctcaaccttatcagcaacaaagcttctctgttaaaaaaaaatgacgcctttatatggttattaaacagagtcgtaaatttccatgaggtgtatattctatggagctcacatggtgggctaaggatatctgcttctctgttaaaaaaaaattgattgcgtctaaagggtggcgaaagcttagaaagttgaaggctttttttgttgaggtgaaagtgaaatggttggcaaggataatctgagggctgacgacttgaacttgtgcttcaagaagctgatgatggtgtgccgggagtgtgtagagtgagaaaggggtgaactgatggtattgagtttgcacctagcgcgtttatatttctcagggtgtacggaagaacatgaattcacttggtcctatctcttgttcctaaattcgcaaaactgcaaactctaatcctccgtcaagacaagcctcaactagaggataatgctgttgagactattgcaaaatgctgtcatgaactgcagatcctggacctcagcaaaagtttcaagctaactgatcgttcactctatgagctcgcccttggttgtcgcgatcttacaaaactcaacatcagcgggtgttcagcatttagtgacaatgctctggcttaccttgccagcttctgcagaaaactgaaagttctaaatctttgtggatgtgttagagctgcatccgatactgcattacaggctattggacaatactgcaatcagctacaatctttgaaccttggatggtgtgataatgttggcgatgttggagtgactactttagcatatgggtgtcctgatcttaggatagttgacttgtgtggctgtgtccgtataacagatgacagtgtgattgctttggcgactagatgcccccatctgaggtccctaggactgtactactgcaagaacatcacagatagagcaatgtattccttggcacacagcaaggtgaacaacaggatgtggggaactgtgaaaggaggaggaaatgatgaagatggtttaaggactttgaacattagccaatgcactgcactcaccccatctgctgttcaagctgtttgtgactcattcccttctctccacacatgctcagggaggcactcactcatcatgagtggctgcctcaacttgacatcagtgcattgtgcctgtgctgtccatgcgcaccgtgcattcaccactttcccttatcctgcccattaagaagctcatgcttttgatgttgaacacacttcgaggatgtgccccttgaaagggctcagagaagtgaaagaagtgaaatccaccccccttgtagatgtatgcctgcataagagagacttgaatctagctgattatgtacatcttttcttcaactttatgtcttaaactcggtttgctttaatccccgaattgtgtaagctcgagacattttggatgctaaaactggcttgttcctagtaagctattttgagtttatggaaagacatggacttttaaatttgcatggttttatggaagtatatgcaaattttggtaaaaaaaaaaaaaaaatgaataactgactctgatattatttaggggaaaatcgcattagaataaaggccggcgaccagttaggaggacccctaaaaggacactttgatgaggaagtgcccttgaagggttttaaagttttaggggtcttctggataagtttatgttcaatgctgcatcatgtcatgttggttgtagaacagcttgaaccttggggcttgagtctcttttggtctccgattttcatggaagggttaggatatttttggtgtcaaaatgtggtttattcccagcttggttatgaatttatggtgagacatgcttttatataatggtttattttatgcccgattttgctcaaaatttcactagttgcatttttcagtgaccttttacaatatctgattttcatgatattaccaaacgacatacaaagcccctcagaaggtgctcagacatgcacttgaaccagtacttagaatatatcttacaaactaacacgacactaacatgggagttagaataactcatgca

SEQ ID NO: 59330 - DNA, 493 bp, Glycine max
  Clone ID: PAT_MRT3847_24587C.1
gatctatattgttgcgtgagtcgcgacgttttttacgtttcgtgtagggctgccgaacttccttaccctatggagagtggtgaccaaagctggaccatggctggccatgactgtgtccggactggaattggatcagacctcaattcgacataatatacgcatcccaaacgtgaagagactggactgccctgcgagttaagagatccaaaatacttcaagtgcgatgcgccctctgcctccataacagagggcggagccgccaccccatttgactgcttggaccagtctccccgcgaggaggggggtcatgcggatcgcccggggggggggaatttctgttttgcgccgagcgagccaacatatgaatgcccttcgcagcccgggcctgacagagttgtggagggcaggccgcgatgacctgtcccaacaggggaccatgctacgtggtgcaagctggcgatcggacactacatgagggggatatgggagtatc

SEQ ID NO: 59331 - DNA, 213 bp, Glycine max
  Clone ID: PAT_MRT3847_24588C.1
cacgcggacgtacagctgtcaaaaatccagctaaagggactgccacagaggggcactagggactcactctcttcacagcaggactcacagtggctttcatcttctcggggtaagttttgatcatgtacacatcatatgaagacaattcagaaggctaacgatgtggatccaactcaatttgatgaatcagttggtaatgacagtgtttgatct

SEQ ID NO: 59332 - DNA, 258 bp, Glycine max
  Clone ID: PAT_MRT3847_24589C.1
gctataaggaaatggaaagtgcatattcctagtgacactaaagaactttatgagcttgatttggaagagtatgccaagagagggagagtcagaattgattccactccaaccttgaggatcctcaacaaggcatgtgtcaacaccgattcaagtactagtggatggaagctaagccctgttacccatgtggaggagaccaaacaaatgctaagaatgatcccaatcttggctgctacattgatccctagtgcaatggtt

SEQ ID NO: 59333 - DNA, 775 bp, Glycine max
  unsure (1)..(775): unsure at all n locations
  Clone ID: PAT_MRT3847_2458C.1
cccacgcgtccgtacggctgcgagaagaggatagaaggggattggaatgtggaaagagtctccgcagtcctcaccagaagcaaaaagactgggttttggcgttaacctaagcgaagagagagagaggttgaagaaggtgaattgaatggcttcctcatcctcttatcctcggacggaaggtgaagaagagtatgggtctgaatcgggatgggtggatgctcgaagttggtgcgatcacctggcatcatccttatcggaggatctagggcagattccggggcctgatactccgtgccagacctgccaacacccaactgaaaactggttgtgtctgtcctgtaagcaggtcctctgtagcccttttgtgaacaagcacatgctccaactctcactcgacacttctccctctcactcagcgatcctcagtttcagcgatctctctgcgtcgcttacttggatcctcaactcattccccaactccgtcctcttcatcaactcgcctatatttcgaaattcggtcagcctccaccaattccatcccccagtctttgattctcattcattgcctttattaactctattttctgcaatgctttgcctttgtgttaaaggcgaatttatcggattgcctaagtatgtttttccccccaactaaactagtgattagagaggtaatgctgattataattacatatttatgtatcagattatgtgaactcccccgaaataaaaaaaaaatacctctaatcattatttnnnnnnnnnnnnnnnnnna

SEQ ID NO: 59334 - DNA, 538 bp, Glycine max
  Clone ID: PAT_MRT3847_24590C.1
aacacagagaacacataaggtgtcattaaatagatctacaagtctctacatcaagtacctacgaggaagaatcaacagaggatctagctcttcatatctaggaagcttcctttacaacacagagaagagaaaaatgaaggagcgaagaaatacaagcagggaagatggctccttcacctctagaacctcacaatcactcacagactcatctcatgctctcaggatgacttcctcttcgcgctcagttctctgccagtcttctcacaacaaaagctctcaaaactctctggatttgaacccttctctctctagaatctctcacatgcaaaagctctttgagaaaaatggccaaaatccctctccatttctgatttcaggcttaaataggcggtcttgttggtgcttgcgcgcttagcgcaactctagatcgcttagcgaacataagtgaatttcggcttagcgctcgtctcttcaggattagcccttgctcagcgaacatgcacaacttatccttcttccagattcttcctcgggctca

SEQ ID NO: 59335 - DNA, 391 bp, Glycine max
  Clone ID: PAT_MRT3847_24591C.1
gttcattgtataggatcacatttgaggataggaggaacggaatagaagggagaggaagaggaaaaggagagaaagacccaacaagcaaagagaagtggcggctccaaatgcagagaagattagggacactcagaaaaaagggggaatgacaacgagtgaggagggacagggcacaggccaaaagccagaagagcggctggatcagttgaaacgagaagggaaggaccactgttccaaagtggccatacgcaacacctgagaagaaccagtgtaaccacccctcgggagatcaacgtggacggagatcgtaccagggcggaaatcggagacctgctgcgcacagggaacgcgaaactgggcaggaacttgaacagcaagataggagtccata

SEQ ID NO: 59336 - DNA, 432 bp, Glycine max
  Clone ID: PAT_MRT3847_24592C.1
aatatacaaacgcctaccatcatacataatggagacgacaccctaaatgagaacttgcaggttaataaaatattcaaatgcatagctgtggtccttctttaacatacccttaccgtgggctttcccaccctctgctaagaaaaactcacatgaataaaatctacatctcctttttcacaaacgaatagaaagcttaagactgctccatactgcgctccataactttagcacatacaataggactttactgtgtctgggcggatggaacttatatactgattcatatatttgaatttagccttaaaaacagattcaggatgaacacttgaaaccagaacaaacaatatatctctgatccatcttgcaaagattagggtacttgattttgttcagttcccaccaaaccaatacatcaaagtgcggaacacgtgg

SEQ ID NO: 59337 - DNA, 415 bp, Glycine max
  Clone ID: PAT_MRT3847_24593C.1
tgtacatgctctggggatccgcacaacaaagatccggaaataagctcctatgttgtcaagccaactgtagtcctcgtcgaccatctggttgatggactgcaacagtttcccttactcactcagaatctagggtgtgaccaacgctctatatttaggcacatacatgcaaatctgaacatactgcatcatgcacgacaaaaacagcttaacaaagacagagataaactgacaaagcatcttcaatgagtgctcaccaatactgttactagaatggcaacgctggttgaacacagtttgcttgatgcatatgctggagaatcaagagatggatctttgagtacgaaggtcagcactgctgccataatgtccatgaactgatcctcacaactactaaggaccataatgacctgtgcta

SEQ ID NO: 59338 - DNA, 1232 bp, Glycine max
  Clone ID: PAT_MRT3847_24594C.1
ggccatcactcaaacattaagaaaagcttatgcctcagccatcgtttctactcgctagagcgtaagcatgggcactcagagaagcaaacccagttgtaccatcgttgcgatctttctagcattttgttgttttgtttcttcttcgaaagcaaagcttgagagtctccaacatgcgcccaaagctgatgggtctctaagcttcttggtggttggagactggggtagaaaaggtgcttataaccaatctcttgtcgcttttcagatgggtgtaataggagagaaattggacgttgattttgtgatctcaacgggggataacttctacgacaatggattaaccggagtgtttgatccatccttcgaagaatcattcaccaaaatctacacggcacctagcttgcagaagaagtggtacaacgttttgggaaatcatgactacaggggaaatgccaaggcacaaataagccatgtccttagatacagagacaatagatgggtgtgcttcagatcatataccctcaattcagaaaatgtagacttcttttttgtagacacaactccttttgttgataaatacttcattgaggataaaggccataactacgattggagaggcatactacccaggaagcgttatatttctaaccttctcaaggacgtggatttggcactaagacaatcaacagcaacctggaaggtagtgattggccatcatacaatcaaaagcattgggcatcatggagacacccaagaacttttaatacattttctcccacttcttaaggcaaataatgttgatttgtacataaacggacacgatcactgcttggaacatataagtagccttgacagttcagttcaatttttgacaagtggtggtggatcgaaggcatggagaggtgacacgaaacagagcgaaggagatgagatgaagttttactacgacggccaaggcttcatgtctgtgcatatttctcaaactcagcttcgaatttctttctttgatgtcttcggcaatgccatccacaaatggaacacctgcaagtttgactcctgtgacatgtaataagtttactagttaaacaatataaaaacatatgttcacatctcattggctgaatattaaattaaaaataaagccttgaaataaattaaagtttttagaattttaatttagtcatccgcgcgctttcaactgcgaacttaaatgagttgtttaatttaagtagtgc

SEQ ID NO: 59339 - DNA, 308 bp, Glycine max
  unsure (1)..(308): unsure at all n locations
  Clone ID: PAT_MRT3847_24595C.1
gcgcgcagaaagcggggaccccacagagggcgcgcccgcgatctattttgcgaccgancaancaaacccaaccgggggccgttctgaaaaatcacggggggggacccccccaagagggattttcaagacgccccaggaacagaaacccgagaanccagggaaacgaaacaacccaaaaaaggccggccaaaaaaaaagataccacnnggcacacccccaaaaaaaacgcaggagaaccatccaacaccgaacccggtaagggccaaaagaaacaccccacccaaggcaaaggcccagaatccgaaccc

SEQ ID NO: 59340 - DNA, 1333 bp, Glycine max
  Clone ID: PAT_MRT3847_24596C.1
ccggccccccaggcggcgggcgaccttcgtctcgtcatcgtttcgttcaactttcaacgccagttcacactctctgcttcgcgtgtaccaacaagtgcaagttcgaatcaatggccagcgctcagctcacagcaatagcgtcatcgatctctacggcgtcgtttgaagggcttcgaccttccgctgttcagtttgcttccacgggcagaattagaattggcaatctctcccaaaggtccttccggggcttggttgtcaaagccgccaccgttgttgcccccaaatacactgcgataaagcctctgggagatagagtgctaataaaaattaaggaagcagaggagaaaactgagggtgggattttgcttccatcaactgctcaaacgaagcctcaagggggtgaggtggttgctgttggggaaggaaagacagttgggaagaacaatgtagagattagtgtgaagactggtgcacaagttgtgtattcgaagtatgcaggtactgaggtggacttcaatggtacaaagcatcttattgtgaaggatgatgacattgttggtatcctcgaaactgatgacatcaaggatcttaaacccttgaatgatagagtcctcataaaggttgctgaagctgaggaaaaaacctctggcggtttgttgcttacagaggcaaccaaggacaaaccttcgattggaacagtgatagctgttgggccggggcatctggacgaggaaggcaacagaaaaccgttgtccgtgactccggggaacacagttttgtactccaaatatgctggaaatgacttcaagggcaaagatggttctgactatattaccttgagagtctcagatgtcatggctgttctctcctagagcaacttgctttgggttttgttacttgaaatttttgtgttcatctcgagaaaacgtgcattttttaactgtaaggacttttgaaaaatatagttaattgcaatctgttccgtagaaaaaaaaaaaaaaaaaaaaaaaaaaaaaaaaaaaaaaaaaaaaaaaaaaaaaaaaaaaaaaaaaaaaaaaaaaaaaaaaaaaaaaaaaaaaaaaaaaaaaaaaaaaaaaaaaaaaaaaaaaaaaaagggcccccccgaacccaacctttttttctttttttggggggtttaatggccccttggggaaaaataagaaaaaaaatttcccttgggaaaaatttttttttttcaaaattccacccaaaaaatgcccccggattaaaaaattgaaaccccggggggcccaaagggggggccaaactcaatttttttgggggggccacattcccccttttaaggggaaaa

SEQ ID NO: 59341 - DNA, 675 bp, Glycine max
  Clone ID: PAT_MRT3847_24597C.1
gaacaactccttgaacagtgttgtcaatgatgccacacacagatccaaagtcactgttattggaagtggcaactggggcagtgttgcagctaagctcattgcctccaataccctcaggcttagctccttccacgatgaagtgaggatgtgggtatatgaggagacactactcggcgcggggaagctcacagatgtcatcaatcgaaccaatgaaaatgtcaaatatctccctggaatcaagcttggcaaaaatgttgttgcagatccagaccttgaaagtgccgtgaaggattccaacatgttagtgtttgtgactccacatcaatttatggaaggaatatgcaaaaggcttgttgggaaaataagggaagatgctgaagctatttcccttgttaaagggatggaggtcaaaatggaaggcccatgcatgatctctagtctcatttctcagcaactgggaatcaactgttctgttttaatgggtgccaacatagcaaatgagatagctgtggagaagtttagtgaagcaactgttggatacaggctcaatagagaagttgctgagagatgggttcagttgtttattcacactatgtcattgtgacagctgttcgagatgtggaaggagtcgaactgtgtggaactatgaaaaatgttgagccagtactggcgagt

SEQ ID NO: 59342 - DNA, 1730 bp, Glycine max
  Clone ID: PAT_MRT3847_24598C.1
ttccccccgggacccgttttgccccgggttcccccaaggggccaattaccccccccaaaagggacaaaaacttggggctcaggggcccctttttttttttttttttaaaatttttttttttttttttttttttttttttttttttttttttttttttttttttttttttttatttttttttttttttttttttttttttttgaaaaggaataactggtacaatctattacattaatataatcgatctacaaacgatcacaccgagaacttcattgaacagagagcatgaactacttatttttcaaaagtccttacgattaaaagaatccacgttttctcgagataaacacaaaaatttcaagttacaaaacccaaagcaagttgttctaggagagaacagccatgacatctgagactctcaaggtaatatagtcagaaccatctttgcccttgaagtcatttccagcatatttggagtacaaaactgtgttcccaggagtcacggacaaaggttttctgttgccttcctcgtccagatgccccggcccaaccgctatcactgttccaatcgaaggtttgtccttggttgcctctgtaagcaacaaaccgccagaggttttttcctcagcttcagcaacctttatgaggactctatcattcaagggtttaagatccttgatgtcatcagtttcaaggataccaacaatgtcatcatccttcacaataagatgctttgtaccatcgaaatccacctcagtacctgcatacttcgaatacacaacttgtgcaccagtcttcacactaatctctacattgttggtatccttgaaactgatgacatcaaggatcttaaacccttgaatgatagagtcctcataaaggttgctgaagctgaggaaaaaacctctggcggtttgttgcttacagaggcaaccaaggacaaaccttcgattggaacagtgatagcggttgggccggggcatctggacgaggaaggcaacagaaaacctttgtccgtgactcctgggaacacagttttgtactccaaatatgctggaaatgacttcaagggcaaagatggttctgactatattaccttgagagtctcagatgtcatggctgttctctcctagaacaacttgctttgggttttgtaacttgaaatttttgtgtttatctcgagaaaacgtggattcttttaatcgtaaggacttttgaaaaatagtttattgcaatctgttccgtagacaatctctttttatctttgaatttggtagcctgtgttgaaataagttccgcaatatctttgaacattttcttaattattaaatgcaattatattcctagaaaaaaaaaaaaaaaaaaaaaaaaaaaaaaaaaaaaaaaaaaaaaaaaaaaaaaaaaaaaaaaaaaaaaaaaaaaaaaaaaaaaaaaaaaaaaaaaaaaaaaaaaggggcccccccaccccccctttttttccccttttagggggggaaaatggcccccttggggaaaaaagggaaaaaagttttcccgggggaaaatttttttccccccaaaattcccccaaaaaaaaagcccggaaaaaaaaagggaaaacccgggggggccttaggggggggccaacccaaattaattgggggggcccccccccccccttttcaggggaaaaacctgggggccccctttttttttaaaatcccccccccccgcggggaggggggttttgg

SEQ ID NO: 59343 - DNA, 856 bp, Glycine max
  Clone ID: PAT_MRT3847_24599C.1
gagctatgactgtcgctcttgcaagatcggaactcggcccacggcttgcatcaatctcgcgctctcaactcgctgttccccccaaaaacccttgctggggaccatgagcaagtctccgcgcagagatctgcaagtcttcgatttcaacgaagaggatgaggtcgcctccgataaacaccacgatttcctcgctcgcgatgcgcaggtcaacaaggttggcatcaagagtgttgccagtatttatcatgttgatgttgatgaagctggtgctatgtttaatttggaaaagggtggttctgacacctctcctgacacagtggaagatatatatgatagtaaagagaatagttctgtgttggaagctgacaaacaatcaaatttgattagtcatgaaagtcgtcatcattttaaaatagatattcataaccataacaaactagagaaaatggatacaagtagcgaagtatcttcacctgaaacaagccagattgacccttcaggatcttcatttttttgcacagccccttcagggtcttcatacagtaatgaatcaattgatgtcaattcagaggctgatgagagcatgaatgagagtgctccaacaagtcctgcttctgatattccagagaatggtgtgtcattagatggttgtggattgaatggcacagacaattctgacatggatgacacaatggaagtcgttcttcatcctgattatgtcatataccaggataattattatctggggccaaaggtaaccttttcaccttgttttgtcaagatcaatgtttcaactgcatgtataaagcaagaagcttttgatcttgaatgggcagttgatgatctcattgacatt

SEQ ID NO: 59344 - DNA, 452 bp, Glycine max
  Clone ID: PAT_MRT3847_2459C.1
gcagtcctcaccagaagcaaaaagactgggttttggcgttaacctaagcgaagagagagagaggttgaagaaggtgaattgaatggcttcctcatcctcttatcctcggacggtaattaccgaaaactttgtatgaatttcattgctatatatatatatatattttataaaattagagtcgcagatcgagggaaagaactaagttggatgattgatgagtgatcaggaaggtgaagaagagtatgggtctgaatcgggatgggtggatgctcgaagttggtgcgatcacctggcatcatccttatcggaggatctagggcagattccggggcctgatactccgtgccagacctgccaacacccaactgaaaactggttgtgtctgtcctgtaagcaagtcctctgtagccgttttgtgaacaagcacatgctccaccattctcgtgacacta

SEQ ID NO: 59345 - DNA, 126 bp, Glycine max
  unsure (1)..(126): unsure at all n locations
  Clone ID: PAT_MRT3847_245C.1
gggcaagntnagtgtctaaccttagnaacattgccacatatnaccgntcattntggaattgtgcantnaaattctattcaattcatcgatggggccnnntcnnatgctatgcnatnaatcctggca

SEQ ID NO: 59346 - DNA, 218 bp, Glycine max
  unsure (1)..(218): unsure at all n locations
  Clone ID: PAT_MRT3847_24600C.1
aggggaacattcaatgctttttgatctggtgccatctttgcaataccggcagtganataaaaacatattgagatgaagacacaaaataatgtagaagattcgattatgatctaaagtcactacctacctgggctagcagctatactctcttgagcagcatatttgttaaattgttaatatctgtctctctctagcacttttgaacattcggcagctac

SEQ ID NO: 59347 - DNA, 782 bp, Glycine max
  Clone ID: PAT_MRT3847_24601C.1
ccaaatcagctgagacccttttgaggtacattgctgcagagcaacttccggtcaagtatggtggactaagcaaagatggagagttcggaatttcggatgctgttacagaaattacagtgaggtcagcagcaaaacataccgtggagtttccagttactgagaactcgctactctcttgggagctcagagtaatagggtgggacgtgagctacggtgcagagtttgtgccaacttcagagggaagctatactgtgatcatccagaaggccagaaaggttgcttcatcagaagaaccggtgctttgcaacaactacaaaattggtgaacctgggaaagtggttctcaccattgacaatcaaagctctaagaagaagaagctcttgtaccgcttgaaggtcaagccttcttctgactgagaatcttatcattgttatgtacatccataagggagatggagaagagcagtgcctacatgggttacttgattacattcttgcattcacttctatctcccaagatgttcaaagcttcaaagatgtggactttgctgctagaagaggaaagttttaatgataatcgtgatcatgtgtttcaatcatatataatttttctgtgtttctttaattatttattattgttatcattgttggaggggatcttttgatttttgaattcttattcatatatttggaggaggacataattgctctatttatctgtataaatttcatgtaaattttggtggggcctttttttatcaatatatttgtctttttgtctgt

SEQ ID NO: 59348 - DNA, 390 bp, Glycine max
  Clone ID: PAT_MRT3847_24602C.1
ctttaataacaccctatctggctcgcactcacccacacacgaggcggtctagactcaaattctggtgttccaactcctacaacgcttttctgtgcactcatggacgaagtcaagatcggtatcaacggagttggaagaaatgggcgattggttgccacaatcgctctgcaaagagacgatgttgaactcgttggcgttaacgaccctttcattaccacgcgactgcatgacatacatgtataaattccacagtgttcacggacactggtagcatgtccatgtcaccgctcatgacgataagacccatgtcttcggagacaaagcaatcactgctagtggacacagaaaccctgaagagatgccatgggggtcaactggagctgacatcat

SEQ ID NO: 59349 - DNA, 711 bp, Glycine max
  Clone ID: PAT_MRT3847_24603C.1
aatgtagccattgatactgatgcctcagctgcatctgtcaacttcaaatttggcactagcacattgcttcctgcagcatcccctcttgacatgggaactttcaaatcctataactgccaaataccaaggttctcttctggtcatggaactattgggatgttcactggcaccggtggaccgattggcatttagtttcaagagttcaggaagtgaaagatgactaaacaatgctggacagatttgtaaagaatcaccaccgccgccactatgaccaccatcaccatcaccatcaatcaccaatactatactatttactaccatacaaaatgcatacggaaaaagcagttgtgtaaaggaagtgggcatcattattacaggtataatttcaagtctttgtacagctggaggattacccagagaaagcatgcacagatgaaatggtataaccgtagttgcagagttgtataactacaaggctgattcaaatcctccgtgatggataacttgagtttaaaggccagaagtgaggaggggagggtataattgttaatcttagctggattaaagttcgaaagtgaagatatttagcttggattttatgtttcattagttaagtttgtacttctacttagttgttatacacagttatcaacccagacagaaaagagaaacaataattagaaacaagaatcaaaagtgagtttttagact

SEQ ID NO: 59350 - DNA, 217 bp, Glycine max
  Clone ID: PAT_MRT3847_24604C.1
gtcgtccttttttttttttttttagaaagccttatatctatgtctatgcaccacataggtgtggcaagttaaatgtacactgaaagcaaatttttgacacacgtttagcatagatcattgtgggagaattattctttgtcacaggtccatattatccctggattgcatcaccaagaggagcagcattcatagagttaagattgtgaacctctacacc

SEQ ID NO: 59351 - DNA, 225 bp, Glycine max
  Clone ID: PAT_MRT3847_24605C.1
tgggacagcacaagttgtatatcggaacgttgccacaaacgttgtagttttcagatcagcacctaactaactatctatcggtctcgatccctgaatacaaccgaacgctacgccgaaactatgagcacagctcgagtaccagcgttgaaccagtaccagtcgctgctgtggctacggtagaacccaaggaaacggctgctaaagcaccaccgctcggatcagact

SEQ ID NO: 59352 - DNA, 226 bp, Glycine max
  Clone ID: PAT_MRT3847_24606C.1
ggaatcccgaggtgggtgtctctagaacagtgagaaattggcagttatggtggaccgaggaattccgatactactattcttattctactactagtcttccaaggaaggggatcactattcaaaacattcttaatttgtccctttaatggcactcttttttccttatctttgagagactggacacaaatttttactgtgttcacagcgacaattggtcccgggggca

SEQ ID NO: 59353 - DNA, 439 bp, Glycine max
  Clone ID: PAT_MRT3847_24607C.1
gaaaaaacactttgtttttttgttttttcttttgaggaaaaaacacttggaaatttgattttacaaagaggaaagggcaggaaaaatacaaatttcctaaattccacaggcctgtaaatttctttttggttttgaaccaaaagtgaggaggatcaccccatgggaacaaaaattaaaggtggtggctcaaatctgcgccaccaaattaaactttgctctcccatatttacaacctcctttggatcttaacactggtatacacaataccttttttttttccaaaaaaagcttaaagttttcccggactttcttctgaaaagctacttgaatttcggtttcatttaagcgggcggtattgacaaatcactagcagtttggggggggcacttatttgtatcaactggaaaagggtcccatcttttctgtcggaacaacatta

SEQ ID NO: 59354 - DNA, 1236 bp, Glycine max
  Clone ID: PAT_MRT3847_24608C.1
ccctgccgctctcaggcacatagtctgtttcaaaccctgcattccttcctcattactatgccccagaaccagcttcagaaaattcccactaacaattccacgtttcagtcttcaagattctcagcagcagcagcagcaacaacaacaacaacaactcaacctctccgttcttcgcttcacattggggattccagggttggatgagtcttacttgcccagatggattggttatggctttggttcacttctgctcttgaatcactttcttgggtctgactcagccactgttacaccggctcagcttagtacagaggttttgggtctgtctttggcttccttctcgattgtgctgccttaccttggtaaatttctcaagggtgctcaaccagtggatgaaaagactataccggatggtacagagcaaatatttgtcatgtcaacagatagagtggatggcctgaaggaggacctggcttgggcatcatatgttctgttgtgcaatacaaatgccatagctatgctaatttttattcaaggagaaatatgtgcaaggggatactggaacataccggatgatacatcaaaagaaattcttcctggttggtttaagaaaaaaattgaaaatgctggcctatatgatttgaaagacaccctatattttcctcaagatgcagattctgaatttcaggatctggtacctatagggactcgctgtcttctaatccaaccagtgttacaagtttctaatgaaagtgatactggcttgcaaaaacctgggggattcattctgctggcctcaactacaagatatgcatttagcaataaagacaaagcctggattgcagccgtggcaaacaaatttagaggaaaggtttaaccatctgattacctactgcaatgcaagagtatctggagtacaaagaaaatgaagcatgaaatctatgtgatacagggcaatggattgcataggatttaacagctcaaaatccggattttctcggttaaattaagggaagaaattagaaaatgaagactcgtgtggaatatgtgatggcgaggttgatttgcaagaattaggatgtggatggtcgtcagtggcagtttttgtgttatgaacagtacttgtgaattttggaaaagtgggtgcattgaatcaataattatggaaaagtcggcgcattgaatcaaaggaggcatctcaaatttgaaaaattaacattatgcatatatataact

SEQ ID NO: 59355 - DNA, 433 bp, Glycine max
  Clone ID: PAT_MRT3847_24609C.1
cggcccggaactactgtgcctgcccatgcgtccttttcttcttgaagaccacagaagggaggtgcatgggggtatgatggcagataggtggggcaagcaaacagatgaaatatataaaaagttggatgcgggggtcaggcaactgaaaccagttggatacacacccagtactataagcatattgagtgatatagaagaggaagagagacaacaagaagcccaccattacttccagagagatccactgtgctacggcctaattggtgagagaaaagaatcatccattcgcatagttaaaaagcttaaaatatgtgacgactgtcatcactttatgaaaggggtctcgaaggtacaccagagtatatatggtcatgagagataagactaggttacaccattctaatggtggaatatgttctagtagagaatatag

SEQ ID NO: 59356 - DNA, 181 bp, Glycine max
  Clone ID: PAT_MRT3847_2460C.1
tatttgttttaaataaattcattccttagggggaaactaaccaaagaagtgataacttttatcatcatacaccaccactactacattcaaatattatattatatcaacctttcttttttcgttttcaaaactatttatcacatctcataatccaaaacactaactgctacttctctatctt

SEQ ID NO: 59357 - DNA, 788 bp, Glycine max
  Clone ID: PAT_MRT3847_24610C.1
gtcatcctacttcgcttttgctttaagccaccaaacgagtgtcctcttcccttcttaataacacagaaacacaacaagggtttacacctacttcttctttctcagacaaaaaagaaagaaaaacacacaaaatatgtgcaactcagatggtgattgcagacccttgggctttctcttgggtctccccttcgcttttctcgccctcctcgtctcggtcgttggcctcgtcgtgtggatcgttgggttgttgttgacatgcatatgcccctgctgcttgtgcataactgtaatagtggagtgtgcgttggagttggtgaaggctccactgcatgttatggagtggtgcacctctcagatcccttgttagctaccttctgtttttaccaattccatcactaagttctgcttttgattacttttcattttatttccccttggtgagactgagaatttcaacttgttattgcctctgttttcttgcaaggttaatagttcatattattatttttctcttgagcatatagttataactctgtaccaataataaaggtaatattctggggtactatgattggggtttaacattttagtatataagtgcaggtagggagtgtctttcttccgctaggtacaataatgaacttggagaaattgttgttttggctcattttgatcactgatgtattatttttgttcgcactgaaagcaacatatttgtcaatggaagattaaataaaatgtagaatatagacagacgcacaatgaaggattaatcaatgatttgaaaa

SEQ ID NO: 59358 - DNA, 902 bp, Glycine max
  Clone ID: PAT_MRT3847_24611C.1
ccacgcgtccggagaactttgtctagagttctaccgtctctcaaccccttcactcccaccacctcaacaaaatcaccataaataataatatattatatataaatcaagacacatcctttaggagagacccacatgattatgactatgatacaccttctttagagtggggaaaaaagaaatgggatttttttttctttcaacgccaccccaagttcccagctttgaagtttgagctcaaggtccaaacattccaaaaacttgcatagagagatagatacatactacaaagacttcagatttttggggggagagaaaagatctgcgggggtgtaagtttgtggggattttttttttgagaaaagaggaagccgtttgtgtctgtgtgtgtttgtgaaatagtgtgttaatatgagtaactggttggggttctctctcactccacacttgaggattgatgaagaatttgagagagaaaaccaagagcgtggaggagggtaccatcatccttctccttcttgtcaccctcacttgtctgttatgccccttcgctctgatggctctctctgtgttgctgactcctttagtcactctgctgcatctcaagaatggagatatgatagtgcaataggtggagggaattccaatgaagaaggtccaaagcttgaagactttttgggttgctactcaaactcccccgctaaggtcttttgccaagactctcagcctgaccaaaaccaaagccagaacaatgtttccaaaatcaatgttaatgtggcaccaagcttttgcaccaacaattcagagattgaaactggggataatctcacaaatccttcttccttgctccattctttccatgcatataatgataactcacatgctcttatccccaccaatggcat

SEQ ID NO: 59359 - DNA, 499 bp, Glycine max
  Clone ID: PAT_MRT3847_24612C.1
ggattcaaaagatactatcatactacataatttactacacttttttccccctaaaaaaaaataaaaccaaacccctatgcgggaaactacttaataaaatagatggccgaaaaaaaaagaacctacaaagatttttcacaattcacaaacaaaagttgaattggccgcaaaaatcctgcctttagtcgaaaaaacattgggggagtagcaggggaacctatcaaagtaactgtaattttgggaggggcttgtttgacccaacacaacaaagggacccttcacatggatccacccttttgagttcgggtcggtattaaccgatttcacgaagcacccactcacatgcttttccttaagagggggaaaaagatcagggacaagcctataaaacccatcctgaaacaggttagtgtttgggaccaccctcaaaggggacctcctcctaaccttcaacctagaaaaggattcgccttttccatcgaaaaccttaacttttttt

SEQ ID NO: 59360 - DNA, 582 bp, Glycine max
  Clone ID: PAT_MRT3847_24613C.1
caattcggctcgagccccatcccaagttcccaaccataacaagctttgaagtttgagctcgaagtccaacattccaaaaacttgcatagagagatagatacatactacaaggagttcagattttcggggggagagaaagatctgtgggggtgtaactgtgtaagtttgtgctgttttgtttgtggggattgttttcttgagaaaagagtaagcggtgtgtgtgtgtgtgaaaaagtgtgttaatatgagtaactggttggggttctctctgactccacacttgaggattgatgaagaatttgagagagagaaccaagagcgtggagcaggaggaggaggagggtaccatcatccttctccttcttctcaccctcacttgtctgttatgcctcttcgctctgatggctctctctgtgttgctgactcctttagccactctgctgcatctcaagaatggagatatgatagtgcaataggtggagggaattccaacgagaaaggtccaaagcttgaggactttttgggtggctactcaaactcccccactaaagttttttgccaagacactcagcatgaccaaaa

SEQ ID NO: 59361 - DNA, 270 bp, Glycine max
  unsure (1)..(270): unsure at all n locations
  Clone ID: PAT_MRT3847_24614C.1
cgacgactgcntcgtaattntctaacccaccccatcttgggagtntttggtttttgggagtttttcggtgggataattgtgggtttgggtgttttgcttccttgatgagttataaggccttttcatttttgccattgaacaccccatctcgagattttnanttttnntacatttttgggtgaaagaattgtgggtttgtgttaaagttgtgagcttgcttctgggttttgtggtgggtcggggaattttgcttgtttgatgagttatgag

SEQ ID NO: 59362 - DNA, 425 bp, Glycine max
  Clone ID: PAT_MRT3847_24615C.1
gtggaatcaactgtgaggccttacttaatggatgtcatttactgttggtcaaagggggcaacatttgcagaagtaatggaaatgacggatatcttcgagggaagcgttatacgacttgccagaaggctggatgagtttttgaatcagttgcgcggtgctgcccatgctgttggagaggtggatcttgagaagaagtttgaaaagagctgtgaaagcctccggcgaggcataatgttcgcaaactccctgtacttgtgatgaggtgctgggcgcccgtctttgtgcttgtctcataccatccaaataggtgttacattttgttggaaatggtgctctgtacattgtatttgtgggattaactttgacattttgtcgaatgtgtcgccaacttgcatgaaaactatgttgagcgcttaaaaattgaa

SEQ ID NO: 59363 - DNA, 883 bp, Glycine max
  Clone ID: PAT_MRT3847_24616C.1
ccacgcgtccgcggacgcgtgggcggacgcgtgggtggaaatgtatgtagtctgaactgtacaaatatggatttgatgaaccaggtcagtcaaattatatattcttgatatgcatccaattagaaatcccctgaattaaggtaatttgtggtttatcctcttcagctttggtttatatgtgaatgtaggactttaggattggataaagatactcaattctttaaacttctcactgtgtgaaaaacaccctttgttagcaaaccattaaatgtcagctgagttgtaagacaataatttctttgaaataaaaaaaataaagttaggaaagagataatcttgcattatccattttttaaaataaaataaaatgcttgtgctgtgttgattggtagttagtgtttcatgattgttcttttctcacatttctaactgctttagtagatgcttatgcattataataggagagtgacaattccctgtatctgaaagaaagaacagtgcatgaagtttgattttgaaaaaccatgatgcatagaataaagtaatttctgaatactatgacggatttcgtaggtcaattacaaatgcatatagttgaatcacggctcattgaacaatgatgcaagagttccggatttaaaaggttatgggtctgcctttccccctgaagataaaatctcaatccgagtgttttctgcatgcccccttcaggtaggcgtgtcgcttcattccctaggtaggacttaggaggaaaggaaccatcatttgagcaaatttttgtgtcttactgtaattgtaccgacgattcgaaatttgagtgttggaatgatactcaactttgtaaatggaaacctgaatcccaaatcctaattcaattgtgcat

SEQ ID NO: 59364 - DNA, 354 bp, Glycine max
  Clone ID: PAT_MRT3847_24617C.1
ctgagagtcagctgttgcgtcctaaagagatttggggcgcgtgggaaaccctacttaggtacgattaaccccactcccttaaccacatgcaaaacaccatattccgaaggtagcaggacagcgctgcagtgaagacaaatgacaatgactactctcaggacatgatatctgacatgtccaagtacatcgctagaaacacgcgtgtttagaagtctgtcaagcttgaccattgatacatctttcataaactcacatgtatgaaatcaaaaatcatcagcacttatcccaatgcgcttactgaagactcaacgagcgaagtgattgatatgacaccggatcttgaaatgcccaagc

SEQ ID NO: 59365 - DNA, 411 bp, Glycine max
  Clone ID: PAT_MRT3847_24618C.1
gggaaccggggccaaaaatttattaaagcccggtaaaaaacaacaaggagggcccggggggggtttaggggacttccccccctaacataaggggggggtaacaaacatagctaaggcccctatttgaatagggcatatcagcctccctttttacctttagaagggggcaaactctacctaaattggtgaaaaaggggaagggcccacccaagggagcccatgggattaggaagcttaaagggcctgctttcccctttgggggccccaaacaaaacgctccattgggccccaaggattccaacaattttggatccccgcccaaaaaaaatctctctcattggggatttggaaaaaagggcctttggagggaaaaaaaggggatccttgaaaataaccgcccccatgggggga

SEQ ID NO: 59366 - DNA, 513 bp, Glycine max
  Clone ID: PAT_MRT3847_24619C.1
tcgcgatctagaacgggaagaagaagagaagggttgcaactatatattctattctgttaagctccaaaatcaaaattccctctctaacctaacctccatcctccattcaggtttcactccaattcccctccctgtttcattttcatcgtgttctgttccgtagatctaatctctctcatcgttttctcacaattccgtttcttccttccttcatcttatttctagattccttcctaagctgcatttacaatcactatcaaaagcgtttttccgattcatctcgcattaattctcaatcccgtctacaattttaagccagcaccgcgcatgccctagaaatttatttttgttttcggtattaattatgcaatttgtttccgagtttaattgcttctgctttttttgctttttgtttctacgtgatatgatttaagattagggaatgatgtaagtaagtaaatgggtcctgatttttcatttagtttgccaggtgaatttgggtcaactattcat

SEQ ID NO: 59367 - DNA, 399 bp, Glycine max
  Clone ID: PAT_MRT3847_2461C.1
gaaaaaacttaaatctaattttgatttctctattttaaaataaaaaatttaatttttctaatttttatatttcataattttaatacttctattttaaaataaaaataattagttatctaattttataaaattcataattttgatcatcggtgtctatatccacataatcatttagcgattattggtaagaaactaatttgatgtgacccaaatttaataatataatataaaataatttatttattaatctatatcataatcaatgttcagttaagctcttaacaatggacacttttagtttaagggcataactaaaattaagaattttataaaaataaaggactaaatatttctattttaaaatagaaaattaaaattgtagattttcaaaaataagaa

SEQ ID NO: 59368 - DNA, 607 bp, Glycine max
  Clone ID: PAT_MRT3847_24620C.1
cggacatggcattgatcacaaaagattccaaaattcaaaatcttataaatggcattaattatctgacgaagaaagaattcacagcagagtcacacacacaaacactaaaggaatcaaccaatgttgcttgtcaacatacccaatgccacaattaatgccttgcgtctgcgggcataaacctagagagtcacctaggtcaccacatctcatttgcatcttcaatccttccacatggggagttcagtcggtgcataaagaaaccactacaaaactccgaaacccctcatcaagaagccaaaacctcttttgtttgtaaaatacaagtacatgaaaatacaaaatccaatcctctttaaaaaccctcttccccccaccaccacagacacagagaataatagatatatttagagagagagaaaaaaaagaaaagaaaagaaaaagaaactctcttcagtccttactaatcacttctcagcatgaaatgtcttagttctctctccaattaaatgctcttcctaccattcattaatgactctctacaaattgccagaccgtctcattaaattaaaccgcatgcgaccatcctccatttaattcggacgcgtgg

SEQ ID NO: 59369 - DNA, 471 bp, Glycine max
  unsure (1)..(471): unsure at all n locations
  Clone ID: PAT_MRT3847_24621C.1
ngaannannnnnnnnnnnttccccttgtatactgataccaggtgcattgctgcgcgttcctcacctacgtatgctggtaattgggctcgcggctggggaagaagggataaagtgtctggtatgggcgcgtgatgacctaggtcacgaaaggaggaaactatcggctgcagagagtattttgtttagccgtgtttttatcaaaaaatggtgcagagactatgtatgatggtttcacactgataccctccaggtcttgacttgcacccacaggtgctgcgcttgccctgctctcccatgaagggctaccggacattctttccttctgcattatcagaagcatacctgatgagatatcagttgtctatgtcttgagccatgtacatgtgaggagtcaatgaaatcttaaaatgaatggagtgattatcacacttgatgatatgtcgggttctcaggagacaggtccatgcttat

SEQ ID NO: 59370 - DNA, 406 bp, Glycine max
  unsure (1)..(406): unsure at all n locations
  Clone ID: PAT_MRT3847_24622C.1
gacagcanaaacaattaataaagatgagtttgaagaacaacatggtggtgctaaaggtgtgtttgttgcttcttttccttgtgggggttacagctgcacgcatggaactgagcttcttcaaaagtgatcagtcatcaatttataataatgatgattattcaaaacaatgcggtgttccctgcatttgcacacgctcaatgcttcctcaatgcacctgtaaaaatattaggctgaattcatgccactcaaattgtaaaacctgtatttgcaaacgctcacagccagaacattgtcgttgtcttgacaccaacgacttctgctacaaaccttgcaattccagagatgactagaaaacctaatacccctctcaaatggacgaagccccttttaggctttgtttgttaag

SEQ ID NO: 59371 - DNA, 652 bp, Glycine max
  unsure (1)..(652): unsure at all n locations
  Clone ID: PAT_MRT3847_24623C.1
aacaacatggtggtgctaaaggtgtgtttgttgcttcttttccttgtgggggttacagctgcacgcatgtgtattctgagcttcctcaaaagtgatcagtcatcaagttatgatgatgatgagtattcaaaaccatgctgtgatctctgcatgtgcacacgctcaatgcctcctcaatgcagctgtgaagatattaggctgaattcatgccactcagattgtaagagctgtatgtgcacacgctcacagccaggacagtgtcgttgtcttgacaccaacgacttctgctacaaaccttgcaagtccagagatgactagaaaaactaatagctctctcaaatggacgaagccccttaggcccgcccgccacgccagggggatcaaataaaaccaaggcataacgctcagtggccagtaaaatgcttttagcaaatttggtcatttttattgcccctttaggctttgtttgttatgttaggggagccaaataaaacaagaaataaaagctcagtggccagtaatttgcttttaacaaatttggtcatttttttttaaaaaaaaaaaaaaaaaaaaaaaaaaaaaaaaaaaaaaaaaaaaaaaaaaaaaaaaaaaaaaaaaaaaacaaaaaaaaaaanannnnnnnnnnnnnnnn

SEQ ID NO: 59372 - DNA, 941 bp, Glycine max
  Clone ID: PAT_MRT3847_24624C.1
cccacgcgtccgtacggctgcgagaacgacagaaggggaggcaaaattgggcttagcgtgagtgtcacgctaagcactgttggaatgaaaaaagcctcaaagagccagactaatttaagtgtgctcgctaagcgcggatggtcggcttagcgagttcatctaatcccaaaaaaaaaaaaaaaaaaaaaaaaaaaaagcggccgctcgaattcggctgcgagaagacgacagaaggggacagcaaaaacaattaataaagatgagtttgaagaacaacatggtggtgctaaaggtgtgtttgttgcttcttttccttgtgggggttacagctgcacgcatggaactgagcttcttcaaaagtgatcagtcatcaagttatgatgatgatgagtattcaaaaccatgctgtgatctctgcatgtgcacacgctcaatgcctgctcaatgcagctgtgaagatattaggctgaattcatgccactcagattgtaagagctgtatgtgcacacgctcacagccaggacagtgtcgttgtcttgacaccaacgacttttgctacaaaccttgcaagtccagagatgactagaaaaactaatagctctctcaaatggacgaagcccctttaggctttgtttgttatgttaggggagacaaataaaacaagaaataaaagctcagtggccagtaatttgcttttagcaaatttggtcatttttattattcttattttaaaaaaaaaaaaacagaaaaaaaaaaaaaaaaaaaaaagtgtaaacaaacttaattatgggttgtgccaatcgcccccatattaaaccgataagaacataaactatatctgatcttagtaaaaagctaaggctgcgaagagtatgaagcatattagtttgaaaagtgtattttataataaaacatcaagtgattgttatctcttcccaaaa

SEQ ID NO: 59373 - DNA, 373 bp, Glycine max
  unsure (1)..(373): unsure at all n locations
  Clone ID: PAT_MRT3847_24625C.1
cttagatctacctctactcccccctttactttcagtgatcccattcaacccactctctgaatacgctttgatgaatgagaagctattgaactttataaggccatccgaccactctttgcacagacatgatacctctgaatgcttgccggacgacctagctggtgttattgtgctgccgatcacagccgccactacatttgactcccatgccatcaacatcatcttaacatgccagaagccgaaccgctcangtctattacgccttgtgtcggctatagctcgacccagaggactcggcataacaccctattaatggacttgatctgcccactcttttctgagacagtgccacaatgcccgttacgtggattcc

SEQ ID NO: 59374 - DNA, 956 bp, Glycine max
  Clone ID: PAT_MRT3847_24626C.1
cagctggtggggagatcaaggaaacaatattaagatataacccgattgcaaaaattgacatgatggagctggacctaagttcaatggaatcagtgaggacatttgcatcgcaattcaattctcgcggtcttcctctgaatatacttgttactcgagccggatcggctcgagcaccattcaagctttcaaaagacaaaatagaattacagtttgcaacaaaccacataggtcatttccttttgacaaacttattgcttgaaacaatgaaacggactgctattgaacagaggaaggagggaagggttgtaaatgtctcatcaagacgtcataaattatcatatcctgaagggattagatttgataaaatcaatgataaatcagggtataacagtttgtctgcatatgggcagtcaaagcttgctaatgtgttgcataccaatgagctcgcaagacggctaaaggaggagggcacaaacataactgcaaactcagttagcccgggaccaattgccaccaatctatttcgttatcacagtttaatggaggtgtttgttggtatacttggtaaatatgcgatgaaaaatatacagcagggagcagcaaccacatgttatgttgcattgcatccacaagttaaagggttgactggctgctactttgcggatagtaacttagctgaagcaagttcacaagcatccgatccagaggtggcaaggaaactgtgggagtatagctctgatttggttaaattttgatattatgttacctaaggagtagggactaatatctagtgaaagttttcaaacatattaatgatccattaaacattcacttgacctttacctttttcccttgtacagaggaatatatgcttagtttacaatcacaaatttagagatacttgtaatctgattttgtctctaaataaactgcacttctattagatgacctaaaaa

SEQ ID NO: 59375 - DNA, 452 bp, Glycine max
  Clone ID: PAT_MRT3847_24627C.1
gtctcgctctagactgaatgttctgaccaccaaacacccttgctgatgctgcagaaccatgaacagggggccgcgcaaagatctgcacgtcttccatatggacgaagaggcagaagtggccctcgaaagacacctcaaattgctccatcgcgaaagccaagacaatatcgttgtgctcaagagacttgaccgcattgattgtgtcgacgcatctggggctttgtttaattgggaaaaggattggtctgacccatttactgacacagtggcagacctatatgagagtgaagagaatacttttgtgttggaagctgacaaataattagaaccgcttattgatgaaagtctggacaacttttaaaatggataattgataaccatggcaaactagagaaagtggattcatgtggcgaagtatatgaacctgacacaagccaggtggacccctaagg

SEQ ID NO: 59376 - DNA, 239 bp, Glycine max
  unsure (1)..(239): unsure at all n locations
  Clone ID: PAT_MRT3847_24628C.1
ggctcgagatacactggcatctggacccttagcttttgctacttagattcctggtctaccccagataaacaaactccactacacatgcgagagaggntgaagtctaaggatgtcgaggctggcaagggcccttcatcgatcccccactggcgtttggtatgggaccagggtctcatcactgatatggtcatgaactggaactacccaggctccggaactgaagaggacccgtatgtggt

SEQ ID NO: 59377 - DNA, 975 bp, Glycine max
  Clone ID: PAT_MRT3847_24629C.1
atgaaaaaaataatggaatatttacagcattatattaatcaatacccgcatcgattagctttagtgtttgaagatcgacatctaacgtatggagaattaagtaaagaaatttatcaggctagtatgcgctataaagaagtaaaattaaacaaaaaagtaggtctaatggatgaacatcctgtaaataatattattaactattttgcggtacatcaaagaggtggaattccttgcatttttaatcatcaatggagtaatgaaaggatacatcaacttgtaaaaagttatgacatacaatggttaattaaagataatcatcttacctcaaatcatgataactcaatttataatgatgaggttatcccacgtaatgttatacatataggtttcacgtcaggaactacaggtttacccaaagcgttttatagaaatgaacattcttggatagtttcttttaaggaaaatgagaaattactccagcattgtgaagaaaccattgtagcaccgggtcctttatcacattcactttcattgtacgcatgtatttatgcattaagtactggaaaaacatttataggtcaaaaaaattttaatccactatctcttatgcgtcttattaatcaattgaacaaaacgacagcaatatttgtagtgccaacgatggtacaacaacttatttcaactcaacgacattgttcatcgattaaaagtattttgagtagtggtgctaaacttacattgcaacagtttcaacaaatcagaaatttatatccacaagcaaatttaatagaattttttgggacatctgaagcaagttttataagctacaattttaaccaatcatctcctgctaattctgttggtaaacttttccctcatgtcgagacacgattattaaatcaagatgatgatgcagtaggattattagccgttagaagtgaaatggttgatgaactactgtaccatctgattagg

SEQ ID NO: 59378 - DNA, 220 bp, Glycine max
  Clone ID: PAT_MRT3847_2462C.1
gagaaggtggtgagttgaatccactatagcctgatccacttgcactggatcatctaccagttgcttcgaactaagaatcgcatggaagtcccaaccgattggaggaatgtgacaaatcggatcaaggttgtgggtcaacccatactaaggcagaatgaccgtgcaggagaaacctgaccgatatctgaatacctagggacctttcaccatagtccatggt

SEQ ID NO: 59379 - DNA, 273 bp, Glycine max
  Clone ID: PAT_MRT3847_24630C.1
gcacgccagaaaactttagcataaggagttcctacaatcagggcggtgctaaaggccaccgcgtgagatgaggaactgctcctatgcggaaggtaattttgtacctgttctccaacatgctcaagcaagaccgaacttatattgtcgcccataagaatgaaaataggattctgaggtgcagcacgcgacatagcataagctaggttcctgattcgagctgagacttcttatctcatatgcgtagaaataatgaagtttctcgatgtgggttta

SEQ ID NO: 59380 - DNA, 361 bp, Glycine max
  Clone ID: PAT_MRT3847_24631C.1
gaacgcacacgtacgcatgctggaacttgggatttagctttaggaattatccttatagatcgatgccagattgatacggataggtgatcctcaatacaatgagggtcaagctcagatgggaacaaatttgtttaaattgtctcttgatgatgttgaaactcctaaaggttccatgttggatcttaaaaattctcaatctaaaattgcactttccaaaaacacaagttggaggaactattctgcgtaatgatctattggcaaaatttttgacagaaggcaattttagaacaagtgttgatttgcagcgcactcattgtattaaaagaatgattaaaatggtggccacaagttggatttctga

SEQ ID NO: 59381 - DNA, 199 bp, Glycine max
  unsure (1)..(199): unsure at all n locations
  Clone ID: PAT_MRT3847_24632C.1
aaaacaaaaattcaatggatagacattgtaacaggncttaacnnnnnngtgtcacaaatgagggtgaagaataactctgccttgggcaggttgctaactctttgtatactgacatactgataatggtcccataatgatcttctgaaaaacgctctgccgataaaatttatgctaggtgagtgcgctccgctgtatttaa

SEQ ID NO: 59382 - DNA, 166 bp, Glycine max
  Clone ID: PAT_MRT3847_24633C.1
aggtcagtctgcagctctcccgtgaccgtcaaatgcagaacggactcatcgctgcagacaaacataggatctcactgcgtgagctcggtagagttgaattagaggactaggactcagacatggctacacacactctgcatactcattgaacgcggcctacgaggac

SEQ ID NO: 59383 - DNA, 388 bp, Glycine max
  Clone ID: PAT_MRT3847_24634C.1
gaatatgaagttgtttgttttctttgttgctgcagtagttttggtagcatggccatgccatggcgcaggctaccaaaggttccctctccgaatgaaaactggctatggtgagcgttcttcggaggtaaaatgcgcaagtattacgcttgctgttgaagctcacaacatctctacctttttaaccattcctgaatagtgcgttgatccgacataggactacattaatggcgaacaatttacatcagactctaaaacgactaaccaacaagcgttgttttatgctattgagcgcgtagtccatggtaacgacatttttatattcggcatggataacagcgtactctctaatatcccatactatggaaaacatcgatatcgagtggatgaa

SEQ ID NO: 59384 - DNA, 465 bp, Glycine max
  Clone ID: PAT_MRT3847_24635C.1
gctcggaaatgcattacttttatgtaaaattacccgtaccgaaggatcgctgagtacatggagataccactaccagacacatggttcctaagtcagactctcaacaggctaaccaggaactaaatgctgggaaaacacatcgctaggatattagactgggtaatgacttaatttttgaggctaccccaaactgttttatctattaaccgcccctatctactcctgaccacacacactccgcctatcttaatatcattaatcggccgccagctagaaaaactaaaaatcctcaacaggcttttatgaagaccaaatttccggtacctacattcagagcagaggtttctgactgggcccttcatcgttgatatattaaaggaccaattctccctaggcactgttcttacatcatgtacgtaactgacgcttatctctccaaaaaaagcactgattctgtacaatcct

SEQ ID NO: 59385 - DNA, 503 bp, Glycine max
  Clone ID: PAT_MRT3847_24636C.1
ggctcgaggatttgtgttggctgctctgctcctgttttactgctggtttggtggcaactggaactagcactatgaaggttgccctgagtggctctatatcggttgggactttccatggggccaatgtcgacagaagggaagaggatgctgcacacaactggttcctctttggtgccaaggctcatgacatcgttgggctgtggaacgaaagatcacagggactggtctgtgtctaatgcccatggtgtgcagtacacttactgtgaaacatagtttctgccatgctgtttggggcacacaagcatatggcagatattccactgctgcagtttctactgctagtaataagaaatgtacggattcaatgacttctgaggaattgggcgacgaatcatatgatgtgatatcccatgtacggattgtgtaatgtggtattcacggtgactcatctagcaacttttgcacttgtcactggagcggctcatatatttctactgcatgta

SEQ ID NO: 59386 - DNA, 400 bp, Glycine max
  Clone ID: PAT_MRT3847_24637C.1
gtgcctgattagacaggcggaagatccagaaatggtggcagggaacgtgacgaaacgatcgcgaagatgccatgctataacacactggttatgaatgatcagaacaggatacctgtagctttcacagtcatgtgcttcatgacacgcggatatggtgatgcttcagacgcactaccaggaaccaatctgtcgactccgaacttattacagctgttgagataccacggctactggttctcctacgacaaagaataacagcattcaagatatggcagaacagacaccgctgtcatctatgccggacacgtgattcatccttacttaagatcacacctccagacttacgtagcatgtcataaagattctgcacctgctgaaaatgagcgccatgaagaggaaa

SEQ ID NO: 59387 - DNA, 338 bp, Glycine max
  unsure (1)..(338): unsure at all n locations
  Clone ID: PAT_MRT3847_24638C.1
nacggcngcgagaagacgacagaaggggggcggaaagggngcnnggcggggnaaagaanaaagaancaacaanggccncggcnncggcnacncnacacaagacancnccggnnnccgacaagagcgagngggncaaaggccagacccggcgggaccncncgngagaagnaacccnnccncagcancagcncccaccagcaaagcngcnncccangcngacgagcncgncaaaaccgccaaaacagnggccncaccggggcgngggacnnnggcgaaggangagncaaangcaaccngcgggaagcgnnnggcanncanggggnnagagaacacagaag

SEQ ID NO: 59388 - DNA, 423 bp, Glycine max
  Clone ID: PAT_MRT3847_24639C.1
ggatgttaaaaaagcaaaactgaatcctataggaagtgagattatagatggactcttgtactaatgctttatatataaaaccacaactgtattaaccaataatgaaattgagttgtaggtgtgaatcatatctttagcaagtctgctgttgttggcatgaaaactttttgcattaaaactgactggaatactcaaattgtgaaataactagacattggagccattggttatattactcattatatggttccaaaatcagggattcatgcttggaacttttgattttgcagagaacactcgtgcagcatatcctattgagtacatacccaatgctaagataccgtgtgttgctccccatgcaaagaatgtcatccttctagcttgtgatgcatttggggtgctccccccagtaagcaagctgag

SEQ ID NO: 59389 - DNA, 197 bp, Glycine max
  Clone ID: PAT_MRT3847_2463C.1
gtggtttggggaagcgtgaagatagctctttttgattcttgaagcaaaaaacaatgggaatggaacaggccagaaaacaaaacaattattaacacatataatcaatccattatatcgaaatcgtataaagtaccaacaccagagaatagattttaataaatggggggaggtggagccccaccaaaacaagccagatg

SEQ ID NO: 59390 - DNA, 299 bp, Glycine max
  unsure (1)..(299): unsure at all n locations
  Clone ID: PAT_MRT3847_24640C.1
anccaancccttcgtncgcnccctcggnnttcggntnnngngctttagttacttttgatgatgatncctgttgatgancctgggtgctgggtcnncagcgattcatnnttccttcncnttgatagccgtnacccagaaattccgnntgtactaccgtatnctggatatgcgaaacggntttcangatttatgccctaancgtagnggtttgtttggccgttacgtngtcatngcngattngttaaatatncttaccangaanagngtnangatcnatnnaggtcttcnntacnttntct

SEQ ID NO: 59391 - DNA, 695 bp, Glycine max
  Clone ID: PAT_MRT3847_24641C.1
cggacgcgtgtgcggacgcgtgggcacacacacccttcttactctttaaatggctcaaaaggctgtgttagaggtaatgactatgactgatgactaaacaaagcaaagggctataaaggcagttgcacatatctatggggtggattcaattgtggctgatgtgaaagatcaaaatttgacagcgattggtcaaatggacacattgaatatagcgaacaaactgaagaaagtacgaaaagtggatataatatcatttggacctgcctaggacgagattaaagactattagaaagaggataaaaaggaacaaaaaatggacgagaaacaggaggacaacaacggggacaagaaggaatataagagggaggagaataacgatgataaaaaataatagagacaatacttgactatcatctgggtttgcctaatgtctccctttcttctctcctctttttatgtattccgtgttgcatattttcccatattcagaagcaattgtaagctgcaaaaattggctatagaagatctttctttccttgctattggtgtacacagtctacgcccctgccggtgaccccaaaaagggcaatttgggaattattgctcccatcccccttggtttaattgttggcgcttacattttgttgggtggggcctttccggaacaaccctgaaccctgctgtgacatttgggc

SEQ ID NO: 59392 - DNA, 554 bp, Glycine max
  Clone ID: PAT_MRT3847_24642C.1
gaaaatggaagccactactatgttccgttttttctctgccgttatggtcaatcctaaacctcacaaactcttctcttccctctctatcttcccttccgccaccgctccccgccactttcaatccctcaaattccccactaaacagaacgctcactctgaaaaccgcgatattggcgaccgcgtcgtcttcgatgacggcatcttcgaaagcggcgccgttttccaaaacgacagcaatctcaccactaacacacccaaacgcagacccagcccaaggacaaaagtgacgcggataacgcgtgagaatttggttccggacaagtggagagaagttcagtcagagaccaaaatcaccattaacgagaggcgcaagaagaagaagaacataagagggttggttcctctaagggatgcaaacaaaatcgaggttgagaagaagttgagtcgctacaaggatgtaaattgggacgagtacaagtcttctaagaaggctaaattgagacagatcagtcctctggttctcaagaacccttctacatttcccgtcaaagaga

SEQ ID NO: 59393 - DNA, 208 bp, Glycine max
  Clone ID: PAT_MRT3847_24643C.1
gtcacacgttcgctgagaagtccgaggacacgctgctctatgccatccattggagtggggagacagtctgtgcatgagattagtggatgcaggcgtgagatttgctgaatcgacagggtgctggtactctgggacctttaatttacaacaactggatgctgttgtacaagtatacggcgtaaagccaatgatttgaggtatttaaacg

SEQ ID NO: 59394 - DNA, 1484 bp, Glycine max
  Clone ID: PAT_MRT3847_24644C.1
gctactgctagcactcatgaaatgaaattccatgcaaaactccacaaaagctaacttcttttattcgacaaatcaacacccagttttcaaaattccattttgttttccctttcttttttcctatataaaccaagctttaatttccttctgaattaatactccttgatctggtgtgaagatggacaccaatgactgggaattcctttcttatgatagcctttatgatgcgtccttagattcaaaaagtgttcttgatttggatgactatgacttgtgcacctcaccaaaattcaagaaagcctcagaagcatcaaggaattttcatccaagggaaccaaaacaggttatccatattccaattcaattggaaccaagaattgggaaggccccagatgaagggccaatggaacaaaacactaaggatcatcatgttgaggtccctcttgtcccatcatcaccaactaccattgagaaaatcaaaggagggattttggaagctgattatgacactgttgcacaccttttctccaagatcaaggaaattgagtctccaaagtctattggtagaggattgttgttcccttgatataggtgctttgaaatttgaggacaaaggtggtgaggcacaagagatcatcatggcctctccaagaatgaagattgagaaagaaattgctactattatggactgtggcaaagaagtggaggactctagtggtggtttcaacttttggaagtggagcttgaatggtgttggggctatatgttcttttggatttgctgctgccacaatctgtgtcctaattcttggaagccagcaaaggaacaacaaaatccagcaggatcagaagatttggttccagatctacactgatgacaagaggattaagcaagtggtgcatgcaaccaaattgaatgaagcaatggcagcagtgagtggtgttcctctgagtagagctcgcataacctgtggtggttactatgatggcctttgattgaggcattgattaaggaagtttgggatagtgcaatgggccaactatactactattctagatctatcatatagtttttttttcttttcttgtaaataaaataatgaggatggtgccttgtaaattaagctacagcttaggggctcttttagtattattagtactattattttatcgatatggttttggaggataaaaaagttcatctggaaggttggcccaagttctggagcaattgttggaagaaaggttttcaaaatgaatgagtggggtagcgtgaaaatgggtatagaaaattgattttgttgttaggcatgctctgatgctcactcaaatgttggcacaggtaggcagaatttaagtgtggcagcaattattaatgctttggacataaagtcaagtcataaagaaaagatcattgtttaattaatgatccctcatttacttttatgagcttaattaccaatattaatgcttactattgcttat

SEQ ID NO: 59395 - DNA, 322 bp, Glycine max
  unsure (1)..(322): unsure at all n locations
  Clone ID: PAT_MRT3847_24645C.1
gaaaaatcaaaattcgggngctaaatagcattgttttaaaaagtattattaaggatctcacacgagggttttatctaaaagaagaagagccacgacatgaaccaccccactccaaataaaactcatcgactcgcctttgacctagccaagagcccaacaatcctcatctatctattcacctcgtctattttcttatccaaacctatcactactacactatctaccaatccacacattatcagcagggcctgatacctttaaatcataaacaagatgtattaattgacacatttcatggtcgtgctcttctctgatttcattc

SEQ ID NO: 59396 - DNA, 747 bp, Glycine max
  unsure (1)..(747): unsure at all n locations
  Clone ID: PAT_MRT3847_24646C.1
ttctttacggctgcgaaagacgacagaaggggatggtggcacttactactcttgtgttgtgtgctactagtaatgaaatgaaattccacgcaaaactccacaaaagccaccttctttgattcaagaaatcaacaccgagtttccaaaatcccattttgttttcccttccttttttcctatataaaccaaccttttaatttccttctgaattaatactccttgatctggtgtgaagatggacactactgactgggaagtcctttcttatgatggcctttctgattttgatgactatgacttgtgcacctcaccaaaattcaagaaagcctctgaagcatcaaggaattttcatccaagggtgcctaaacagattcttcatattccaattcaattggaaccgagaattgggaaggccccagatgaagggtcaatggaagaaaacactaaggatcatcatcgtgttgaggtccctcttgttccatcatcaccaactaccattgagaatatcaaaggagggattttggaggctgattatgacactgttgcacaccttttctccaagatcaaggaaattgagtctccaaagtccattgatagaggattgttgttccctgatataggtgctttgaaatttgaggacaaaggtggtgatcaggcacaagagatcatcatggcccttccaagaatgaagattgagaaagaaattgatactattatggactgntgcacagaagtggaggactctag

SEQ ID NO: 59397 - DNA, 358 bp, Glycine max
  Clone ID: PAT_MRT3847_24647C.1
cggaattcggctcgaggatgctactgcagagtggatgaatccatggaactacgggaatatgaagctgccatccgagatgagtagcttgtaacagctatcactgatgtgctagtgctgaagggctaaccatatgcccagtagcccgaattttattcttaatacactccttctagttattattattattgctattgctctttcatgataacatatattaataactttatcttaaacccaaatcttgtgacatcacaaacctaaccctttttgtctatttcctttgacggattttcaatatcagcaaattactgctatacccagatggattttgcgctgaatatctactccttatgtatct

SEQ ID NO: 59398 - DNA, 405 bp, Glycine max
  Clone ID: PAT_MRT3847_24648C.1
cttgactttgctaatttttcatgcccgacgatacccaaaacaagggtggcagctctgaggttcaggtccacgaacgtggcggtcttgagtttatctgaaagaaaagggatgaagaatatacctctatcctcaggaggagggcatggccacctcttttcaataagtgaccgcctctgaccttggacataacctgcacctcctcttacatgagctgcaccccgctgacagtctttctaactgttaagagaggacgattgttatcattgaccgatcctggataataagcacattgaccatactggcctgaatgaaacaagcggtgagaaaagagaaggtgatcattatggtctcaaggatgaggacagacccgtgcatgctgataatgattatggtggggaaacccct

SEQ ID NO: 59399 - DNA, 570 bp, Glycine max
  Clone ID: PAT_MRT3847_24649C.1
tcgaccatctcactatttcttggccgcccttctttttttttttttttcccgaaagcctctctgtgatatgatctgataaccggtactgttggtacaattttttgcactgctatatcgcgcccctgataaaaaactccgcactcactgcttgttactatccctgccctatttttttcttacctctcttgaacgaggggggataaatttcctacttattttgagctcttgctttttcaactttgcttagttggttacaagtcttcccctatagctccaattttttctgttctcaataaacaccccgagagccctcttcactgctggcacaagcattgttcatgatgacaaatcgtctgattcaaagaccaacattttatgcgcagctttacctcattcatttttcaaacagatgccatgtctttgccgccaggaataatgtctctatgccgattgttctaatgacgggctccggcggtccatgtgagtgatccaccgaccactccggccgagtagcttatcaagaggacgagattcatgtgaaaactattcctaggcgctacaatgcttgca

SEQ ID NO: 59400 - DNA, 254 bp, Glycine max
  Clone ID: PAT_MRT3847_2464C.1
tagaaggggaccgttactaaaacataagcgcacttcaagaagccctccgagacagaaccctgtcccataaaacgaagaaagcgcccacagtaacccccttctcatcagccgcacccgcctctatagccatagtcctagaattagagttattagccatattcctacgattattaaaggtagggttattacaggtattagccatagtcctagaactagagttattagccatattcctacgaatattaaaaggtagg

SEQ ID NO: 59401 - DNA, 161 bp, Glycine max
  Clone ID: PAT_MRT3847_24650C.1
gattcacgcagctacgtaagacttgaatagtactatcgtctttgctctctttccaatctgtgccatcatcagcgcagtgggggcttcagccaccgctcagttcgtgctcgacactgatgatgatcctcttcacataccgtcgcacacaccatactgttgcc

SEQ ID NO: 59402 - DNA, 269 bp, Glycine max
  Clone ID: PAT_MRT3847_24651C.1
cgagcagctaagtagagacacagatggaagtttgagcacggtagaaacactggcttctacagctatttgcggaatcatacactcaattttgggtggccagccactcctaatagtgggagtgctgaacccactatcattatgtacacctacctgtacaactttgccaaaaatagggattccttgggacaagaactctttttagcttgggccggatgggtttgtgtatggactgctctcttgctgtttcttctagcaatattcaatgctgg

SEQ ID NO: 59403 - DNA, 367 bp, Glycine max
  unsure (1)..(367): unsure at all n locations
  Clone ID: PAT_MRT3847_24652C.1
tactgttgcgagaagacgacacaaagggaagcagtaattattaacaagtattgggtgatactaacaccctcttaacaataacataatacatacaaaagggttgactgaaaggaaaaccaaatcaaacccaacccaccttgtactatctcgcaccaaatgtgggtcgtgtgatttnaatcgaggcaactggacgtagctgcgctcctacttcaccatgagggccaaagaaccaccattttaagccttgaaccaaggcgcttaaggaaatcataaagtaccagaatagcacctagcttctcataatgaatctgacatttcaaaggctcttgagagaaatctcgcacgatttcaagaccgatttgcgttt

SEQ ID NO: 59404 - DNA, 175 bp, Glycine max
  Clone ID: PAT_MRT3847_24653C.1
ctcgagccgctcgagccgattcggctcgagaccaacattccaatgcctcctccataaccatattggagaataagataaatacaacaaaacctctagatggaagaagcacacgtgcacgtattggaagggtatgtatattggggggacacgcccaccctaaaaagaggctatgggg

SEQ ID NO: 59405 - DNA, 319 bp, Glycine max
  Clone ID: PAT_MRT3847_24654C.1
gtttctctatttcgagagacaatgtactcaggtttcgggttctaatactgaactcaccaagcacacagctggagggaccattctgggaacagagctaatggcacattttttggcttatggcaattatagagcttgtgaacattcgacacgcactcatggcgttagaagtatgatggaaatgacggccacaggggtcatacttgagcatacagctctagtattggacttggccatagatggttcttttaaggaaggctccagaattgatatgaacgccatctgctctaaagactgagaaacatggaatgctggttgcaca

SEQ ID NO: 59406 - DNA, 522 bp, Glycine max
  unsure (1)..(522): unsure at all n locations
  Clone ID: PAT_MRT3847_24655C.1
ancttcttttaatattaaaattaactaccaaaagcattaatttgaaaatgtaacatctaacataatttaaaaaatattgaaagatcttttacatcgtaattataaaatacaacaaatgtataactttatatacatgtgggtgggcataagacaggttggctactacaatatcctaactgacactcataccctcacaatatttgtgggtaatttacctaggcctaagccttgaaccatttaatagataaaaccttattctttgtaagtgatttttatgggtatcaatgatttgtcaattgtcatcccaatctaaaacctttattattagcatttgttgattccaagctttttcagaatcaatctttccagatctaatgcctcaccaaaactaacaagggatgtcttttacaacagataacataatgaataatgattgtcaagaaccccaccgaataacaacctaacaaaagatgacttgtatggcttgcttaactgctttattctcgtgacgaattgctgaag

SEQ ID NO: 59407 - DNA, 709 bp, Glycine max
  Clone ID: PAT_MRT3847_24656C.1
cttcctggtcttcgtcatgttgtacttattggagatgagaaacagttgcctgccctagtcaaaagtgagatttctggcaaggcagggtttgggagaagtttgtttgaaaggctggttcttttgggtatgaaaaacaccttctaatgttcaatatagaatgcatccatccattagcttgtttccaaatatggaattctatgacaaacagattttggattctcctagtgttaaagaaagaagccatgagaagcattttctacatggagatatgtttaagttctactctttcataaatgttgcttatgggcaagatgaattcgatgaagggaatagccgaaaaaatatggtggaagtagctgtggtatctgagattgttctcaacctctataaagaatcagcttctagaaaacagaactgttagtgttggtgttatatcaccatataaagctcaagttcttgccatacaagatgctcttggaaaaaggtttgttggtaatgttgataatgacttttccctgaaggtttccacggttgatggtttccaaggtggtgaagaggatgtgataataatatccactgtaagatataataacatgggatatgtggggattcctttctaattttcaaagaactaatgttgctttaacaagagcaaggtattgcctttggatagtaggtaatagtgaaactttgatgaatagtggctctg

SEQ ID NO: 59408 - DNA, 870 bp, Glycine max
  unsure (1)..(870): unsure at all n locations
  Clone ID: PAT_MRT3847_24657C.1
cnaagggagttgnnnncagggatagtgtaattagaacaggtgatgactgcatcnnaatagttnnnnnntcttcacgggnnnnnatcagaaacatctcttgtnntcctggccatggcataagcattggtagcnngngaaaatcgaagaaatgggagaaggtgcaaaatgtaattgtcgatggagtttatctttacaacactgataatggggtgagaatcaaaacgtggcagggtgggagtggttttgcctccaagatcacattccagcatatcttgatggagaacgtgtctaatccaataatagtagatcagtactactgtgattcacgaaatccatgcaaaaatgagacttcggccgtcagagtggagaatatatccttcattgatatacaaggaacttcagccactgaagaagcaatcaaattttcctgtagtgatgcctttccatgtgaaggattatatctcgaaaatatttttcttgcatcatgcttcggaggaaatactagctctttctgctggcaagctcatggctctgcacggggtttcttacatccttctacctgtctctcaagcagtgacgatcgtattagacagaatgttggggtaaagtcaaaccctgctattcattccgtctgagtataattattctgtacagaataaaatgagcacatcaaattcctctgtaattattttgtactttactattgtttaaggggaagtcagatatgatgaacacttaaaaaaaaaaaaaaaaaaaaaataaaaaaacccctccaaaaaaaatttataaaaaaaaaaaaaaaaaaaaacccaaaaaaaaaaaaaaaacccaaaaaaaaaaagggggcgcccccattttaggaacctcccc

SEQ ID NO: 59409 - DNA, 388 bp, Glycine max
  Clone ID: PAT_MRT3847_24658C.1
ttggtgcgtatttcttcggtttctattttgggagaacacctctgataaagctttctccaaagaaaacctgggaaggtttcattggagcgtctgttgccactatgattgctgcattcacgtttgcaaacttcttaggtcgcttccagtggctaacatgtccaaggaaggatttagcaactggttggcttcagtgtgaccctgacccaatttttaagccagattatattccattgccaggattgatttctcattggcttccttggaaagagatagcagttttgccagtacagtgggatgccttgtggatgggactatttgcatcaattatagcaccatttggaggtttttttgctagtggtttcaaaagagcttttaaaatcaaagactt

SEQ ID NO: 59410 - DNA, 285 bp, Glycine max
  unsure (1)..(285): unsure at all n locations
  Clone ID: PAT_MRT3847_24659C.1
ggtgcctgtccttaattccttggtttacccacgcggtcctatgatttcagcaaagacagttactgggaaaggggtaatttaacatatgggggggggaccatacttctttacttttggaaaatcagagggacctaaagggcttgaaatggggatagggacaatgggtcgggaagagaagggtggtatatatgtcaccaggcagtatttgactgggtctcctctgatgcctngaatagaagggtacgatgaagtccattttgaagtggggctgggtcactttattca

SEQ ID NO: 59411 - DNA, 1913 bp, Glycine max
  Clone ID: PAT_MRT3847_2465C.1
caactttaaacttcttaagttggatacacaaataattttttaatacaacagaaaaagagataattctttgcaatttctacaatgcatgcatcgccacttgggggtttagagggacaatccagactcttcatcctcttcaagggtggaagcgtagacaaagtagagagcccatataagaccgaagacaccaaacaggatccaaccaagaaggttgttgctaagcccaaagggaagcccggttccttcagtgctgagtctctcatccaccaaagccatggctgggcttgacatggttgcggcaactgcagctgctaacaaggatgcccccatccctatatttgagctgcttgcggacgcgtgggcggacgcgtgggcggacgcgtgggcggacgcgtgggcttcttcagaatcttctgttgaagaacttggtcaccatgcaggctattatcgccttcctcgttccaaagctgcaaggatgttctacttcttctttgaatctcgaagcagtaagaatgatcctgttgtcatatggctgactggaggaccaggatgcagcagtgaactagctttgttttacgaaaatggtccttttcagcttaccaagaacttgtctcttgtgtggaatgactatggctgggacaaggcatcaaatattatatttgtagaccaacccactgggacggggttcagctatacttctgatgagagtgacattcgccatgatgaagagggcgttagcaatgatttgtatgacttcttgcaggcatttttcaaggagcaccctcaattcactaagaatgacttttatattactggagagtcatatgctggacattacattccagctcttgcatccagggttcaccaaggaaacaaagcaaaagaaggaattcatataaatctaaagggatttgctattggtaatgggttaaccaatcctgaaattcagtaccaggcgtatacagactacgcattagacaggggactaattaaaaaggctgaatataacagtatcaacaagttgatcccaccatgcaagcaggccatagaagcttgcggaactgaaggtggagaaacatgcgtatcttcattatatgtttgcaataagatattcaatcggatcatgaccattgctgatgatgttaattactatgacattagaaagaaatgtgtgggagttctgtgttatgacttctctgtgatggaggatttcttaaacgagaagacagtgagagatgctttaggtgttggggacttggacttcgtttcatgcagtagcacagtgtatagtgctatgatgcaagactggatgagaaatctggaagttggtattcccacacttcttgaggaaggaatcaaggtgcttgtgtatgctggagaagaagatctcatatgcaattggcttgggaattcaaggtgggttcaagcaatggagtggtctggtcaaaaacaatttggggcgtctggtacagtcccatttttggttgatggtgctgaagcaggaacgctgaaaagccatggacctctcgctttcctcaaggtatacgaggctggtcacatggtccctatggatcaaccaaaagctgcacttgagatgctaagaagctggatgcaaggcaaactgacaatgacaaagagtggagataatgtctctcctaaatgatgcaatcagagcacaaaaaccaaaaccatccctctgttgctgcatagatattgatgccatttccttgtgtatattgtgagggtgtggaatgtaattctttttctcactattttttctagtttctcttatccctgagaccgtgcattcaaagatttggaacaaatcatctatccttgtcaccaaatcgtgtacaactttacacttaacacttgtaacctgattttattcaagcaaatttcaattcttgaac

SEQ ID NO: 59412 - DNA, 125 bp, Glycine max
  Clone ID: PAT_MRT3847_24660C.1
gttttgtcacgttcgtgatcaagggccaaggtgtcttgtgacagagctgtgtcttaagtctgcaggctctgaatggcaataacaccttatagacgtgaggacgaattggatcctattatgaccgt

SEQ ID NO: 59413 - DNA, 619 bp, Glycine max
  Clone ID: PAT_MRT3847_24661C.1
aaacacatcccccaaaagtgcagctaaagaaatcattaaatgaaaaaggaagagattttggtttgatgatctctctataaacatctccctattaaccctttcatactacttatcttctctttcttcattgttttcttcagcagtgttagcttcactcacttcatgcacttcaaaaccgatcaacatatacccttttgtcaagcatgtcaaataaagagttcttccttctcaccaaagatgacaaagaagatttgagcaacttcgagattgtgaagagacctatgttggagttccaaagtgagaattgtaatgaaaccctttcaagcagttccaactctcaccattcacaaaaagaagagaagaaaagcaatcatcaacagatcatagaagagtgtcaacgacagatctgtagaataacaaaaactgattcagaatcaagtacttcaaaactcaaagaggaagatgatgaagaagagcaagaacaagaagatgggttcaaaactccaacatctttggaccacaagattcctttacctttacaatgccctcctgcaccaagaaaaacccaccttctctgaaaagaaaagcttcttattacaacaaccactgcaactactgc

SEQ ID NO: 59414 - DNA, 255 bp, Glycine max
  Clone ID: PAT_MRT3847_24662C.1
ctcctcttctcaataccaatcccaacaacctccactgctcccaaatcaccgacttcaccgtctccaacttcaaacaagtcatcaaccttctcaacggaacgggcaaggccggtttcggcggtcttcaacccaagcccaagcccaagcccaaacccaaacccaaacccaaccaagtcttcagcctcaaccggaaacccaccaagggtccagttagatttcgtgaagcccaccattctaaactcaaaacccagcaac

SEQ ID NO: 59415 - DNA, 785 bp, Glycine max
  unsure (1)..(785): unsure at all n locations
  Clone ID: PAT_MRT3847_24663C.1
ggtgcagccggggcacttgatggcgccggctgggccggggattgggtttaatccgtcggctgctgcagctgcgcaggctgcgttgaatccggcaatggcacaggcgttgacggccctgctggcgtcacaggggacgttggggctgacgaatttgttggggagtattggaacgagtgctgcggtgaaccctggtgtgcctgctgcagggtctgcggtgcagggtggtggttatagtgctcagccgaatataagtcccggtgttgttggaggatatgggaatcaggtggggttacaggctgcgtatccgaatcagaatcagcagatagggcagggtggatctggaagagggcagtatggtggtggagctgcgccctacatggggcactaggtatggtgtgtgatcatttttgtgtagataattgatgtcttttcctgtttggccttatttttatctgtttggtactgtgtttaattgtagaagggaatagggtaggtcttggaggaagtgaaagcaaaggagtgggttttctttgttgggtatattcttagggtttttagtgccaacttttagggtgtcgaatatgatgtatttttgaatgcttagcatgcctgccttgggctttctttggtaataaacatnacaaaaaactggggnggcccgtacccatcgcctatgtgagtgatacgcgcctcctggcgcgtttcaacgttgactggaaacccgggtactcacttatcgctgagcaatccctttcgcgtggttanagcagggccgacgatcgctt

SEQ ID NO: 59416 - DNA, 1236 bp, Glycine max
  unsure (1)..(1236): unsure at all n locations
  Clone ID: PAT_MRT3847_24664C.1
ccgcgaaccaatgcattccctacccttaccctgctctctccgcctctctctctctctctctctgttgtgttgttttgtgtccacaccaaggaaaggagatcgaaaccaagcaaagcaagattttccctcttgtcttaactattctttcactaagacatacatacaacaacttcatatatggaggaactcttctcctccctcaagcttctctcttttaccttcatgctccttctcttcctcctcaagctcaccgtcttgctctggtggcgacccagaaaaattgaaggccatttctccaagcaagggatcagaggccccccttatcgtttcttcattggaaacgttaaggaacttgtcggcatgatgttgaaggcctcttctcaacctatgcctttctcccataacattctccccagagtcctttccttctaccatcactggaagaaaatttatggtgcaacattcctagtttggtttggacccactgttcgtctcaccgtctctgagccagacctcatccgggaaatcttcacatccaagtcagaattttacgagaaaaacgaagctccaccacttgtgaagcagctagaaggtgatgggctccttagcctcaaaggagaaaaatgggctcaccacagaaaaattatctctcccacttttcacatggaaaatctcaaattgctggtaccggtgatggcaacaagcgtggtagagatgctggaaaagtggtcggcaatgggtgagaagggccaggtagaaatcgaagtttcggagtggtttcaaagcctaacagaagatgtcattacgaggaccgcgtttggaagcagctacgaagatggcaaagccattttccgattacaggcccaacaaatggacttggccgccgatgctttccaaaaagtattcatcccaggttacagattctttcccacaaggaggaatataagatcttggaaattggagaaggagattaagaaatcgctggtgaagctgatctcaagacggagagagaatgagaaagggtgtggggtggaggaaaaagaaaaagggccaaaggatttgttgggactaatgattcaggcatcgaacatgaacatgaacatgtccaatgtcacagtggatgacatggtggaagagtgcaagagctttttctttgcaggcaaacagaccacatccaacctgctgacgtggacgaccattctccttgctatgcacccacactggcaggtgcgggcn

SEQ ID NO: 59417 - DNA, 680 bp, Glycine max
  Clone ID: PAT_MRT3847_24665C.1
ctttattgtaaaaaaaaagtgatcagtctgcaaaccggagtgtcattgcttacaatagataaaacctgtgactcaggctgttattttattctggatttcatttctctatgcatagtggtattttgattttcccatcactttatctgtcagttttacgctacttcaaatacctgcacttaatcagtcatagaatgaggaatgtgctgcattgataaatggcttgcaaggggactaaaccctgtataacagaaaatgataagtgattttaacatttcctttaactatagtgagagaccaaaaatactttcataggatgtgcactgagttatagggtaaattacattactgcctaatggtttatttaatttagtgtcatatgatgttttttttttgaggaaagtgtcatatgatgtttatttacccatttctataatctcccaaaactatgattaaaagtggaaccttgtatttcctgtaaaatttaatagtggccatctgtgtgagaagcaaagtagtgttggttttatgagaagggtgccaaatttaattgtgagcagatattttttaaagtgactcgttattttcaacacagctgcaaaccaattcctttccattttatgcactgtttcccttgtacttgaatgtatttgagtttggatggtaattgatttatgcctgca

SEQ ID NO: 59418 - DNA, 478 bp, Glycine max
  Clone ID: PAT_MRT3847_24666C.1
gtgtttttgcatttcaatctttgtttgttgctgttaatcattttcttgctggtctgtacaaggatatatccaattttcatgttgaggttaaaagaaaaggtcatggctccacacgcggcaatactgtatactgacaaatcttaagggggggtcagtatatgatgggatccccatagcgatggagagggccccactgttgaacacttagctgtaccacaggctagaagaaatgcctggcaggggagcacagttttttttctgcccttgcttttcccgaagaaaacacaagatggtcttgacctgtgatcacaaagaccatggcgccgcttacactctagcactagttgtcctagtcggcaaagcctacgggcccctttttctgcgttccctagcaccactaaatactgaggaaaaaaattgttggtctgtggagagaatatgcagataagaaaaactcttggtcccccaaaaggaacct

SEQ ID NO: 59419 - DNA, 2014 bp, Glycine max
  Clone ID: PAT_MRT3847_24667C.1
gtgcatccccacctgcctctgttataaactcccacccgggctcggtgcagtttcaattcaagaaagtttcataccgggtcttgctgaccctttacaggcttgaactgttcaagcagcctcagatcgacttcatacagatacccctcctgaatagctctgtataagtaaaactccacctaagatgcttgtaattttaaacccacgatcaggtcggggtcgttcaagtaaagttttccatggcattgtggaacccatattcaagcttgctgggtttatattggaggtagtcaaaacaacatctgctggtcatgcgagatatcttgcatcaagtgtagacatcagctcttgccctgatggaattatctgtgttggtggtgatgggataatcaatgaggttcttaatggtctccttagtagagacaatcaaaaggaaggaatatctataccaattggaattataccggctggttctgataactcattggtatggactgttcttggagttagagatccagtttctgcagcaatggctattgtaaagggtggtcttactgctacagatgtctttgctgttgaatggattcagactaataaaattcactatggattaacagtctcatattatggttttgttggtgatgtgttggaactttctgaaaaatatcagaagcgctttggcccgctgcggtattttgttgctggattcttcaagttcctatgcttaccacgctacaactatgaagttgaatatcttccagcttcaaagactgagagagaaggaaagctttctggtgaaaaggaagtagttgacatgtcagatctgtatactgacatcatgagcagatcaaataaggatggaatgcccagagcatctagtctttctagtattgactcaataatgactccaagtcatatatctggtgtagacctggatacctgtagtagtacccatgctagcactgaaccttctgaattggtgcgtggcttagatccaaagtccaaaattcggctgtagggaaggggcaatgtaatagcagagccagaagttatccatccgcagctgcctctgtcaacaactccaaactggccaagaaccagatctaagtcaaggaatgataaaggatggactggattgaccacaacacatgatacctctagacggggaaatactgtgacaaatgatagagaggatatatcatcaacactgtctgatccaggtcctatctgggatgctgaaccaaaatgggatgctgaacctagtaattgggatgtggaaaatccaattgagttgccaggaccatcagatgacacagaaataggatctgcaaaggaggttgtgccccgttttggagataaatgggttgcgtcaaagggacaatttcttggcattctggtttgcaaccatgcatgtagaactgttcagagctctcaggtggttgctcccaaagctgagcacgatgataacacactagatttgctcttggttcatgggagtggaaggctgaggctgttgagatttttcttactcctacaaatgggtcgacatctttcactgccatatgttgaatatgtcaaggtaaagtctgtgaggataaagcctgggaagcacactcacaatggatgtggtattgatggggagcttttcccactcaatggacaagtaatttcttctttgcttccagaacagtgccggcttattggtcgctttcgtatatgataactgagttcttttcaattctttcatgggttctgggaagttcatgtaccttctcatatatatgaatccagatgcccaatttgtcttgcaaattccttatcgctgtaacagctgagctttgtaaatcttttgttccggttatatgtatctgttgttgctagcttacctgtctttactttgctttttataaaaaagaaaacaagttgtacatttatgcatttcctgcaacaagaagctgaatgtattgctgatcaccatttccttgaattggtcaattgattttcttattctccaacc

SEQ ID NO: 59420 - DNA, 1620 bp, Glycine max
  Clone ID: PAT_MRT3847_24668C.1
cccacgcgtccgcggacattagaactgttttttaattcaaggttttatgccagtgacaatagtattgaaaattgaaatggtattttttaagtttcaaaataaaaatttgtgtaattgttataacatttttaaacatgtattttaactgttcgtatttttttcctctaaagaaacatgggagcctttggtttgagaaaacattctttttcattttctatttgcacttttaattacaaaaaaaatgtcaattgttttctaaacaaacaataaacaagataaaaaaatcatgttagatatgacttctagatagttattatatattctaattagtaatttgtgattggatcacgacataaaaattctttaactgtcaatgcaaacattatttactctttttgtaattagaatagaaaactttcaaatgaacccctgaacaaagggatgtaacatcctgaaattaattgaatgtgaaaagttggagatgagcttattatcgtttaagtggcttatatgctgctgctagtatggtgacggactaagcacaatcatgtaactagttactaactattggacccatctaactaacccaatatgtggtagtaataatgaggctatgaatttgaaattgttattgaattgattgtatatggtgtggacttgcaggttgcatcacaaccaaggagcttggaactgttatgcgttcattggggcaaaacccaactgaggcagagctccaggacatgatcaatgaagtggatgctgatgggaatggtaccattgacttccctgagttcctaaatctcatggccaggaagatgaaggacactgattctgaggaggagctgaaagaggcattccgggttttcgacaaggaccagaatgggttcatctctgctgctgagctccgccatgtgatgaccaacctcggggagaagctcaccgatgaagaggttgatgagatgattcgcgaggccgatgttgatggcgatggccaaataaactacgaggagttcgttaaggtgatgatggccaagtgatcatcacattatggccacaaaaacctaaatgaagaaatgttgattaaaaggaaacgacaaaaaaaggggtaggaggaaggccaagggtttgggtggtataacagtgatgtagtagtccttgacctttcttcttcctacatttttatttgatggtttttgaatccaaccttaaaatgtcaattagtggcaagtcctgctactaggctgtagtggaactgaaccttcttagtttgtcttgtaattttatccaaaaaaagggttgtaatgttaatgtctcttcactttctgccactcctcatttttttaaagatgatgaatattgtgatgatatttgacatgcatcttagtttacttgaaaagccattgtgtgatatggattctcctaagatatggatgtgaatgagtagaactaattattccttggtcttttagtgaatttatttctccaagaattgagaaagatgtttaactaaaaagggggtgtttaatgggtgtcggccacccatcgggcagcgggagtgccaagggtttgggttgtataacagtgatgtagtagtccttgacctttcttcttctacatttt

SEQ ID NO: 59421 - DNA, 2008 bp, Glycine max
  Clone ID: PAT_MRT3847_24669C.1
ccacgcgtccgatccaatcctgaatccatcaccattcaacaacacacatacacaatgccttctccatctcgttatggcttcgggatttcccaaattaccctcagactgatgatgctcttgtttttatttttcgcacgcgcggcttcgggtctgaacctcaccgccctcctctccaccgtgccggagctctcccaattcacctccctcctcgcctccgccacgcccctcgctgcggatctctcggaccgctcctccctctccattctcgccgtccccaacgcctacctcgccgccgacgaccacctctcccgccaccacctctccccggccgccctcgccgacgtccttcgctaccacgtcctcctccagttcctctcctggtccgacctccgcgccctccccccctccggcaagctcatcaccacgctcctccaaaccaccggccgcgccaccgacaacttcggctctgtgaacctcacccgcgactctcaatctggcgtcatctcgatccgctcccccgcaccgtactccccctccaacgccaccatcctctccctcatcaaaaccctaccctacaacgtcaccatcttcgccgtcaattccctcctcatcccctacggcctcgacctcatggcctcggaaacccgccccaacattgttctcaacatcaccaatgccctcgtcaacggccacaacttcaacgtcgccgcctccatgctcgctgcgtccggcgtcgtccaggagtttgaagcggacgagggtggtgccggaataacgctctttgtcccggtggacgacgcattcgcggatctcccaccctcggttgctctccagtctctgcctgcggataagaaagccgttgttctcaaattccacgtgctacattcgtattaccctctcggttctcttgaatccgtggttaaccctttccaaccaaccctggctactgaggccatgggtgctggcagcttcacgctcaacatttcacgcgttaacggctccgtcgcaatcaacaccggcatcgttcaggcctccattacgcagaccgtgttcgatcagaatcccgtcgcaatttttggggtttccaaggttctcttgccgagggagattttcgggagaaatccgatagtttctgctaagcctcttgataatgctcctccaccggatgatgacgctttgtcaccggagaattcaccgggatttgatggacagccctcacacctatcgtccccgccaggctttcgcgaagatgtgaggtctcatgctggtggttctggtggttccttgaactttgttgttcttctttgctgtataggcttgtattttgtggtatagaattacagattattgttttctgtcgtggggttttgttttaattttctccaccttctgtacacggttaattgcattatgaggctgcaaatgcagcttttttttttcctattgcttcttagttattttctggtttcgattagctataaaatttttgatgttcccgcgtgaacggctctgtcgccatcaacaccggcatcgttcaggcctcaattacgcagaccgtgtttgatcagaaccctgttgccattttcggggtttccaaggttctcttgcctagggaaatttttgggaaaaatccgactgtgtcccccaagcctcttgataatgctcctcccccggatgatgatgctttgtccccggagaattccccgggatttgatggacagccctcacccctatttttgcccccgggattttgtgaaaatgtgaggtctcatgctggtggtgctggtggttccctgaactttgttgttcttctttgctgtataggattgtattttgtggtatagaattactgattattaattttttttgtggggttttgttttaattttctcccccctttctgtacccggttaattgcattattaggttgcaaatgcagccctttttttttttttcctattgcttctcagttatcttctttacgatttattataattttttttttgtt

SEQ ID NO: 59422 - DNA, 254 bp, Glycine max
  unsure (1)..(254): unsure at all n locations
  Clone ID: PAT_MRT3847_2466C.1
cgtgcggaacttctaacacaaattttttcatttaccattcctatccttctctctntnnccaagccttagtcttactctcacatgctccttctctgaaccaaacccatccattattcattttaatcttcttatacatcccaaaaaaacccaatcaaaacactgtccttacaaacttctctttatccctaaaaaacaatcaaacctttccattaaaaaaagaaccccctttttttaaattcccaattttggtctca

SEQ ID NO: 59423 - DNA, 573 bp, Glycine max
  Clone ID: PAT_MRT3847_24670C.1
ctagctatctcgatcgaactgtccaaggtcctgtcaccctcaccccgccatccacctccgcctcctcctcgtcggttcatctcccgccgcactacgtgacacggggaggttagcactgccacgtctgcaatctcgtcgccgtcaccccccaccgtccatacgcccgcaccaccagtcacagcaggtgctgctccttaaacagtggtcttgcctcgcaacctcttccaccaccatgttgttcgccaccacctcggggatcatcttctaagcaccttccgcttggcacttacggtgtccaggagtaccttacgcgggctggctcaaacgctaaagtacacctggttatcccataaatcatagctgcacgccgctgtgctgctatcaatcacgtaccggcttatcgactagcctcgcggactagatacaaacaataaacttacacacgaagggttggaagcatattagattgctgacgcaatggagagagtgtacggtatggcataacaagcgcgggactggaaggacggagagaccaaaggattaaccaaaaatgcaaccgtacaaatgccaggt

SEQ ID NO: 59424 - DNA, 768 bp, Glycine max
  Clone ID: PAT_MRT3847_24671C.1
agctagcttctcggattccacgtgcatgcattctaataatagagcacagttactaaatttgtgacaagaatccctatctctaaaaccatgaaaacaaaaattacacgtaactgacaaagagactatattatgttagtaatgtacattgactattcaacaacagagaaatcaggttctgctggcttctgcaaggagcttacaactccagaatctgtcctagtactcctggcaacccttttagcataggttggtgtttgagtttgaggctcatcaacaacattaacatgaattgcccttgccctaattagttcagccacttcctttcttttcttgtgccttctccaagcagcttgaatgaaacacgcggcccaagttctccactggtgcgagtaaaacctgaacttatgcctgagctgtttgctgtgtagtcttctaaactgtgacgcaacgaacttgaggtcttctgctatgagtgcaaaggcctccacttctgagatggctttcactgttcgagtggatgaggggagtatcacactgggccgtgggtccaaggcccatgttagaagctcctccccgcagaaatcgccaggcccaatgcagcacgagttgaagaacccggcccggcccccgttggtggtgtaagaatctagatggcctcggattatgaatagcatctcgttcacaggatcaccctcgcggaccagaaacatgccctcagtgcacaatgcaggctttagcctctcgcatattgcatccagcattctctcg

SEQ ID NO: 59425 - DNA, 409 bp, Glycine max
  Clone ID: PAT_MRT3847_24672C.1
ggaaaggagacagaagaaactaatttgctacagcagttgtctgatgcctgcctggttgttgatgcattagagccttctgtaagggaagaattggtaaataatttcttcatttgatctcattcggcgcttaatccatgcatatcttcgttcagttttatccaactttgcaagttctaaagatgaaaaaataaggaaaaccaaatatgcagacatttggcaagaactctaagtataaactaacacaaaaatgttccagataaatcaaacataccagctccttcaaaaatttgctcatacgatgtaagctccctattgcagaagtttttcctcttctgaatccatcgccactgcagcgtggacggaatcggagtgcagccatagcagaagcaatagaagccctatactaacc

SEQ ID NO: 59426 - DNA, 407 bp, Glycine max
  Clone ID: PAT_MRT3847_24673C.1
aattcggctcgagcatgagggaaataaaagaccggctatcattagatcactctgcctaacatgggagggagatttgagggcaccccgcagggtaaaccttactgatgaaactgaacaatggaattttgtacaattcacatttgagattcatgaccaacattgctggtgcacccaacaatttttcaaaaaccccaaaatacccctgaacgtttttcaaatgaaaaacaattttgttttggtgtgatatttggcaactaaggtacatagcttttgtgtgtatcattgtttatgatgagggaagcccacaggcctacaggtaacttacgggtaaggctcatatgacaactatcaatggattggtaccgagtgacattataactgcgggagataaaaactcatttagtgga

SEQ ID NO: 59427 - DNA, 221 bp, Glycine max
  Clone ID: PAT_MRT3847_24674C.1
ctcgagcctatctggatcttaacatagccaggtacatgcacatcattcgcaagactactataccaaatggctcgcactatacctatactgttattcccagcaaaggcagtaaactggattctacaatatagtcgtattacatacagattcaacttggtacaatataattattcatccaatgtacattagtggttccctatctgtaggtgttgctgcaaggc

SEQ ID NO: 59428 - DNA, 293 bp, Glycine max
  Clone ID: PAT_MRT3847_24675C.1
gcgctagaggaagcatcacagcaactggctggacaagaaagggaaaagaatcagggatttgattttgattcctttattgcaggaactattcagcttagttcccagcatgagcctactgatgttgttgataaattaaatgacttgaatagctcagtgtcccaactagaattgaaaagtttgatatcaaagtcagtaagccaagaaaaacaggaaaaaggaatggcaaatctggctcaattagaagccttgtaccagtcttcttgggacagccagtttgtgagtggtggggagga

SEQ ID NO: 59429 - DNA, 266 bp, Glycine max
  Clone ID: PAT_MRT3847_24676C.1
ggaagcgcttgagaccaagccccactcaaccaccacaccactctctctgctcttcttctacctttcaagtttttaaagtagtaagatggcagagacattcctatttacctcagagtcagtgaacgagggacaccctgacaagctctgcgaccacgatctccgatgccgtcctcgacgcttgccttgaacaggacgcagatcgcactgttgcctgcgaaagcatgcactaacaccaacttggtcatcgccttcggagagatcaccac

SEQ ID NO: 59430 - DNA, 251 bp, Glycine max
  Clone ID: PAT_MRT3847_24677C.1
cgtcagtcggtggcaagacgacaacagggcggcatgtctgtttatggacaaaatctctatatggtctcatacaagcacctcgccgctctctatgattcatgcttgagtcaggctttctccgacggtctttctctgctattgtgtcttccaagttctattcaattgccgtcctttttcacagtcttgactgggaaacccctggcgtttcccaacttattcgccttgcaccgcatccccctttgatcagctgg

SEQ ID NO: 59431 - DNA, 332 bp, Glycine max
  Clone ID: PAT_MRT3847_24678C.1
acgggaagggaaatttttatattattgtaaccaccaaaaaaaacaacaaagccccactagttgacgcctcccaactttgttaaacaaacaataccttcaaaacattcactgaatttcacacacacacagctgaacacaccacgtttaaacaaaagaaatgggctcccttaaaaaaccatgattcaccaaaatgaacccctggtgaacatttccgaatttcaaccttccactaaaagcccccccggccaaacaagccccacccaaattggaatcaccaaaaatgtatgtatcacccggaagcgcaaaaaccccacccttgaaatggaaaacac

SEQ ID NO: 59432 - DNA, 277 bp, Glycine max
  unsure (1)..(277): unsure at all n locations
  Clone ID: PAT_MRT3847_24679C.1
tcctctagagcggccgctttttgttttttttttttttttttttntngggggcgggggaagtgacctcaaccagattgcttgggtcaattgggagattgtttgccttccaaaagagaggggtggtctgggaatcaaggacctcacccgcttcaacttggcacttctaggcaaatggaagtgggagttatttcatcctcaggatgagctatgggcaaaggttctggtttcaaggtaccgggactggaggggacttgctgaaccaccctatgataaaaat

SEQ ID NO: 59433 - DNA, 625 bp, Glycine max
  Clone ID: PAT_MRT3847_2467C.1
gagaagaaatcaataacttagtaagtttgaaattggatacacaagtagtttttaatacaacagaaaaggacataactctttgcaatttctacaatacatgcatcatcacatgggggtttagagggacaatccagactcttcatcctcttcaagggtggaagtgtagacaaagaagagagcccatatgagaccaaagacaccaaacaggatccaaccaagaaggttgttgctaagcccaaagggaagcccagttccttcagtgctgagtctctcatcaaccaaagccatggctgctgggcttgacatggttgcggcagctgcagctgctaacaaggatgcccccatccctaggtttgagctgcttgaaggcttttcctccatggagcacctcactctccccgccttggccattgctggcaatcctgtacaatttatgtttgcaatcaagaacggtagaggatgaggccccaacaggtcgtttgagcacatgacctgtgcgagtgattgatgtagttggggtgccggcgatgattgttgccatttttcttcactaacgaatcagagtaagagtatgctattgctacgcaactttcgtcacggttgcagtttatttcatatgcatgcc

SEQ ID NO: 59434 - DNA, 450 bp, Glycine max
  Clone ID: PAT_MRT3847_24680C.1
gcttggaacctttgggctgatttatgtgcttgaccctctaaacactaagccacgatgagcccgtatcccgtagagacggaaaagaaagagagaaagactacggcggtcgcggacgagagttaagagagtacgtacgtatctcttcggcgtactattaactccacccttgaaattaataagtccgcctcgtcccacgctaggttattcctcgtccctcatcttccggacgttgtagggcacaatccccttcttgacgccgccgacgtcacggaaaagcatagcacgtatccggtcaacctagctacggaaagagtcgaagtcgcccgtagagatccgaatgtcatcaacactaacacggagagagcggccggcgcacgatacgttaagaacgcaacacgtagcgtcgctaagaaatcagaggtcgatattcccgccacgggaatctacggt

SEQ ID NO: 59435 - DNA, 573 bp, Glycine max
  Clone ID: PAT_MRT3847_24681C.1
gtcttcgaccacctgaattgatggcagcgacggcatctgcacgcacgccgacagcacgaccgcatcggcgccgctgatgttgaggcgatccgcatggccgacaaggtttgccggatcgagccgacccacggcaagattgtccgacacttccaggctgattgaatcggtgacttcgataccggaatcctcgatgtagtcgatcaccgtttgcgtgagcggcttcatgtatggcgtgatgattgctaccttcttgtagccctgtacatggatggcgtctatcagggcaccggcggaactgagtacaggcgtaggggcattgttctgctcggtaatcctggccagacgttcctgcgaaacacggtgatagccacggccctggctcatgatggcgaccaggcaagcatatgccatgacatcgcagcgggcatcactcaattcaagcgcgcagcggtcgcttgctacgtccatgtttttcagttcctctggcgtgacatgcatcatgcgcatgcgggctgagtggaacgtgaaacgttcatcgggaaactcggcgtagcgggaggtcagcatcgccgg

SEQ ID NO: 59436 - DNA, 517 bp, Glycine max
  Clone ID: PAT_MRT3847_24682C.1
ggaatcaaagaatttaggcctacctagattaagggcgaattacaccttatttcaatacaaatcacagagcaataaaatccttctttaatctttagctctggcataacccactctaaattacccccaaaattttctacatattaaaggccgctaaacaaaatcaagggatagctcggaggaccttagggaaaataaagggccaaaaatagattttgcccccccaccatggcccagttcctatggatccatcactttcgggtacccaaaaggggttttagcggggtcccgaaaaaaaaataaaaaaaaaaggaatcctgcgggggaactatcttccctgaccaaggcccctgaaaaccgggcttttcccagctagagttgcttcccccctccctgaagatagcagaatctgggaaagggatatcacaacttgtctcatttcggggcggaagatggggtcctcatccacacattggtttgccaacatggccccctttattcacattcctgggggtcccga

SEQ ID NO: 59437 - DNA, 236 bp, Glycine max
  Clone ID: PAT_MRT3847_24683C.1
cggacttaaaaaattgcaggagagagtgaagaaacaacaagagaaagtaggaaagaaggtaacaacgttgatcatgaaatatcctattagctattatcatttgctttgaatttgcatcggcaactgttggcacacgagtctttgagaaaggttaccttagttcagagagcatatccactaaccattgatttgaactaaagcattttgtaagcataacttactttaaatcaatggta

SEQ ID NO: 59438 - DNA, 414 bp, Glycine max
  Clone ID: PAT_MRT3847_24684C.1
ttttttttttttttttttttttttttttttttttttttttttttttttcttgggttttttttttttggaaaggaaaaaaaatcccttttggtttaaccccctattcctttcaaagagggatccaaaaatcccctttttttaaataacaaatggcttccacccaaacaaaaaaagtaaccacccctttacctaaaaagattttctaaaaaaaaacccctcattcgaaccaagggggcctaatatctaaataaaaagccagtgtacttggggaccgccttgtacccctaaaaaacggggttcttggccaattcaccgggaaaaaaaatcctaacccgggggtaaatttcccttgaagagagggggggcctttttttgtaatcggccagattaaaaatatcctgggcaatcttcttc

SEQ ID NO: 59439 - DNA, 464 bp, Glycine max
  Clone ID: PAT_MRT3847_24685C.1
gtattaaggttgttaataatgatttttgcttgttggttggtggtggtgatgtgaaaaacaagctcatggccatagacctgacatactctgaggacgccaaattttgcacgggggcttgagtcgggcttccataaccttatccttagctaaccatttgggggggaaaaagctaaaacaccccgggtttcagaaacaggctttaaaaacttcccccactaattgcctcttttgaaagggagcgcccagaatttcccttggccaaaaccgtcccgagagggattgtccttttttggtccccacttgttggaaaaggttccatccccccccattgaaaagctttttttttaaaaggggtggcaatataaccttgggaagtgcttttccccagggccaaaaaacttttgattctttatgttttgaccacccctttccactacatacagcccaaaaaaaaaccttgggct

SEQ ID NO: 59440 - DNA, 339 bp, Glycine max
  Clone ID: PAT_MRT3847_24686C.1
gggggggaaaaaaaaaaggcccccccaaaaccagggcatttaataaaaaaatggggtggaacaaaaaaaccaatccctttaacaaaaaaacccctccccccaacctgcaccaggaagtttgttcgttcctacctacaaaaagaaaccaccggggcgcgcgcgaacacaattcgaccgaaaaaaagaaagaatttcctaaaaagggcgcggaccctccccccatggttccctaaaaaaaccccccccttacttttagccctgtttttttgaacgggcgggtgggcccccccagaaattccggccccgtgccggggagcgaaccatctttacctaaggggg

SEQ ID NO: 59441 - DNA, 418 bp, Glycine max
  unsure (1)..(418): unsure at all n locations
  Clone ID: PAT_MRT3847_24687C.1
cgccgcttgtgctgcagccatgtctctagtgatccctgaaaagttccagcatattttgcgagtactcaacaccaacatcgatgggcggcggaaaatagcctttgccatcactgccattaagggtgtgggccgaagatatgctcatgtnggtgttgaggaaagcagacattgacctcaccaagagggcgggagaactcactgaggatgaggtggaacgtgtgatcaccattatgcagaatccacgccagtacaagatcccagactggttcttgaacagacanaaggatgtaaaggatggaaaatacagccaggtcctagccaatggtctggacaacaagctccgtgnagacctggagcgactgaagaagattcgggcccatagagggtgcgtcacttctggggncttcgtgtcgaggcc

SEQ ID NO: 59442 - DNA, 403 bp, Glycine max
  unsure (1)..(403): unsure at all n locations
  Clone ID: PAT_MRT3847_24688C.1
cggacgcgtgggcggacgcgtgggtgcaaaagtaaatccatcatgggcaagaaatctacacaggaacacaacagcaacaacaacaactgagtttaaaatgcgcaagtatgacatgatttaccatgattcattctctaatattgccttgtagaagtgtatttgctcttctctctctgcatcttatatgatgagttccaactcctcccagcagaagctataatagctgtttgtgctatctccactggcaacagcaaaagccagtgattagaaggaagcattttgctagaaaggcccagaaattctccactggattgagcaagagaactagcaaagtagctgagaagaaagagggtactgttgctggtgcagntgctcttatcattggtactagtattggtactgg

SEQ ID NO: 59443 - DNA, 133 bp, Glycine max
  unsure (1)..(133): unsure at all n locations
  Clone ID: PAT_MRT3847_24689C.1
acggatcttgaacgcactnaaggatctgcagaaggctcctcntaccttttgcagccncggtcctgttgctgaagacatgcttcattggcacgcaacacttatgggccctacagacaatccttatgctggaggc

SEQ ID NO: 59444 - DNA, 326 bp, Glycine max
  Clone ID: PAT_MRT3847_2468C.1
gcccggtgcacatagaattgccttatacaatcaagaatacactgacactaaccagtctaggaatgcagttaagtgaccgatgtcggacatgtacgactatgagaacgatatatggctctgaaactcatttccacggtcaatgctagaacttcactgcattatgaccgtctattaatactttgaaagaagtgcatgcgttcttgactgataatccaactgacattgagaccatcataactgaagactatgcgcacactcactaggagttgactaatgtgttcacatgtgcatatactggatcagtattagttccctgtgaccaagac

SEQ ID NO: 59445 - DNA, 2364 bp, Glycine max
  Clone ID: PAT_MRT3847_24690C.1
ccacgcgtccggtaaaaacgagggttgtaaatcatgcaacgtgagcgtgagtgacaccttgagaatcccctacaaattatccaaccttttcagtttccattcagatatttttgttttttcaaatttcactgatccagctagcacagttttacagagagcaacaaacaaagcaactacaaaatttatgcagctttagatcaatgtctttctctctctctctatctgtctcttccatggaatggtagatttgaggtgaagacgttccacattggtcaggtcccgatctcacgatggggaagtcaccaggaaaatggatcaaaactgtactgttcgggaaaaagtcatctaaatcaaatatttcaaaaggcagagaggtaaagcttgttaatcaaaaaggagtagtagttacctccaaggtgccagaaactggtttggctttagaaccaacctccgatactattgccagacatgaggaagatccagagctggaaaataaagaagcagaaaatgttttacccgggaatcaagaaatagacacagtgggatcaattaatgaagatgctgcactagatccagagaaaatgaggctggaggaagcagctacaaaggcacaagctgctttcaggggttatttggctcggagagcatttagggctctaaaaggaataataaggttgcaagcactcatccgtgggcacttggttaggagacaagctgttgttacattatgctcaatgtatggtattgtcaagtttcaagcacttgttcgtggaggaatagttagacagtctaatgttggatctgaaatccatgagaagtccaatatattgaaccctctggatggcaagcttgtcaagccaaatgctatgttcacgaaaattaccaagctgtctgcaaatgctttcattcggaagcttcttacttcgtcaactacaataatggcgctgcggttgcaatatgttcccggcgatccaaattcagtcctaagttggttggagcgctggtcagcatctcacttttggaaaccagttccccaacccaagaaaattcgagatactaagtctcagagaaagcatggcaatatttcagttggagatactcatgtgagcaagtcaaaacgaatcaacaggaagcttcctactgcaagttttgactcggtcccagtgcaagcaaatcctgaatttgaaaaaccaaaacgaaacacaaggaaaatttcaaaccaatcctcagatcctcatgtgcaggaaaacccacaaagtgagcttgaaaagattaaacgtaacttgagaaaggtttataacccagttgttgagaatgctgttccgtcagaagttgaatccgaaatgccaaaggatcatttggaaaaggtaacagttacctcatgccttgctgtttcagagcaagaggtcattagttctaatgagaagatcaagaaggaagcaatattaactgtttccagtgtgccagatatagaaactactccaagactttcagttagtaaggaggtgtctgacacaccaagcagttatcaagtgactgtggaatcaaaaccattgactgagattacaactaaagataaaaacatttctgtttctgacgaagtaaaaaatgagcccatagatttaccagagcctatttgtaaagatgaaaattctcacttaacaaatggagatttgagtcacaaggaagatcaaataggcagtgaaaaccagaaaccaaaccaaaaagcctcaattgtagcaaagcaggaacgtgcagagaatggtatacagaatagtccaacattaccgagttacatggcagcaactgaatctgcaaaggcaaagttgagggcacaaggatccccaagatttggacaggatggaagtgaaagaaacaaccatactcggcgacattctctgccatcctcaactaacagcaaaattaattcaccttcacctaggacacagagaccagttcaatcaggtggcaaaggtggccacagaagtgacagaactgtatcatcttctagagatgggaatggaaaggtaattcaagcagagtggaggcggtaatttgaggaaggccgatgttctggaggaacatgaggagggcgaaaccgtgtgtggtttatatgtatctttgatgagaattgttgaatggataggactataggtgtgcttgaattcaggttatttcttcatttgctgcattttgggctttgagggtgatttgtacattataggtttctagttttgcatgatgcaactataactaaatttaattatgttttaagcaaaaaaaaaaaaaaaaaaactcgaaaaaaaaaaaaaaaaaaaaaaaaaaaaaaaaaaaaaaaaaaaaaaaaaaaaaaaaaaaaaaaaa

SEQ ID NO: 59446 - DNA, 2294 bp, Glycine max
  Clone ID: PAT_MRT3847_24691C.1
cccacgcgtccgccagaaacaaccccttttaaatcacacccacttcctttttccctcggcgtgtcctcgtgtgtagcacaaactctcatttccaccctccgattaaactattcatttagggcgagattcaaaccgcatcaagtcattgcatcggacgaaagcagcaacaaacaaagcaaccacaaaatttatgtagctgatcaatctctttctctctctatctgtctcttccatggaatggtagatttgaggtgaaaaggttccacattggtcaggttccgatctcacaatggggaagtcaccaggaaaatggatcaaaactgtattgtttgggaaaaagtcatccaaatcaaatatttcaaaaggcagagagaagcttgttaatcaagaagaaggagttgtagttacctccaaggtgctagaaactggtttggctttagaaccaacctccgatactattgccagacatgaggaagacctagagctggaaaatgaagaagcagaaaatgttatacctgggaatcaagaaatagacacagtgggatcaattaatgaagatgctgcactagatccagagaaaataaggctggaggaagctgctaccaaggcacaagctgctttcaggggttatttggctcggagagcatttagggccctaaaaggcattataaggttgcaagcactcatccgtgggcacttggttaggagacaagctgttgcaacattatgctctatgtatggtattgtcaagtttcaagcacttgttcgtggaggaatagttagacattctaacgttggatctgaaatccaagagaagtgcaacatattgaaccctctggatggcaagcttgtcaagccaattgctatatccatgaaaattaccaagctgtctgcaaatgctttcattcgtaagcttctcacttcatcaaccagaataatggtgctgcagctgcaatatgttcctggtgatccaaattctgtcctaagttggttggagcgctggtcagcatctcatttttggaaaccagttccccagcctaagaaaattcgggatactaagtctcatagaaagcatggcaatatttcagttggagatactcatatgagcaagtcaaaacgaaccaacaggaagcttcctcctgcaagttttgactcagtcccagtgcaagcacatcctgaatttgaaaaaccaaaacggaacatgaggaaaattccaagccaatcctcagatcctcctgtgcaggaaaatccacaaagtgagcttgaaaagattaaacgtaacctgaggaaagttcataacccagttgttgagaatgctgttccgtcagaagttgaatcggagacgccaaaggatcatttggaaaaggcaacagttacctcatgccttgctgtttcagaacaagaggtcattagttctaatgagaagatcaagaaggaagcaacattaattgtttctagtgtgccagatatagaaactactccaagactttcagttagtaaggaggtgttagactcaccaagcagttatcaagtgactgtggaatcaaaaccattgactgagattacaactaaagataaaaacattcatgtttctgatgaagtaaaaaacgagcccatagatttaccagagcctatttgtaaagatgaaaattctcacttaacaaatggagatttgagtcacaaggaagatcaaataggcagtgaaaaccagaaaccaaacggaaaagcctcaattgtagcaaagcaggaacgtgcagagaatggtatacagaatagtccagcactaccaagttacatggcagcaactgaatctgcaaaggcaaagttgaaggcacaaggatccccgagatttggacaagatggaagtgaaaaaaacaaccatactcggcgacattctctgccatcctcaactaactgcaaaattagttcgcattcacctaggacactgagacaagttcaatcaggaggcaaaggtggccacagaagtgacagaactgtatcatcttctagagatgggaatggaaaggtaattcaagcagagtggaggcggtaatttgaggaaggcagatgttctggagaggaacatgaggaggttgaaactgtgtggtttatatgtatctttgatgagaattgttgaattgatgggactataggtgtgcttgaattcaggttatttcttcatttgctgcattttgggctttgagggtgatttgtacattataggtttctagtttttgcatgatgcaactatacctaaatttaatttatgctttaagcatgatttctgagctttc

SEQ ID NO: 59447 - DNA, 1109 bp, Glycine max
  Clone ID: PAT_MRT3847_24692C.1
cccggtgctggatcaagcggaaatcaaaaacggcggagctcaaactgaggatcgaatgaggccacacggctcaatgtaccgtccgggaacgcactgtattgcggagctgcgtgggtttggacaagcttccaaaagggctggtcgcagtgggcctcgccccagtgaaggttgaacacaacacagctcaactaatattcccagttcccatccgaaacccagtgtctcgatattgccggtatcgtaagcctgggcgtcctaagtgatgttaaaatgtgaccaattgtatctccgtggcatccattgacaaaatacttgtgggaaatgggtggtgctatgaaggctgcccaaaatgctccaagaaagttgaggcgcccccatgcaggttgtgcaaatgattgctcaactactattacaagtttggttgagaaaggtcaatggtttgatgtcgttaatgctgataggatcaagagtataaatgattttgctaacttttttgcctacaagttgattccagagtacaatattagagtccaagtgtatgatggcgcgggtaatgcctgctttaaattaccatataaggatgtcaaaatattactgaaaatatcgtgcaaagatattgttttacacattgagggtccatatgctcaggagttaccagcactactgtatgatctaaatggattggacctattatttttagtagacacaagaattgaaggatcagctacatcaagtagcaatgttagcgatcatgatgggtactctgtgtctgaaatatgtcatgagaaggagattttgagaatgctccagagaggggaacactatttccaatttgatgaggggcaagctaaacgtgctctctgtctatctgtcaaggaaaacaaattgaaggtaaccaaacaacatcatgctcctggttgtattgattgagatggtaaagaaacaaagtaaaatgcttttatcaaagtgtatctgatgctgctgatgtggaattacttttgtcaacaaatcaaagtctgctgaaatacagaagtagtctgattggtgtaatatgttttattgaacaaacctatctttatattatgcatatgtagtttaacttttcttca

SEQ ID NO: 59448 - DNA, 157 bp, Glycine max
  Clone ID: PAT_MRT3847_24693C.1
tttattgattactcatttacttgaatcgagcattaatacttctcaccttctatttcctaaacttaaaagtgcatacttgctagttcatacacctatggggtttttaactgttttttaacactcatatcagtacatctattaattgtgctggttattt

SEQ ID NO: 59449 - DNA, 402 bp, Glycine max
  Clone ID: PAT_MRT3847_24694C.1
ggttacatgagagaaaaaaagaaaaagataggagagttcaaattaaaggtaaaatctttttaaaaaatggatttgcacgtctttggaattttatgcattgttttggtcctgacttcaggagcagtaacatgtctggatgatgatccggaggatctgttttgtttaagaccatgctcaccattttgcaaccatgactgcattgtccgtggctataaatacggaggcgcctgtttcgcatatattatgtgttgttgtaagaagaattgatcatgactaccaccaatttgcaaccaagcaagaataatgcaacaacagatgatataagaaaaaagtgcatgcttctatggaatttgatgtgttttaatttgttgtaagaataattgaatattttgtacctctatc

SEQ ID NO: 59450 - DNA, 471 bp, Glycine max
  Clone ID: PAT_MRT3847_24695C.1
gaacgcccccaaaaagttggctatatgttggatttacaacaggcttctcagttctcccacatgtccagtacttgatgctttagggaagaaactgtcctttgagatagcagttggcttaaatggacgtgtttgggtcgatgcatcatctgcacacacaactattgttgtagctaatgcgattatgaactctgagacattgagtggtgctcagcagagaataatgattgataagctgctgcagaggatccagtgatccttccatttttgattggccattcatatagtcccttgtgatttcaatttcatagcagaatacctgttttgcaattgtcatcttatgccatttccaatttataaagtgcgtactttttatgtgctaccaaataccaatgcttctgcagggtgagcactctccactagactagccccactagctaaagggcacaaaggattatcaacaccttcatgttt

SEQ ID NO: 59451 - DNA, 517 bp, Glycine max
  Clone ID: PAT_MRT3847_24696C.1
ccagtttctttataatgctgaaatcaaaagcttgggagaactaagtgatgttaaaaagtgaccaattgtatcaccgtggcaaccattgacaaaatatttgtgggaaatgggtggagctatgaaggctgcccaaaatgctttaagaaagttgaggcgcccccatgcaggttgtgcaaatgattgctcaactactattacaagggcggataatgtaccgtgtgggccaaaatttgcagtttggttgagaaaggtcaatggtttgatgtcgttaatgctgataggatcaagagtataaatgattttgctaacttttttgcctacaagttgattccagagtacaatattagagtccaagtgtatgatggaactggtaatgcctgctttaaattaccatataaggatgtcaaaatattactgaaaatatcgtgcaaagatattgttttacacattgagggtccatatgctcaggagttaccagcactactgtatgatctaaatggattggacctattatttt

SEQ ID NO: 59452 - DNA, 135 bp, Glycine max
  Clone ID: PAT_MRT3847_24697C.1
ttttacttttgatcgactctttaaggggggggattttaactgctttgactattcaaaatttgcataaataaatgttaaaaacctattttttatgaatcagtgtaatattatatgattatgcttttgatttagata

SEQ ID NO: 59453 - DNA, 369 bp, Glycine max
  Clone ID: PAT_MRT3847_24698C.1
ctcacacaagcctacagctgggagaacacgacatacagcgaatgctagataaccatcgggcgctgtttacagaactgggtacataactgacagcctgatcttcatgaatttgagacgtattgccacacccacatgatgactgtcatgcgggaagcaacaactcttaccttatctggattttggcctgcttgttcctaccaaactcactggcagctcctaaactatatgctcattttcaatagagctatctcatttgacttgatatcatctgtcgaggcacactcatttgtggtgagcttttctgaagtttactagtgaatatcaaaggaccacagttgacgtacagttccctatccctaatgaaattgg

SEQ ID NO: 59454 - DNA, 1149 bp, Glycine max
  Clone ID: PAT_MRT3847_24699C.1
ggctcgaggaaggctacagtttctgctaccgatgaagattccattgctgatgtgatggaacagcatgacgaatttcttagttcaatgctggctcgttcagctaagttacagatggtcttcagatgttgggaaagaaatgatgttaaggaggtcattggcataatggcaaggatggatgatcatgctgtgattgctgatgttgttagcattataatggaaaaaattgatatcattacacttgagatatgtgctggtcttctgccacttctaactgatcttctacaaagtgaaatggaaagacatctaggaatatccttggaaatgctattgaaactggtcagaatatttggttcagtaatctattcaaccgtatcagctacacaacctgttggtgtcgatatcgaggcagagaacaggctagagcgttgcaacctctgcttcacagagcttgaaaaagtcaaacgtttttttgccttctctttcaagaagaggaggatcaattgcaaaatctgcacaagagttgaatctggctttgcaggatgtttcgtgatcttttcctgattcaattatttccgccgctcaagttttaccggtgctttttaggggttttgtgcattttaaagatttaaacctccatacaagccaccgaatagtttgatgcattgtcatttggcattgaatgaagccttttcctgtatgtacatttattgctgttaaaaattcatggtaattgattagtggaggcactgatagctgctaattctgcgacatatactcgaagccaaagcttgaggcatgtcaccctctgctgatggttgcacagctgactataacctgtcgatatctgcttaatgtgtagatctcagtcggttccataactaacctaatatgtggcgcaagatactactgcctatctaatcttatttcaaaatttcatgatttttgttatgattctttaagtgtcgttatacttagtgagtagcgccgttcatatttctatttgttgcatattcttgtatgattttctttcaatgcttttggtgaattatgacgatggattagtgtcatgtatgcgctaagaaatgagatcacagctttgccaaatgatctgatatttatggactatatgaattgtttagaattcccaat

SEQ ID NO: 59455 - DNA, 1849 bp, Glycine max
  Clone ID: PAT_MRT3847_2469C.1
tcccgagcgggggagcacgcgcgtggcatcatcgtcaaggttcctcaaaatgtctctgtcttttgtgttgctcttcctcatctcaattccaccttctttctcctctccaattcaccccacaagcaacgaccttcgtttttcttcaacagcagaaaaactcataagagggcttaacctgttcccgaaagaccccattaacacactcgagaatgaccctctttttgtgtcaggaagcattgtggagaagagcttcactttccctagtcttgctgcttcttcagaatcttctgttgaagaacttgagaagaaatcaataacttaagaagtttaaagttggatacacaaataattttttaatacaacagaaaaagagataattctttgcaatttctacaatgcatgcatcgccacttgggggtttagagggacaatccagactcttcatcctcttcaagggtggaagcgtagacaaagtagagagcccatataagaccgaagacaccaaacaggatccaaccaagaaggttgttgctaagcccaaagggaagcccggttccttcagtgctgagtctctcatccaccaaagccatggctggggcttgacatggttgcggcaactgcagctgctaacaaggatgcccccatccctatatttgagctgcttgaaggcttttcctccatggagcacctcactttccctgccttagccattgctggcaatccaagaacggtagaggacgaggctccaacaggtcgtttgagcacaagacctgcgcgagtgatcgatgtagttgggatgccggcgatgatggttgccatttttcttcactaatgaatcagagtatgggtacgcaacttttgttacgcctgcagtttatttcataagcattggagaaacatgcgtatcttcattatatgtttgcaataagatattcaatcggatcatgaccatcgctgacgatgtaaattactatgacattagaaagaaatgtgtgggagatctgtgttatgacttctctgtgatggaggatttcttaaacaagaagacagtgagagatgctttaggtgttggggacttggacttcgtttcatgcagtagcacagtgtatagtgctatgatgcaagactggatgagaaatctggaagttggtattcccacactccttgaggaaggaatcaaggtgcttgtgtatgctggagaagaagatctcatatgcaactggctcgggaattcaaggtgggttaatgcaatggagtggtctggtcaaaaacaatttggggcgtctggtacagtcccatttttagttgatggtgcagaagcaggaacgctgaaaagccatggacctctctctttcctcaaggtatacgaggctggtcacatggtccctatggatcaaccaaaagctgcacttgagatgctaagaagctggatgcaagggaaactgacaatgacaaagagtggagataatgtctctcctaaatgatgcactcacagcacaaaaaccaaaaccatccctctattgctgcatagatattgatgtcatttccttgtgtatactgggagggtggaatgtaattctttttcttttttcttttttttttctttctctagtttctcttatccctgaccattgagggatttggaactaatcatctatcattgtcaccaaatcacgcacaactttacacttgtaacctgatttcaatcaaagcaaatttcaattcttgaacaaatagagcattcaaagatttggaacaaatcatctatccttgtcaccaaatcgtgtacaactttacacttaacccttgtaacctgattttattcaagcaaatttcaattcttggcccc

SEQ ID NO: 59456 - DNA, 366 bp, Glycine max
  Clone ID: PAT_MRT3847_246C.1
gtgatgatcttgaactttgtgttctggggagtagatgaataggtggatgactatgaagaacctcatgctagaggacacgggaacacaacgctctgataggatgtgacattaggatatatgttttatattaattatatgaagcttatacgaccttgtttgagccgagatgactttattataaatttggacaagtttgaatatgatgtagaagaaagtgaatgtgagtcttttacccctttgaaagacttgtatttaaaaatgttttaaaaatacttttaattaatatttgaaattttatttctttattaatatatatgtgaggggtagagggtgttacactaaggttcttcaactaggtgtgaggtg

SEQ ID NO: 59457 - DNA, 833 bp, Glycine max
  unsure (1)..(833): unsure at all n locations
  Clone ID: PAT_MRT3847_24700C.1
tggctcgtctacattgcaacaccgcgatatgaacgatgcaaaatagtttcagatacgtcgcgttgattgattgatatgaagtggttgactttctggaactgcatatctatcctcgtgttgtcttttgctttcttcttcttctattgtcacacatacacatctactccttccctcatggctgagcaatcttccaagtccatttacgatttcacagtcaaggttcgtttttttgcttctaaaattgttgcctgctcatacccaactgttgtttctctatagttacgtgaaaagattgtggcttgctcatgcccaattgtgtttacactcgaattgtttgatgggtgagtgaagattatctaggaaatatcagggcacactatgatgacaattatatttagtaggttctgattttgtatcccacgcgtttccccacttatggagatcaatgaagctctctgatctagttttcttttcaattgattgatgattttgctgattgcagtatttagatttattttccctaacacttttattgtggtattcatggaaaatgaattgagttcggattattcttgttgattattggtttgtctatgccctcttctgtatatcatctgtgtctgttctgtcctaccaaattgtttgggataaggctggtagatttcattgctgctaattttattgtaattgcttgggtgacgttttacttttatagttttttttttttggttnctgggggggaccataattgcaggacattcatggaaatgatttgagtcttaaatattacagcgggaaggttctactgannnnnnnnnnnnnnnnnnnnnnnn

SEQ ID NO: 59458 - DNA, 250 bp, Glycine max
  Clone ID: PAT_MRT3847_24701C.1
catggggaaaactcaccatgttatttctcgcccagatagtcctactaaggaggccaatgatcacaaagatgacataccacaaaagtagggtggagtctaatttatcccttgatataataaatgaaactccacttaggaataataccattgattcacacaattccaatctatcatcatcctgagaacggacctcagacaccagagagaacataatattaactataccgctggaaagtcaaccacaaattct

SEQ ID NO: 59459 - DNA, 1916 bp, Glycine max
  Clone ID: PAT_MRT3847_24702C.1
gaattgagaaaccattattattataacaagtaaactgaatttagatgcagactttacaagttcctctgtccgtgtttgatatatgttgcaaacttacaatgacaatgacaatattgagaactttacaaggaattgaaaccatcaatatacaagtaaaccaatatattgatgttcctatgtccgtgtttgaaaactcgcaatgattggcaatattatttcatatacagatataattaattacaaattattgagatagctttcttctttcctcatctctacctcctcccctctcttcccttccttattccatatggcataaaaaatggatcatcgaatttgtgtgcgccccagtgaccaaaggcctgtatctttaacgggggccggtgctttcattgatgggaaaacattccaaaaccgtagagtctcatcccctgcaccagttactattgtctgaccatcaggagacattgcaaggtacagcactcgcatgctgtggccagttagagttgcaacctttgtcaatgatggatatttccacaccatgatctgattttgggagtacccatgagtacttactagttcattcacatttttactccatgcaagggttgcaaacctggctcccagtgtcaacacagttcaattgatggccatttgtagtgttccaaaaacgaatgcacctatcagcggttccacctccagacacaaggagactgctttggtgaggtgaccaagcaatggccttcacagcagcagtgtgctcggtaagtctcaaaactggttgctgagagtgttgattccataccaggagctgattatcattaccaccagaagcaagttccctgtcatcacaggaccatttcaatccacatacctcagacttgtgaccaacaagcttgctaacaaagtcacctggaaccctcatgtcatgctgaagtatgttcctatctctgctccctgaagccaaaatgcgagaattccatgccaaaacaccagtccttgtctgatgcccacccatggttctgaccttcttacactgagttccatcccaaacctgaacttgaccaagatttgtaccaatggatataaaagaaccctcccgggtccactggacagagcagacaccatcataaggccccaagtcacataacttagtcactttgctgtttgaagcgctccataaatacacacaagtgcctagccccacagcaagaacattttgtgtggaccagtccaccagattcaaataaaagtcatcttgaagtgatggggcatccaaaacccttgtggggcgtcttgaggactttcctgggaggtttgggaggcggggtagaagagtcagaaggaaaggcattctgctgtcccaaaatggacggcgaataaggcgaagaaggcgcgacggagtggtcggtcttgaagcggagcatgttcttgctggggctgagcggcgaaggaggagcagcacctgcaggggaagaaagagaaagagaaggagaagcaaagtcagatccaaagagttctgatttcaacaacctggaataagcctcgttactcccttccttcaccggcgagggcctgtccaggagcccgaacgtgtgcaacctcgaggaggaccggcacggaatgaacctgtcgctgcaagccgagttggatttcgaaggcgaggtgagattagagatggaacggagagaagaaggagaattgagggtcgagatggaagatgctgctgcagtgtccagccggagtgaggttccggacatcccagctgggagattcaaacccgatttcttcgcctccatttttagctactactatagaggagaaagagataaacgaaacaaatatgttttttgtgcaacggaagaagaagaatgagactagtttttgggttataaatttaacggtcgaattctgag

SEQ ID NO: 59460 - DNA, 2925 bp, Glycine max
  Clone ID: PAT_MRT3847_24703C.1
atgaatccctcacacactctcattccttcttctcactgctaccctcccctccttccttttactttcgcaactctttgcacctcccaacgacgccgtttcagagtcttcttccctcgctgtttctccgccacctccgctccgccgcaagtcccgaaggatctctgcggaatcgaacacctcgtcgataagctgtcgccgccggtgcggctcgcaacctccgtcgttgtcttcgccgccgctgcctccgccggatatggactcggctccaagctcggtggatgccagaatgtcgctatcggcggagccgtcgcgttcggcgtggccggcaccgccgctgcttacgctctcaatgcggttgcgccgcaagtcgctgccgtgaatttgcataactatgtggtagggcttgataatcctttcttgttgaagaaggaagacatcgatggaatctccaataggtatggtgtgagcaagcaggatgacgcatttaaagcggagatttgtgatatttacagccactttgtgtcgtctttgcttcctcctggtgatgtggagcttaaaggagacgaggctgataagatcattagcttcaagaattctttaggaattgatgacccagatgcagctgctatgcatattgaggttggtaggaacattttcaggcagaggcttgaggttggggattgtgaagcggatattgagcaataccgggcatttcagaagctgatatatatgtcatatctcgtttttggagaagcatcatcattccttctaccttggaagcatgtgttcaaggtcactgattctcaggttgaagaagctatacgtgacaatgcccagcgattgtatgcttccaagctgaaatcagttggcagagaacaactcgttacacttagagaagcacaacacttgtattgcctttctgatcagcttgctgaaaacttgtttaaggagcacacaaggaaattggttgagggaagtatttcagtagcacatgttatcgaagctgtagaggagcttgatagtgtattggcttttaataatatactaatctcattaaagaaccacccagatgtggaccactttgctcaaggtgttggcccagtttctttactgggtggtgagtatgatggtgacagaaagatagaggacttgaagctcctttatagagcatatattgcaaatgctttgtctagtggtcgcatggaagataataaagtagctgcactaaatctgttgagaaaattttttgggttgggtaaacgtgaagccgaagccattatgcttgatgttacatcaagagtatatcgcaaaaaacttgcacaggctgtctcaggtggttctttagaaatgacagatagcaaggaaacattccttcaaaaactttgtgatgaattacactttgatccacaaaaggcctgtgaaattcatgaagaaatttaccgccaaaagcttcagcaattggtggctgatggggagctcagtgataaagatgctgctgctttgttgaggttgggtgtaatgctctgtatacctcaacagaccattgatacagctcactcggatatctgtggcagtttgtttgaaaaggttgtcaaggatgcgattgcatcaggggttgatggaaatggtgctgagatgaggaaatcagtaagaaaagcagcacatggcttgcgactaaccggggatactgctatgtctattgcaagcaagaccgtaaggaaaatatttattaattacataaaacgtgcacgagcagctgggaattgtacagaatctgcaaaagaattaaagaaaatgatagctttcaacaccttggttgtgactgagttggtgaatgacattaaaggggagtcagatgatgagtcgactgaagaacctggaaaggatgacgtgatacaaactgaagatgaagaatgggattctctgcagacacttaagaaaataagacaaaacaaagaactcgaagcaaagctggggaatcttagtcatacagaaattactcttatagatgacctttcggaaagagatagaactgatctttacaagatatacctcctattctgtttaactggtgaagagacaagggttccatttggtgcccaaatcactgccaagaaggatgattcagaatatgttctgctaaatcagcttggcgggattcttggtttgagtggtaaagaaatagtggaagtacatagaagtctagcagagcaagcttttaggcagcaagctgaggtaattttagtggatggacagctgacaaaggccagggtggagcagcttaataatctgcagaaccaagttggcttacctcaagaatattctcagaagataatcaacagtataactactaccaaaatggcagcagccattgaaactgcagtaactcaagggaagcttagtattaagcagataagagaacttaaggaagccagtgttgagatagacaacatggtatctgaagacttgagagagaccctcttcaaaaaaactgttggtgatattttctcatcaggcactggagagttcgatgaggaggaagtatatgaaagaatcccgttggatctcaacattaataaagagaaagcaagaggcgtggttctagagcttgcagaaactaggttatctaactctctcattcaagccgtggcactattaagacagagaaatcgtgaaggggtggtttcttcactcaataacatgctggcttgtgacaaagcagtgccctctcggccacattcgtggggagtgcaagaggagcttgctgatctttatactatatacatgaagagtaatgcaactcctgaaaaattgtctcgtttgcagtatctgttgggcataaatgattccacagcagcttctcttcgagagatgggagaaagattgcttagtaataatgcagaggtagaggagtttgtattctga

SEQ ID NO: 59461 - DNA, 3229 bp, Glycine max
  Clone ID: PAT_MRT3847_24704C.1
acaaccacactccagttttacgacgtcgttttccgagggaatcatcatgaatccctcacacactctcattccttcttctcactgctaccctcccctccttccttttactttcgcaactctttgcacctcccaacgacgccgtttcagagtcttcttccctcgctgtttctccgccacctccgctccgccgcaagtcccgaaggatctctgcggaatcgaacacctcgtcgataagctgtcgccgccggtgcggctcgcaacctccgtcgttgtcttcgccgccgctgcctccgccggatatggactcggctccaagctcggtggatgccagaatgtcgctatcggcggagccgtcgcgttcggcgtggccggcaccgccgctgcttacgctctcaatgcggttgcgccgcaagtcgctgccgtgaatttgcataactatgtggtagggcttgataatcctttcttgttgaagaaggaagacatcgatggaatctccaataggtatggtgtgagcaagcaggatgacgcatttaaagcggagatttgtgatatttacagccactttgtgtcgtctttgcttcctcctggtgatgtggagcttaaaggagacgaggctgataagatcattagcttcaagaattctttaggaattgatgacccagatgcagctgctatgcatattgaggttggtaggaacattttcaggcagaggcttgaggttggggattgtgaagcggatattgagcaataccgggcatttcagaagctgatatatatgtcatatctcgtttttggagaagcatcatcattccttctaccttggaagcatgtgttcaaggtcactgattctcaggttgaagaagctatacgtgacaatgcccagcgattgtatgcttccaagctgaaatcagttggcagagatattgatgcagaacaactcgttacacttagagaagcacaacacttgtattgcctttctgatcagcttgctgaaaacttgtttaaggagcacacaaggaaattggttgagggaagtatttcagtagcacatggtatacttaaatcccacacaagatctgtctatggagttatcgaagctgtagaggagcttgatagtgtattggcttttaataatatactaatctcattaaagaaccacccagatgtggaccactttgctcaaggtgttggcccagtttctttactgggtggtgagtatgatggtgacagaaagatagaggacttgaagctcctttatagagcatatattgcaaatgctttgtctagtggtcgcatggaagataataaagtagctgcactaaatctgttgagaaaattttttgggttgggtaaacgtgaagccgaagccattatgcttgatgttacatcaagagtatatcgcaaaaaacttgcacaggctgtctcaggtggttctttagaaatgacagatagcaaggaaacattccttcaaaaactttgtgatgaattacactttgatccacaaaaggcctgtgaaattcatgaagaaatttaccgccaaaagcttcagcaattggtggctgatggggagctcagtgataaagatgctgctgctttgttgaggttgggtgtaatgctctgtatacctcaacagaccattgatacagctcactcggatatctgtggcagtttgtttgaaaaggttgtcaaggatgcgattgcatcaggggttgatggaaatggtgctgagatgaggaaatcagtaagaaaagcagcacatggcttgcgactaaccggggatactgctatgtctattgcaagcaagaccgtaaggaaaatatttattaattacataaaacgtgcacgagcagctgggaattgtacagaatctgcaaaagaattaaagaaaatgatagctttcaacaccttggttgtgactgagttggtgaatgacattaaaggggagtcagatgatgagtcgactgaagaacctggaaaggatgacgtgatacaaactgaagatgaagaatgggattctctgcagacacttaagaaaataagacaaaacaaagaactcgaagcaaagctggggaatcttagtcatacagaaattactcttatagatgacctttcggaaagagatagaactgatctttacaagatatacctcctattctgtttaactggtgaagagacaagggttccatttggtgcccaaatcactgccaagaaggatgattcagaatatgttctgctaaatcagcttggcgggattcttggtttgagtggtaaagaaatagtggaagtacatagaagtctagcagagcaagcttttaggcagcaagctgaggtaattttagtggatggacagctgacaaaggccagggtggagcagcttaataatctgcagaaccaagttggcttacctcaagaatattctcagaagataatcaacagtataactactaccaaaatggcagcagccattgaaactgcagtaactcaagggaagcttagtattaagcagataagagaacttaaggaagccagtgttgagatagacaacatggtatctgaagacttgagagagaccctcttcaaaaaaactgttggtgatattttctcatcaggcactggagagttcgatgaggaggaagtatatgaaagaatcccgttggatctcaacattaataaagagaaagcaagaggcgtggttctagagcttgcagaaactaggttatctaactctctcattcaagccgtggcactattaagacagagaaatcgtgaaggggtggtttcttcactcaataacatgctggcttgtgacaaagcagtgccctctcggccacattcgtggggagtgcaagaggagcttgctgatctttatactatatacatgaagagtaatgcaactcctgaaaaattgtctcgtttgcagtatctgttgggcataaatgattccacagcagcttctcttcgagagatgggagaaagattgcttagtaataatgcagaggtagaggagtttgtattctgataattataagaaacagttgtcaaaaaacccattttctattgtcatattgtttaaaggtgaaagaaaagaaaatcatatagattctcgggaaagaaatgagtaagacgcagatttatgagtagaagttgggatttcagattgatcatattttgacagtacgatttagtctgctgatgtttttgatcaatgcaaatcatattgatctttatc

SEQ ID NO: 59462 - DNA, 279 bp, Glycine max
  Clone ID: PAT_MRT3847_24705C.1
cttgggactcacgcttattttgctctctcattctacctagctaatcccgtgggttatcaacgggatacaaagatcatggcagaaagtctcatcaataaacattaagaagatcgagtagtaacatgacgtgattatacgtgcagaacagacaccgatctgcaaaatagcatgtactaaagaggcaccggtccgatcgcaatatccagcagatgctcagtctgccatgataatgggacatttactttaactctgtatttatagcgcagcctgagccattta

SEQ ID NO: 59463 - DNA, 1002 bp, Glycine max
  Clone ID: PAT_MRT3847_24706C.1
tctaacccttgttatcactattgttgttgttcatgttgttttccatctcttcccttataccctatgggaagacacgttttttatgatcctttgattcacccaaaagctggctacggttgtaaaagttggtaccttttttatggtagaaattttcatttcaacaaaccaataaaaagggtggtcactgtgtatataaaaatataattttatggatgtgttaccatgaatgaaaaatgtttcttcaactgaaacttgaaggaacatgaacattgatcatatggggtcctatttattgcagcgtgtgaatcactgttcgagaaaaaggaggatcgaactcgaacccgattgtggtcggtgcagaacagagaggagaggacaacacacacaatcacagggttgagttgagttgagccgtgagaaaagaaaaaataaatggccattgctatgaaggccacgcctatcacggcttcgggcttcgtttcaacaagaaattccacacttccaccctttaaatcatcatttctcagataccgctcaggagcattggaagttcctggcatgcgggtaacctactcagatagattgaaatgtaattgtcatggtggcggtgcccttggcactcaaatgaatctttttagcagatttgctagagttatcaagtcatatgctaatgccattataagctcctttgaagaccctgagaagatattagaacaagctgtgctggatatgaacaatgatttgatcaaggttcgccaagctacagcacaggttctagcatctcaaaagcagttagaaagcaagtacaaatccatagaaaaagcttctgatgattggtatcgaagggcgcaacttgctcttcagaaaggagacgaggaacttgcccgtgaggcacttaagagaagaaagtcttatgcggataatgcaactgctttggagatgcagcttgatcagcaaaagaatgttgctgatgatcttgtgtccaaaacacagcttttggag

SEQ ID NO: 59464 - DNA, 508 bp, Glycine max
  Clone ID: PAT_MRT3847_24707C.1
tttgaatcaaagaattgattaattgttagctaattagattacaaaaaaaaattaaattaaattagaagagcttgctagcaaattcatcggtggttgttccctctacccgagaataagccgattttcttgcaagatctctgagttgtgacaaacttcttcccaatttcaacgccaacttcatttcaaacaactccccattttccctttgttcttcatcttcctccatagtctcttggatcgaattctctagcagttggaagaatccaccacagtttctgtacatttcggacaccatccccacttgtccgccatgctcaaaagcattaacagtggtcgctaatgcccctcccaaaaccgccactatagctccccatgatgaatcttggctcaaacatgcagatcccacagccgcaacgccagtgaataaaggcccagcaatggccaaactcttgtttatcttcaacaccaagttccctagcctctcgtagtccttcatgtcattttcctt

SEQ ID NO: 59465 - DNA, 615 bp, Glycine max
  Clone ID: PAT_MRT3847_24708C.1
gtacgtacaatgaaattacatcatggaactaagttccattcgtactacatgatccttaaaattctttggtgtcatgcctttagttaaaggatcaacaatcatcaactcagtgttgacgtgttcaatgaccactttcttttctttaacacgttctcttatgactaagtacttgatgtcgatgtgcttacttcgatttccacttttattgtttttagccataaacaccgcagcaaagttgtcacaatacaactttaatggcctagaaatagagtccacaactctaaggctagacatgaaactcttcaaccatacaccatgcgaggtagcctcaaaacagggaacgaactcaacctccatagtggaagtagcaattaaggtttgcttggaacttctccaagatacaactccatcggctaacataaaaatataaccagatgttgatcttcgtgaatcaacgcaaccagcaaagtctgagtcggagtagccaatcacttccagacaattagtttgtttgtacatgagcatgtaatcctttgttccttgaagatatctcatcactttctttgcagttttccagtggtcaatacctggattactttgatatcttcccaagac

SEQ ID NO: 59466 - DNA, 537 bp, Glycine max
  Clone ID: PAT_MRT3847_24709C.1
gcattgagatctccatgatgagtgccaagatacccattggggacgagcagcgaagttcccttctagaagggctcccccaacatgcaaaattgtggaggtcaaaattggatctgtcctacatgcacgcagcctaaaagggaccaaggtacacacaccatacttagccctgctttgtgaacagttttaaatttttttttttgccccaatcgagggactacgatggcaattggaggatacccgccaatgaccaattgaccacctttatcgaacagttagagatttattttctcaaatggtacagagcctgccaggagaggacccgctacctgtgagtgggacctcttgatgagaaccaacactttacatcctccttatcagaagagttataatattgccaccccttgcatagatcagagaagctgcatataccctgtgcacgtggatctagaattctataacatatcattgaccataccctgcagtcctgaccccagctgtgcaagataaatgcacaaatgcctggttgtccaaacttac

SEQ ID NO: 59467 - DNA, 306 bp, Glycine max
  Clone ID: PAT_MRT3847_2470C.1
aaaaaggggaaaaaaaccgggtaaatattataaaaaaggcccccccccaatggttaaaccccccccaattttgggggggttaaaaaacccccccccaagagaaaaaccctaggtcttttaatttaaaaaacgggggcaccctttttgggaaaaaataaaaaaaaacaaagtttaggccccgggtaaaccgttaaccaagaaattagccctttttttggggggatgggaaccaaaaatagaccggtccccccccccaggaaatggtgagcaaaaaattgggggggtgaaaatcccaaaaccccctgg

SEQ ID NO: 59468 - DNA, 501 bp, Glycine max
  Clone ID: PAT_MRT3847_24710C.1
ttgcgtggtacatgtgtaggagtgccgcctgcttgggggggggggggggcacaaggaaagtgggctgacgatgtgactaggggatagtaggctacagaaaaccgataaagattccggagcccaggctagcaaaggtaagttgggggtggatatagagagacggaaggagtatggaaggagaaccacagtagcgttatgaccaaaaatataaactaaaaagcaagcagaaagagcagaagcatgaggaggcgtagatcggaacgggcggtagtgtttgttggagcctaggcctttgtatgaactgtttaagccgcggaagccttaagggtacagttgttaagccaggcttacctattatgcgtggcgataacgactgagtaaaccgtagtggtgctatagatgtagtactatatagtgctataaatctgggttggctaaccggccattgagaaaatattggtgcaacaagagttaacattggcgaacggccttaagaacgtg

SEQ ID NO: 59469 - DNA, 202 bp, Glycine max
  Clone ID: PAT_MRT3847_24711C.1
acgctcactcgtactcccacgcgttctcccactcgttccactggcagggtgataccaccagggggaccgtcacaacgcaagccttcaccactattttccggccatgatcctcgaaatacaagtttcagaccagctcttactgtaacataaccgagaaggtgctatcaggccaatgtcgtgccctccttctgcctctttcaaa

SEQ ID NO: 59470 - DNA, 877 bp, Glycine max
  unsure (1)..(877): unsure at all n locations
  Clone ID: PAT_MRT3847_24712C.1
gttcccgggtcgaccaccgcgtccgaaaanagcaccagctcgcgtctgcgtctctttttcccccaaaacaaaacgcacaatttacgttcccaagccactgcgtctcttcccctttcccccaaatacagtgccgtcggcgatgacgactccgggtgagtgcgccggagacgatgagcagacagcggacaacggtcagcgctggcctgggtccgccggcggtgacgggattcaccaagtgcgtaggcgagctgcatgttctcaatggggttatgtcaacgaacatgggctttggctgcgtttattccccctcattcaagtgagtataatcatgggcggcaattatctaatctttaatttcaaaactttaagatattatctaatctttaatttcaaaactttaagatttttttttaaaaaaaatttaaagatattatctaatttgtatgaatctttagaatttaaaaatattatctaatctcttaaatctttagatttaaggatgctacctttattttagagtttgatttcttctttttacgattaaaaattcttgagctgaaaaacttgtagcctgaagaagtcataaccgtgagaagaatcaagtgaaggaagtcgtctttcatagtgatagtgggaccataaaaccaacattatcgattagcatggatcaaagctcaagtttgaatgcatttgtcaatgacaataagatcccaaatcctgcaactgaaaagactcanaatggaaagcgcanatacaagaagaaagagtacaatttgccttcgccgtgcttcaaaacgtcttgctggaatcaaggttgatccagctatagaacttaannaacagcagatcaagcgaagtgctattaatcaatcatgtg

SEQ ID NO: 59471 - DNA, 474 bp, Glycine max
  Clone ID: PAT_MRT3847_24713C.1
acgaggttgttgcttttatggtcaatatttgacaggatcggttccttcggtagaaggaagagggtgttttgaggcttcatcgcgaaagtgcctaaacccttccttgtttccaaacgtacatgccctaaaaaagttatcaatgatcctaatacgtaattaatgaccaggtctatatatagaacatcaccaccctaattaagcctagaaaaggttctcaatatctgggaagttaatgaatgtaaaagaacagcaagtaatacctagctattaatttctgattctagggcacagtctgtgaggctgtgtttcattttcacttttatcaataatatttaatttcattttgattaatttttttgttagaagcaccgacagagatgaagagaaacgtaggttaactttggtgttcgtaagtggcatggggaaaaataggtggtagagagagagaaagacatatatagggcagtttcttct

SEQ ID NO: 59472 - DNA, 178 bp, Glycine max
  Clone ID: PAT_MRT3847_24714C.1
ggcatgctaacataaagattacgaggctaagagaaagaatcacaggaaggtgcagggtgtaacaggagctgctaacacattatcaatgggacacccaatgctgactttttctcacacacaagactacggtctggactacaatgatccgcttccttcgccattagttcacccgccggag

SEQ ID NO: 59473 - DNA, 167 bp, Glycine max
  Clone ID: PAT_MRT3847_24715C.1
caattttggttaagagtcttgaaaaagcaagagaaaaaaaaataccaaccatggcaaccatttctgattaacctaaaaggtcctactcctaaggaacctcaaatggagcaccctaaggaaccacgtttgagaacaacaacagcatttacaaaccaactttaagccaa

SEQ ID NO: 59474 - DNA, 541 bp, Glycine max
  Clone ID: PAT_MRT3847_24716C.1
ttaaactaagaatttagaacaactacaaggacaaatgaatagtttaactttaataatttcacctagcattggttcaagtgacaagaagctcggttttacttaaataaggtatggggtttgagtaatgagaatgaaaaaaaaatgcaccagaagggttttgctctcttaaatgagttcatccagcttaacttggattatactgaggatccaaataaaaaaaaatgtaatttcacctcaatagtgtttcaagattaatctacacctttatcattgggttactaggataaaattctaattttaattaaagatcaacactagaagcaatgaaactgcacctaaattttatcctatgatagtatgatatactatggtttgtttttgtcacaactcaactttcaaagcacttcaactaagaagcttgtgtcttgtgggattggatcaaacgttagtttaagcatttcaaacataaaaacaaacacactaataatcctttagatttataatcaacttcttcaaactatgtataatgattgttgccagt

SEQ ID NO: 59475 - DNA, 404 bp, Glycine max
  Clone ID: PAT_MRT3847_24717C.1
caccccaattttttttttttttttaaaaaaaaaaaaggggaaccggggggtaaaattaataccaattcgttcttaccaaccgggcttatttttttttttcaagggggttgggcccttcccccccctacttttaaccataaaacccaaggccccaaaggggtttttttttccccttggctaccttttccacaatggtggctaatcacccgtttaaccccgggaaagttaactttcccccccccgtggaaacccacggttttaaccatgtgggggctttcctggagggaccctttttttcggggggggttaacccccgggaaaacctccggggggaaaatagggccgtttttgccatgaccgcccaggtgaaaaccttgggggacctgggggtccccctcaaccca

SEQ ID NO: 59476 - DNA, 477 bp, Glycine max
  Clone ID: PAT_MRT3847_24718C.1
atgaaatactagataggcttataaattgggccttctgcacattgcacttctctatgcacacacaatagagcactagtatagctactaaatgagagtaagagtcaggaaaattggattacatttctagaatgcatatgtcaagctatgatttcttttatgtttatataataatatgcggtaaacttctatacatttctagttgcctgagccaaccctttgttagtttgatgggccttatgagagagaagtcaagatgttcttttagtgagtgaaagaatggtggacaccatcattttgaagtcaattggctttgttaagtaagcatccatgcccacctccaggcatttggcttcatcacatgacattgcatgtgctgtaagagcaacaatgggaatgtgcctgcttgttcccacttctgatttcctgattgcttttgttgcctcatagccatccatctttggcatctgacaatccatt

SEQ ID NO: 59477 - DNA, 936 bp, Glycine max
  Clone ID: PAT_MRT3847_24719C.1
cagaagtctgaagaaacttggaagaaagccaaacaagacgcacgcgattttcctagtgcgctgaaggtagcacatgaaaaatatttagctgctttgaaatctgtagtcaactgtttggaaggtcacaagattgactttgtaaaacttcttcctgagtggcaacttaagaataagattacgaacttggagaaagatattggtgatgccaataaaaaaattgaagagaagtcaatgctcaagagaaaagtggataaaaacaattcttctaacaagatgaagattccagaggctaaacgaacaaggttcactgggaaagatgcatctgtgctatcaccttccctcgctatcttgcaagagcaaaggattgttagtcacatggatggcaatagctcatatgatggttcattgtcggcacttttactggatggtagatcctatggcaattacccgaataattatcttgctgcagcatctgtttcagattctttggccgaaaaatatcttggaagtacagtggcaagtggggctaatatgcttggaggagctatgggtggttcattttctgggtatcagggggatatgtatagatatcatggaattggggaaggggcattgtctcatgataggtcagttggacagagttttgtgggacaatctgcatcaacattgaataatttgtatgggaaaacatccacagaaggttttgcaggtgtgccagagcacctctctgttggtgcttctagtcgcagtggaggttctgatttatatggctttgctgatgctgtttttgatatgtagtcattccagggaagcagttctcctaattattggtgtttgatcagctgggaagcatgtgttttgatcatcctcaacaattttttacctgcccatgggaatgcagaattgtatgatgttaaattttatttctcaacatac

SEQ ID NO: 59478 - DNA, 206 bp, Glycine max
  Clone ID: PAT_MRT3847_2471C.1
tattgatgtcatttccttgtgtatactgcttttgtggaatgtaacccttttcattggggctatcaaacactaacagtgtgtatcatctcaaatgccataaaatgccttcactgagtcccacagttgatgagccatcaaaagggttggcaacacacattcacttatataggaaaccaagtccatcatacgattatttgaccaccacc

SEQ ID NO: 59479 - DNA, 2368 bp, Glycine max
  Clone ID: PAT_MRT3847_24720C.1
ggctcgagatcacattcctgttgtcaccctaaaaacctgaatttctctctcttcggcacaggggctaggtttttcactttcttcctccattctcgttccgtctcaacccaaccatggaaacccccgaaaacgccgcatactgttcgtcgtggctgccgccggaagacgaaaacgacagtggcgccaaattggcaaaatcggtgaacaaactcaacgacctcgccgttgcgatacaagccttcaataacaggtacgaagaattgcagaaacacctcgaattcatcgaacaagccattgacacgaggaccaaggagctccgagcactaggctacaattctactcaaggaaccgccgaaaacggcgtcgttcaatcagattcaaatccgaagccagaagaagccaaggcggtagagaaagagaaagaaaaggtaaaagaagaagaaaaagaaaaagaagacgagcttattacgctttgcaaaacgatgaatagccgaggcctgcgtaaatacgtgttaacgcgtctatccgaaacggcgtcgcttcgggaacaggtacccgttgcgctgaggagcgcggcgaagccctcaaggctggtgtttgaatgcattgggaggtttttccttcaggggagcaaagcttacacgaagaactcgccgatggttcccgcaaggcaggtttcggtgctggttttggagcactacttgctctctggctgcgttgggaatgagaaggacgtggaggcttcattgaagagggaggcggattccgccgcggttgcgtggaggaagaggatgtttgttgaagggggtttgctgaaggcagctgaggttgatgccaggggtttgattctcttcgtcgccggcttcgggattcccagtgttttcaaggatgaggatatatacaacttggtttgtgtcagcaatggcagagaattctccgatgccctgctccagtctcagcccctgcttaagagggtttcagatgttgcagatgggatgatgaaaaagggcatggccgttaaagctgttgatttggcttatacctttgggtttgaagagaaatattcttctcagacagctctgacttcatttctgcagaagtctgaagaaacttggaagaaagccaaacaagacgcacgtgattttcctagtgcactgaaggtagcacatgaaaaatatttggctgctttgcaatctgtagttaaatgtttggaaggtcacaagattgaccctgtaaaatttctgcctgggtggcaacttaagaataagattactcaacttggagaaagatattaatgatgccaataaaaaaattgatgagaagtcaatgctcaagagttaaaagtttataaaaaggtaaatgaggtatatgttgttaaaaatttcatgacgagtttaagtgtcagattgagatgcatttaaataaggtattactctatcatttaaagaaagaaaataaatttttaagtcatgctttcaaatattaattttgagccatttaacaggatgaaaatttcagatgctaaaccatcaatgttcactgggaaagaggcatctgtgctatcaccttccctcgctatcttgcaagatcaaaggattgttagtcacctggatggcaatatctcatatgatggttcattgacagcacttttactggatggtatatcctatggcaattacccgaataattatcttgctgccgcatccattacacattcttaggccgaaaaatatctaggaagtacagcggcaagcggggctaatatgcttgtaggagctatgggaggttcatatcctgggtatcaaggggatatgataagagacaatgttgggacagtgctcaatagcaacagtcatctgtatagatatcatggtattggggaaggggcattatctcatgataggccagttgggcagagttttgtgggacaatctgcatcaacattgaataatttgtatgggaaaacatccacagaaggttttgctggtgtgccagagcatctctctattggtgcttctagtcgcagtggaggttctgatttgtatggctttgctgatgctgtttttgatgcatagtcataccagggcagcagttctccaaattactgtggttttgatcagctgggaagcatgtgttttgatcatcctcaacaaatttttacctgcccatggaaatacagaattgtatgatgttaaattttatttctcaacttgcatttaatgtttataggaatagccataggattgaatatcatccacatggcttgctagcatatttgcctcacacctccctaaaaatgttcacgcttgggcggcttgtatagttacttatttggataactcccgacaaatcactcagccaaaatcaa

SEQ ID NO: 59480 - DNA, 1138 bp, Glycine max
  Clone ID: PAT_MRT3847_24721C.1
aacccaggcttcttggggccggaattaacgcctcgacccacgcgtccgcaaacctcagtttctacctttgattacacgttgaaactttggtctaatttcgcgttcccgccgacccacttctctctctatctctatctctccctctctttctctagaaaaagaggaaaaaaaaaagaagaaaaaaagactttgaatgaaaacttacttgattgaggctcttttaaaaccaaaccaaactcataatctctcattatctttcattatggtcttcttcttctgaaggaagagaagaagttcagaacaaaaacacaacaaaaaagaagtaactctctttctttctttctttctttctttctctcgttgtgaagttgttctctttaatggcgaagtcaaagaacaatgctaagaagttgtcctacatatcagttccatctcagatcatcaactccatatcatcatcttctctgcaatctcttcttgactctcccaagaagtcttcaaggaacaccaacaacaacaggttctttatcttcttcaccaacagcaccagcaccatcatcttcagaaaacaaagactctggtttttcacactctttctctttggtttccttggcatgctcaagtttggcctcacccttcacacccctttccccccctacccatgtgccaccacaacccttctgccacagaacatgatctcaaccaccccacattcaaagtcaaaccttggtgctgttttgagagagaacaatgaccaaaaaaaagatgaggtcttgttgtctcatgtggagctgagagcacagggattggagaaggtggaaggtgatgagggtgttgagaagagtgagttttgggagaagccagatgggttgggatacaaaccttgcttgagttttagcagggattattgaacagcaagcgaaggggttctgaaggataggagaaagttccttatggttggtggtttctggaggtgtgaatcacgacaaggaatagacatgtgatgcactttgccttgctaggattctggagctgccttggtgggtctatatcgcagccggacgtcatttttggggatgaaagagagcttggggatatatgtgagacggagcacatgtagagagctcttgccaatgat

SEQ ID NO: 59481 - DNA, 718 bp, Glycine max
  unsure (1)..(718): unsure at all n locations
  Clone ID: PAT_MRT3847_24722C.1
gtccaggatataacaattttcttgcaaggatctataaaccctgagaaacaatggcaaatcaaattagtggaagtaattttgtgaaacacttcaagggtcagaaaggactgaggaagactggtattacataaaatggcatgaagcaaatttcaatacttcatggttgaaaaatgaagcaaacttcaatttttaacaactcagacaaagggaaggaacatattgcattttcattctattctgtttttctaaccatattttccattatttcatttcctccctaaaactagacattaaaactattcctcaacttaactgatttctggccataatactgtgtagtatgcaactctaagaactaccaaactctctcttcagtacacaagggaattgaaatcccacatgcattttgaattcaaagttccactgtaatgacccaagtgtttagcaatctacttttatgttaagagggcaacttttgagatacatcaatgcaaacctttgagttcattctctactgctgaacctggacaactcagaacagtgccagcctttgtttcagggagatgcctggcagcaattaagggtttttatgctctctttgaagttgagcctctaactcggcaattctttgcaggatgcatngtcaatgncaagcacgcgcttacattcttcctctagtgaactagaaaattggtatctcagctctgccatttcctga

SEQ ID NO: 59482 - DNA, 341 bp, Glycine max
  Clone ID: PAT_MRT3847_24723C.1
cccccaaaattcccattaaccccccgaagaaccttaaattgggggaagggtttcttttttccacccccgtaaaccataaaagcctttaaaagaattgtgggtccccctgctaaagggtttaaaaaaaaaagggtttccccaaaaacccttttttggaaaaaaaaacttttcaattttttttccccccttttgaaatgggaaaaatttcattttggaggccccccaattttcattcacccacccttttttccaattccctccccgcccccctttggaaaaaatttaacccccgggggttttaaagtggttttggaaaatttccaattcccgaacccgggggt

SEQ ID NO: 59483 - DNA, 1138 bp, Glycine max
  Clone ID: PAT_MRT3847_24724C.1
ccacgcgtccgcggacgcgtggggtttttccttctctctctttccctcatttatttcactcatcccactttcatgtcctctctatatatgcacattcggaaccccacacttattcctactacttccaattccaaattacctctacttcatcttgttctttctcatcactcttctttgttccttgattgttgctatttttttctttctcatttgccaaagccatgaacaagtttaagaaatctcaagttctagttctcttagttctagttcttcttcttctcatcacaccctttttaccttcctctttgagaccaacctacttgtatttcattataaacttcctcatcatggcactttttgctgaagctggcctcatttcagatttttctaggcctttagaagataaaaagcaatctacttctgttaccaattccacttctgagaaaagagaagtttccaattccacccctacagttgttggagatgatgtctcagaacatgttgaaaagtctgcatctgagagggttgtttgtgtcaccaaagtggacaaggtgcaaaattctccttcaatgcctacccttttattcatagggggtggagaagctgatgaacaggtcatggatgaagagcttgaagcagaagaggagcttggaggagtaaatgggcaagagctctttacaaaagctgaggccttcattgggaacttctacaagcaactgaagatgcaaagtgaggaatcttggatttatcaaaaagccctttaggaagggtgcattagcttttacaatagaataatgtgatttctctagtgttctagattagaaactatggttcttatgagaaaccataatattattctctgatggttttttccccttccattgggtttgtacatattttaacttctgaattctgaggtcaagtatgtttcctgattagtatcatcatcagataaagttacagttaagagggttttagtgtggtgatgttagatttcttcatacaaataagaaaaaaggaggatgttctgaatgatgatatacaaaatcatacatatgtttgtgtctgtctcatcatctatatttgagcctcttaggttgtttcattattgaaaatatgcaagagtagcatttttttt

SEQ ID NO: 59484 - DNA, 496 bp, Glycine max
  Clone ID: PAT_MRT3847_24725C.1
gttcaggagaaatgcatcatccttgctctctttgtaatccattatcttcttaattaatttcatcttttatcagataataataataatcaaaataataacaaaaaatatctaaattgtagccagatgacaacagatagttggccacaacattttacacaatacttaacatacagtgatttacaactttatttataaagagtgtaattactaattacaagatactaaaaatatttaaacaaaatccaggaagaagagattatggcatatatacggaagaagccaaatctgtcattcacagctcttgatcatttctaaacagctagacaagtccatccataatcaatttgtatttgacagaaaatgcaccataacaggtttccatgcataatcgtgtgatctcatgatttgtatcacatggaaacacttgagatcattaaagcaaaaactgtgaggaaactgatacatacaaatatgttataaagataatttcaggaaa

SEQ ID NO: 59485 - DNA, 567 bp, Glycine max
  unsure (1)..(567): unsure at all n locations
  Clone ID: PAT_MRT3847_24726C.1
ggctcgagcttctctgttccacaaccttaactttctgcattctgagaaaggtgatgaatcttctacttctaccatttcccatcttctgaactttcaaaatcgccatttcttcttctttccgtgtttagttgcacttgttccgctagtgggtatgagtttgtttatttgcggatagggtcaaattcctttttgtgttatattgtttttaagaagatcctagtgttcacttatcatttggtatcagagcataagaaagtgatataatcaggtgtaactcttaattcacattaatcttctttctcttgcttgcttcatccccttagtcatatgatctccaattccatgtaaaggatcatcagacaggttgcttgcacctctatcacttgtgcttagtacaactagcaatggaggatccgcatccctgtatgncgagccatctctttttctttttcttttgggtatgatttcacttattggttatcacctttttgggtttcggctctgtcttctgccttagtttttaacaaccgagacggttaaagcggggtttttttttagttctttttg

SEQ ID NO: 59486 - DNA, 1192 bp, Glycine max
  Clone ID: PAT_MRT3847_24727C.1
tataatttacattttttatgttttattttaatttttattttatttttatcttttttatttctattatgttaatcatacacacccttgatcattattattgaaactttttttttcttcacccattattagattgatatttttattttgttgatcaaatgatcataatattgatataaaacatttctgtgaaattgatgattaattttcatgaaaatcgtgagcacataaaatataaatattcttctcacaagaagattcattttatgtctaagagtcaatcagatgccagtcctgatttcttgatcaaaagatataagtgattaccacttctgtcaactattgttttattagaccgttttcaaactaatgcatatgagctggttttgagattaaataagacctaaactaaattttttaagacttttcaatggctgaaatccaaactaagtaacaaccaagaaaaaacaaatgaagcagctgtaggaaagaaaggtgtgggaggccctatatcgtcatgattaaaatccacagtgaagtcaaagaaactagctttaacatcaacaagtctctgaagtttgctgctactagagggcttcttcccatgtgatcttcttgtcttcatcttgtttttctgaaatatgcgatacacagcaaaatctgccactggcatctgacatgggtaggaagctacaaggcgcaattcgtgcatgacccactgagttcttgtctcatgggaccctttgcaaaaaaacagtgtttccttcatcccaattacttgattgctctctgaatggatgatttgtttttctttgcctacagatttccagcacccagaaccagcaggtctcttgatgtttccatttgatctattgctaaaaaagtacctattttccctcaattcacctggaagtttccatggctcagtctgaaacacgtcaaactctgaaatgactgaagcgggtaattgttgagcaaacgccttcttcttgaggtagtgaaggagaagctcttcatcggtgggacaaaacctgaacccaattggcaacttgatgcctcctttgacaacatggttttcgaacctccccatctccccaaaagtgatttttgtaatcagagaagcaaacccatgtatgtcaacagggagattcaaagctaagtattattactggcttgtggagtggccttggttgtg

SEQ ID NO: 59487 - DNA, 283 bp, Glycine max
  Clone ID: PAT_MRT3847_24728C.1
tccttcacgtgtcaaaaaacaaaaaaaaggattgtgcataaaagaaaaacttcaaattacgttgtctctacagaaagacacttatccacacagatgacatagttagacacttctcaccatggaaggaggagtatcctacgcgcgcatgccttgggtcaaaatacgtaaactgaaggacgactacgccaaattagagctacttgactactataccagcattttcaacgcgcttgtgatcgtaactatagatgtgctcacaacaccatatacttaccttataaca

SEQ ID NO: 59488 - DNA, 173 bp, Glycine max
  Clone ID: PAT_MRT3847_24729C.1
ccccactttactacactattaatcactacaacaagccattatatcataactttttcattacattcttctctcctcatacactaatcttactgtccataacactatcttactttcataatcttaaacaccccacatattaaaacttaatttttaattatccacaaaatccttcc

SEQ ID NO: 59489 - DNA, 578 bp, Glycine max
  Clone ID: PAT_MRT3847_2472C.1
cccacgcgtccgcccacgcgtccgcggacgcgtgggtggcccacgcgtccgcccacgcgtgggacgcgaggagacgacagaagggggcgcatgcatatgaaataaactgcaaccgtgacaaaagttgcgtagcaatagcatactcttactctgattcgttagtgaagaaaaatggcaacaatcatcgccggcaccccaactacatcaatcactcgcacaggtcatgtgctcaaacgacctgttggggcctcatcctctaccgttcttggattgccagcaatggccaaggcggggagagtgaggtgctccatggaggaaaagccttcaagcagctcaaacctagggatgggggcatccttgttagcagctgcagctgccgcaaccatgtcaagcccagcagccatggctttggttgatgagagactcagcactgaaggaactgggcttccctttgggcttagcaacaaccttcttggttggatcctgtttggtgtctttggtctcatatgggctctcttctttgtctacacttccacccttgaagaggatgaagagtctggattgtccctctaaacccc

SEQ ID NO: 59490 - DNA, 307 bp, Glycine max
  Clone ID: PAT_MRT3847_24730C.1
accagaaaagatcattgggttgtctagctgataaggagtatggggttcaacattcatggactaaattgatgataggttggaaatggtgctcggttcagatttgcaatttcccacttagttgtgtataactcagatgataggttgtgttatgttacgattgtgggccccgatctgctaacttaccatgaaggtttggtttctctatcatgttaatgttaaaatctcatttctattgtttacttttcatgacttgtgaataacttttttttataattactattggcagtttgttgtcaaaaaaaaaaaa

SEQ ID NO: 59491 - DNA, 295 bp, Glycine max
  Clone ID: PAT_MRT3847_24731C.1
tccggaaacttcttgttctgtatcttttttcactgtttgcttccttttaggtatggagatgaacacaggcttgcaaggttttcagcaaatttgcaagcaatcatttccttttgttgagaacgggccttggcaataaagacttgcaaccatgtttgtcaatggataaaagatgtagaaaatgaaatatttttgctaggagctagcccctttttatggtaatttccttgcaaatgctgtcaacacgtacggtaaattttgtttaataaaattcctttacaatttattcttttttagc

SEQ ID NO: 59492 - DNA, 151 bp, Glycine max
  unsure (1)..(151): unsure at all n locations
  Clone ID: PAT_MRT3847_24732C.1
cactttcattgcattgcattgaacgcaanacnaacacnnacacatggcttcctcgttgttcttctttctaacgttgcttctcctctccgntatctccgccgtcacccccngcncgccgncagaacgggcagcantattggncttcaaagng

SEQ ID NO: 59493 - DNA, 195 bp, Glycine max
  unsure (1)..(195): unsure at all n locations
  Clone ID: PAT_MRT3847_24733C.1
caaaacgccatttccnaaggagcaacctctttccttntcactgantataaggacgtgggaanctncatggtggcnttngccattttgatattcctcngccttgagctctntgganggattcagcacaagctatcagcngngcacctatgancaantaaaaatggnnngcnnagttctgncnaggntgtgaanagg

SEQ ID NO: 59494 - DNA, 292 bp, Glycine max
  Clone ID: PAT_MRT3847_24734C.1
ctacaacactcatcaagccagacaaccaacaccactaccgcaatcatcatgtctgactacgagccaactgagcactaccgtctccgcatggacggccagccagaccagcttgtctgcaccggacagtttgcagcgagcaaggtggattccgcggaagctagctagttaggcggcaacacctattgaagtggcttcatctatgccaggctgagcagcgtgagtctctacaatccaactgggtatgatacgatacacaagggctgtcttgcctatggtcgtgtccaacgataat

SEQ ID NO: 59495 - DNA, 400 bp, Glycine max
  Clone ID: PAT_MRT3847_24735C.1
ccttctttttaaccctttttttcaagtttcatctcttttcctcaggggattcttctaactggctctccgtttacttcacttcatgacggattcttctcctcttatccctccctcaccggtcacagtcaccgtgatcgacctcgaagtgggaccctcctatcaaattcaatgccggattcgtcttgtaactgatggttgaatttttcattgttccttgtaagtgcaaaggtacgctatagtacttacattgagagtgttttgtatctttgactccctctgatgctggggatttcttcctcttttatattttttttttttgttctccatctcatcctgttttatcaaagtttttttttcatatattcactttttttctttattttttcatatttttttcttt

SEQ ID NO: 59496 - DNA, 234 bp, Glycine max
  Clone ID: PAT_MRT3847_24736C.1
agttgtttttttttttttttttttttttttttttttttttttttttttttttttttttggggcctaataccccaaaaagggaagtaattcccccccaaaactaacatatttccaacaaaaattatgcctgggaaaacacgacggaatgggaaacccaaaccccagacttattctcttaagaccttatgaaacaagggctttggagacacaacttaatgggcattggggcccgcc

SEQ ID NO: 59497 - DNA, 381 bp, Glycine max
  Clone ID: PAT_MRT3847_24737C.1
ggctcgagactaaccatagcacatcgaactcgccatgtcccacaggaagttcgaagctccccgccacgggtctctggcattcttgccgcgaaagcgcgctgcccgtcaccggggtaaggtgaagagcttccctaaggatgaccccaagaagcccgtccacctgacggccgccatgggctacaaggccggtatgaccacaatcgtccgcgaccttgaccgtcctggtgcgaagttgcacaagaaggagattgtcgaggcctgcacagtcatcgagactcctcctatgatcgctgtcggtcttgtcggctacatcgagaccccccgcggtctacgatcgctcaccaccgtctgggccgagcacttgagcgacgaggtcaagcg

SEQ ID NO: 59498 - DNA, 368 bp, Glycine max
  Clone ID: PAT_MRT3847_24738C.1
acggcgacgggtttcgcccaatgcctacctagacaactgggaacttctctcagtactctgatgaggatccgtgtgagcagtcttagcacaagagatgatcatcaacgtgaaggaatcaacggtggagcggccgatggaggaggtggcgcggtagatggggtggaactacaacgtggacctggtggtcccaatggttcacacgcccagtgtatacttatataggaccgacggcacctgcgactttttcgacgggagggttatgaaggaggcgctgatcaaggtgatggtgccgatctacccaatggctgtgcggcttcggcgagacaaatacggtagagtggagattgactgctacagtgagggggtgc

SEQ ID NO: 59499 - DNA, 166 bp, Glycine max
  Clone ID: PAT_MRT3847_24739C.1
ttcaatacaaatctacacccttgaccctggggactggatatatatacaatctggaaccccactgtcaatcgttaccataaatgagaatgataagctcttccgtgctatgctccatatacctgtctcagtccctactcctggaaaatttgaggaatttttcgggcct

SEQ ID NO: 59500 - DNA, 1402 bp, Glycine max
  Clone ID: PAT_MRT3847_2473C.1
accgcgcggtgcggaattcccgggtcgacccacgcgtccggccggacccttcttgagcgccgtgggtgccgtccccgcgtcgacccacgcgtccgcgcaaacatgtccaccgcaacaactcacgtgctcgcttatcccttccctacctccggtcacgtgatccctctcttagacttcaccaaaaccctagtctctcgcggcgtccatgtcaccgttctggtcacaccctacaacgaagccttacttccaaaaaactattcccctcttctccaaacgcttctcctccccgaacctcagttcccgaacccgaagcaaaacaggctcgtatccatggtaaccttcatgcggcaccaccactacccgatcattatggactgggcccaggcccagcccattcctcctgcggctattatatcagatttcttcctcggttggacccacctcctcgcacgtgacctccacgtgccgcgcgtagtcttctccccctccggcgccttcgcgctctccgtctcctactccctctggcgcgacgccccccaaaacgacaacccggaagacccaaacggcgttgtttcgttcccaaatctcccaaattccccattctacccctggtggcagatcacgcacttattccatgacaccgagagaggaggtcccgaatggaagtttcacagagagaacatgcttctcaacattgattcctgggggcgccgttatctacacattcaccgagtcagcgcggtgggggctttcgtgagtcactgcgggtggaactcggtggtggaagggttgatttcgggggtggcgatgctgacgtggccgatgggtgcggatcagtatacgaacgcgaagcttctggtggatgagttgggcgtggcggttcgccccgcggagggtgagaaggtaattccagaagctagcgagttggggaagagaattgaagaagctttggggagaacgaaggagagggtaaaagcggaaatgttgagggatgatgcgttgcttgcgattgggaatggtggcagctcgcagagggaattggatgcgctcgtgaagcttttaagtgaagttcagcgtgtggaaagcacttcttgaaaacgtgtttcttttttgttggggttagggtaatttgggaaccattgggatttttagtgtgattggttttgagcggcgtgtttggatgcatgctgcactaactgagctcactcacgtttggtaactagtaggttctttcagtgagaggtaaaagtattattgcttccgttctgattgtactactactaaatactaatttatcgttctggtcttgaccgacgaaaatgcgggttgttgacttgtttaaacggtttgacacttttggaagaagttcaacgtgaaaactactaataagtaattatgattt

SEQ ID NO: 59501 - DNA, 1377 bp, Glycine max
  Clone ID: PAT_MRT3847_24740C.1
agaggaagaaaaaagaacaacatccaagaaaaccagcagagcacctcccaagatccgatcagatccattcaaccctctctcttcactttctctctctaccttcaatatcccattttttctcacttcccccaaacccatttccgctctcgccggttagggtttcttcaattccttctccaaatgcgctagatcgacacccagaagttcaagtgcatgaagctttggtgctttccatggctatgcttcactgaagaagaagaagaagagcgcaacgttccaaaacctatgaaggaagacgacattttcggaaacgacgtcgtttccgacgacgacgacgacggaaacaatacccgcggcggcgacgacgagcaattcgcgacggcgcgcaccgatgcattgggctcgtggcccggcgagagcagctccaccgccgccgccgcatgttcggaaacccccgccgccggcggcgagagccgcgattcgagccacaagcgcgccaagttctacgcggatttcgaggagcatgatttgaattggggaagtagttgtgggcaaagtgacaatttccctgctgtaaacaccccatctagggcaagttctaatgagaatatccctgaatcaagtgagcaatccactcgcttactgcaaaacctcaactgtgttggatgtccaaatattaggaaggttgtcattccattgagggcaaattgttttcatttgttatttttaaacctttcactctcggcaaatttgaaagaggttgatgttacttgtctcaacctatgctttcttaatttaagcaattgttcctctttggaaattttgaagctagagtgtccaaaattgaccagtctgttccttcagtcttgcaatattgacgaggaagctgttgaagctgccatatcaaaatgctctatactggagacccttgacgttcgcttttgtccaaagataagctcaatgagcatgggaagattacgcccaatttgttcaagtttgaagcgaatattcagcagttagtcaactcttgttaccatgatcaaggatataaaaaaaaaaatccctagtgcttcacttggattgaaagcgcgcttggtaataaatttgattatttcttcgtggtgttgtaaatggctaaattttaaatgtttgtttggcatatggaaatccgttctgtatttgcaataatttatctttgttgtacccgtattcttgtaaaatcaacatttcaaatttaagctctctttattttgaagcagtttaatgtatccatgttgaagaataaaggtagctttgattcttgtcttattttttttcagttttttgtttaaaaattgttccctaaaataattttacacaataatcaatttctcctcc

SEQ ID NO: 59502 - DNA, 787 bp, Glycine max
  Clone ID: PAT_MRT3847_24741C.1
ccttctacttccccttctcagaatacccaaaaaaaaaaaaaaatgaaacacgaaacagacaacattaacaacaacaacggaacccacgacgggtccgaagattccgtcctccgcccctgtctatccctcctcaagtgccgcagcttcgccgcgtgccacgtgtccgctaacaaaatctcaagatccgacccgaacgtctccctccacgtggaccaaatcctcgcggtggcggacgtcctcgcggcggcggagcgccgccgcgtcccctcccacccgcacgactggtactccatcctccgcctcctccccggcgacggcgacaaccgcgacctgacacgtcagcacttcaaaaccctcgtgcggctcctcgaccctaacaagaacaagctccccttcgccgatgaggctctcatgcgcgtgcgagaagcgtggttcgttctctcagacccaacgcgcaaggcgcgcttcgataaagagatcaacgacgccgccaaaacaaaaacgacatcgttttggacaatgtgcccttactgttggtacctacacgagtacgaacggaaatacgaggactgcacgttgaggtgttcgaattgcaagagaacttttcacggcgcggcggtgacgtcgccgcggccggaggctgtggcggcgggcaacgaggagtattactgctaccacgtgagcttgccggtgaggtatccggtcggcggcgaacggtgtcgttttggggatggggcgaggaagaggatgagggttaaaacggtggctaatagaatgaaaaagaaag

SEQ ID NO: 59503 - DNA, 1521 bp, Glycine max
  Clone ID: PAT_MRT3847_24742C.1
gttattgctaatgctgccatgagagccaaagtacaagattctatggggcagaaagaagccattcaagatcaggttaagcttataggtggtgatttggatggagtcaaaaaggagaggcaagcaatccggtccaaaatcaagcaacttgaagatacagtaaaagccttagacaaggatattcagtctttacaggatgaactaggagctgttactgaaaagagggaaaaagcttatgagagcattcagcagcaaagaaaacaacgcgatcaggggaactcctacttctaccaaagtcgtacaattttgaacaaagcacgggagcttgctgcaaagaaagatattaatgcgattgaggaactggcacaaactgaggttgagaaagctatgtcactctggaacagtgacaaatcctttagggatgactatgagaaaagacttttgccatcactggacatgcgacaattatgtagggatggacggatgaggaacccagatgaaaagccactgctggaagaaccgaaacctgccgaaactgatacattgccgaaaagcagtgtaaaacagccaaaggaggaggagcctaaatcatctgcatcaaaaactgtgcctgagcagaagattcagaaagaaaccaaaaagaaaggaaaagatttgaaatccaatctgaacaaggttttagaagacactgatgaatatgaatttgaattgccaaaggtgaataaggagcctccgattgatccagaaaagctgaaggagatgaaaagagaagaggaaatcgcgaaagcgaagcaggctttggaaaggaagaaaaaacaagcggagaaagctgcagccaaagcagctaccagagcacaaaaggaagctgagaagaagctcaaggtacgtgagaagaaagcgaagaaggtggctggtggcactggagctgttccaagtcctgaggaaccagcaaatgaagctgtggaggttgctgaacagaagaccgatgatagcatggaagcctcagctccggcgaaggagaaggtcccaaaggagagcagtgttaagttcaggaatcgagccaaagcactgaaaggccccgacactatcccaaaagctattatgaagaggaaaaggtctaactacgacgactggatatggattgcatcttgtgtttttcttgtcctgtctgcgttggtgtttgcatacattattctttcttgaaaaagcttggatcttgaaggagctgtgaaccaattttctgtgggtggcttggctaggttctgcagagtaagtaattgtcttctatatcagtcctattggggcattttctctctctttcctttttgtcttttggtagctaatcatcagggaaatggcgcggtgatatacttgaaaactttgtgctgagatattctatatgttttagttttgataatatagacaaaatttttatgtaaatgattatgaaacgtggtgaaaattggggttggtggatggttagttggaataagttcaacaagcatttggatgctttcccttcgt

SEQ ID NO: 59504 - DNA, 1824 bp, Glycine max
  unsure (1)..(1824): unsure at all n locations
  Clone ID: PAT_MRT3847_24743C.1
cccacgcgtccctgaaccagcaccatgccctcgtcgtcctctctccgtcgccgtcttcaccagctatcgccgtcgatcaccccaccgcaacggagcatggctgttggagaccacaccacgccgcttctggattccttcaaaaggggggtttgggagtgacgaaccagaaggagaaagagttgttgttgggggataggggtggtggggacgaggagggtttgggtctgaatttggttccttccaaatcaattctctcaacaacaacccaattccattccaaaaccgttattgttcccacaaacgagcgaaaccctatcccatacggtcgcagaagaagagaccctccgccttccaatgcatcacggtggccccgatctcatcgtcgacgatgggggtgacaccactagatcacgcggtgttcctcgatccagctcccttcgacaatgtgaagaacagactcgtcggggccgacaatgcttgtcttgatttatgtcaaaagggttgtcctgtagttggagctatggcagttgaggttgtgggatttgagatggttcaagggccagtggagaatggtgctaaagaagacaaatctatttcagaaaaaactgaaaatgggaaattggaacaagacacaggagttgctgagccaacaaaatttgggtcacatggagatgaatctgctaaaccagaagcaaatgttgtttcagatgccaatgtccccaaagatgcagttgacgattggcctgcgccaaggcagatacattctttttattttgttaggttccggccttatgatgatcccaacattaaagcaaaacttgagaagtatgataaagagattagccaggaaaatcaagcacgaattcaggtcactgatgctttaagggcaaaaaggacagaacgagcagggtgtatttctcagattaagtctctaaaaggtgacaataggcaatttcagagcattgttgatgaaaaaattaaagagattgaacctctgcagcaggcactgggcaagctgcgtactgcaaataatgctggtcggggtgttggattatgctcatctgaggaggagcttaacaatcttattaatagcttgcactaccgcatacaacatgaaagcattccgtttgctgaagaaaaacaaatccttcgagaaattaaacagctagaggggacaagggagaaggttattgctaatgctgccatgagagccaaagtacaagattctatggggcagaaagaagccattcaagatcaggttaagcttataggtggtgatttggatggagtcaaaaaggagaggcaagcaatccggtccaaaatcaagcaacttgaagatacagtaaaagccttagacaaggatattcagtctttacaggatgaactaggagctgttactgaaaagagggaaaaagcttatgagagcattcagcagcaaagaaaacaacgcgatcagggggtgtgttttcctttcttgtgacacacatgcacgcattttatttttataaatcctattcttaacatgtgatcctaagctatatactcttcttctgatccaaatttatgttgatctatttaaagctcctcttcagtcttcttttctgctgcttcagaagggaatcattggcatgctattgagtgttttattcattttgtttttcaaatttgctgtcttttatagttntctgattttccaatgctgaataaattctgaacttgaattgatattaatttgttcagaactcctacttctaccaaagtcgtacaattttgaacaaagcacgggagcttgctgcaaagaagatttaatgcgattgaggaact

SEQ ID NO: 59505 - DNA, 765 bp, Glycine max
  Clone ID: PAT_MRT3847_24744C.1
tacggctgcgagaagacgacagaagggacctgaaagaagctaagatctattttccatcaagagtgcgttgaaatttgtttcacagacacaaattgccttgccccggaaggctatttaacatcaactattatgaacttctacattcaatatttgcagcaacaagcattgttgacaaatagatcgttatctgcctaccattttttcaatacatatttctacaagaagcttaaagaagctgtggctcgagagcaaagtgattgagagatctttgcaaagttcagaagatggtggaaaggtgtaaatatttttcagaaggcttatgttttgattccaatacacgaggagtaagttttcttgttagcattgaactattgtttgtaaatgataattcttgtaaatggtgagaagttcttttttgtgctttcctttgaattaggtcattatctgaagaaactactattcacttgacaaaagggactgttgtgaagaatcatttatcaatgtttagatatttgagctaaaatgttacctccttatttcatgtgaactaaatgagcacacttgattataagtagtgggactattattcaagaaaggacaattattgttggaggtatacacaatcggttgtagacagaaggttcaccttatgatattgtatgctttttgggagggaaattttggtgacatagaggaataagatgtacattgtagtttctaggtcaagtgccaagtagagttttgagctatggttcatggagtttg

SEQ ID NO: 59506 - DNA, 476 bp, Glycine max
  Clone ID: PAT_MRT3847_24745C.1
ggtgtgctgtaccatgaaatggtgcacgtttggcagtggctcgagccgattcggctcgagggtggattaattgaaggtattgcggactatgttaggctgaaggcaaactatgcacctagtcactgggtgaaagcagggcaaggacagaaatgggaccagggttatgatgttactgcacgctttttggactattgtgatagtctcaaaagtgggtttgtggcacaacttaacaagttgatgagaactggttatagtgatcaatacttcgttcagttactgggaaaaccggttgatcagctctggcgagactacaaggccaagtatggcaatattgcctaataacctaagagctttttcatttaaagaataagcgagtatatcgcaatgtttttcaataagattgtatcagctctaagattctgctattacaagttttggtgttttatttaaaataaaaatattctgagtttttaacc

SEQ ID NO: 59507 - DNA, 129 bp, Glycine max
  Clone ID: PAT_MRT3847_24746C.1
tgctcgagccgattcggctagagctcgctccgcaacttcgctcaccaatcctccatctcgcggattcaattgcactctcaacagctcccagaagctagttacccagcgctctatcctcgatgacaattt

SEQ ID NO: 59508 - DNA, 399 bp, Glycine max
  unsure (1)..(399): unsure at all n locations
  Clone ID: PAT_MRT3847_24747C.1
gcaaatatgaatttgggccaattgacattgtttgccatccttgcggcactttttgtgggtgcgccggtgcaaagcggcgtattgccacctcagccgcagtcgcctcaaccaccggagccgccgcagccaaaggcaccggcaccaccaagctacgaaccaccggagcccccaagttacggagccccgacgtcaccaccgacgtcttcaccaccaccttcaccgcctgccccttcaccggcgtcttcagcgtatgagccaccagagccgccaagctacggagccccggcggcgtcttcacctcctacggcgactactcctacggctccaccaccgncgtctacaccaccgnctccagcgtatgagccaccagaaccgccaagctatgagccacctgagccc

SEQ ID NO: 59509 - DNA, 210 bp, Glycine max
  Clone ID: PAT_MRT3847_24748C.1
ccacgcgtccggttcttgcaattcttgcgtttacggtggccagtttggggtaagcctgagccgaaaacggggcttaaaggcctttcttagtcccacccaaagccctaatttccccaatccatcatccccatggaccttcttttttttccttttccaaaccaaagccaaaacccaaggggtaaacctttttgcttttaaaagcgccattaa

SEQ ID NO: 59510 - DNA, 141 bp, Glycine max
  Clone ID: PAT_MRT3847_24749C.1
acccccgacgagacgacacaggggggcgggcaaatgaaaagagaaccccggaaaccacccgcaagaggagcagagacgggaacaccacagccggaggaaaaaaagcgcccaaaagggaccgccaacagaacggggaggacc

SEQ ID NO: 59511 - DNA, 248 bp, Glycine max
  Clone ID: PAT_MRT3847_2474C.1
cgacccacgcgtacgccccgcgtttttcctctcgtacgaccaatccataaatggtattatggggggttcgtatgtgaactcctagaccgggatttcagacaaatatttgttagatgtccttatggcttaaaaaatacgacttctatggactagaatacacactggactgctgatacagttttttttcaactcggttgaaatcattttcattatcattactatggcaatgggattatgactttgagacc

SEQ ID NO: 59512 - DNA, 926 bp, Glycine max
  Clone ID: PAT_MRT3847_24750C.1
gaactcggctcgaggctgtgagatgacgacagacggggggaaatccaacatcaggcctcatctaaatctagagcccccaaaaacgaaactacattgcactttcagatattttgttcgttactctctctctctctgcgacaccccaatttccaaaaacacaaacaagtggcctcattctgaactctgaaactcaaccttctttcttctcttctctctcgtgtttaactgttcagggcatcctagtttctctcagttagccaaaatggtagctgcaaatgagagggtcgtcgctgtgatcatggttggaggacccactaaaggtactagattccgaccattgtcattcaacgtacccaagccactttttccattagcaggacaacccatggttcatcatccaatttctgcttgtaaaaggattcctaatttggctcagatttatctgcttggtttctacgaggaacgcgaatttgccttatatgtatcttctatctcaaatgagcttaaagtccctgttagatacttgaaggaagacaggccacatggttcagctggtggtctttatcattttagagatctgatcatggaagaggatccgtcacatatcttcttgctgaactgtgatgtatgctgcagttttccactgccagaaatgctggatgctcataaaagatatggtgggatgggaacaatactagttgtcaaggtttctgcagagtcagcaagtgagttcggggaattagtagctgatccaaccactaatgaactattgcattacacagagaaacccgaaacttttgtaagtgatcgtataaactgtggtgtgtacgtatttacacctgatatctttacagccatttgagggtgtttctactcagcggaaagaagagctaacctaagacgtgtctcaagctttgaagcaatgc

SEQ ID NO: 59513 - DNA, 614 bp, Glycine max
  Clone ID: PAT_MRT3847_24751C.1
taatttatgaagttcgtgtgaaatttatgagttatatgcgacgtttgacattgcccaatcccctaattcgcctacttcagcgtaaccagctcctcagcactaacagggtgaatcgccacgcagcgatcgaaatccttcttggtagcgcccatcctgatcgccacgccaaagccctgcagcatctccgccgaaccaacacccataatgtgcaggccaacaaccttctcctccttgcccgcgcacacgagcttgtacgccgtcggctgcttgtcctcaggctccatcatggcaaagtacatagccgtgaagttcgtctggtagatcttgatgttgtcgtcgccgtacgcttcgcgggcctcaggctccgtcatgccgatgctgccgacttccgggtgcgcgaagacgacgctggggatgttctcgtactcgaggtgcgcgtcggcgttgccgccgaagaggcgctcggagagcttgcggccggcggcgatggcgacgggtgtgagctcgaagcccttgtcgcagacgtcgccgagggcgtagatctgcgggacgttggtgttctggtactcctcgagccgattcggctcgagctcgagccgaattccgagcgtacg

SEQ ID NO: 59514 - DNA, 1496 bp, Glycine max
  Clone ID: PAT_MRT3847_24752C.1
gatgaaccttgggtggtcctgctaattaggaatcctttgacaagcagaaattggatgatgaaccatgggttgtcctgctaatggaaaaagtggcttgggtacgttgaatgacaatggtcggaatctagtacctttagtgggtcctccaacttctgcttgtaaaaggattcctaatttggctcagatttatctgcttggtttctacgaggaacgcgaatttgccttatatgtatcttctatctcaaatgagcttaaagtccctgttagatacttgaaggaagacaggccacatggttcagctggtggtctttatcattttagagatctgatcatggaagaggatccgtcacatatcttcttgctgaactgtgatgtatgctgcagttttccactgccagaaatgctggatgctcataaaagatatggtgggatgggaacaatactagttgtgaaggtttctgcagagtcagcgagcgagttcggggaattagtagctgatccaaccactaatgaactattgcattacacagagaaacctgaaacttttgtaagtgatcgaataaactgcggggtgtacatatttacacccaatatctttacagccattgagggtgtttctactcaacggaaagacagagctaatctaagacgtgtctccagctttgaagcaatgcagccagacacaaggagtcttccagtcaattatgtcagattggatcaagatatcctctcacctcttgcgggggcaatagttcagtacatttatatcagcaatgacttttgggaacaaacggggatgataaatctcgctcgctgactctgcagaaaccttcacaactagtattgttcccatcccaccatatcttctgtgagcacccagcatatctggcagtgaaaactgcagcatacatcacagttcagcaagaaaatatgtgacggatcctcttccatgatcagatctctaaaatgataaagaccacctgccgaaccatgtggcctatcttccttcaagtatctaacagggactttaagctcatttgagatagaagatacatataaggcaaattcacgttcctcgtagaaaccaagcagataaatctgagccaaattaggaatccttttacaagcagaaattggatgatgaaccatgggttgtcctgctaatggaaaaagtggcttgggtatgttgaacgacaatggccggaatctagtacctttagtgggtcctccaaccatgatcacagcgacgaccctctcatttgcagctaccattttggctaacagagagaaattaacagttaagacgcgagagaagagaagaaagaaggttgagtttcagagttcagaatgaggtcacttgagtttattggaatttttggaatttgggtttgtcgcagagagacacagagagggagatagtgacgaacaaaatacgtgaaactgcaatcgtagtttcgtcttctcgcagccgtactcgagccgattcggctcgagcc

SEQ ID NO: 59515 - DNA, 222 bp, Glycine max
  Clone ID: PAT_MRT3847_24753C.1
ggctcgagaatccatattcctgatttttatcgtcatgttttcatcttcaatttaatacatacattgcgccttataaaagatgtcgtatcaacaaataatgattatcataataacaatttactacattattcttcaagacaagcactacctgatctactaaatgtttacactgaaacacctcaatataatatgcctgatttatcttttaacttgattcatcgt

SEQ ID NO: 59516 - DNA, 438 bp, Glycine max
  Clone ID: PAT_MRT3847_24754C.1
aggggccacccaacccacggattgggggtgtaaaaaaattctgggggcccaaggctcattagctataaaaagctgacgtactcaatcctgaaaaagggactccagcaaaaatggccccagtacacgcccccccaatgggccccccgcgttcttgggtgaattctgggcgtggttaaaaaattcggtaaaaaaatcctgaaaaatggcttaccccttttcaacttccttgctccaagacataaaaactcccgggggggccccactggaaggagattgaaggcctgaaatcatttctcttcttaaaaaaaaaccgtgcgtgggggccacgccaaattttgacttggccactattctgagaaaacccagataagccgccccccccagaaaaggccgtctacccccgttccgttccctcccaagggctcttaccaaccctgc

SEQ ID NO: 59517 - DNA, 1468 bp, Glycine max
  Clone ID: PAT_MRT3847_24755C.1
agggaatctttcttcttatgggaatctcgtgggggattcatttggcaaattcggaaaagctctggtgcaaatatgcgttataatcaacaacattggaatgctgattatttacatgattattattggtgatgtgatttctggaacatcttcttctagtgaatttcatcattctggtgtacttgaaggatggtttggagttcactggtggacaggtcgtacatttgttcttctttttacaacatttgctgtgtttgcacctttgtcatgcttcaagcgaattgattcgttgagatacacttctgcattatcatttggcttagcagttgcttttcttgttattgctgtgggaatctcaattttcaagatttcaattggaggcattgggatgcccagactcttcccaatcattactgacgtagcctcagtttttgaactgttcactgtaactcctgtggttgtgacagcctatttatgccacttcaatgttcacagcatagataatgaactggaggactcctcgcagataaatgggattgtgcgtacttcccttgctctatgtgcttcagtgtacttgctaacaagcttctttgggttcctcctatttggtgaaggaactcttgatgatgtgcttgccaattttgacattgatcttggaattccttttggttctgtgctcaacgatgctgttcgttttagctatgccgcacatcttgtgcttgtatttccagttgtcttctatgcagtgcggatcaaccttgatggtctcatatttccatcatctaggcctttggttctagataacttcagatttgcatcaattactatggtccttattgttgcttcctttttgggagcaaatttcatacccagcatttgggatatattccagttcaccggagcaacagctgctgcatgtttatcattcatatttccatctgccatcaccctaagggatcgatacaacattgcaactaaaaaagacaagattctatcagtgtttatgatagtcctcgcagtcttggcgaatgttgtggctgtatacagtgatgcctttgccctgatcaagaatagtataactaaacgtgagtgatttcttgaaattttctatacaagtccacagttcagatatgttcgtactttcagatgctagagtggcagggttattggccaactagaaaatcgatgtttcttgagaggatctgatgggttgattgtaaaataaagaaagaagcaacccagtccctgtgtacagttgttcttcaaaattgtgtaaaggcttgcaacatgttcggtctcccgtgtaatgtgctctttgctattatagttctagagttgtttttctttcttcccaatcctatttaaaagagattgactcatgtattttaaagcgtttgttaataccttgtgttataaatttccctagaaatagaacattttcggcacttaatggcattgcaatagtctgagt

SEQ ID NO: 59518 - DNA, 510 bp, Glycine max
  Clone ID: PAT_MRT3847_24756C.1
tgccaggtgccgtgcactatggcgccctgtgggcaccatgtgaatggcgcgcttaggtatcttaactcgcgcatgaggagctttaaccagaggtactgcctaacaaccaggtcgccgcactcgctggcacggccgctcggtgcgcgggcgcaacagccaggcggccgcctgctccagccgcggggcggatgaacggggtgggggcggcaacttgagaccggaggacccaaaaagaccgcgggatggccgacgtagaggaaggcgtaggcctaaagatgcttgaacatatgcgcaaccgtgccggcggacaaagggcctagcgagggcagggggggccagttgggagggtgtcggggagggtgccggcgctacttatgggcccaaggcgaggccataatgggtgcggcttagtgaagtgacggcaactgactggagtcgcgtaaaaaaaataagaaagaaaaaaagaaaccctcgttcttcatgacgcactgtcgtcatttcccaaggaag

SEQ ID NO: 59519 - DNA, 304 bp, Glycine max
  Clone ID: PAT_MRT3847_24757C.1
gactacgttacagatgctatctccgacgcttggtaaagtcacctgctcaggctgttctcggggccgcggtacactggctatggtgcccgtactacggaggtgaaatgcgcaagttggaggcttgctgtggaagcacacaacaatctttggctttgagaccattctctgaagagcgcgttgcagcaacaaaggaatacatgcatggcgaacaatttagatcagactccagaacagcttaccaacacgcttacttttatgcccgagaccttgaagtacattccaaggacacatttgtgttcagtat

SEQ ID NO: 59520 - DNA, 1424 bp, Glycine max
  Clone ID: PAT_MRT3847_24758C.1
gccggctgcgagaagacgacagaagggggtggaaaaaattgattaaagttcatactctgaatatctctctctgtatgctccctgactctagcccttttacgactttttggtgcccataaattggagttgctccctcgcttctccatcacttatggtctttgaaacaaagctagcatagcatttttcttttacaaagcaagacacccttttccttttcattccatcatctctttagctttgtccaaagaccatgtctgtggtggctgataattctgcaaacaatggaagccaccaagtggttttaaatgtaaacggtgatgcccccaagaagtgtgatgactcagccaaccaagactgtgtacctcttctgcagaagttggtagcagaggtggtggggacgtacttcttgatatttgcagggtgtgcttcggtggtggtgaaccttgacaaggacaaagtggtaacacaacctgggatttcaattgtttggggtctcactgttatggttttggtttactcagttggtcacatctctggtgctcatttcaaccctgctgtcaccattgctcatgctaccaccaaaaggtttccactgaagcaggtaccagcttatgtgatagctcaggtcgttggagccacacttgctagtggaactcttagacttatattcaatggcaagaatgaccattttgcaggaacactcccttccggttctgatttgcagtcttttgtggtcgaattcataatcactttttatctcatgtttgtcatttctggtgttgccaccgataacagagcgattggtgagctggcagggcttgcagttgggtctacggtgctgctaaatgtgatgtttgccgggccaatcacaggagcatcaatgaatccagcaagaagtttagggcctgctattgtgcaccatgaatacagaggaatatggatatatttggtgtcaccaactcttggagctgtggctggtacatgggcctataatttcatcaggtacacaaacaagccagtgcgtgaaatcaccaagagtgcctctttcctcaaaggtagtgaagctgagtgatacaacagcaaatgcatgaatgttccttttgcttcttcatttcttatcttcaagttcaccatgtattagggttaaaatgtataaggaagaatcactggtttagtgtatcgaataaccatgtaatgtttttttggtaatgcataaccatgtaatatagctagaggaagtgaaaaatacaatttctccttatccatgcaaaaaaaaaaaaaaaatataaaaagcagaaaaaaaaaacaaaaaacaaaaaactaaacaaactaatagtggtcggacggtttaaatgatctaggtctagccaacgcgtgctttcaaaagaataccttttctttggggccccctaagataatttaat

SEQ ID NO: 59521 - DNA, 637 bp, Glycine max
  Clone ID: PAT_MRT3847_24759C.1
acccgcccatgtgatagctcaggtcgttggagccacacttggctatggaactctccagacttatattcaatggcaagagtgaccactttaccaggaacactcccctgcggttctgacttgcaatcttttgtggtcgaattcataatcactttttatctcatgttcgtcatttctggcgttgccaccgataacagagcgattggagagttggcagggcttgcagttgggtctacggtactgctgaatgtgatgtttgccgggccactcacaggggcatcaatgaatccagcaagaagcttagggcctgctattgtgcacaatgagtacaaaggaatatggatatatttggtgtcaccaactcttggagctgtggctggtacttgggcctataatttcatcaggtacacaaataagccagtgcgtgaaatcaccaagagtgcctctttcctcaaaggtggtgaagctgagtgattcaacagcaaatgcaagaatgttgttttttcttcttcattttcttatcttcaagttcaccatgcattagggttaaaatttaagaaagaattactggtttagtgtgccgaataaccctgtaatatagatagaggaaatgaaaaatacagtttctcctaaaaaatgc

SEQ ID NO: 59522 - DNA, 416 bp, Glycine max
  Clone ID: PAT_MRT3847_2475C.1
aaattaacccttaattttcatttcatacgaaaaggacccttaggcaacaacaatggccggggaaaaaaaactcaattaaatatagcaatactttttaaaaggggcggggagcaacataaactttgggcatggccgatacataaaagacagtctaaaatcaaaactttagcataatctggtatcatcacatttttttaaccaaaaaccaaaaacctaaatatgcttatggggttttcaaatcaaggggcaaccacaatgcgtccagccacttgatcaaaatcccgccggccactggaagggattttcctgccacccttggggcccagttcaatgatgctcatgttctgcaactggtgaaaaatgggacgagcaacagccccactgtttttgcaaaaatgaggagggcggttaccatt

SEQ ID NO: 59523 - DNA, 398 bp, Glycine max
  Clone ID: PAT_MRT3847_24760C.1
aaggggaaaaaaaacatttttaaaacagggttgttctcccaacatgggaacccaacgggactaaccctacccaaacttttggggttaaaccaacaaattgggagggaaaatatgaattgggcccccttttacaatttttttacaacaaaaaggtttgaaatctaaacccccatttgggtttttgtataattgggggcttggctcccttgaaaaacaaaaagccccattttttgacaagggggtcccttttggccccccacttgtgaaacctttttggtggtggggcccaatttcgaggtttcgtacccgggggtgggaaggaataattttttttttggggcccccaaatttaattccctgggccggggtttaaaaccgggggggtgggaaaaccctgg

SEQ ID NO: 59524 - DNA, 442 bp, Glycine max
  Clone ID: PAT_MRT3847_24761C.1
ttcgtccgctcacgcgtccgcccacgcgtccgcccacgcgtccgctcaatcatttttttctggggaaatcattataccattttattacttctatttttattttattttatctttattaaaattagttatataactagtgctgcacttgcccaaatatggttctgcatatggctttcctagatactttatgtgattgtttaaagagaatattaggaaacagttcagagatattgctgttggagctcaatgtatcttctatgagcgatccatgtttggggtttaaacaaattttacgctggctgtcgagggcttaacgtaactgttctcccttatttgggtttgagactagctatgagattgtaggtggagtgaagatggattgtgtgtccacaaaagaaaggacaagatacaaaatgatagtatcaaggagatattggcatga

SEQ ID NO: 59525 - DNA, 145 bp, Glycine max
  Clone ID: PAT_MRT3847_24762C.1
ggctcgaggtcggtgtagtcttctgctgcggccggtattactgtgcactcgacggttgctaggcgcctggtcactcactattacactcgacgggcgcactgccttgctttacgcactgcatgcataacggctgctctaagccggg

SEQ ID NO: 59526 - DNA, 391 bp, Glycine max
  Clone ID: PAT_MRT3847_24763C.1
gcacaatctattttgatagcacaacgagaggcacttcgtgcgaactacttccaagccctaagggtatgaccgataatctccttcgtctgagcataagggggatgctcgcggagcatggtcgcggagcaccagagctggaaggcactaccgggaatgacatgctgaggcgatcgcacagggactgaacgggtgctgaatagatcttgctgcccacagacggggggggaaagtgaaacgcgccctcttcattatcctgcttggcagggagacaacgagcatcttgcgttcgatggtgtataaggatagatcaataatgaccaactataccatgccggtaacgacttgactagatctacgcaggacaagcaacgtacattcagacgctagacag

SEQ ID NO: 59527 - DNA, 749 bp, Glycine max
  unsure (1)..(749): unsure at all n locations
  Clone ID: PAT_MRT3847_24764C.1
attgggntcgagtggagtagtgagttgaggcatggaaggagaacacgacgactcacagaagctttcgttgttttacgaatccggtatatactacttcgatgattcaaacgccgttttcgtcgaccccgttcgcgttctcaatcgttcctaccaccgtttcaccgtttctccttctacctactattcccgtttcttcaaatccccaacaacccccaactccgtctcctccaccgttagttcctctctcagaaaacggaaacggaaacccaaagagcctccacctctgaacgaaagagaactaattgctctacagcgtcaccaggaagcgaggcctttgttgttggcggcacacgagtgtttgctgaaatcaactgaactgttgaatgttttgaaaactttaaagagtgaatcgcgttgctcgaagaaggagtgtgagggtggtcaacaacactctttcgttgacctgggacgggggtcgcctcaacttgaggtaacactaagtttacgtgttagtgacgctgacactcacctgccccccaacgagttggaagattcgcttagtgtgcaatgctgtgaacagaaggtgctccctgcattcattaatttggttgcttatgacaccaaggatgatgcggggggctgaaatttctgggacaattgttttatagtggccctgggagagtgcttttaactgcctcacgctgattctggttttcaacctggaagggggggggttcccccttggggaa

SEQ ID NO: 59528 - DNA, 1780 bp, Glycine max
  Clone ID: PAT_MRT3847_24765C.1
atactcaatcttcagcagtctttagtgaaagcaaatcttgctggttacattaaactagttgtcccctgcaatgcagatgcgtatgagtcatcacttccttcacaaggtgcattccggcctgaactgacccaaatcatgactcagctggttcagttcctcaactcaaacggtaccccgtttattgttaacatctacccattccttagcctctatgacaacaatgatttcccgcaagactacgcattctttgagggaactactcatcctgtcacagatggtaacaatgtctacaccaatgcatttgatggaaactatgacactttagttgcagccctgagtaaacttggatatgatcagatgcctatagttattggggaaattggttggccctcagatggagccattggtgcaaatatcactgcagcaaaggttttcaatcaaggtctcataagtcatgttttaagtaacaaagggacccctttgaggccagatgctcctcctatggacatctatctcttcagtcttcttgatgaaggagcaaagagcatactaccaggagggtttgaaagacactgggggatattctcttttgatggacaagctaagtatcctctaaaccttggccttggaaacaaggaattgaagaatgcaaagaatgttcagtatcttccatctagatggtgtgtggcaagcccctctactgatgctcaaaatgtagcaaaccatatgagaattgcatgcagtgttgcggattgcaccacacttgattatgggggttcatgtaatggaattggagagaagggtaacatctcatatgcttttaacagttactatcagttgcaaatgcaagactcacgaagctgcaactttgatgggcttggtgtgatcactttccgagacccttcagttggtgactgccgttttcttgtgggtgtcacagataaaggctccgattcctctgcttctcagatcagatgtcagtggtggattctactagcatttctagttatacagacgatctcttctttctcattgtgattcagaggtttcataagtgggtttttcatgatcacctattcgataacttagaagtagcagtcaagtagaatagcttaaaaaaaagaatatttgatatttatgggctaataatatatagaaaatattcgactgcattcttggtctgtaacccagcgtaggatctagtcattgtatcataacacaaaaggtgatccgaacaccaaaaatatacaatattacacatgatttatctatgagactagcatgtagtgttgcagactgcactacccttaactatgggggctcatgtaatgaaattggtgagaagggtaatatatcatatgcttttaatagttactatcagctacaaatgcaagattcacggagctgcaattttgatgggcttggtatggttactttcctagacccttcagttggcgattgtcattttcttgtaggcgttacagataaaggctcagattcatttacgtctcaaacaacatatcagtggtggactctagtgttacttctgattttacatgggacttttttgctttcaatgtgacgtaagtttcataagtgggtttttcatggtcccctcttcttagactgttagaactagattagctgatatacctatttaacgtaagaaatattccaaagattcatggcttgtagcactgcatatgattaagtcattgtatcatatcagagacggtataaacactatcactgtgcattgaatattacacatatttatttt

SEQ ID NO: 59529 - DNA, 394 bp, Glycine max
  Clone ID: PAT_MRT3847_24766C.1
cagggtagtgaaactcatttgtaagtactggtaattgttgattgccgaacttcattttgtgttttatattttggtaggagactttggagggcttcatcttgttgaatacctgcaaaacgagaaaaaatatcaacaacaacattattaactccttttatatgttcaaaatttatctttattccgttatcataaacatattcttggaataaaagccatcttttctgagattttttatcggtatttatttgttggctactattacttcgcaatcagttcttatggtgatttcacttttattaatcagaaagagtttaaatccttctagagcgtttatcacaacattgacttcataatctgtagaagttgagtatacctatggtttcgtgtgatattt

SEQ ID NO: 59530 - DNA, 523 bp, Glycine max
  Clone ID: PAT_MRT3847_24767C.1
cccacgcgtccgcccacgcgtccgcccacgcgtccgacggctgcgagaagacgacagaagggagtgtagaatcggatctgaagctctttactaggattggaacaagcgaggaacgagtgaccacaagctccgcttaagcgctcgacatttagcttaaaacatgttcatcatgtggccgagcgaagcgcacctgcgtgaagcagcctagcatcactttagataggagcagaatggatgacttacaactgaaagttcttcggatcgatatatcgtacgacgtaatggagatcttggtctaggtccggtggttcgcagaattcgggacctaacgatgttcgattcgtcacatgaacgggagcggacgattccctcgtctctccctttttcggggaatggctgcaatcacaagcaagtgattgaatgagtgggggctccgaaagcacatgcgggataagcaggtctttcaggagacggtctagaaagaaaagagaactctcaacaagcttgaactaatcaagatcaa

SEQ ID NO: 59531 - DNA, 698 bp, Glycine max
  Clone ID: PAT_MRT3847_24768C.1
taataataaaaagaaatgccatggctaaaggattcaattttgacatttaagctttactttttaatttgagagcacgcagtagataaagttcttttcatccaaatcactgacccttgtcagtatactgaagtctgtattattccttttcattatatttccttgataagatattgattgtgtgggttcgtgttaacttgtgtatccccattatgcttgtaaattacgaggagctgagagaggtggttgatcttattttcttgttagttaaattgcgaatgtgtgttattcttgaaggctttgaatgttctatcatctctcaatcttgtaagaaaactgtgttccaattgacagttattttatgcttccgatgggttaaggtcaagctcatattgctaaactcacacgacagataagcttgatagatggacagcatcagcagtttaaatcttcttctgaccagtaggtgtacaattaggatctgacgtttattttctaattactgagagagcagaagaatgggatggttatatgcttctgatcagctagttgtttcttcagctgtattgtaacttatttcattttttttttgggcggtgttgtaatctaagagcactgtaccttttgccaataaacataagcagccaaatgtgtatgatttaatcataaaatattgaaagatgtccttttttatttaagat

SEQ ID NO: 59532 - DNA, 367 bp, Glycine max
  Clone ID: PAT_MRT3847_24769C.1
aaacccccaaaggttatctcaactttttgattgcgtttttccctcaagggaacaaaattttgtttcctcaatgaaaagccttgggggttgctaacttgtttcctttttgcgcaattgcttaacctcttatgtgaataaaacactttttggctattaatattcaccaaaaatggccgagaggaaccttaaatttgcttccgaaattgcatgaacaggttgcgcattttctcttttttttgactaaaactgatgacagtatggggtcgcgaggaaaaaaactcggaagccccaacaccactgattaaaacattaagtttcgcctggggatccacaggggcttcctcaaccaaaaccaatggttgctctg

SEQ ID NO: 59533 - DNA, 1279 bp, Glycine max
  Clone ID: PAT_MRT3847_2476C.1
caagggtggaacgcattcaattgaatttgggatagtcttaagaagaaatggttgtgttatggtaatcccaatatctcatctctgtttctcaacactctctctctatttggattcaaatcccatctttgttgcctcgatcactccgctttgaggagttatagcaactattcaatggcccttttctttgttgctgtgtaaatggaagcagctgttattgcacgattttttcaagtatatcagatatttgctggggattaagtgaaaaagactcaatggtaaacccaaaagtgtctactcaaccaaaaatatgctacaggcctattcaaccttctgacctggacattttagagcatatccattgcagattatttcccatcaggtacgaatccacttttttccatgatgtggtaaatggacgtgacattgtgtcatggggagctgttgacagcagtcggtcggatggtcaaagtgatgaactcattggatttgtaacagcacgaattgttcttgcaaaagaaagtgagatagtggatatgcttggatatgactcggctaaatctgaccaaactctagtctatgttctgacgctgggagtagtggaagcatatagaagtcttggaatagcttcttctctgattcgggaggtcataaaatatgcttcaagtattccaacatgccgagctgtctacttgcatgtaatctcttacaataaccctgcaatcaatttgtacaagaaaatgtctttcaagtgtgtgagaaggttgcagggattttatttaatcaatgggcaacattatgattcgttcttattcttgtactatgtaaatgggggacagtctccttgctcaccattagagtttctcactgcaatagtaagctacatgaagagtggctttaactcagtggcagcaaggctgtgcaagaacggaggcaggaagatctcaaggcgggcaaagtgtaaagaaagtcattctcttgtgtcagcaacacccaacaaaagaaacgtggcagtcgagtgtcctggttatgagtgtgtttaactttgttttttatttatatattttttaaaagcttttctgtttcctgtatcattcaacctcactattgattccctctagaaaagtcatattaaagccaaacattgtatttacttgctatgatgtcataataaactttctcgatctggtgaattcccacatactgttagaagttgataacaataatctctcagtttatgcgatcaatggaacttttgattctgtcgatcattgctacaaaa

SEQ ID NO: 59534 - DNA, 894 bp, Glycine max
  Clone ID: PAT_MRT3847_24770C.1
tgtcgtccgttacggctgcgagaagacgacagaagggggcgttttgatattgtaaatcacgtccagcacaacagtccgagaagtgaatggctgacatagtgaagcagctgttggcaaagccgatccagctggcggaccaagtggccaaggcagcggaggaggccagttcctccttcaagcaagagtgcttagagctcaaatccaaggccgacaagctcgcggcgctgctgcggctggcggcgcgtgcgagctccgacctctacgagcgccccacgcgccgcatcatcgccgacaccgagctcgtcctcgacaaggccctctccctaaccctaaaatgccgcgccaacggcctcatgaagcgcgtctttagcatcatccccaccgccgccttccgcaagatgtcctcccagctcgagaactccatcggcgacgtctcctggctccttcgcgtctccactccggctgaggaccgcgccgacaccgagtacctcggtctccccccaatcgccgccaacgagcccatcctcggcctcatctgggagcaggtcgccgtcctccacaccggctccctcgacgaccgctccgatgccgccgcctccctcgtgtcgctcgcacgtgacaacgaccgctacgggaaatcgatcatcgcggctcgagccttactgacgctactcaagctcatcaaaaaagtagagaaagagaaccccgcaaacgctatgagagttcttggccgtgaccctgagagcgtggaactcatgatccacgctggtgtttgctctgtcttcgccaaagtcctcaaagaaggtcccatgaaagtgcaagccgtggtggcttgggccgtgtcggaattagctgcgaaataccctacatgccaagatcttttcgtcagcataa

SEQ ID NO: 59535 - DNA, 610 bp, Glycine max
  unsure (1)..(610): unsure at all n locations
  Clone ID: PAT_MRT3847_24771C.1
gattgttgactattttaatgtcncagtgttanagcaaattacggctgcgagaagacgacagaaggggggagcattctttcagtcttcttcttctcctcatatattcaaaggtggagccgttgaagacacttgtggggagggagctagcaatagcaatggcaactcgaaggatgcagcgttcaaaggtggagcggttgaagatgctgttgcagcattctttgagtctctttttcttctcatccagttttaatttcgcccatcccgttccctcattcactcccgcccattagtctctctctctcaaccaagttgcaggttttgtggctgaaaaaccagcgcggtgagggactcatgggaagattgatgttttggcgagtatgatttcgttgacgagtttgtggcttcacgggaacaagtttgaagggagtgtgccagatagtattggggatttggtttctctaaaggatttggatctcaacgggaatgagtttgttgggttgattccgagtnnntttgtagatcaaggggcaacgcatgttcaaagtgatttggatatattctgttttagttactgttgtgacataatcatgtgtgtnnnacaattttnnnt

SEQ ID NO: 59536 - DNA, 179 bp, Glycine max
  unsure (1)..(179): unsure at all n locations
  Clone ID: PAT_MRT3847_24772C.1
gcatngntagtgacctncgattggttgccantntgatgatngagaggtgcaagggagtgtncaagggcataaattcattngttgatgtnggnangaggaacgaggactatggcctaaagctattaccaantccattnccgcaactnnaagtgcattgnatgnagatctccnagntgtgc

SEQ ID NO: 59537 - DNA, 475 bp, Glycine max
  Clone ID: PAT_MRT3847_24773C.1
gagaaggcaaagggtgagatgacacatttctactcagctgatagcgtcacctcttaaacgctaagaattacattgtacaatctctgcaaattatattgggcaacacaatttcaatctgagagttatccttaatacaagagaatgtgaaatctgaaactaaaagccaatgaatgtgtaaaaaataggctcttcttgaagagaccctcataaatcagaaatgaagcctgaatgtgtaaaaaataggctcttcttgaagagaccctcataaatcagaaatgaagcctgaattacattcatcccaaagatgaatgttaaaaaatatgataaataattatactactcttcatcagctcaagcagttttctctgcctttccaatttctgtattaccatttctgaagtttagtatgccaatcaatcctcgtcccctcgccatctgttccagttcttgaattctatgcttaagaagttctact

SEQ ID NO: 59538 - DNA, 920 bp, Glycine max
  Clone ID: PAT_MRT3847_24774C.1
tcctgggttgtgtgcacttgatcttatgaacttggacaaattgacagatttatccttaggatatcttacaaatagttgtcaagcacttcgtacattgaagctctgccgcaatctattcagtgatgaagcaattgctgcattcttggagattactggagagtccttgaaagaactttcacttaacaatattaagaaggttggccaccacacaaccatatcacttgcgaggcatgcaaaaaatttgcataccctagatctatcttggtgccggaatttgacagacaacgagttgggtttcattgtagatagctgcttctcactgaggttgcttaaactttttggatgctcactggtgacagatgtttttctgaacgggcactcaaacccagagattcagatccttggattgaagatgtcccctttattgcaaaatgtcaaagtgcctgaaccctatcaaggtcccttgcgttattcaccagtttcagtagatttggtataaataagattaataatgaaacatatggatggcaatggcattacttatgtagtaaaagcagacataactttctgctaacatgatgctaactgaagaggtaaggaaaccgctgtgttgcccgttttaccttttgttttagtgatgccattgttgttgcaaagcattcaaagccaaacacagactattttcttttattagagtattcatattcattatgtacagtggatatgtatagcatatgcaaattcgtaagctgattgaggcatataataaagtttcttcctgaaagaaggaagaaaacttcaactcagtctgtctacagtgaattgttctatggaatagagattaaaaagaaaaattcatatttctgtgcaagttcaaaattgtgcggtcatttggaaatttcctctcattatttaacttg

SEQ ID NO: 59539 - DNA, 173 bp, Glycine max
  Clone ID: PAT_MRT3847_24775C.1
ggatcactattcgaggctcttgttctatgtggcgcgaaattacgaggagaactacacccacaccacttccatccatgctacctaacttgatagtagataccgtcccatacataacactagctcctctatcacccattcatttcctaagcctacaatatgaccattcatatata

SEQ ID NO: 59540 - DNA, 500 bp, Glycine max
  Clone ID: PAT_MRT3847_24776C.1
gactttatataaagaaattagatgattttgtaggtaaagattgaaaaggttacatatttttgtaggtgacagatgtttttctgaatgggcactcaaacccagagattcagatccttggattgaagatgtctcctttattgcaaaatgtcaaagtgcccgaaccctgtcaaggtcctctgcgttattcaccagtttcagtagatttggtataaattagcattaataatatgaaacatatggcattacttatggtcatttctagttaaagcagacataactttctgctaacatgctgctaactctagaggcaaggaaacccctgtgttgcctgttttaccttctgttttagtgatgccattatgtacagactattttcttttattagagtattcatattcattatgtacagtggatatgtatagaaaatgcaatttcgtaagatgattgaggcagataataaagtttcttcctgaaagatggaagaaaacttcagcccggtc

SEQ ID NO: 59541 - DNA, 234 bp, Glycine max
  Clone ID: PAT_MRT3847_24777C.1
ccatacttatcggattcttcctcactctcttattcattttttccgctaaacccaaccctaggcattttgtgaattaagccacgtacacaggctaataatatgaataagactagccttattcttaaccaccactaaccaccgtcgattcacctgaagtctctgctgtcaccaccagctcaccctccgacacctcaaccgaacccccgtacgacgcccgtacggagcctctagccc

SEQ ID NO: 59542 - DNA, 1061 bp, Glycine max
  Clone ID: PAT_MRT3847_24778C.1
ccacgcgtccgcaaattgcactctttccccacctctccattctctcatctcattccaacaaaaaaccaaaccccaaaacagcagagcaaccaacaaagtcataatagtattacccacccgccgcagactgaaaaaacaaaaccagatacaatcgcagaataataatgccagaacactcttcatagttgttcatacagtacatagttattctcacaccaaaaccacgtcaacaaattcaaaaactgtgtcaccttccttggtgtgttaatgttaatgcatcaccaccacaagccagagcttcacatcggaaaagagaacccccacctctcttccgatgacgccgccacttcaactccacaaacccatttctcaattcaggtttcaccttcctcgccccatccacctccaccaaactcaccaaacacgccgttccaccatgaacgcttctccaacaagagaataatacccatcatgactttccctctgttccaaacaccctttggcgcaaagtttccaacttccaagcttctcccgcgtttccgcttcctcctcttcctaccccttccttccctctacctcctcttctcaaaccctagccccttagatttcttctcagttatcgctttctcagcagcatcgagcgtttccctcaatttggcactgtctttcttcactcgattgttccccaccaaattctcatcatcatcatcatcctcttctcctcagcctgttgtatggtctattgggtcgaaccctaagcaagtaaagaacacaaattgggggtgttgggtccaagtttacagcaatggggatgtttatgagggtgaatttcaaaaagggaagtgttgggggagtggggtttatcactatcacatgcatgggaggtatgagggaggatgggttgatggaaagtatgatgggtatggtgttgagacatgggctagagggagcaggtatagagggcaatatagagaaggtttgaggcatggaatggggatatataagttttactgtggggatgtgtatggtggtgagtggtctaatggacagtgtcacgggtt

SEQ ID NO: 59543 - DNA, 239 bp, Glycine max
  Clone ID: PAT_MRT3847_24779C.1
atcaacgtactatacggtttttcatcatgttctcagctcaatgggacagggggatctacggggacctcacgaacatactcagacactcaacaggtatcgagacgatacatgtcctctatggatcatcatatgaccttatagatagcattggtaatgtacttgttctattcaatactatagtgaatcgttacaaactctacacagaccatgatatcaaatcgctgataaacctagattca

SEQ ID NO: 59544 - DNA, 377 bp, Glycine max
  unsure (1)..(377): unsure at all n locations
  Clone ID: PAT_MRT3847_2477C.1
cccacgcgtccggcaagatttgcattaatggcgtcctcagagccaatacctccaggggcagagcccgaaagccacctttcttctctcatctacgagatatcaaatgaagtccaagggatcatggagaacatgtttaagactgtcactgaaattaatcaaagttctgctgtggtagaggaggagatagagaaatgcaaaggttctgctctcgagaggaaaagagccttagatgaagagaaggattactttcaaaaagctgcttatgctgttcttgacatgctcagcanagaagtaaacgctctangttaccgggaagagcttgaagattaaaaaaacctcattcctgtaagaaaacttaatctttcaaatgacttcta

SEQ ID NO: 59545 - DNA, 283 bp, Glycine max
  Clone ID: PAT_MRT3847_24780C.1
attccgaatcgacccacgcctccatccggtcgtaagagaacacctcagggggaatactgagtgacaacggtaagttaattcatcagtgaccacggtagcgtagctgatcgatctgcattagatctctccggtatctgaagcgacagacttcaatcggagatctgcatgcatggcccgagtcaccagattcccattctccaacacatccttcaggatccgttcggtctgaccattcgtctgatcggatcaggagtcgtcgatttcggcggtaggctaattttca

SEQ ID NO: 59546 - DNA, 362 bp, Glycine max
  Clone ID: PAT_MRT3847_24781C.1
acaagagctgcgcccgtgcatgcacccctgcattagcttcgagctcgagccgaggctgcttggagtgcaagctgagtaaaggtcatgaccgtgttgtttgggcttgcaacacacaacatgagtgatcgtggctgattggcgcatgcagtgttaacactcagaaccaagccatatcgtacctgagcgtgtctgggcccagagtttcaaccaccattctatgcatcttcttaccaataggaaagggttctgctcatgggttcccaacgcagagatttgcgtgggcagactaaacattgtggctgttgaatatacttattgacaatgccaaaccgcctacaccttctgggactgtttggaggatc

SEQ ID NO: 59547 - DNA, 1145 bp, Glycine max
  Clone ID: PAT_MRT3847_24782C.1
tgggtatagggctcgagccaacacaacactcttaataattaactcaaaccccattttgcaagaatcaagttagtgttctaacacatatatatagctttcttattgatctagatatggcaccacatggagagtctttctctaggaaaagcaacatgtcaaagccacaaaagctttcatctgagaaccttcaacgaacggtctcagacatctctttcgagctgaccaaggaagagatcgatgatttgaagctgccaacaatatctgaggttgagaatgcaaagtgtgagtgctgtggcatgtgcgaggagtgcacaccggagtacatagaccgtgtgcgtgagaagttcaacgggaagtgggtgtgtggattgtgtgctgaggctgtaaaggaagagttggagaaaaatggagggaaaaaggaagaagccgtaagtgcacacatgagtgcatgtgttaggttcaacaaatatggtagggctttcccggttctgttccaagcacaagctatgaaagagatgctgaaaaagaacaccctagatggtagaagggctaagtctattagccctagggacaaaggaggggcaaagaaaggaggaattgctcgtagctcaagttgcattccagcaatcacaagagagatcaatgatatcaaaatagccaattaataatgttactttagtactacaagtcatgcaaacttttttcgtgtttaatttaactaatgtaaattaagaacatggtttttgtatctttaaatagttagctgtttccttaatttttatcggctgactacactagctaggacttggatccattgaatattctactgtaagtattaagaaccccacacgcatcttgttcatctgctaatttacaaatgcttccattgctgtctttcgggataaaataatgatggccttatgtcaaagaagacccaagttcacttctgaggtttttttggttagtagcctttccactcctttttcaagggtggtttcttctgggatcttgtttgcatttccttaactagagagggttcagcttctttgtttttgttcagtggtttttttctgtaatttttgtgagatatatgtattctacatattattaatcataaagttgaatgataaaaaaaaaaaaaaaga

SEQ ID NO: 59548 - DNA, 170 bp, Glycine max
  Clone ID: PAT_MRT3847_24783C.1
cgaagacgggttcttctgtttgaaagtgtgaatgcttgaaagggatcatctgtttcatcctccaaagcttttcatggagttcgcggcactctctaacgctacgacacttgggggattcaaccccctcagaaccggccttcaaagttctcttccttttcggcatgcatgct

SEQ ID NO: 59549 - DNA, 1487 bp, Glycine max
  Clone ID: PAT_MRT3847_24784C.1
gaagcaaaaacgaaatcacaacgtcggaagctcccctctctaagtggcggcgacggcgggcgtgcacggcggtggttcaccttctacactcctctcatctcgtaagtctttgggatctatcgaacgcatagagaaactcttctcctcactcttcatcgtgcttcgcttcgctttatcgcatattaggaaactctccaggatatgtgaaacttgtcaaaagcaggatgagcaataacatatttgatggacagttgttagccgagaagttgttgaaacttaacaattcacaacaaagcattgaatcactgtcccattggtgtatttctcaccggaagagagctaaagaaatagttgaaacttgggataaattgttcaatgcttcccagaaagagcagcgtatctcttttctatacttggctaatgacatattgcaaaatagtaggcgaaagggcagtgagtttgtcaatgaattctggaaagttcttccagcagctctcaggcatgtctatgaaagtggtgatgaagatggaaggaaagcagtgaccagactagttgacatatgggaagagaggaaggtttttggttcacgaggtcaaggtcttaaggatgatgtaatgggcaagaatccccttccatctgctagcaatggaaagagttcaaattctatcaagatagtgaagagggatgcccactcagtgagaataaaactggctgttgggggtttgccagagaaaatactaacagcatttcagcccattcttgatcaacatcttaatgagaaagatgctttaaacaactgcagtgctgctgtgcgcgaagtgggtagagttgtggaagatgttgaaaatacattggctcatggaaaccagttggaatctactttggtgaatgacttacaggagcaggaaaaaaagcttaaacaatatatggagcaacttgaaaatggggaggctgcaagggcttcattgctttctcagcttaaacatgcacttcaggaacaagaatcaaggcaagagcttgttcacacccagttgctagttgcacgaggccagatcgaaaaagttgttggtatcaggaagcagcttaaccaagcagcagaagccacagatccatctcagcctacttctgttcaatcttctgtatcatatgctccttgccaaactactgaagatgataacaagaaggcagcagcagctgccgttgctgctaagcttgctgcctctgcatcctctgcccagatgcttacatccgttctttcttctcttgttgcggaagaagctgcctccttgaatggtagcttaaattctacaggattttcatcagtattacctattttcaacccagagaaaagacccaaacttgaaaaaccaacgcctgctcatgatgttagcaattatgatatggccaactctcccttttatgccactatgcaacagccaccagtgcctaatgtaccacttacactgccagttggcatgcaaaccgta

SEQ ID NO: 59550 - DNA, 588 bp, Glycine max
  Clone ID: PAT_MRT3847_24785C.1
gtttaaagccaaatggaggtggagcccctgagccatagtcactgaagaagctaagctttaagtctatgaagcgctttcttgatctcttctctcccattcacttacacctcactcctcctgatgccgaaaggatcaacaagcagagacaacaacttttagatttgaaaataatatgaaagatgtaggtgtgggatcaatgttagaggcacctgaatctcctgtagaatggcctatgcaattcaagcaacaacaaacagaaatagtggaattgtggcgagcctacaatgtatcattgtttcataggacttacttctttcttttgtttagaggtgatccaactgactccatttacatgggggtggagcttagaagattatctttcctcaaagaaacatttgcctgtggaaatcagtccatgaacgacactcacacctcacattagcttcaaggttctctcttgtttctgtcacatgagcatttgatatacatcttcctcatggacacttcatcaattatgtgtgatacattgaaattgtgaaggaaaaaggattggagatatgtcaaccagcgcttgacccaaatttgata

SEQ ID NO: 59551 - DNA, 276 bp, Glycine max
  Clone ID: PAT_MRT3847_24786C.1
tcgttttaaaatagaagtggacttgcgaagaacacagtgcgcaggaaccattctgcaccatggtctatcggtaaattttttgacagctggctattactgagcaagagtggatcagaagcgcacgcacagagtcgagggcatgatttaaaaggcggctacaggcggaatgcctgcgacttcacatatacaattggcctgggctatgaaaaaaaatcttagggggcgtgccgaatctgacattatgacgctgtgccataaggactgtgtataatggac

SEQ ID NO: 59552 - DNA, 214 bp, Glycine max
  Clone ID: PAT_MRT3847_24787C.1
taggacacacacccccatatatacatatactcaaatttctctctttttacagtgattcttcatactactgactgggacatcactgttcctccaactcatatatccaacactcattcagactccccttcataaatacttactcccagttcactatactatacattctacatcatattcaatttatacacaaccaattcacacatgactcctacac

SEQ ID NO: 59553 - DNA, 223 bp, Glycine max
  Clone ID: PAT_MRT3847_24788C.1
tttccggtgtctcacaggcggacgcgactaccgcaacctcgaacaatcaaacacgcacccaccacaaccgcggctgtggacggtagccgcgagcccacgctcacgcaacacccaccaaagaacaccgctaaacagcaccacatgaagagagacgggagaacaacacagccccacacgacaaacaggcaaggaacaactaagagcagctatggctgagcacgag

SEQ ID NO: 59554 - DNA, 430 bp, Glycine max
  Clone ID: PAT_MRT3847_24789C.1
cctcttcttaacatgtcttgcattaactaaatgttttaggtcataaatcatatgcttgaatgtatccatattatctgcacgatcaaactttcacttcattgacagtcataccaagtcttttagcatgcatcttaatatgcacaatgatcatcaaatgataacttgcgagtcaagagccaaatccatgtacaaaatgcatgttctcttcgttttatctgatttgatttcttttttgttcttctttatgcatagatgcacagaaacttgaattattcctgatacccattttgtggatgccaattaacctgccaatttgtcacaagtcttttctgcaacatctgtggttcaagtgcatgaatgaaagagctctgaagcatgacttaatccatagtatcttctatcattgaattgttgttaactttcaaaaagt

SEQ ID NO: 59555 - DNA, 397 bp, Glycine max
  unsure (1)..(397): unsure at all n locations
  Clone ID: PAT_MRT3847_2478C.1
aagtgtatgccagcttttgtaaaaaagcaaaaaaatttttttccaaatgctgcaaagtggtaagttgccgtctcttcttcaaattgcttcaaagtttccttgggcacgcttcaagggggttaagatttcaagtgggcgcttgcttgttcaagcttgaaagcttcacccttcaaaagccggcttcccctgctgaagaagaatgttgattgattccttgatccctttttgggtgattgaagaccagagggaaggttaaagaaggccagcaagaaggaaaaggggagggcttgcttaaaanagccttgccaagaaaaaaagaagaagtgggcaagtctttcttgtcctttcttcgatgttaaaccttgngaccaatagccccgacatgaaaaaacctgga

SEQ ID NO: 59556 - DNA, 386 bp, Glycine max
  Clone ID: PAT_MRT3847_24790C.1
caaacttgcaacttctccccacctaatctatcattcatccacctccttctcctcttccattcccatgtagctttgattctttctctctaacatgggtctgaactacagaaatttgttcccaggaacaccatcaaactgtctacaagactgttcttatgatgataaatcatcatgttgtgatccttctaatttgctccctccaactcctcctatctactcagataatgatttgagccaaagtcccagcaaacacatcaaagctgaatacttgatcataagtttctccattgttgcaaccgctttcattgccctcttctgctacgccatctacgtcaagttcttctcccctcggaacacctcaattatcagaagaagaagaagaacaa

SEQ ID NO: 59557 - DNA, 624 bp, Glycine max
  Clone ID: PAT_MRT3847_24791C.1
gtggcagctcctgctcgtgtaggtttagttgcacctattgatgttgttgttcccccaggcaacacagggctggatccctctcagacctctttctttcaggtgcttaacatccctaccaagattaataagggtactgtggaaattatcacccctgtggaactcattatgaagggagacaaggttggctcttctgaagctgctttgctttccaagcttgcgataaggcccttctcatatgggcttgctgtcgtttctgtttatgagaatggttcagtttttagccctgaggttcttgatctcactgaagatgacctcgttgtgaagtttgctgagggtgtctgtatggtgtcttcactttccttggctatctcctacccatccattgcagctgctccacacatgtttgtcaattcctacaagaacatcctggctgttgcagtggcaaccgaatattcgttccctgaggcagacaaggttaaggagtacttgaaggatcccactgttgttgccgcacctgctactaagtctggcgctgctccagctgcagcatccaaggtggaggataagaaggaagaagccgcagatgaatccgatgatgacatgggcttcagtttgtttgattaa

SEQ ID NO: 59558 - DNA, 310 bp, Glycine max
  Clone ID: PAT_MRT3847_24792C.1
ggaatggaagtcactcactgtgggttttgggagtgattttttggtttgactaggtggcctaacttgttagtgggttgtaccattgattgccattctgaaatctcaagctctcttgtttgttcgtggacatgtgcctggatccaatttgcatggagctgtaccaccattggtgatcgcttccaatttgtgcaaagtggacccgcatgacgcatgtttcaaatccctccatttcccctttcttttagcgatgatttgtgggttcctccatttcactgttgtttttaggtacttttttggtcattcctgtgtc

SEQ ID NO: 59559 - DNA, 859 bp, Glycine max
  unsure (1)..(859): unsure at all n locations
  Clone ID: PAT_MRT3847_24793C.1
acgtaacatacggctgcgagaagacgacagaaggggtactctatttgtaaatgggatacctcagaaatataacaagagagaggctcttcttgctcattttaagaagtttggggaagttattgacatctatattccattaaacagtgaacgggcttttgtgcaattctccaagagagaagaggctgaagctgctttgaaggcaccggatgcggtaatgggtaatcgttttatcaagctatggtgggctaatcgtgatagcattcgcaaagatagtactacaagtgggaatggtgtgattgtaactccccgtgggcaagcacctgcttttgttccatctcatcctgttgtcactgataggggtaaagacatccatcaagctgatgcttcaaagactatgtatgaagtatcatcgcctactgatcaatctaagcctgtcatcacagatggacccaaggttccacctcctttgcagaagaagcttgtaaacttagagagtctaaaggaagaactgcgcaagaagcaggaaatgctagatcaaaaacgcaatgagttcaagcgccagttgaacaaatttgagaaacaagtaaatacagggggcgctttcctttaaaccgcaagagcttatacattgttttagaggtttatgatcttttggcttttaaaaactatacctttagaaagtagcgtgattggtttagactttagtgtcaggtaacaagcattatgtatcaaaaaggcctatactgcccttttcaggtctaagtgaagttttaatgggtagaacctataaaaaatttgtcataggttatcttctacttatcttaataagaaccttnaagttaggcntacttggcatttt

SEQ ID NO: 59560 - DNA, 272 bp, Glycine max
  unsure (1)..(272): unsure at all n locations
  Clone ID: PAT_MRT3847_24794C.1
tnnnnntnnnntttttttttttttttttttaaaaccaaaaaccgatggagtaacccctttgttattttgggccagccttggctaaggcgcaaccataaatcatcacacaatgtcaggaaatacaaataaagcctgtaattcactacccacctattgcttttgtggggcgtcaaattctcgtgcggtcatattgatatctgacacctaactggcctttccaaattatttatggcattaaaatttctaaaagagggccattcaaaatctcgttc

SEQ ID NO: 59561 - DNA, 604 bp, Glycine max
  unsure (1)..(604): unsure at all n locations
  Clone ID: PAT_MRT3847_24795C.1
aggaaacatattatgtatacattttaccaatcaatatcaatgttaacaatatgagaacctcgggtgcttacacttcaaattcgacataccaatcacggctcatagaggatgatgtggatatgcaaaatacgatatttgcggtggggaagcgccccctccatcaagctaaggtgacgtttctgttttgaagagcattgaatgatagactacctacgaaagacgaataaaataaatattattggggaggactctaaattgttttgtccattttgtcttcaacataatgagtctctaaatcatatcttcatacattgtaacgttatcttcatacattgtaacgttacttctatggtttggaacgaatgttataagtggttgctccagactttgcggtgactgctcaggattcacttgatggccaattttggacacactcggcctatgtagatcatctattaatctcaatttgngatagcaaacgtactgagaatatcaggcccaagaggatctccatcaaaccggcccatctaaaagattatgtgtagaagcgggaaaccgatagaacattagcaatgctctgccaagtatcatagtttggtattcg

SEQ ID NO: 59562 - DNA, 944 bp, Glycine max
  Clone ID: PAT_MRT3847_24796C.1
ccgactacctttgttcttcacctttctccctctctatatataccctccatcatcaaatctcccattattcttcaaattctctccattcaattctctccaacgttaacaaccttcattccatcctcgtatcggttattattaattttaattccacgtaatgggcaactacgtttcatgcaccttggcgcctcctttgatgaagaattccaaggccacgagggttatcatccccaccggtgaagtcaagcaattcaaagagatcgtgaaggctgcggaactcatgctcgaacaccccaactattttttggtcaattctcgttctttgcatataggaagaagattctctgctctcggtgctgatgaagagttggagttcggcaacgtgtatatcttcttcccgatgaggagagtgaactctcttgtcaccgcccctgacatggcagtactcttcttggccgccaactctgccgccaaaagattgtccggcagtaaggcgcgtgttctgccggacaactgtggcggcaaagcatggcaacaacgggaagaagaagaagagagttcaaaagatgaaagtttaagtgtgattccaaggttgagtttggaaggagtggagtcagggtttcagtataggttaaattattgtaggtcaaggaagcctgttttggagactataaatgaggaacctgttaggctaaggtgatcatgtaatgaaactcattcgtttatgcatcagattttattttatttttagcttcaagagagatttaattagttgaatcatacaacccttcaaaaaataaaaaagttaaaatggtgtctcattagcatcaaatttgtacaaaattcatatacaaacaagtttgtgtgtgatacatattgacaaaaattttattttttggctacggtgaatgaatttaaattaatttaattcatgttccaaaaaa

SEQ ID NO: 59563 - DNA, 310 bp, Glycine max
  Clone ID: PAT_MRT3847_24797C.1
tatggcaatgatttcgcccattggcaatgaccacatacacaatctgactattcataggctaaagcgcccaacctctcaaagggggcgaatgttaatacattactttacaactttctagagatgtcatgaatagatgagtatcatgatagttctagcatcttctatcttatacctatacttatagttgtagaccgttctaccataagccataactttaggatattttactctcttcatacctattatattaaagattattctagaaattcgtaggaacttcaaaactccttcttgctgcacatatgtggga

SEQ ID NO: 59564 - DNA, 688 bp, Glycine max
  unsure (1)..(688): unsure at all n locations
  Clone ID: PAT_MRT3847_24798C.1
atttaattccctctcacgtgttcctttggcagtgaattgatattaaataagaagttttaaattgattctcgatattctcttttaaaaattgttaccactgcactattatataacaaccaaatcatttcgttgtagcaattattttgtagtgtattcttttaatatgttataacacgcgtttcttttttatattatgcatttcttacgtctaagtaatgtttcaactaccgccttagtgatataatgatgtaaagaataaagaatatgatactaaaatgtggatcatattataatcattctacatgccttgtgtcatcatcatccaaatattgtactaatgtcgtgttcatcgtgtgcagtgatgaacatccatgcaatggaagatttcagaagtagaggagctgaaacattgaagtttctcagtaatttggatcagatcaaattgcctggacttcacccatcaatgtccatggacgatttggtaagccacattggacattgcatttcagaacagatgggatccgacaatccgagtttggctggtgacagccagtatagtagatctattctggaagaattttctcagtacttgttcaatgactctcaacatgcaactacctctgatgaacagcgtgtgatgtcaagggtgaactcactttactgccttctgcagaangatccttcttca

SEQ ID NO: 59565 - DNA, 894 bp, Glycine max
  Clone ID: PAT_MRT3847_24799C.1
gtattacaaacgacagcgtttgactgagaagtctgacgtgtactcctttggggtggtgctcttggaggtattgtctgggaggcagcctttgatccgcactgtggagaagcaaaaggtgtcactggttgattgggcaaagcatcgctacgcaaagggatctctgggtgagattgtggatcctgcactgaagggccagatagcaactgagtgtatacacaaatttggtgaggttgcgctgagttgtttgcttgaggatgggactcaaaggccctccatgaaggacgtcgttgggatgctggagtttgttctgcagctaaaggatactatggatgtcgcctttggaggggactcgagggcattccatgaagaacaacgttgggattctggactcccatttgaagcttcaggttactgattttaatgatgcaaatggcagtagccacgcttcaggacagtgctgttaatggagtggtggtcagtggtggggattatgaagatagtgaggatatgtttagcagtacccatagtagtatacaactttcgaattatagtaacagcactggattgaacaccacgagctatggcagtaaggaatctgacaggttgatcccggagaatgttttctctgagattaagaatccagaggggcgataaagatcggagcagtattcaagttcaggccaagtatgcggttaaagataagcaaaatggatagtttgaaattagatgaatctaaaactatgtggcatggagatatcaatgtaaaaatcttgaagtggtttcaatttagaagtgtgtattaattaggtggattctataaaggtttgtctaatgattatttatcaaattttgttttgataatatatattttggaatcaagaaagtttcagttca

SEQ ID NO: 59566 - DNA, 307 bp, Glycine max
  Clone ID: PAT_MRT3847_2479C.1
cctcccaatcttgttttgatgttttcagaaccacgggcgttttcttttgatctcgacgaattcaacatatctagcaactgacgctgcttccctctagaggattcatctgatgctggctgcgatacaggctcattcatctgcaaatcttgcgaagggcgggcagacccacattctgtttctgagctctgctctgatctcctggaggccacacaccttcacagtacatccgagatcctctttagcccatttaaagactgccctcaaatttccatccaaagcttgacacacaacatacaaaattttcgcc

SEQ ID NO: 59567 - DNA, 345 bp, Glycine max
  unsure (1)..(345): unsure at all n locations
  Clone ID: PAT_MRT3847_24800C.1
ttttcagcacttaacccaccctanaattacatcttaagatcattttaaacaagggttcctccctcccctccttcttttttataataaacatgtttatatttaagagggctcattctcacatacactccaccttacacctttctgtttcctaaacacccttctttgggagagggaagatctatattctcttacaacctaaatgctccttttataccccatataaatttaaattcttatatttttaatcaaaattttacccaatgtcaccatcctaaatttaatttaaatctgtacacgactcgaaaaagtcattatatataatatataaattctcatattataata

SEQ ID NO: 59568 - DNA, 499 bp, Glycine max
  Clone ID: PAT_MRT3847_24801C.1
tcgtttactcgtgcacacctctcattttcccacgacccattttcatttttccaaaaagatctcaactttgcttcaatctagaagactccctctttttacgttcccgtttcatgggcatctcttggaatcgggaaccatagacatcgccatggaaaaggacaagtctcacactcacagctttcttcacagtatcgtcaaacacttcaaattcggttcaccgaaagagcgaaacaatgaagctgacgtacaccaaatggctgcacaggagcagaagatcttcgcctacgaaaccttgacagctgcaactaagaattttagtgctattcataagcttggtgagggaggctttggacccgtctacaaggggaagctgaatgatgggagagagattgctgtgaagaagttatcacacacgtcaaaccaagggaagaaggagttcatgaatgaggccaagttgttggcacgtgtgcagcatcggaatgtggtgaatttggtgggc

SEQ ID NO: 59569 - DNA, 423 bp, Glycine max
  Clone ID: PAT_MRT3847_24802C.1
gggggaagggccaaaaaccccttccatccttttataaatttttatttttcccgggaagagagctttttttatcacatgacaacaacggggaggaggggccctatttacattttacaaacaaaagctggacccatgcttctactactagggacagggaaaaaaacatgccccggtggatcgtaattgtcgtcgtcggcgtcccatagcaaaacaccaaaaaaaaccggggcaaacgggggacccaaaaaacacatgcgtttccagcttaaatgtttttatttttttttgccctaactaaactaacttgaaaaaaaatcccctgggggggggcccacaagccccctcataaaccttgagtttcgggctacccggcaaaagcaaatgggcggggtggatcggtttgttaaaaaaggctttttgggc

SEQ ID NO: 59570 - DNA, 402 bp, Glycine max
  unsure (1)..(402): unsure at all n locations
  Clone ID: PAT_MRT3847_24803C.1
aattcggcaccagaggatttttgccctgaaactggattaacagattattttagggcaatgaacagtttttttttttgtgattccatgtaatatgatatgtncattttatatcaatcaaaacttgattaaatttctttgaatgtcaaagacagcagaatgaggtacatacgaaataagtctcagattcatttacgatgctttgcctctctgttcttgagcacagatttaccagttgggctacatctaaattgttgtctcattttatttcctgttttctgaagtttatacaagaaaaagtgaaaacagaaagcaataagttgtttttcactatataaacttttgaatacatgaaacaaatttaaaacaaaatgtttctcaaactaatcacccctgaacaatttt

SEQ ID NO: 59571 - DNA, 154 bp, Glycine max
  Clone ID: PAT_MRT3847_24804C.1
cgcgcttcgcagcgtctactattggggggaactagatgttgtctcttgctggcactgtggaggctattgataatgactactgtgaagtgtggtgtatgtgttatactgtcccacgaacatctctggaatgcggagactgatgagttgtagatgc

SEQ ID NO: 59572 - DNA, 450 bp, Glycine max
  Clone ID: PAT_MRT3847_24805C.1
ccattgctgaataagtgcagcaatgcccaaaaatttgaactagaaactttgaatctggatgcagatgatgatcagcttcctgagaatggaatagtaaagaacgaatctaatatgtgtcaggatttgtctagtagaaatccaaaccagaacatgaatttgttagtgcctgcgaagggaaggccatctgcaggaacccttattgtttgtccaacaagtgtcctgcggcaatgggccgaggagttgcacaataaggtaacctgcaaagcaaaactctctgtgctagtatatcatggaagcaatcgaacaaaagatccttatgagcttgccaaatatgatgttgttctgacgacttattcaattgtcagcatggaggttcctaagcagccttttgttgacaaagatgatgaagaaaaaggaacttatgatgatcatgcaatatcaagtaagaaa

SEQ ID NO: 59573 - DNA, 447 bp, Glycine max
  Clone ID: PAT_MRT3847_24806C.1
aggatcctgaagtagcaaagtttagagagcaaggcctcaaattcttacctgagatggaattcctttttaagggtactattgctactggttttgcagcatatgcaccatctgaggattcaagacaatatgaaggattcaacacaagaacagaagagacaaatgataacattgatgataacactgacatggaagtgaatgagcctgagatagacacgacaactcagaacacgtcttcggcaaaggaaaatggacagaggaagagagggtgataaaagaattggggttgctgccaagctttcctcacaattagatcgtattattcaaacatttgaatctagtgtatctgctcaagacccaactagtattactgcatgtgtagcaaagttgaaagatctaccaggacttgagtgtgggagtgaactattttacaaagccactaaacttatg

SEQ ID NO: 59574 - DNA, 187 bp, Glycine max
  Clone ID: PAT_MRT3847_24807C.1
tcgagactttgacactcagctcagaaaactctcgttcaagtaagcgttcacctgttaagtgcagtgacagctacgtacactggcactgctcttatgttagcaatgtctggctgttaaagctaagcacgatcacgcatttccatgacggtagccttactattcctgacctgcacgaagctcgacagaa

SEQ ID NO: 59575 - DNA, 1499 bp, Glycine max
  Clone ID: PAT_MRT3847_24808C.1
ttaccggtttatggattcttgaagcgcctatttcgggacctatttgctcgagaaggttatgaatttgattatgtatttgattggactattttaaagtaccagcaggcacaaaagaatagagtccagtctcgtatatctacagtccctggaacaagcagtagtcctgcaatgccaatggatgtagacaaccatcgaggtattaatgcttattcaggggatgtcacagcagaacgcattaagtcaggcaatgttactggttctggtgttaaaattcagtttaaatcaccagttggcaaaaatttgggctctgaaaagcctctggacaagaatatttttggtgaagcgaatataccctctacctcatactctattgctggtacctcaagaaggaacaccttgaagcctgccttgtccactgaagctcctaaccctggacatgggcaaggtagtaataaaattggcccttcgagtagctggatttcatctgtgcagcgcatatcttctgccaaatgaatgcccaatatggtttgattctgatcaagaagattccctgtatacattcattaacctgcaaatttgtggtatttgcttgcttcaactgtacatttttggtcaagaattttcaaatgatctatccagggagactgcaaatgtgctgcaaggtagctcgaatttgactatcagccagattaacttgtattgtcattcttgggatgaatgaaaacctggtctaatttcagtttagcctttttttcaaggacttcttttttcaacctatattgactgaaggatgaaatagtgactgacagttggtatatatggatgccattatcaactggaacatacctctccatacagattgggttgtcgtagcattttgggagtacttcagctttgtgacaaagcttgaaatgagaattgcttttgatatggatgttagttagcaaagatgattcaagatctgtgattctaaccaacatttttgtaaggttgactattcatttttcagttgatggacatgatcagtgatcattgattttgttgctggttacaagtgggtctctcgaggaaaattatagtagagaaaacaatgcatatgaaggaagctcagtttcatatattgaaaaacatttggttttaataatgaactattgaatcccatttttgagtagatgatatgtggttccaatgataagcaagactacctgtaactttatcagtaaatctggaggtatttcatacactagtttttattctacttcagtctaattgctgattttattcctgactaatttgtatttcatgttttccactattctctagccacagactaaccgtgtcaaatagagtacattgattgggtgaatggaaactttgaacttgcagactctctggagattgcagggattgtgaaagattattccaaggcatcctccatttccatgagggttgagatgtgtcacaattacaggggtttatgcaaattggttttgttagac

SEQ ID NO: 59576 - DNA, 349 bp, Glycine max
  unsure (1)..(349): unsure at all n locations
  Clone ID: PAT_MRT3847_24809C.1
ggaatagtaatttaagggggattaatttgtgtnttgatngtgaattgtagtgagtgagatttgagaataaggtttattttttttgtnnatggaagaatttttttggggggggggtnatggananatanattgatgatttgattgangnggatgggtatttgnnatggnaaggagtagagggtntttttggtatggatagttgtttttatgnngagtannagaanattgggnttggttttagaaaatgnaagngtgtgaaatggggtgggatttggaaaatnattttttaagnagnangttggtttttaaaatgtaagttttttgatgagaattggtttgaattgaggtt

SEQ ID NO: 59577 - DNA, 490 bp, Glycine max
  unsure (1)..(490): unsure at all n locations
  Clone ID: PAT_MRT3847_2480C.1
aaaaaaaaaaaaaaaaaaaaattttttnanntttataaaaaaaaaaaaaaaaaaaaaaaaaaaaaaaaaaaaaaaaaaaaaaaaaaaaaaaaaaaaaaaagggggcgccctttttgggggtccctttttaagttcccattttttgcaccgtgaaagctattttataggtccccttaaatgcaacccaatgcccatttttttacccctttttaactgaaaaaaccttggaaaaacccattttattccccttttaaaacatccccttttaacccccttttttaaaagtgaaaaggcccgaaaaaatcccctttccaaacattttcccaactttattggcaattgaaacgccccttgtaccccccctttaaccccccattaaacgggggttacccccaggttaccccctacatttcccatccccttacccccccctttttgccctttttttcttttttttttccccactttcgccgcctttccccgggatttt

SEQ ID NO: 59578 - DNA, 260 bp, Glycine max
  Clone ID: PAT_MRT3847_24810C.1
tgcagaagcagtaatacatgtttgtcaaagccaatattcaataacttgaacttccttaagagaaaagtaaagcaagatttaagttctgcctctagttgctctactccttgtacaagtaatttggacaaggagggggcaattctgatttgaagcatgatgtgaaacacaatgagaaacagtcgcctagcagttcaaatcatagcattgaagttaactcaattaatggtggtacagattcaagcaaatctggtttcagcttg

SEQ ID NO: 59579 - DNA, 359 bp, Glycine max
  unsure (1)..(359): unsure at all n locations
  Clone ID: PAT_MRT3847_24811C.1
gctctgcgagaacntgagtcaccgattcgaaaagcatgagcaagccccatatattttctaagcgagaagccatttgaggaattacggccgaacccaaggagaggaaacacaaaacagcggagaccaacgaactacacaagcggaaagaagaactacgagccacacaaggacaagaagatccaccggccccgccaagaagccccacaacccaagacccaagagaaaaaataccagccccgggggacaacagacctgacaaaaaggcaaacaagacagaaccggacggaatggaggcagaagccccgaaaaagcttaacaaaaacaataaaggcggtgaaaaagccaccctagaaaatacc

SEQ ID NO: 59580 - DNA, 317 bp, Glycine max
  Clone ID: PAT_MRT3847_24812C.1
gttggctagagtgctcgtcctatctagcttaccaatacaatataaaaacattattgttgaacattacatctatatatgggcaagctctttctcatccactgactaattggagactgccttttgtactatatatccgcttgtgcataggagaactaatctgacatcataacctgaaaccccgctatcccttcatgtgtcgcacagccttagccacgatctaccaaaacataatcatcgcctatatgctcaaccttaactaccccacgatatggccagaattgacaccacagcgccagccacagtggcacataaacttg

SEQ ID NO: 59581 - DNA, 482 bp, Glycine max
  Clone ID: PAT_MRT3847_24813C.1
ctcatctcaacgtgatagatatgttctaaatttagcgcgaaatctttgtttgcacctttaaaaacattttgagtgctgactctagaagattgtggacatacaaggtagttgtgtacacaagagcaaacacaaactttttatgagtccagccagacttgagaagattgctgatattttttgcataacagtccccatgaatacagacacagaaaaacactaattctcttgttgaaaactcatttgaccttaaattcttgatgagtacaaactattgaacccgtttatttgaattctccaattcactttccatttccataaaggatatgtgatttctaccaacatacatctgaaactcttgcatctctaggaaccatgagtaaaggatatgtgattctattaccagcctaataaagcatgtaaagtctacttgttcggttacacactaattttaagtttttaatcaatcatgtatctggaattga

SEQ ID NO: 59582 - DNA, 253 bp, Glycine max
  Clone ID: PAT_MRT3847_24814C.1
atcgtctcagagcagccagccatctgttgccacgtggtggaaaaccacggagaagtacgaccacctgaatcggaagaacaagaaagctgcttcttctctttctctatcactgggcgatcagtttctttaccagggtttcttgcttgggaagttactaaccaggttgaacctttttaaactggcattcaaaggggtaccgatgaacgccattaaccttttttagacattcttttaactgtcattttaaagtttt

SEQ ID NO: 59583 - DNA, 443 bp, Glycine max
  unsure (1)..(443): unsure at all n locations
  Clone ID: PAT_MRT3847_24815C.1
aanncnncannnnancccacnnnccccccannncccncaccanaanacaacccanaaaaaaatnttcncaacnncnnaannannacnnnaaaaccannnnccacannnanncnacnnnnncnncnnccncanncaccaccnnnccncnncanacnnncnnnnnncccacncncnnnncanncncnanncaccannannaacancnnncaacnnccnnanntacnnncccncccanannnaacacacncnncnncanncntnccnnnnnacacancncnnnnannnaancattacanncacnnncacaccnacnnnccacncaccactnncacnnancccaannacannncancnnancaanannntnacnnacncannnntnnnnnannnnatantcccnnccnanancaacacanccnanaccanaaaanntncannnaanc

SEQ ID NO: 59584 - DNA, 810 bp, Glycine max
  unsure (1)..(810): unsure at all n locations
  Clone ID: PAT_MRT3847_24816C.1
atgacgcaggtcggatattccagagcggacccacccgtccggaggaagctgtaaccaatggtcaaacggatgaggaggaaaaagagtgtgatgattgtagggttgattatgatgatgacgaagaagaagaagaaaatgaagaggtttcgttcgatagagactcgttttcaagaatgcttcggagggtgtcattgtccgaagctagattctatgcgcgcatatcccacttgggcaatttggcatactgtattcccaaaatcaaaccagggaaactcttcaaacactatggtctgcgttttgtaacttcatccatagagaaaaaggaattagctatggcagctgaaaaaaatcagatatctcaaaaagaagaaactaatgagaaggatgtggatgaaacaaaagaggaaaagaataatggtggatacatgataagtgcatctgctgtatacgagattgctgcttctgctgcctcttatcttcatgctcagacaaggagcatactttcattaacatcttctgatgctgcggaaggtgaaggctcaattgaagcaatcaatgaaagctttaacggcgataagattagaaacacggaggaggcaaatttgaaggcaactacggattcggtaacagcagttgttgctgcaaatgagcaagtaaagcaggcttttgcagatgatttgaactcaacaagctcttcaccttgtgaatggttcgtatgtgatgatgaccagacctctacaagatattttgtgatccagggctccgagtcgtttgcatcctggcaagcanatctactatttgagccagttc

SEQ ID NO: 59585 - DNA, 167 bp, Glycine max
  Clone ID: PAT_MRT3847_24817C.1
cgaattcttcttgcagctgatggcgcaagttctgctccattggattcttcatggcagtcatctatgaattcgataagctcaacattggtggttgcagctttggtagagaaggtcgtactgtacatcgaccagactgttggtattggactaggtgtcactaaactatc

SEQ ID NO: 59586 - DNA, 262 bp, Glycine max
  unsure (1)..(262): unsure at all n locations
  Clone ID: PAT_MRT3847_24818C.1
gaaaaaaaaaaagttttaggggttttttttataaaaaatatcccccccttaatcccggggtcaccttaatctgcgccttttttattgcaaaaaaaagggggtgggggtatttaaatttgagaatttgactttgggaatccccccggaaaaaatttccaagcaaggggctattccccctctagcccaaattcgaggtataaaaccccnncctgggaggggaaaggttttttaaaaggacacctaaaaaaaaaaaaaggggggg

SEQ ID NO: 59587 - DNA, 331 bp, Glycine max
  unsure (1)..(331): unsure at all n locations
  Clone ID: PAT_MRT3847_24819C.1
gtanaatgcacgagagccttatggcctctagatatttgattcaatcttagggcacttagtgcgaacctgtatctaagaatcaaacgacactataaacccatcgctcactattcaatgcaaaatttgcatcattaatttaatcgaatgatgagagctccccctctcgaagcgtaaactcacacctgacgtttaaaggaaagaaaacgctgagtatgtatacataattcggaaaaagaagcgctcgacacatcccacaaatggctgctaaaggcagctaatcagagcgtgcacgataaaaaataacatcaagggcttgctggaatgacacttt

SEQ ID NO: 59588 - DNA, 262 bp, Glycine max
  Clone ID: PAT_MRT3847_2481C.1
cgtcccacccctccctcccggcatgcgtaaagaaatgcttaaaaaatcgaggcaacctgccacatggttttctttgcccaatctttggctggcaaggccgtgaaattgctcactctcatcgacaaagtgcaatgggtcaccataatggaagacctccaccaagcaggcctcctccggaagccaatggtacggcccataccgcgtcaagtccttggtccgagaccatagtggagcccggctaactacgctcactgccgagttc

SEQ ID NO: 59589 - DNA, 187 bp, Glycine max
  Clone ID: PAT_MRT3847_24820C.1
aaaccaaatttcatcaatttcattactgaaaaatataatagaacgtcctttgataaagcccccaaagctagtaaacaaattttttaatttatttacctgaataaaatcatgggaaagaattttttaacccaacctgggggaatttaaactgcgatcatgaatataaaagttggtcactggtcgggcc

SEQ ID NO: 59590 - DNA, 289 bp, Glycine max
  unsure (1)..(289): unsure at all n locations
  Clone ID: PAT_MRT3847_24821C.1
gcttacgctcccctggngnanaagnnccacggacgacggggacaaataagggggaaacccccacggaaccccaacnggagcaaccaagagaaaaaaccccagagcanggacaacaacggacgagagaacaggaggcacagaacaggagggacagagaccacacaccggggggagccaaaaaaaagccaggcccaggaggcccagagacaaagaaaagccgnccaaggaggcacacaacagggacgaggaacggcccgaccgagccgaggaggaggagccccacgaggaa

SEQ ID NO: 59591 - DNA, 219 bp, Glycine max
  unsure (1)..(219): unsure at all n locations
  Clone ID: PAT_MRT3847_24822C.1
gtctcttaaggccccnncnccagagaggagtgggtgcctttttcatcggccccccgcccccaccccaacataccactcaacaggtgggaaacccgctcaccctattttaaaacgactacaactaaccaatttcagaaataatcacccttctacctttaaccatagtattgaccaatctaaataattttaaaaatacaacactttgcacagagtaaaatt

SEQ ID NO: 59592 - DNA, 371 bp, Glycine max
  Clone ID: PAT_MRT3847_24823C.1
ccccccaaaaaagttcccgggtatttcccaatattttaccccccgggggggaatgttaggaaacccaatttgttgttcccgaagggcccaaaaagaaaatttttggcgctttttcccggcttcccccctaggggggggttaaaaatgatttggggggccccctttgggaatgtcccccttgggggggggggcccttttttccataacttggttaaaaaggggaaaagcaattgccccccttttttgaagggggggggccttcttgtattgtttttggaaaaaaatgggggccccttttgcccctgaaccaaatttttttcctttgtttttcccaaatgggcccgaggggtccggggaatttaagcgggggc

SEQ ID NO: 59593 - DNA, 115 bp, Glycine max
  Clone ID: PAT_MRT3847_24824C.1
tacattactacagatgcgagaagatttttctcgcgtcacttctcatccttcatacgctgctttctttatatcgtaggacctttccatggggaagacacaaagaatgggagctcat

SEQ ID NO: 59594 - DNA, 1693 bp, Glycine max
  Clone ID: PAT_MRT3847_24825C.1
ggacctttgtagccactaatacgtctgtgttgctagccttagatccagtctatgaatggcaaagccaagatcttggactcagatatggtcttctattgtcggagtgtgtgttctgaattttgttctgaacttcaagatcgtggcagtagcagatgacactggaagcaacagtattgtatcagaaggtgactgcaagaacacaaattatcagattttcctccctccaccttatcagaatatatcctctaccatatgcaaacctgtttggcattcatacgaattgaggtacaccaagacgggtgacaccacaactatcatattatctgctccatacactgtggggtgggtgggaattggattttcaagggatgggatgatggctggttccagtgcaatggtgggatggattaacaaacatggccatgcaaaagtcaagcagttttatctaaggggtagggaggcaatcagaagtaattatagacaaaggtgaactgcctctaaatactgtgcctgctgcggtggcaacaaatggggctgaaatttacatagcttttcagctgcaaaccacaattccatttcggaagcaaccaattttgttggcttttagtactaaatatccactgaaccaccatctatccaaacatgaagacaaaacagctattatatttgatttctcttcaggttctacgggtcctgtatccaatgaattgattcacatgaggacgaaccatggaatattgggtataattgggtggggtctaatcctgcctgtaggggctattattgctagatatttcaggcacaaggatcccctatggttctatctccattcagtcattcaatttgtgggattttcatttgggcttggcacagtccttcttggattacaactctatagaaacatgcatgtccacataccagctcacagaggcataggcatctttgtccttgtcctaagtattcttcagatattggcattcttcttgaggccagacaaggattccaagtatcgaaacatttggaatttgtatcacagttggtttggaagaatggcacttttctttgcagcattgaatatagtcctggggatgcgagctgcgggagcagggaatgattggaaggcaggctatgggttccttcttagcattgtacttgtcgcagttatcgttctggaagtcttggcgtatttgaaaaggtcagaaaagcgttctcttcctcagactttccaaatggacccagttggagatgctaacttcccaaccaatctagctaaagggtgaatgtgttggctcctagttttgtttgcacttgtacaagctgtgtcaattgtctcattcagccacttcagactaaacctcattcatcctacactactgcatgtgaactgagttgtggagctttcttgatgtagatagatatgtagccacctagaagtttgccaagatggacaatcctgacgtttggcttcctcacctgaacttgagattgaaccttttttgctttcttcattggttgtttttttgcatccgcatggtcagaaatggaatgctactacatttacatctatatatattttgttattcttctatgaaaatgtgatgaaaattaaggaaaaacgggaaatctaggtatctaaatttaaaaataaaacttccctctttgttgagtgccaagtttccattctttcacaacc

SEQ ID NO: 59595 - DNA, 608 bp, Glycine max
  Clone ID: PAT_MRT3847_24826C.1
gtgagtttgagtcaatgtggagtcaacatgggcagtgtgaatccgagtataaatatgttctctttgtcggaattaagttttcaaggctgggcttgggatttggattttaaaaatttaatgttagtttctcattctcacggcatgtatcatattaaaatactcattctcttgagatttgtaatttatagtcgaattgtcctaaaatttaatctaattcccacctggatcagtgggcaaaagaaataaatgaagtcctacataatttcagcaagaaaaaaaaaaaaaaaaaaaaaaaaaaaaaaaaaaaaaaaaaaaaaaaaaaaaaaaaaaaaaaaaaaaaaaaaaaaaaaaaaaaaaaaaaaaaaaaaaaaaaaaaaaaaaaaaaaaaaaagccacccggccaaaaaaaaacaaagttttaaaatgcagaaaacctggcgttaacactttttatttggtttgccgaaaatacttttttcgcccggtggttaacaaactaaaaggccgggaacaaccgccctttccaacatttaagcgctttgaatagaaaccccttccccccctgtagccaaacattaaacgccccgaatggggggctttcccccacc

SEQ ID NO: 59596 - DNA, 383 bp, Glycine max
  Clone ID: PAT_MRT3847_24827C.1
aagatgttcagttagtggggtgggcccttaacaggttgcttgcttggctgatacttcttgtacaacctttttcaaaacaagtatttccttttgttgtgttttttattattaaaaaaggatttgttacaaataaagtgttggctatcattgacttatgtttattaactatgtaggacaaaaagggggctgagggaccggcgaaactggtggatatgctggaactagatgacaatcttctatactagataacattaatgattccagtttttcctcaagcctatgcaggtgttatggaattcaactgtgtttggggtgtataatgatgacgtccccttgtacataaaacattaagatctttctgaaattgcacatagtggtcaatg

SEQ ID NO: 59597 - DNA, 232 bp, Glycine max
  Clone ID: PAT_MRT3847_24828C.1
ggagcgcagtcgaattgcacctctaattgtacgtcaaaagggcactgaatgccatggctatataagaggcttatattgaacctatactgttgggtcaaatacataagttcaaacaggggagtcaaatcttatgaataacacgctataatctaatctcgtgggctaaattttaacctttctgggttaagaagcttatagaatgtgaattattttcttcgtatggcgtccaaat

SEQ ID NO: 59598 - DNA, 240 bp, Glycine max
  unsure (1)..(240): unsure at all n locations
  Clone ID: PAT_MRT3847_24829C.1
cccacgcgttcgtatattccagggacaaagatggtgtgtaccggtcttaataaaccttaggaacgtgcatatcgtattgcatatgttatagaattcactgcataaagattaaatggtcatacatgcagttatgcactttactgtcataggtgtggagatttaattctcagacattttatactgnggtgcaatgaatactggatcaacatattgagtagactggattgacttgcaacgcta

SEQ ID NO: 59599 - DNA, 654 bp, Glycine max
  unsure (1)..(654): unsure at all n locations
  Clone ID: PAT_MRT3847_2482C.1
aaaaagaaggagataaatnaaaggaagnaagggggntacggaatgcataaagnnntntgaaggaacaagaacttaactacacaactgaacccttactcaacaaataaaaaatatatntaatntatntgnagatcggagaaaccaaaaaaaaaaaatggagnnnngangagaagaaagaaatgataaaaaaaagtgaaagttacaagtaagataacaatataaataacaattataaaaataaatatgaatacaagaaaatttataaaaaaatntacnnnaanntnttnnnanngnnnnaaaaaaaaaaaaaaanagaaaaaaaaagcgccacaaaaaaaaaaagaaaagcaaaaaaatnaaaaaaaaaaaaaaaggaaaaaaaaaaaaaaanaatagaaaaataanaataaaaaaaaaaaaaaaataaaccaaggcaanaaaaggaaaataaaanatanaaaaaaaaaggaggacggattaaaaaaaaaaaaaaaagaaaacaaggaaactagaaaatgaaagggggttagcaaaaaccaaaaagggctaaaaaaacaggaaagaccagannaganaggngagaaaaataagaaaaaaanaaannnaaaaanaaaaaaaaaaagaaaaagaaaaagaanaaaaaaaacctagcaa

SEQ ID NO: 59600 - DNA, 352 bp, Glycine max
  Clone ID: PAT_MRT3847_24830C.1
acctagaaaatcatcacataatattgatactccatacaaatgaatcaagtgttgtgtattttggataaacaaaaagggttatgagccatctaaatccaacacatctcaacccatgccgtggtgaaaaataaaactaactaaacaaaaaatgctcctccggcattgagccatctaagttatcgactcagtgtgctctttgttagtaggggtgatgacggtttttcttgtgagttctttctgccttcatagtcaatgtgcttgaaatccaagattgatttgattcagaggaatcatcagagagccaacaacatagccgaccatttttcccacccgtccaaccgaaaatgccttg

SEQ ID NO: 59601 - DNA, 734 bp, Glycine max
  Clone ID: PAT_MRT3847_24831C.1
ccacgcgtccgatttcttggatgctactttctttatgcagtgcctatgtcacggattcgtctgtctgcttcaaagcttttgtactttcggaatttgcaaggtatagcttgttaatttaggacagttttcaattctcttcggttccaaacatgatgtctcaagaagcaatacctgctccttccaacaataacaacctcagagactccacggttcaacttcatgaaccaaactcaaaccctaatcctaaccctaattcggttaagagaaaaagaagcctacccggaacaccatatccgaatgcagaagtgattgctctgtcgccaaagtcgctgatggctaccaaccgattcatctgcgaagtatgccacacgggtttccagagggaccagaacctgcaactgcaccggcgagggcacaacttgccgtggaagctgcggcagagaaacagggaagacgtggcgaataagaaggtgtacgtatgtcctgagaagacttgtgtgcaccacgacccttgcagagccctgtgggacctcaccgggataaaagagcacttcatgtagaagcacggtgcgaagaagtggtagtgcgaaaagtgctccaagaaacacgctgttcaatctgactggatagcccatagcaagatgtgtcggactacacagtacagatgtgactgtggtacaatattcttcatgaaggacagctttgcaacgcatatggcctttgtgtgacgccat

SEQ ID NO: 59602 - DNA, 400 bp, Glycine max
  Clone ID: PAT_MRT3847_24832C.1
gagctcactatgtcggtggccgccctttttttttttttttttttttggtttttttttttttttttttttttttttttttttattgtattttttttttttttttgttttttttttgaaaacccaaaaaaaaaattttggccggttttaatcagggaaaattgtaaagggggttggagaaaaagcctcaactttaaattggggttttccccgggttgtttttttggggaaaaataaaaacaaaaaacccctcccccggaaaaagaattaactttccggaaaataacctccggtcactttttttccgttttggaaacctcctaaggttaataatgtaccccctttttttggggggttttccccactttccgttttgtttaaaaatgggggttattggcaggtt

SEQ ID NO: 59603 - DNA, 477 bp, Glycine max
  unsure (1)..(477): unsure at all n locations
  Clone ID: PAT_MRT3847_24833C.1
cactgagcatcgtctagctatctcgatcgaactgtccaaggtcctgtcacagataaactaggcaaggtaaaaatgaacggtagggtggcgctggcatgggaggttgtaaaattaaatagggtcaatatagctcctaatgcgcatgctctgcataacatgaatgcgtattaaccgcaaatacatgagccagccggagacagacaccatgcacgaacacgtgatagtcaccatgcggcatagccagcggttagtagtgcagtagcagcccaagctaaactccgtatgaatgcgtatggcatatcccatgcatagtggcggccgtctagcgaaccgacagagcngagccaaaagcngaaggcnttagggctggccgtaagataaagtgttaaagaagcgaagtggtcgagcaagaaacgcgcgtcggagttgaaaaaaaaaagcagcacccaaaaaaaagagagaaaagaacaataaaaa

SEQ ID NO: 59604 - DNA, 1717 bp, Glycine max
  unsure (1)..(1717): unsure at all n locations
  Clone ID: PAT_MRT3847_24834C.1
ccacggctcgagctctggaactccactcgtgatccaacacgatagagagagaaaaagggtcttgcctttttttctgcttttgatttgactctttacaaatacaaataaataataaaatcccatcaagaagaaataaatatcaagcccaacccagtgcagtgctgcagggactgtcactgaactcaaaaatgaactgtcttcggaatctttctcgattctctgttttgcccttcgaaacacctgttacgcgccaccgcaagaaccttcccctttccctgggtttcgtcaacaattctcgtcaatatccaactatggccctcaaggctgcctcaggttctataccaagtgcagacacaagtagtgccgataaggaggaagaaaagtctgagacatatagtcataacatgacagaagccatgggtgctgttttgacttataggcatgaattaggaatgaactataatttcatccgtccagacttgattgtgggatcatgcctacagactcctgaagatgtagacaagttgcgtagaattggagtgaaaactatattttgcttacaacaagattcagaccttgaatattttggagttgatattaatgccatacgagaatatgccaagacatgcaatgacattcaacacttgcgtgctgagataagggactttgatgcatttgatctacggaggcggcttccagctgtagttagcaaattatacaaggcaataaattccaatggaggtgtaacatatatacattgcactgctggacttggaagagctccagctgttgcgttggcttatatgttttgggttctgggttataaacttaacgaggctcatacactacttcagagcaaaaggtcgtgctttccaaaactggatgccattaaaagtgcaacagctgatattcttacaggcctcagtaagaagtctgtcactttgtcatgggaagacaaaaattgctctaccgtggaaatttcaggacttgatattggatgggggcagagaatacccctaaattttgatgacaaagagggtttgtggtttctcaagagggaattgcctgaaggactctacgagtacaagtacattgttgatggggaatggacatgcaacagcgatgagcttataacctctcccaacaaagatggccatgtcaacaattttattcaagtccttgatgatacaagcagtgttcgtgcctctcttcggaagagattgacggctgatgatcctgatctcacaacagatgaacaactcagaataaaggagtttcttgaagcttgtcctgatgaggattagtgaaccatcaattcacgtggttgttgatatgaaaaatactagatgcgcgcatacatgttacctaataagattaatctaaaccttacaatatgttgggttcctgcggtttattgagttccatagtaatcaaatgtcttggaaattatttaaatagcaccatgaccttcaaatttcaatgtaccatgaaatagaatgtggctataaaatgagttttacatttatatcctcatagatgcagatgtaatggtatgttgttgccggtttatgtgaaccatacatattaatggttaatgaatgaataaagtattgttaaaaccatgacatagaatgtgactattagatgagttttacatttatatccacatagatgtggaaataattgtataatgttttcgcaannnntgaannaccct

SEQ ID NO: 59605 - DNA, 982 bp, Glycine max
  Clone ID: PAT_MRT3847_24835C.1
gtgagtgtcactgaactaaaaaatgaactgtcttcagaatctttctcgattctctgttttgcccttcgatacacttgttacgcgccaccgcaagaaccttcccctttccctgggtttcgtcaataattctcatcaaaatctaactatggcactcaaggctgcctcaggttctataccgagtgcagacacaagtagtgccgataaggaggaagaaaagtctgagacatatagtcatagcatgacagaagccatgggtgctggcaaactgtgatggaatatttcaaattatgggaataaaccttcattttgtctggtccgatcaattctaacattcttagttttgacttataggcatgaattaggaatgaactataatttcatccgtccagacttgattgtgggatcatgcctacagactcctgaagatgtagacaagttgtgtagaattggagtgaaaactatattttgcttacaacaagatccagaccttgaatatttcggagttgatattaatgccatacgagaatatgccaagacatgcaatgacattcaacacttgcgtgcggagataagcagggactttgatgcatttgatctacggaggcggcttccagttgtagttagcaaattatacaaggcaataaattccaatggaggtgtaacatatatacattgcactgctggacttggaagagctccagctgttgcgttggcttatatgttttgggttttgggttataaacttaacgaggctcatacactacttcagagcaaaaggtcatgctttccaaaactggatgccattaaaagtgcaacagctgatattcttacaggcctcagtaagaagtctgtcactttgtcatgggaaggcagcaattgctctaccgtggaaatttcaggacttgatattggatgggggcagaccaaatcggagaaaattatatatctgtagaaattggcagtttgtccccggctgttcaaa

SEQ ID NO: 59606 - DNA, 289 bp, Glycine max
  Clone ID: PAT_MRT3847_24836C.1
aattcggctcgagcaaaaagattcaacaaagaacaaaagtataagcacctaagagtgcagaattttccatcacggaatcctatcaaactggtaaattctgcactcttaggtgcttatacttttgataggattccgtgatggaaaattgcattataagtatgattagttcttcgctttataggttgcaatatgtgtaaaacttaagcgattggaaattggcttaattttgtaacattccagagatagatatagcttttaaaatggtttatgaccaacttttttccaaaaa

SEQ ID NO: 59607 - DNA, 649 bp, Glycine max
  Clone ID: PAT_MRT3847_24837C.1
tatgagtacaagtacattgttgatgggaaatggacatgcaatacagatgagcttgtaacctctcccaacaaagatggccatgtcaacaattttattcaagtccttgatgatacaaacagagtccgtgcctcccttcgggagagattgaccggtgatgatcctgatctcacaacagatgaacgactgagaataaaggagtttcttgaagcttgtcctgatgaggattagtgaaccatcaatgcacgtggttgttgatgtaaagtactagatgcacgcatacatattacctaataagattgaatctaaaccatagataagatctctgttgcagttataatgctgagttgctgcagtttattgagttccatagcaatcaaatgtcaccatgtctttcaaatttcaatgtaccatgacatagaatgtgactattagatgagttttacatttatatccacatagatgtggaaataattgtataatgttttcgaaatacgtgaattaaacatatttatggttagatgaatgaatggattaagtattgttataaaaaaaaaaaaaaaaaaaaaaaaaaaaaaaaaaaaaaaaaaaaaaaaaaaaaaaaaaaaaaaaaaaaaaaaaaaaaaaaaaaaaaaaaaaaaaaaaaaaaaaa

SEQ ID NO: 59608 - DNA, 246 bp, Glycine max
  Clone ID: PAT_MRT3847_24838C.1
tcgcccacgcgtccgtacggctgcgagaagacgacagaagggggcatagtggaaaaagaagaaattgctatataagggggttaaagatctaatgttgggtgatgaagggaaagggattcacccaagaattggaaagcttaaggatgcctgtgctgatgctttgaaagaccttggtcctctacaagagcactttccccatttggcactgaattggagaactgaatttcaagatggccatccagtaaa

SEQ ID NO: 59609 - DNA, 439 bp, Glycine max
  Clone ID: PAT_MRT3847_24839C.1
ctgttttgtaaagcgtgagacaaagagagagaggaagatgatgggggaaaatgccctagtgtgagttgtgatgctaggccgactcacatctaagatacgctatctatggctttttacggatgcgcgacccgcgtgggtgaattcatagggcactattgctcgacttcctcgtccgagaaggcgagtctgatatagcacctgatagagagaacatgcgctgatctgaaggatgagatagcgggtctggtggattcgacttgcgacatagaggatgctcagaaggacctgaggaatagaggcaaaggtttggcgttcaagaaatcctctctaactgcctaccaaggccttctcgctctggcccactgccccaccaaactcgatgtcattgagctcaagctgtgagaccgacttcgctgcccgaatcgacatattacaaccc

SEQ ID NO: 59610 - DNA, 144 bp, Glycine max
  unsure (1)..(144): unsure at all n locations
  Clone ID: PAT_MRT3847_2483C.1
cnnnttaaacgtacncntagncaaactnggaattcaactcgagagaaataaacntntgnnagngngaagtgagnganaaaacntaggnagngnaaannaatggaggnatagtgaaacatggagntgaaaggngngcggaaatnt

SEQ ID NO: 59611 - DNA, 176 bp, Glycine max
  Clone ID: PAT_MRT3847_24840C.1
cgtgggccgttgaattatgcgaccatgcatttccttggttggactttatttgatctgtttgttttagtagataagtgtttgatccagtgtaggctcggaataataaatgtgtcgtaagactaacattggagacaatcatgtatccaaatccttcatatatgagagaatattgtgat

SEQ ID NO: 59612 - DNA, 385 bp, Glycine max
  Clone ID: PAT_MRT3847_24841C.1
cccaagggaaatataaaaaaccttttttgtttaaattacccatttacctggggggggttccctacttccaacaaatttttgtcaattccaaacattttaatttaagttcccttttaagggatcatttcaacatacccatgactataaatttcattcttttttgggaaaaaagctaaaacacatttgttaaaaatttagtagtcgaagtacgtgcgtaatttttttggggagtttcacaatataaactcaacttgagctttccaatcatttaaactgaactactttttaatttggggaaacagctaagggggtttactgcctccacctgaaccaaaagccccaaacccaccctttctttggttgttaaatgctcaaaaaccaccac

SEQ ID NO: 59613 - DNA, 454 bp, Glycine max
  Clone ID: PAT_MRT3847_24842C.1
ctatcatggcggtggtctgattacgctgcagggtgactatgatgcatccctaacctccctctaactctgttcgccggcacgcccgcaggactgatcatgctatctactaccacatcagcatatagcctgaccacaatgcccagacccaagtcatccctgcctatatacaacctcttctcgatcaatttgccattctctagcaaccccctcattccttgcctccctcgcgagccactgaccaccacatacacctattacccaatatggcccacgtacatgtcaggccctatcgttacccgcactaccagataaaggaaatcgaggaccatgtcgattcgatgcttcaacaagggctaattcaacccagtaccagtccattctcgtcgccggtactctatatgaagaagaacgatggctcgtggcgcttctgcggtgactaccatgccctgaatgc

SEQ ID NO: 59614 - DNA, 939 bp, Glycine max
  Clone ID: PAT_MRT3847_24843C.1
ggctccggctcgagccgcgccggaggagcagaaagaaaacaaacttccagagttccttcctcagttctctctctttctagaatcttccaattccaaccttattttttcttcaataacaccattaacttactgagtagcgagaacgagtcatggaatccaaacccggtcaaactatcaagctcctctgcagctacggcggcaagattctccctcgcgccaccgacggcgaactccgttacgctggcggccacaccagagtcctcactgtcgcccgttccatttccttttcagaattgatggtgaagctaagcgagttctgtggttcgtctgtgatcttgcggtgtcaattgcccaagggagacttggagaccttgatctccatcaccaacgacgaagatctcgctagcataatcgaagaatacgaccgtgcctcgttgaaattggcgcatccgttgaagatcaaagccgttctatcgccgccgaaatcgacgaagaaaacttcgcctgttccgtcgtcggcgtcgtccagcgccactcactctccgtccggatcgccgcacacctccacagaatcgctgccgtacgcggcgttccaccgcatcggccgccacaaccgcccgccggttgtgtatgctatcggcgcggcgaaggcatgttgctacacgcagttcgatgggagccctaggttcctgtaccgtggacctcactgcaattattactgccactgaggcgaacgaaccgattttattcactgtaaatacagctgcaagagaatcgctattacgaagttgattccatacaaacgatgatgacgacgaaaaatatcaaaggaccaaaaaaaataaaatagagagaaagagtggactcttaaatacaattaatttttttttaattttgataaaattttagaaatggatgagttgaggttctaattttttt

SEQ ID NO: 59615 - DNA, 544 bp, Glycine max
  Clone ID: PAT_MRT3847_24844C.1
cttcaactgagtctttttttttttattcttgttttcagtttgccttcttcacctgggtctttccctctttttctgattcttgttttcagtttgtcttcacttggatcattcactctttttctatgttttcagttcatcttctctgtttttttttttaaattatattctatttttttaattcttctctgttttcaattcttagtctctgttttcaattcatcttctccgttttctctgcattatagatattttttctttttctgaattctaatatttttactgtgtttgcatttctttttatgattttgttgttgctttgaactcttgaactaaataaaattgatgttgttaatagtttatgacaatgttcttatgagacttgtgatatttagactttagtctatggttcttgacgcattttgtttgtatttttattttattttatttatatctgatttttttagtatttatacatatatattatttttattttgtctgccatgccatcagccattagctgtcatccgccattcataatgctttg

SEQ ID NO: 59616 - DNA, 336 bp, Glycine max
  Clone ID: PAT_MRT3847_24845C.1
ctcttgaaagagcaaaccaagtccacattcccggcgcaggtttctttcttcttacaatttaaacaacatatggcacccattaataaaacttaaagcctgaattatcgccatgtcctacccccatttccaataccttcccaagtattaataaaactcaaaacacccagtccggcacaagcattgactttaccatggcagaagtgggcccgccccctacctgaccttgctcattcaatgttaaaaaattaccccctatctattgataaggtgcatgcagccaaacattttatccctcaacttctgaaattcagcctctttatggatgtcctcaccctc

SEQ ID NO: 59617 - DNA, 1034 bp, Glycine max
  Clone ID: PAT_MRT3847_24846C.1
tacggctgcgagaagacgacagaaggggaagcataagcaacacgagttgtaaaacgcgggaacgcaaaagcgcgcgggaggaaatgctgctgagtaccagtaacctacagttttctcggtggactttcttcaaacaccttacgccacggaaattcaaattagctccaccactctgtcagcacaaatccgtagccactctctctcacttcggaatcctaacctcccgccagaaagaccagattcatctctacgtcgaaactcttcttcaatggaacaagcgcatgaatctcaccgctgttagagaggtaaatgaagtgatggagaggcacgtggaggattccctcgcgattttgcctccgctcagcgactgttaccgctcgcactgcagcgcttcgtgcgataagctgagtctcgtcgatgtcggaaccggcgctggccttcccggagtagttctggccatagctcgccctgagtgggatgtaacgctgatggagtctatgaacaagcggtgcgtcttcttggagcacgttgtcggtgttatcggttcctcaaacattaaaattgtaagaggaagagcagagagtttagggcagaatccttgcttcagagagcaatttgacatagcagtggccagggcggttgctgaaatgagaatattagctgaatattgtcttcctttggttcgtgtcggtgggttgtttattgctgccaagggtcatgatcctgaggatgaaattaagaaagctgaaagtgccatccagaaggtgggtgcatctctattgcaagtatgctcagtggaatcgcaaagtccatatggtcaacgaactgctgtcgtatgttcaaaggatcgtcctaccccaatgaaatatccccgtgatccaggtacaccagctaaggagccattataaccaagttgatgctaattgtgttggctgcttttattttatttattttttcttgccattcctatcactattcttgaaccaacttgaaacattttgctaccaagagaggccagctgtgtccaccaatgt

SEQ ID NO: 59618 - DNA, 444 bp, Glycine max
  Clone ID: PAT_MRT3847_24847C.1
agctaaaaccataaagatgtttaacctcctcatcaacctccgtttacagagaatcacacacaagggtactaaacatctttatgggtttagctttaaaaaaataaaaatccaaaattttggtggttcctcttgggaattttttgagctcaaattcatatttccattcaataaaggagcaactataattgagttcttaagtagcaaaatataaagggttctgttatatctctaaagcatgtcacattacttcatgacaagcttcaaaggtttaacctaggggcaccataaccatacccacgagaaaaaaaacgttgtacttgtcaagggtattcctgtttaaatgttaaaaacactggagagcaaggcctggaaatgttggttggtggtagaacttattggaccatttatcaagaggagttaaccaaaagtatccgataatggaat

SEQ ID NO: 59619 - DNA, 492 bp, Glycine max
  unsure (1)..(492): unsure at all n locations
  Clone ID: PAT_MRT3847_24848C.1
tcggctcgagggtgccacaaggcccgctccctctgcctctagccctgcctccttcaagacctgtggctcttttctncaaaaagaaggctgcccctcccaaaaaagctgcagctgctgctcctgcccatgatgagcctgcccagtggtatggtcctgacagaagtttttttttnggggggggtgtccccgcacccacctcacctcccaaatacacccccccnacacggggccggggggggccccccccccccaccccccgccccccacccccctccccccccccccccccccccccccccccccccccccccctcccccgcccccctcccccccccccccccccccccccccccccaccgccgccccccccccccccccccccccccccccctccccccccccgcccccctccccccccgtccccccccccccccccccccccctcgcccacccccccccccccccccccccccccccccccccccccccccg

SEQ ID NO: 59620 - DNA, 457 bp, Glycine max
  Clone ID: PAT_MRT3847_24849C.1
ccctcgcgtccgcccacgcgtccgggaccaggggggcgtttataaaggtcaagacgagtagcattaggtggatggaaagagaaatactaagtctccgtacactggaccacccacacaggatgaacttggaaggcatactcacttcacaactatcaaatagtatacaccttggataaggatacatggagcatgaccttgctggtctagtaggatctggtgacataaatgctaccatatctcatgtcccaggggaataataactccacttctcttgagactatgagattccaagattatggcagctttcgttgggggagaatcctcgaatggggttactagcacgttctgggcacactgagatgacagaatatggcttaatgtaaaaggcagggaagaaaagatcaacttctatactggaaccttggcgatttgtgtggttgaaaaccaatgcaaaaat

SEQ ID NO: 59621 - DNA, 1171 bp, Glycine max
  Clone ID: PAT_MRT3847_2484C.1
cattttgattcttctgcaggagatcatggacaaagaaaatacaaatgggcctttacattttgatctgaatactggtgcaaagattccatcggttggtcttggaacatggaaagctcctccaggtgttgtgggtgatgctgttattgctgcagtcaaggctggttacaggcatatagattgtgctaggatatatgataatgaaaaagaggtaggggaggctctgaaaacactattttctactggggtagtacagcgtagtgagatgttcatcacatcaaagctttggatcagtgactgtgcacctgaagatgtctcaaaggcactgactaggactcttgcggacatgaagcttgactacattgatttatatcttatgcattggccttttaggacaaagttgggttcaagaggttggaaccctgagaatatggctcccttgtgtcttccagagacatggaatgcaatggaaggtttgtttgcctcgggtcaggcacgcgcaatcggggtgagcaacttttcaactaagaagctgcaagacttgcttggatatgctaagattccgccagcagttaaccaagttgaatgccacccagtgtggcagcaacctgctcttcacaatttgtgcaagtctaccggtgttcatctcacagcatattgtcctttaggctctcctgggtcatgggtaaaggggcaagtcttgaaggaaccactgttgaaggaaattgctgaaaagcttcacaagtctccagcgcaagtggcattgcgttgggggactccaaagtggtcacagtgttcttccaaaaagtgtaaatgaatctaggatcaaggagaaccttagtttatttgattggtgcattcctcctgagctactctcaaaattatcacagattcaccagcaaaggttacttcgaaatgaatctgctgtccatgaaacttgtagtccttacaaaaatcttgaagaattgtgggatggagaaatatgaaatgcagattacttttgatgaagctcgggatgtaatttgacattgaattcttatttctgatgcaaattgtagaaatgttttaacatttgtattgtctgaagacaatcacccctctaccttggggttttatgtgaatcctcacatatgattatatgaacaaaaagaaaatttgacccattctttaaaaa

SEQ ID NO: 59622 - DNA, 104 bp, Glycine max
  Clone ID: PAT_MRT3847_24850C.1
gaattcccggcccggcggacgcgtacgcttaggcttccgaaaatgacccggcttagattttaagcatcactctgagctatcggggatagtagattttcaaagac

SEQ ID NO: 59623 - DNA, 195 bp, Glycine max
  Clone ID: PAT_MRT3847_24851C.1
cgcattcacgccatccacacgctcgtaagctcggacttgggctcgaggctatgatattgattatcattaaaaaaagaagatccattactgcgggggtgccggccaccgaattcatataccaagggcatgggcctattgatgacggatctatgaaatattattataaccaaaataaacccttgtacaaaaaacaaa

SEQ ID NO: 59624 - DNA, 857 bp, Glycine max
  Clone ID: PAT_MRT3847_24852C.1
ccacgcgtccgatgaagttgagttgcaatgggtgtcgcattctccgcaaaggttgtggtgaggattgtgccataaggccatgcctcgagtggatcaacactcctcaggcccaagccaacgctaccctcttccttgccaaattctatggtcgtgctggcttggtcaacctcatcgattctgccccacaacacaatggacctgctgtattcaagtcactattgtatgaggcatgtgggagaattgcgaatccgacatttgggtcagtgggcttgttttggaccggtgagtgggcccaatgccaagctgccgttgatgctgtgctagctgggtcccagatcaaggtcgtgggagcttccgattcgcaggggattgcgacacatggcgacgagcatgttgcccaaatccttggcattcgccacgtgtccaaagatgctgaaatggaccatgtgaaaggaagagccaagaagatcaagagatctaggacagtgatcaagccaaagccacaagtgagttcaattgactcggctgcgatgttgaagctgacttggagccgtgagccaggaaggtccgagggtgatagtgaggaaactgtggaagctatgttggtgagccaaaacaagccgagtcgtaatggtggagttgagatggatttggatctcactctcggctaggcttctactgttagtgaagtgttgctaccaaatcaatttagtaatagaaaatagcgttgtttttaatattttgttttatattttactcaaaaagtattttgttttattcggcatttgtatgtttttcttccgtgaaacaggatcattgggcatagccaaatgtaaatgttgttggggatttaaggt

SEQ ID NO: 59625 - DNA, 135 bp, Glycine max
  Clone ID: PAT_MRT3847_24853C.1
ccggcaatattgcattaaattttttatccaagatcacacgtagatttatcgctttcttttgatataaagtgagcatgtgtaaacgggcgtgcgccagtgcgttcataatgatgacattttggtaaagctttattt

SEQ ID NO: 59626 - DNA, 420 bp, Glycine max
  Clone ID: PAT_MRT3847_24854C.1
ctggggaaaaaccggggttaatggaatttttccccaaaaaaaaataaaaggtttcccttttttttcgcttttacctttggaaggatttttgggggggccagaaatagaaaggcccccaatttggaattttttattaaaatcggaattccctaaattacctaaaaaatcctgggttttttaacaaccgaataaatttttaaaaaaaaaaaaaagggaaccccgccctttaaaaaagatataagggggcctttttttataaatcccccaaaaaaaaggggttcctaaaaaaaaacaaaatttgggggattttttttttttttaggggttttttcagggaattagtttcaaggccatcccataagggggggctttatttaggggggggccctaaacctaccttttgggagggatttggatttt

SEQ ID NO: 59627 - DNA, 217 bp, Glycine max
  Clone ID: PAT_MRT3847_24855C.1
catgtgtttgacttgactcgtccatcttcgtcgttatcgtctgcttttgttgtttgtgtgattgttctttctctcatctgaaaatgtcttgctgcggttgtaaatgtggttgcggaagcgcctgcaagtgcggcaactgctgccgatgctgctagatgtatccagacttgagcgactccgagtcaaccaccagtgagaccttgggcatgggagtggc

SEQ ID NO: 59628 - DNA, 315 bp, Glycine max
  Clone ID: PAT_MRT3847_24856C.1
tacggctgcgagaagacgacagaagggatacttgagatgtacaaggaggcagggctgtttgatccggtagctagacctgttaaagtgacacgtgcttacgataaaagatacttaccttctagaacctgtttggcacattcatactagatttgtacatgtgccaccaacaacggcacccggagcatcaacaacatcgtctctagtcttgtgactgcttgatttcagctaccaacatgcacacatacattactttttttgaagatgattatgggatcttaatgattttatttgactgtggaaacctgtggaacaact

SEQ ID NO: 59629 - DNA, 1251 bp, Glycine max
  Clone ID: PAT_MRT3847_24857C.1
aagtgaagtcgtgcaagttccttcttcactttcacgacactcactcacacaccatggatttgctctcaatctctccctctcaccctttaccttcttccattcgaaccctttcctcaaaccctaagccacccatttcctcctccttcttcttcatccccaaaccccattcacgcttctccaaaaccccaccaaggtgcgtcttcacgccggcctcgccaatcccctccaaaaacacaaactttgggtcccagtttcggaaccctacgagcctcaccttcgagctctcctcgccccagactccctcgacggcggcgagaggcgcggagggcgacgtgatggggctgttgctgagagagaggattgtgttcctcgggagcagcatcgatgactttgtggccgatgctatcatgagccagatgctgctgttggatgcccaagaccccactaaggatatcaggctcttcattaattccactggtggctctctcagtgctacaatggctatctatgatgccgtacagcttgtgagggccgatgtttccacagttgcactcggcattgcagcatcaacagcttctgttatccttggtggtggcaccaaaggcaagcgctttgctatgccaaatacacgaattatgattcatcaacctctaggaggtgctagtggacaagctatagatgtagaaattcaggctaaagaagttatgcacaacaagaataatatcacaagaattatatcaagtttcactggacgctcatttgaacaagtgcaaaaagatattgatagggataaatatatgtctccaattgaagcagtggaatacggaattattgatggtgtaatcgatagagatagcattattcctctcatgccagtgccagaaagagtgaaatcaacactaaactatgaagaaataagtaaagaccccaggaaattcctaaccccagatattcctgatgatgagatatactagctttaaatggttgataatgttatatccttgaattttatgttacggtgataacagaattcaacatttttgggtaaagcttgaggatgctggaacaaaccctgaaagatttaggattgtcttatatttttgtcttgcattttttaattttatttcgtgtgggtgagtgaaaaattatggttcagctatggagaattttgttggttatcattaaacaaaaaaaaaaaaagggcggacaccgaatagtgagcacgtaaacccggaaattaaaaacgaaccg

SEQ ID NO: 59630 - DNA, 526 bp, Glycine max
  Clone ID: PAT_MRT3847_24858C.1
cagtaaagcaagtgaagtcgtgcacttccccaacactcacaccatggatttgctctcaatctctccctctcaccctttaccttcttccattcgcaccctttcctcaaaccctaagtcccccatttcctcctccttcttcacccccaaaccccattcacgcttctccaaaccctccaaaacccccgcaaggtgtgtcttcacggcctcgccaatcccctccaaaatcccaaactttgggtctcaatctcggaacccgggcctcactttcgagctctccgcgccccagacgccttcgacggcggcgagaggcgcggagggcgacgtgatggggctgttgctgagggagaggattgtgttcctcgggagcagcatcgacgactttgtggctgatgctatcatgagccagttgctgctgttggatgccctagaccccactaaggatatcaggctctttattaattccactggtggctctctcagtgctacaatggctatctatgacgctgtacagcttgtgagggccgat

SEQ ID NO: 59631 - DNA, 320 bp, Glycine max
  Clone ID: PAT_MRT3847_24859C.1
tttttaacgacttgcttataagatataactatgaaaaagtgctgttccatgctagagctaggaggatgcttatacaatccttaaaaaatttagcttctttgtgtgtactatggaaatgataacttaaataccgttcatgaatatgtcaagccttactttattaatcctaaacaaaaaagctttctatctggtgataatatcacccttactgatgagctagacaaaacgtgtgcaactttgcaaatccagaaaagctagacaattgtcatttttttatatataaactttaaaaaaatctcttatgttttgagggtgcttcc

SEQ ID NO: 59632 - DNA, 376 bp, Glycine max
  Clone ID: PAT_MRT3847_2485C.1
atttccgggtcggccccttccttccgcctgtgagaggacaccacaggggggggaggcattgtcaaactcaagataaacttatctgagggcatatggcctcttcattgcttgcactctctagcctcaaacctccccctcccactgtttagaaatgctcacttagaggccttcccttcctctcaaggaactcctcttaattcaaagttgtggccagtggtggccagaagatcaagactgacaagccttatggaatcaatggtggcatggctttgagggaaggagttgatgcatctggcaagaaaagaaagggaaagggcgtttaccagtttgtagacaaatacggtgctaatgtcgatggttacagtcctatctacca

SEQ ID NO: 59633 - DNA, 485 bp, Glycine max
  Clone ID: PAT_MRT3847_24860C.1
gctttccagaagcatcacccacaccaacatgaagttctctcacgccctcgtatgggccaccgtggccatgggcctcggcgccgacgcgaaattgtttggcaaagacaagcccgtgtacgaagactggtccctcgagcagtcccttgcgttcctcaaggagcagggcgtcaaggtgcgcgactcgcagtcgctggaagaggtccgcaaggccgtcctcgagaatgccgacgcggctgctacctggggcgcaggtgccgcgggcaaggcgcaagcgtactttgaggctggcagcgccgctgccctggaggcttgggacgagagccagctgcgagagtatcttctcgagcagggcgtggtttcgccccagtcgacgcgcgagcagctgctcgtgcttgcgaggcaaaaggcgtctgccgctttcacggcaatctatggccaccctaccgaccaggccgcgtcgtctgtctcgtcggcatactatgacg

SEQ ID NO: 59634 - DNA, 211 bp, Glycine max
  Clone ID: PAT_MRT3847_24861C.1
gcgctctctcgtgcgaccacgcgtccgatcctggtctctgggtactatacaagtgtgcgcaagctatcacctattaatcctaaatgaccttaccttacgactcagggcagagcagacctgacacccacagcgcacgtgaactatttatctacactggagaatggcactagagttcacgaactcggtggccctgaagttgtgaagtgggagg

SEQ ID NO: 59635 - DNA, 688 bp, Glycine max
  unsure (1)..(688): unsure at all n locations
  Clone ID: PAT_MRT3847_24862C.1
ttacaatagaatctccctgtatatatgaagaatatatttgtaatttttaggataggtttgttttcctattttccctctttctcataatatgtctagcctataaatagacattagtgcttgtattgcaaaacacactcgataatattcagttttttctcttttcaaatttcaagtaggtatcagaactctcaatttcaagggctccgctcttgctgccgtccaccactgcctgtcaccactcagctgccaatttgaccagtgtgaccataccggatggggtgtcatctccagattggcttgtccccaaattcacgttgccttccaccaccaccactacacatgcttcttcccaacacgtgaaagccacataccattcctgtgccaaccactcgccagcacatagcaagtagccgctgactcttctttcaggcctaatggttagtctttccttatctcatcccgtttagcttataaatagggattagtgcttgtattgcaaaacactcaataatattcacttctcttctcaagtgaaacaaatgactagatctaggcagcaaaactattaatatgaaatggatcaagacaaaaatgggcacttgttacagaatgtcacactcacagctaagggaagccaacagaagaccttattgntatgtgaatgggcgatactttaaaataacaatga

SEQ ID NO: 59636 - DNA, 601 bp, Glycine max
  Clone ID: PAT_MRT3847_24863C.1
ccacgcgtccgaaaaaaaaaaaaaaaaaaaaaaaaaaaaaaaaaaaaaaaaaaaaaaaaaaaaaaaaaaaaaaaaaaaaaaaaaaaaaaaaaaaaaaaaaaaaaaaaaaaaaaaaaaaaaaaaaacaaaaaaaaaaaaaaaaaaaaaaaaaaaaaaggggcgccccttttaaaaatccaaattttacaaccccgggaatccaaggaattattttttttttggggcccccaaatttaattccttgggccgggttttaaaaagggggggaggggaaaaccctgggggttcccaaattaattccctttgaaaaaaacccccttttcccaagttgggtaaaaacaaaaaagcccccccccatccccctttccaaaaatttgccccccctaattggaaaagggccccccccctttacgggccctttaacccggggggggggggggtttccccccaggggaccctttaattttgcaagccccttagcccccccccttttcgttttttccctttcttttcccccaaatttcgcggttttcccccggaaatttttaaatgggggccccccttaagggtcccatttaaggttttaacggcccctgccccc

SEQ ID NO: 59637 - DNA, 350 bp, Glycine max
  Clone ID: PAT_MRT3847_24864C.1
tcagtacagcacaaaaaggggagtgtggtacagatccaacaagacaacagtttgaggttgaggatttgggattggtaaagcgatgcaatgcgctgcgtctcgtcatcatctctttcgagtcatccctcagtcatattctgccaatccagcattctcatccttccattcatacatacacacatctgatcgcgtatcatttctcccatggagtcttagcgcatcctcaaggatcctcatcgacctgctccatgacctaccgatttcttgcatggctagtctagtcgctgatgacatgttgcattagcaaccaatgattttgggtcctgctcacattccctaggctagatgtg

SEQ ID NO: 59638 - DNA, 184 bp, Glycine max
  Clone ID: PAT_MRT3847_24865C.1
gatcttctcgtacttcccggattttgtggggaaggaagtaatcgccgagctgaagaacgatttgagcatcaaaaggacgttgcaatctgttgatcagttcctaatcatgaagctttatagcactagcgtggccaatcatgaacagtaccctcacatgctgtgtgtaaagaactgcttgatcaga

SEQ ID NO: 59639 - DNA, 453 bp, Glycine max
  Clone ID: PAT_MRT3847_24866C.1
cggacgagagcgcaacccccacgacaagagcacgaaaccccaaagggaaggggaacaagaacaccagcgaacacccccccaccgccaaagaaacgggccgaaggccagggaagggaacaaacacgcacccaccagccacaatgccggaacaaagcaaggaagccggtggcccagcaacgccaggcgaagaaacgaatgaaaaggccgacgggacagccggaccacaagccgaacacaaaaaagaaaatgggaagagggcgccaaaaaggaagcacaatcggggaaagaccggggacggaggcaacgaagccccgggaacaaaaaaaaccaacaacggaaaggggggcgccgaagccacaaaagcagggagaagggccccggacaaagcccccacagaacctgggcagagtggcaaaaggagcgcagagctcaccaccacggcagaggtccaaa

SEQ ID NO: 59640 - DNA, 378 bp, Glycine max
  Clone ID: PAT_MRT3847_24867C.1
ttgaattctcgacccgagcgtccgcatgctctaattgagatgtactatgatctggtttctgggggaactgagaatcacccggttggggagagtctgaagaataaggagaccgatggctccagagttgagaaggtgttgtaagcagttcatattgcatctaataaaaacactgttcctggagatatgtctgccatgcttcctgttctcatcactgactggaacccctgctcttactcctataggatctgttgaggaggattttgttaaggtagcacatgctcttagatgcatcagtgcagttggctgtgaagattaagggtcagagcacaagaacaaagctctaggacttcttgaccgcaattcaatcatcttctacct

SEQ ID NO: 59641 - DNA, 391 bp, Glycine max
  Clone ID: PAT_MRT3847_24868C.1
acgcaagttgcaagagccatatgcccataccgtaatgctctactagtgtacttgatctcggaacggcaattagattatggcttgccataaaatgaggttagccctaataaggatacactgtccaaaagatgacattctatgactgggaaagctagtatctgcatattcttcatacctaacaatgtctgtatgccttgattatcataaatcaatccctttcttggggaactcttgacatatatctagatctgaataactatagtccaaaggctatcacacacagagccaaggatctgactaccaacaaatgaaatatctagcccaatcatgatgcgagacaatgagagtagctgtcccactaatctacaatatcaacactagtatgctactc

SEQ ID NO: 59642 - DNA, 396 bp, Glycine max
  Clone ID: PAT_MRT3847_24869C.1
gtgaaaaaacaccacagatggtcactttcaccacttaaattctttatcataggcgtgggagtccaaatgcgtgcaacttaaactaattctcgatgactcccttattgacacctatgttattcctgctctcaaaactcacactcttcatacataattctatacattggttgttctctcttcctaacttgctttatctttcttttactgattattccatatcttcctttctacctacactgatgctaccataaactgtgttagaacagcaacatgatactttgtcacatgtaatgattaagaaggaataatcttcatacaacttattaaagtcaccttattcccagctactggctaacacattactctagatgatgaggcatttaactatacttagac

SEQ ID NO: 59643 - DNA, 382 bp, Glycine max
  Clone ID: PAT_MRT3847_2486C.1
aaaaaaaaaaaaataaaaaaaaaaaaaaaaaaaaaaaaaaaaaggaaaaaaaaaaaaaaaaaaaaaaaaaaaaaaaaaaaaaaaaaaaaaaaaaaaaaaaaaaaaaaaaaaaaaaaaagaaaaaaaaaaaaaaaaaaaaaaaaaaaaaaaaaaaaaaaaaaaaaaaaaaaaaaaaaaggggggggcccccccttttgttgcttctccccccgggttttttttgggggccggttctttgggggggccctgctttcctttattggggggattttgaatcttggggacaaacggggatttagtgtcttctggggaaaaatattttgttgaaacaattcccccaacaataatcagcccgccattaatgggtatagacctgggggtc

SEQ ID NO: 59644 - DNA, 1040 bp, Glycine max
  Clone ID: PAT_MRT3847_24870C.1
agctaaaataatatcatttcttccgttcaaatcataacagcacttcgcgtgccctagctcactccgtcgctcctcacccttccggcagtgcgtggttggtcgtgggccgtcaccgaacttcaaaaattaagactatgttcagcttgatcaggaagggtggataattggcatgttcaaaaggtgtgaaagcaaaaaagatgcagcatagaaatttacttctggaaggccttctggaactgatggctctgattactccataccgtatggtaggatttccaaggtatcatggttgcgcaaaggggaagatgtccctatctgcactttatcactgtgggtgggtgttgctgtgatgctgttaaaagctgcaacacttgtatttaccagatagaagcagatgatccacagaataccctatcatctttttttttgagtgcactaataattgggaatagtagatcgtatagacaaaaaggtcacgaacggtttgttctttccaggattctaaactttagaacattgggtctcttgaagtcttctctggatgtcaatgatttccgactgtggcttatttatggtattttcattggttagcaaggtacaaatggttaccttatcggagttggttttgtttatctacatggtactcgttatccttttataagcctttgcgccagtcaaggtagcctctgatttccttatcttttatatggtgaaatccaaattttttttcctcattcatctatttacaacccattgatctatatccatgactatcttctatgaatgagatattttgagggaagctcaagagattttacctacaaaacattttaaagacatttgttaattatataggtttttgttgttttgtgtttcttttgagttctagtctagggaggatctattgaaccgtccccccaaaaacaaaacgtagtgttgaggagataatatttccccctattccggtagtgttccctactaattttgttagttctttttacaaagcaaatattttctaatgagaaatgagacaattcatt

SEQ ID NO: 59645 - DNA, 523 bp, Glycine max
  unsure (1)..(523): unsure at all n locations
  Clone ID: PAT_MRT3847_24871C.1
cttgggggggggggggggcgaaaaactaacgaataggaacggccaggtccagatataacagaaggtataggagtgcaacgataggctaagaatagagatggtattaaatataaagtgaaaaatgtgtaaaacgtagggtcggtgggcatctgtatgggttccccatcaacggccgcctagacctttacctcggcggcggcatacccgtactaaccgcagtcctcaccggtgttaagccatttgggttccgcataagccttgcaataaacaacttaaatagacacaatagccttaagtcgttcggtggcacggttggtattggaactgtactaaaacttgtgcccgtagtactaacctttaagcccgtcaactgcttattgcccgacaggcccgtacgcattgtattcacccccttattactaagatccgaattggtaatcctatttaggaccagaatggcgcgcctttacagcctcaacagctgtgccctcgccagtaactgncccggctttaacgacgtcac

SEQ ID NO: 59646 - DNA, 231 bp, Glycine max
  Clone ID: PAT_MRT3847_24872C.1
ccatctcaactccttctaatgtccaaagcacattgaaaatcatgatatgctaacacaagctttcactcatctattattgactacatccaatacaaatcaacatttcaacgcatttcagactcacccaaatcacctttaacttactaaactattttcaacctctatacaaaaaaatcctgtactaaatttcccatctaacctttacaaaccaccaccaatatcctcaactta

SEQ ID NO: 59647 - DNA, 636 bp, Glycine max
  unsure (1)..(636): unsure at all n locations
  Clone ID: PAT_MRT3847_24873C.1
acccaatgaacgaggtgacattctctatccgtaataaaaatgtgttaaaagttaatacaggttaaattctctaacagtaataaaaaaaatatgctaaaactgttttctacatcaggtgtgtaatagaacatcaattctcccaattgcatggcagataaggtaactggagataaaacaaatggcaaaccgtagaagcttagaaggtctccgccaggttacaacaaaatatatcccttctagggttgcaatatgatcacaaatgatatggaaaaaagaaacgatgggcatcatgaaaacattgaagcagtgcttaattttatgatgcatcttcttgatgataaaggtggaggcccagcccaaagcgtgcacaagctctacgaaaagcaattgcttctgccttctgtacaggatctccataancttgtgtcatctactgnaagcagtaccataaatatctccgcatcagtcccataaagggtaactctgtagacgacagagacagacttggaatcgggggaatagctgatattccgaacctcaccagaccactctacaataaacaagagcattagttattaattgatgaacagggttaggttatagtattaaattaccggnagcggtaaagaaaaagta

SEQ ID NO: 59648 - DNA, 127 bp, Glycine max
  Clone ID: PAT_MRT3847_24874C.1
tatacacacacgtgttcacgtatgcgtgcacacatacgtctatgtgtctgtacgcactcgctcgcatgcgagtacgcgcgcgcgcgtgtatgtgtgcacgtctgcgtgagcgcgcgtctacgtatgt

SEQ ID NO: 59649 - DNA, 452 bp, Glycine max
  Clone ID: PAT_MRT3847_24875C.1
aaaaagaacaggacggactaatttaactaaacatttgggggggcttaatagccaaaaaaacacccttttttcataacagatggtccaaaaataaaatcttttttccacttcgcccaattcaatcaacagatggaaaataaacatgagccttctttaaaacgaaaaactcaaacttaaaacccaactttttttttgagtttttcccaccttgcttttacccctgttaaaagtaacaaaataaagctgctctgcaacaaatggaatttaaatttccaagacagggaacgtcccgcgctgtatttttaaggaaagaaatgagaaaaacggcccagggaaggattaacccgaccaaaaaccaaaagatataagcttcttaggcagaaaccctaaaacccaaaaaacccttggagtaaagcctgttaggagctaaccactgtaaacaaaacccaatg

SEQ ID NO: 59650 - DNA, 506 bp, Glycine max
  Clone ID: PAT_MRT3847_24876C.1
gaaggaaggggggccaaaaacaaaaatcatggaaaaaaaaaacgggcccaaagaaaattatttttcttcaaagcccgaagtggtaagcaatcccccccccaatcggaaaaagaagcccccaaaaaaaatttccacatgtaaaaaactaaaaagcaacgggggggggaaattttccccctccttaaaaggacttaaccatgataaaaaagctaacccctgcgggaacaaaggctggaaaattccctttacgggtggaaaaacctaaaaagcctaaaaaatgttggcctagaggggaatcaaaaccaggaaatcctggggaaggaatgccgggaaaaaatgtagaactttctaaaggtgccggaaccaatggcctgggggacaaggaaataatgccttcaggaaattctgcggggaaaggactaaaatcttcaggaaaagcggcggggggaacaaaattggtggccccggaaaaagtgtctattaaaaccttatttccttggctgcaa

SEQ ID NO: 59651 - DNA, 477 bp, Glycine max
  Clone ID: PAT_MRT3847_24877C.1
ccggtacggactagctatgaggttcgacgcgctcgctcgtcggctcggcgatctgctcgagctaacaaccacgtatccgctttctacttataacgagtgaggagaaatgtgccgtctgaggatcggacagtctgagtcaaggaggtacccgatggagcactataacagactctctggcctggacatgccgcacaagtatgcacgcacgaccgcatcaacggacaacactgagctacgagagatggcaccctggctacgagcatgaaaactggcaggcaagcccgacatgatacttgaaaggcgtggttcaagaggccagactaggtcgagcaaccctgatgatcatgaagagctattggagaacgagcgaaactgtagagaggaccccaggtcttgatccaaatgaccctgtgcaacgagggaggcagtacctaaacctctgcaccatgtgaagggtgaccctaacttccgctctta

SEQ ID NO: 59652 - DNA, 349 bp, Glycine max
  Clone ID: PAT_MRT3847_24878C.1
gacggtttgcaattagcactgatttttttcacactgccggtgcaacactggcttcagagaagaaactttcgaacccaatgagggggataaaagtgctaaagctcgatctgaatatctctgatgaagagagtggagatcgcctaaccagagccgccaaggagccggaacatacttgatggccaaacgcacacagatttccaaagcaagggacactgatcgatcctttgggattagaagaaatgaaaagattgcatgctatgtcactgacagaggtgacatggcgatgcaactttataagaatgactcgaatgctaaagaatatgaacttatcagaaagaattacaatgat

SEQ ID NO: 59653 - DNA, 304 bp, Glycine max
  Clone ID: PAT_MRT3847_24879C.1
cacgcgagaggatccctcggggaattccaattccacattttcaagaaataatgaggcagaaatgttcatatatgaattggaattatttggtttcctattaggcctatcctgaagccaaaggaaatgaaatcggtattccttggggaattccacttccacatttttaagaaataatgatgcaaaaatgttcatagatgaattggcactatttggtttcttagtaggcctatcctgaagccaaatgaaatgagatcagtattcctcgggggttacgagctcgaattcgctataatgagtcgtatta

SEQ ID NO: 59654 - DNA, 453 bp, Glycine max
  unsure (1)..(453): unsure at all n locations
  Clone ID: PAT_MRT3847_2487C.1
ttgtttcttaaaacttaaaaaggaagaaattaaggtatagtccccttttttgaccgagtcaacccacgcgcagccacctcacaagtcacaaccacctcggcggcgttcaatacgtcgtcgtttcctcaacagaagaaaggagctcgcgccgctctgaattctcgtgcgatctgttttctatttcttcatcccggcgagttagttggtgtgatcggagatgatgggttcgaggggactgttcgggtggtccccgccgcacatacagcctctcacgcccgtctctgaggtgtcggagccgccggagtcgccgtcgccttacctcgacctcggtgccgagacctccgcaactcaatctatggaggtcgaggaggagatggaggaggccgacgagattgagccgccgnccgacgccgttcctttctacgcctctttgcctgcgctgaccaccttgat

SEQ ID NO: 59655 - DNA, 118 bp, Glycine max
  Clone ID: PAT_MRT3847_24880C.1
tccactcgtccgaacgcttccgagaggacaaccaaggggggcgtaaggcgcagtacactactgtgcacgggacacccgatttgctgctcaaaccactccctaaccttagatctcacac

SEQ ID NO: 59656 - DNA, 310 bp, Glycine max
  Clone ID: PAT_MRT3847_24881C.1
ctcactcgatcgggataaccctaatacttctatcatcatctattgatactggcccttacgatccttgcggctcttcaagcggtccacgatgtgctgagaagctcgcgcatccatgctcatataggcctgatcaacctactagcgactatccctttaatacagggaactagccatccaaggtcggtagcgcgaatatcatcatccatcagactacaatgcgccgatcgcagacgcatccactattgcccctgatgttgcattgcaaccgatggcgccagctcacagtcattactctatacgagcccatagg

SEQ ID NO: 59657 - DNA, 195 bp, Glycine max
  Clone ID: PAT_MRT3847_24882C.1
ctattttctgtctttatgattatcttttgaatggaaccgataccttaaagctctgggagaacgaaaaatataacagagagaggtacacctgagagagtatcatgaagccaccataacagccccatgactgttaggaaaagcaattaccataagccttttgtgtacagtctaatgggtgctccctgtggtacaccg

SEQ ID NO: 59658 - DNA, 326 bp, Glycine max
  unsure (1)..(326): unsure at all n locations
  Clone ID: PAT_MRT3847_24883C.1
gnggngcngagggnncaaagcagagcagaagngagaggaagagccgaaaagcaangnngaagcggggaccgaaacccgnnaccggggnnagnagggncacaancaagagaacaaaaaananncnnnncnncaacncaaaacccgangncnncaagaggccaaanncngagaccnangncanannnggggaggcgaaaanagaggacnngagcncncagnngcagacacaggcngcncaacagnncaggangccagananggganccngaacggcaaaacaagaagaagcngcngcngcagcagcgcaaccngaagaagagggagag

SEQ ID NO: 59659 - DNA, 391 bp, Glycine max
  Clone ID: PAT_MRT3847_24884C.1
ttttttttttttttttttttttttttttttttttttttttttttttaaaaaaatgcccaatttttgatttttttgaacaacttggggggataaaagggtacaaagttaaaaaaaaaaaaaaggctaataaatagtgctttctttgttcaggggaagaacccatttttcacatgaggggtgggatgatgttttatgttacagttactgtttttgccaccgttgcccctggggttataaaaatgggaactacgggaactagcgacattgttgtcttctctggacttaaattggggttcgggcccaggcgttctggaacctccggccccgggggccgaaaaacccccacacttttgacccctggtcaccgccaaattttgccgacggggggggc

SEQ ID NO: 59660 - DNA, 278 bp, Glycine max
  Clone ID: PAT_MRT3847_24885C.1
cttacatctatcactacaatacttcaataaaaatggaaactatcagccaagaaagcggtatgatcaagggtgttgaagtcctcttcttcgaagaagccgagatccaaaagatgagaggcaacacccccatcttcgctgccatgggtcccctcagcgtcctctacttcaaggactacaacagatttgtcctcagactcaacgattggagatatcccctcctcagaagactcaacattctggctctgacaagaactttgttctccccggtgccaacggtg

SEQ ID NO: 59661 - DNA, 280 bp, Glycine max
  unsure (1)..(280): unsure at all n locations
  Clone ID: PAT_MRT3847_24886C.1
acgcctcgaggtgccgcgnccggaatttccgcggcgaccccgcgtgcgtccacgcgtgcggccacgcgttcgtccacgcgtacgggttgaaaccgctgagatctgacacaggtggcagttgctctggatgtcgagtagatcgatcgatctgagacatgagcagctggggagctagtgaacatggaacctgtcgaactgaagaacaggttggagctgaagaagcaggtctgatggtgtctggggtggggcggtaggaccgatagctgtgggggcttgaagg

SEQ ID NO: 59662 - DNA, 249 bp, Glycine max
  Clone ID: PAT_MRT3847_24887C.1
ccaccctgtcactgtccatatctgcttctcatccaccctcagactcacacaccgttaaagtcacgcctcttgagactatctcacggaggccttgtggttggtatcagtatatttgaaagcaacatctggtaggccgctgcatactaatgagctcttcaagtctgtaattctgtccggaccggtgacagacacgtgtcatagctttcactattgtggatcatcataaacacgtcagtatgcataatcata

SEQ ID NO: 59663 - DNA, 668 bp, Glycine max
  unsure (1)..(668): unsure at all n locations
  Clone ID: PAT_MRT3847_24888C.1
ncgtcgcatgcacgcgtacgtaagctcggaattcggctcgagctttctttctttccttcttcgtccttcacatctggctggggagcatctgtcttcttgtactccatagcattggactgtttctttccagaacagcagaagaggatcacaaggaacactggcaacgctacagtcagaatgtagaccacccaaagccatggacgctcttcagctgcctccagcatctgccccactacacctggctctgcagccccatcagcagctttcttcaggccccacccatcattggcccagtcatcaactactcttcggtcaccactaatgataaagttgtcaaaaaagatgtcggatgtcatggaccagagctccaaaccaatagcgctgaaaggagtcatcctaaaaggttccaggtcttcaaagaaatctggattgggtattttccttggtttccagattccctggtagttaggattgtcaatcataggaggcttccatttgcccttataattggggttgtcaatcataggtcgctgccagacaccacacccaggggcggactcacacttagggttggcaatctgaggagcctcccattctccgtccatatcctcatcccaatcttctggtttctctgcatcagggtctggaatactagttctagatcgcga

SEQ ID NO: 59664 - DNA, 193 bp, Glycine max
  Clone ID: PAT_MRT3847_24889C.1
ggggaagggaaataggctgcatttaatttttcgaatacgattcttttgataacactcttaaacacttggaattttaagggccaattttaattttagggctaggagggggtaaaaaaaaaggaaaaggaagggtttaattttagggccagaagggggttaaagatataaggaagagacgggtttaaaccggttt

SEQ ID NO: 59665 - DNA, 378 bp, Glycine max
  unsure (1)..(378): unsure at all n locations
  Clone ID: PAT_MRT3847_2488C.1
cccagccggccttcgtccttttttttttaattcgaaaaatcaaattagtttgaatggtgctgagaaaaaatacttttactttgatgttgctgtnaaatttatgccagaccaccgaatatggatgtgtggaatgctgcgtacaggaggggacagaacttctcgaattacatttcaagaacaacatacatttatttgccagcttctgcattaacaccaacaacccaaactactatatatttttgcatctctagctagaattaacatggtggttttaattagaaagaaatttgtacccctccaagctgaaaccttttattttcgaatgaagacttattcatttgaaggttggcttaaattttttgcgcccctggttttcct

SEQ ID NO: 59666 - DNA, 120 bp, Glycine max
  unsure (1)..(120): unsure at all n locations
  Clone ID: PAT_MRT3847_24890C.1
gcngnaggtctacggtctacgtcnagctaacaaagttaagtaaactgtcgctncagtacngtatagatatataanggctgtggctttgacgagtctggtgaccctgncgcacggntctct

SEQ ID NO: 59667 - DNA, 238 bp, Glycine max
  Clone ID: PAT_MRT3847_24891C.1
ctcgtcgcaaaatgtttgacaaacctaagacgcgctgcttcactattctccctatggaggtgaatcttgtggtccgtcaaaagtttttaaattctgcgaggctcattctgaagaaaagggacaagcttagttgtcaagatggaatcaacccatactccatggaatggactgggtaggccaatagattactgcgtaagggcaatgacattttgtgaagggaacctgctcggtttgatgg

SEQ ID NO: 59668 - DNA, 287 bp, Glycine max
  Clone ID: PAT_MRT3847_24892C.1
gaacctttgggctgatttatgtgcttgcttatgtgcttgcatggtcgtgagaagatcatagaaggtgaacggtggacacggaattgaggttcaatgatctgttctcagaggaaacgcgaaaatcttaaatacccgcgagtgagtcaaggaggagaccgaggtcgagtcctactgtgatagactgtcatattactatcgacaaatctacgggataagagacgataccgacaacgcaatcgcatttgacgaaactaaagtgttcggcgtagccgaatagacgaaggagc

SEQ ID NO: 59669 - DNA, 935 bp, Glycine max
  Clone ID: PAT_MRT3847_24893C.1
gaaacctgaaaacgctcccgttcgcgggggcgccctcggtgtgctccccgacgttcttctgtcccgcaggtctcccgttagcccttcactcctggaggcatcttcggccgtggatcctgctaagatttctggtccttgtgcgcaatcaagtggcatttgagccattctgtatcggaccagcctgtcaagtgccgtgcttcagcccaagaatccggcctcctgccgcaaaagcaaggaaattaaaaactgatcttgctgctcagctcagatcgttgccacagctcgtggctgagcccacagatgcaagatcaaattcatttgttggtactcatgaatacttggcgcctgagatcatcaaaggagagggacatggagctgcagttgactggtggacatttggagtttttctctatgaacttttatatggtagaacaccctttaaaggttcaaacaatgaagaaacattagccaacgtggtgttgcaaggtctcagattccctgacaccccatttgttagtatccaagcgagggatctcattagagggttgttggttaaagagcctgaaaaccgtttgggttcagagaaaggggctgctgagataaaacagcaccccttcttcgaaggccttaattgggcgttaatacgttgcgctatcccaccagaactgccagacttgtgtgaatttggagtttcagagatgaccctacagtcccagggaaagggtgttaagtatgtagagtgtaatgcagcaggagagctagttgaatttgagttgttttgaagagactgctctttggcaagagtagcattcttgttatggattcccttgtttttggctctatgcttcacgtgtcgagctgcaacagttatgtaagcctatgttgtatattagttttgattataacagggtaacatgtgccttttgaggtatagg

SEQ ID NO: 59670 - DNA, 185 bp, Glycine max
  Clone ID: PAT_MRT3847_24894C.1
gtggatatggagctgcgcctatgcgaagcctcgattttcaagatgaggcactaggtgctcatgcttagaactgtgttgagactgatgcagatggatttttgagtggatattggccttagaaatccacaactaccgcgtgataatagacaacgataaagctttcatcgcggtgaaagaattttcat

SEQ ID NO: 59671 - DNA, 677 bp, Glycine max
  Clone ID: PAT_MRT3847_24895C.1
tcggctcgaggctcctttcttgagtgacctctgccacttctcaagggattttccagtaaacactgaccgtgtccactggacttttcccccatgcacccgtcagttttgtggcagttgtgcgtcccgcacttttcacctaccagatgggggtagtgatggtagagacaccaggcatctgtgttgggcccacacttctggacccagggcttgaaaaggtttgtcccaatttaaaaccattattattcaccccaatttttccttaaaatttagtgcccaacataattggattcattcaggcaggtgggaatccgagttacccctggacgggttattcccccgttgccagttgcttggaccgtgaatgtcagggagttccttgtttattatcagggagccttttgattgaaacccttgaagtattaaggccataaggccttttgtacctcccttcttgccgacaaaagcctttggaaagtggttgaaccgattagcttcttatatttgcaaaaaccttgtattaaggtcattttttcatttattttccctgaatgtcaatcagaactttgggcgtcaaggattcccaacccgttcttaccccgtttaattttataaagttcatgtacccatggaattctctaccctctttgaaaaaaaaacagtcattctttacttttcct

SEQ ID NO: 59672 - DNA, 567 bp, Glycine max
  Clone ID: PAT_MRT3847_24896C.1
ctctcattgtcatgagagacctcaaaattacaaaatgaaggaaaatggatgaaaatggaagatagaggtagatgggagctccaattgccgcgcacaaccctaggtttatgccctcccttgcaatcctaagagaatgtccttttatatcgagcccaaggcctttctctcgtcacttcaaagtgtggtctactcacttggcaagcttcaactcgctaggcgaattctttgacaattagaattctgaatgtcttttcttcacttagtggcatttactcgttggtcgagtttctcctcgctaggcgagttcttcaataattgaatttctacaattcttttcctacttcagtgtcctttactcactagtcgagtttgtactcgctaagcgagttcttcagatgacttgacacttttctttctctcttgaactgccatgtggccttgtctatgcacttgcgctcgctaggcgagtcatcatggatgacaactgcatttggtgctatttgacaaaagagtagaaactagtagaaaaaattaaatgttagttacagcctaggattctataaaaat

SEQ ID NO: 59673 - DNA, 941 bp, Glycine max
  Clone ID: PAT_MRT3847_24897C.1
cccacgcgtccgatcgggtctctctgtctctctcggatcatcaaaatcagaaagaattgggggaatggagaacaaccagcaacaaggcgctcaagcccaatcgggaccgtaccccggcggcgccggtggaagtgcaggtgcaggtgcaggtgcaggtgcaggcgcggccccgttccagcacctgctccagcagcagcagcagcagctgcagatgttctggtcgtaccagcggcaagagatcgagcacgtgaacgacttcaagaaccaccagctccccttggcccgcatcaagaagatcatgaaggccgacgaggacgtccgcatgatctccgccgagggccccatcctcttcgccaaggcctgcgagctcttcatcctcgagctcaccattcgctcctggctccacgccgacgagaacaagcgccgcacccctcagaagaacgacattcggcgccgccattactcgcaccgacattttcgacttcctcgtcgacatcgtcccccgcgacgagaccaaggacccccccgcgctcgtcggggcaacggccagtggggtgccttactactacccgcccaatggccagcctgccgggatgatgattggccgccccgccgtcgatcccgccaccggagtttatgtccagccgccctcccaggcctggcagtccgtctggcagtccgccgccgaggacacgccctacggcaccggtgcccaggggaaccttgatggccagagctgagcgacaaccatgccgaaacggactgtcaggagttatgaagattctgaacttgcttggcattttgattgcttgcaatttggaaatggttttgttaactaaatttttatgggatgacactatgaacctgttaactcgatgaacagcatgatttaactacttctgtacaaaaatttaaaactaaaccagtgatccttctgtgtg

SEQ ID NO: 59674 - DNA, 575 bp, Glycine max
  Clone ID: PAT_MRT3847_24898C.1
aattcggctcgaggctgcgagaagacgacagaagggtaccactaaatgaaaggctgcgtgttactgttgacatcacaaaattcaatatgttcgtcattaatttataatattcttccttaacccctgttctgaaagtaaagcatgattagtgaacctgagtaaatcagctttctgcgtcaaaatagtgctcctgatgctaattaacaaactttaaagaaacatgcaagtctctctcccattgatggtggaaaaggaaagctgaaaatttcgagaaaaatacattatatatatgaaccgtctatatttctccatttacaggacccatatgtccatttctttaacatatcgcccatgttgctcttctcaagttgatcatatctctatattcctcctctacatacgaatcatgctctcttttcaggtcaaatacagattaagcgcctctcgttaattgtatttgtagtcaacaaaggctatactatgcgaatcaggctttaaattaatggatgctaataaatgttttctacattattgcataactaatccaccatgcctggccctttaccttaccttaa

SEQ ID NO: 59675 - DNA, 302 bp, Glycine max
  Clone ID: PAT_MRT3847_24899C.1
ggctcgaggaacattaactaggattggagctatgccatcacttgacgacaatggggacttacgttgactacgctgacttacgatccttgctgtgctgggccgcagcctcatataccaacaggatatctttcgaacaataatctacatgcaatacgaccagttcaaatacgatctcaagcttaactaccgggtgagtgaaggtcttgcccacaagatctgcgattgacttatattggtaggtatctcattggctgctacaacaaatgcttcgccgttgcaccatgatgcaaatccatcaaatg

SEQ ID NO: 59676 - DNA, 1078 bp, Glycine max
  Clone ID: PAT_MRT3847_2489C.1
cttccctatcgcgcaggagaatgtgttggcttcttctccccgacgaactgtggaggcgaattctggagatcggaatcgagagcaacggtttcagttacaaggatctctgctgcgtctcaatctcatgccgccgccttcatcgcctctcctcggaagaacctctttggaaccgtcttctcttctctgactatccccaatcccaatctcacccttcttcttcttcttcttcttcttcttctaaatctctttacagattaaggtttgagagagacaaggagaggagaatagctgctcataggagggctgtgctgagaaaggaaagccaggttgccgaacattccagaaggctcaaagatatgaagacacgtctcgctcaagaaaccaccaaagccacgcaaactgctcaagacttgtccaatttgcgcaggctcagacaagcctttgtagctttgaatgtgtggcaaccagaggttgtccggggtaggcaaaaacaaatggtagagcaaagtgttgtgcctgctgaatgtcggatacatgcgcttgagatggaattcaagctttgtaagcaacagattctgggattggagaagttctataaagatgaaaagcgcagacttgatactgcaaaagaagagttggcatctatgaagtatcaccctgtacaggagcataagcccacaagtggaggggagaatgaacatgtcaagcggaagaagttgaaaatatgcaatagctgaagacgttgcattggatgatgagcaatgttctagacagatgaattttgctggtctttcttccattgaaactgggaatttgtttctgccatgaagactgactgcacaaatgattagcaatacctgttgaaaacttgaataagttaataaaaaaaagtcttaaaatcattatgtgtaacttaagagttaagatgacttagttggtcactcagttgtagccagtggacttcgaggaaaccttgtagtttgaggaaagcaaaaagcatatcataggagggagtacattatgtagtcattgtaaatttatgttttgttagtactttatattctgttgtgcgttgtac

SEQ ID NO: 59677 - DNA, 195 bp, Glycine max
  Clone ID: PAT_MRT3847_248C.1
taaaccataaactgtttataaaacttaaatggaaatgagaaggcaacttaaatcatccttaatcaacaaaggaattggactaaaaccctttaacttgctgagaaatacgaaacatctaagactcttcttactatcaaaacaaatatcagggcccatctccaacctacagcattgatattcgtcccccgccgttca

SEQ ID NO: 59678 - DNA, 226 bp, Glycine max
  unsure (1)..(226): unsure at all n locations
  Clone ID: PAT_MRT3847_24900C.1
tgtgaatgaagggatcttgtttgctccacacagtaaacatcatagatgtcaatgagttgctaaggaatattatttttgcagacgactctgatacatatggtatcatgcncgctagaagagcactttcagtccatacagtggcaccacatacgagcatgtgacagagatcagcagctctccccctggacgagttctcctcaagaatgcggcagttaccggctacgaa

SEQ ID NO: 59679 - DNA, 398 bp, Glycine max
  Clone ID: PAT_MRT3847_24901C.1
acattgatgaacacaaatggcctttattggtaaaaaaatggttcaggatggctcatgaataccgataggaatgggaagtaaaaaataagatctaattaaagccgccttaccacttagcatcaacttggttataatggcttcttacctggcgaacccggatcacggggatattttattggggtaggacgatcctttgaaataaccaaataatttgtagaccataaggacttttcaatggcactgggcctacttgcatatacagtgctccaaacttatggatggcactttaaaggtttgttaaatgaatccttaggaacattacctttggtaacaaaatgcaaccccccgacctgaaccaatggaagaccatattcagataatattcttatttgaaacaa

SEQ ID NO: 59680 - DNA, 232 bp, Glycine max
  unsure (1)..(232): unsure at all n locations
  Clone ID: PAT_MRT3847_24902C.1
cctaganttaccgagacttaccaatttcctaaccagacttntgttctttccctgatgggacggagccttncgggctacataatcatcccctttttnagttacggggtgtgacggggcctcacttaattatncgacgagncttccatttgagtggcgagtggtgaccgaaacttacggggtgtgcgtcaatatttttttggggtttttcngggtgtgctgngatttcacaaat

SEQ ID NO: 59681 - DNA, 442 bp, Glycine max
  Clone ID: PAT_MRT3847_24903C.1
ttaaaaaaaaacccccccttcacacttttttacaacatttaaaagggggggggaatttttcaaatagcccaaccttcctcaacaggggggtcttgtctaatttcctttttggaattaacccccccacccaccgaaaaaaacccccttttccaaatcttgcaaaggtttcccctttttaaaaaaatctggcaataccctgggaaacaaaaaaagctggcttaaaaattttccccccattttcaaaatcttgaaaaattcccaaaaaaatttcaaaaactgtaaactgtttgggattgccaataaggaaacccaaggcccctgaagtttgttttcccccctcaaaacccccctttttaaaaccttttttaggaccccctcccttttttgggaaaaacaattcccaggaaagggggtcccattttgcccccttacacgccccaaa

SEQ ID NO: 59682 - DNA, 473 bp, Glycine max
  Clone ID: PAT_MRT3847_24904C.1
cttttttttatatcataatcatttatatattactcacttacaagggattcatagccggggggtatatacaattcaacaatcaactgcacccacaccatccctccctgattaacaacctactaataccaatcttttcttaacccaaaactcgcgtgcttattacctcaaccccccatgtggcgggtatatatacttctctaaccaaaacactcgaataaaactcccctcggagtaaaaacaaaaaatccctaaagaaacatgccaccctaaagtgcacccaggtaaaaatcaaacaatattgctcgaaatggataaaactccactttggcaacccaatggtgcatacccgataaataagattagctagttctctaaatcctttacaatcgacaccctaagtttggcccatcaaagcacccccacattcttcataatgagcaaatttctatacaactaacctcgtacctctaatt

SEQ ID NO: 59683 - DNA, 177 bp, Glycine max
  Clone ID: PAT_MRT3847_24905C.1
ccacgcgtccgtacggctgcgagaagactacagaaggggaacagagaaaactttcaatctctggttttgtgagttacggttggttgactctaatttaaggagctggaaaaggtacataaattctaaagatgtactaaatgtgttacctaggtttcagttctgtgtatcaaatgtttt

SEQ ID NO: 59684 - DNA, 135 bp, Glycine max
  Clone ID: PAT_MRT3847_24906C.1
tgattagtcattatcatcttcataattcatttaccgtattgctttctttattttcggattagggtaactaacatcaatttttgtattttgcttcagtgattaattgtcacctctatttcaaagtctcatcttttt

SEQ ID NO: 59685 - DNA, 511 bp, Glycine max
  Clone ID: PAT_MRT3847_24907C.1
ggaaaaaaaaaacccaagcacagtaaaacaggggaagggacaaaaggcaaaagggggggggacaggacaacaaaaaaccaggggaaaaaaaattgggtaaaacaagggaacacccaaaaaagggggccaaatcaagcaggggaacccgacataaaatcccgctaaagggattttttttccaggccccccaaggcaaaaaaaggggattttccaaagggaaaaaaagggaaaaacaaaaacaaaggggttcaaaaaccttgggaaaaaaaaaacttgaaacaaggggaaaaggcttccccgaagaaaaaaaggcatcccaaaacacggacttttcgggggctgggcaagaaaggggattcttgcccccgcaaaagaaactaatccaaaaaggccctgtcaaaaaacaccccttttttaaaacctaaaatccaaagggggaagggttggggaagaaaaaattgacgaaggaaaaagcctttgcccacaaccctttcaaccggggaagccccct

SEQ ID NO: 59686 - DNA, 838 bp, Glycine max
  Clone ID: PAT_MRT3847_24908C.1
gtactttgtgatctacaattacatgctgatcattattatcattttatctttcagatgagctccattgatgcagccatagataagaggattcttgagagtaggctggctggtcgtatggcattttagatcaatctcatccatacactcttgtcaaatttcttcagtgataagggctcaaaatggtattttaataaagcttgacagcgcgtgttcaagattcctttatttaaggtccggcaagtaattgttattggtgcaattctttgccaaaatgggcaatgggccctacggttatggtggaatcgaaggaaaaatattgaaatggttctgatttcttacttcttaggaagttgcaaaactttgtttatttctcatttcataccttttctcccgttgatgtttgtagtcaacctttaggacgtggtactcaaaagagtattatatatttgctgtaatcagattattacatgttttgggtggaaaattgacggcaatttttggttggttatatgcttcgtaattagtgtctctaattgtgtaaaagacagcaaaaggtgtactttggtggagagacaaaaatacatattggacattaatttgttgctaatattcgaggagagtatgtgttgcaacggttagagagatctgagaaaacattgaggatgtgatactgcactgtcttgaagtagaaagacagttccattggagaatgcaagcaagatgattgtgtagaattcttttttttttaataaaatatcttaatgtaaacttatagttgagaattatttgaaaccattgaaatgtttaataataattctatttaatttgttttgagatt

SEQ ID NO: 59687 - DNA, 231 bp, Glycine max
  Clone ID: PAT_MRT3847_24909C.1
caagaatggatgatactggaagtaattcgtaactgtcgaatccatggatgctgcacttggagaaactcgatctcgaactcaagagccctctatgtttgagttagcacaagaggccggtgttactaccatgcaaccactcgtactgcaatacatgtctggctgattgcataacggctgggcctagatgtgctgtttgaacggcaacgtatgctcaaacgaatgtaaggcatg

SEQ ID NO: 59688 - DNA, 764 bp, Glycine max
  Clone ID: PAT_MRT3847_2490C.1
aattcggctcgaggcgtcttccctatcgcgcaggagaatgtgttggcttcttctccccgacgaactgtggaggcgaattctggagatcggaatcgagagcaacggtttcagttacaaggatctctgctgcgtctcaatctcatgccgccgccttcatcgcctctcctcggaagaacctctttggaaccgtcttctcttctctgactatccccaatcccaatctcacccttcttcttcttcttcttcttcttcttctaaatctctttacagattaaggtaccaattcattcgattctgcattttcaaattaaagttttttgtgtgattttcttgttcagatttttatcatttattggcttaattatatatttggtcacttgattataattaaaggttcgattggttcctcaactattaaaaagctcaatcatatcctataattgtttaaaacaccgttgagtctgagaaacccctttgagaattttaatatttcattatacaaaggacctgattgtagtattttaaacaattaaagaacttgattaaattttttaataatcgagagagcaaatagaacttttaattataattaaggggatgaatgttataattaagccttattatttataaaacttttcggtggtgaggtttgagagagacaaggagaggagaatagctgctcataggagggctgtgctgagaaaggaaagccaggttgccgaacattccagaaggctcaaagatatgaagacacgtctcgctca

SEQ ID NO: 59689 - DNA, 272 bp, Glycine max
  Clone ID: PAT_MRT3847_24910C.1
tgtctggcctgtgggattatctgaacgaggctgccatcaccactttctctgtccttgggctcttctcctcccaagctgccgccatcctcagcaccctccttgctgctgaggtcatccccaccactgtccggggccgtggcctgggcctgatcatggctctaggggcgcttggaggactgagcggtccggcccagcgcctccacatgggccatggagccttcctgcagcacgtggtgctggcggcctgcgccctcctctgcattctcagcatt

SEQ ID NO: 59690 - DNA, 826 bp, Glycine max
  Clone ID: PAT_MRT3847_24911C.1
cgccttgttgatagtcctcaaaaaaataaaatggctggagatgaagaaaaacttacaatagtgatgttcccatggctagccttcggtcacatgatcccaaaccttgagttggccaaactcattgctcgaaagggccaccaagtgagtttcgtatccaccccaagaaacatacagcgtctcccaaaaccgtcaccaaatacactcatcaatttcgtgaagcttccactccccaaaatccaaaaccttccagaaaacgcagaagccaccactgacatcccctacgacgtcgttgaacacctcaaagtagcctatgacgccctccaagaacctttaaaacgttttctcgaatcttccaaaccggattggctgttctacgacttcgtgcccttctgggctggttcaattgcttccaagcttggcatcaaaagcgctttttacagcatctgcactccacccttctcggggttcttaggacccccttcgtctctcatgggtaaagattcgttacgccaaaaaccggaagatttcatcgtttcccctccgtgggtcccgtttccgacaaccgtcgcatttcggtacttcgaaattatgagaattgtagacagtttgtcggccgaaaacaacaccggcgtatccgacgcgtaccggtacggtgccagtgctgagaactgtgacatcgtggtgattagaggatgcaccgagttccaaccggagtggtttcaagtgctggagaatatttaccggaaaccgggtctccccattgggcaactccctagtactgaccctgtgggggtgaggataccgacacgtggcggtgggtgaagga

SEQ ID NO: 59691 - DNA, 385 bp, Glycine max
  Clone ID: PAT_MRT3847_24912C.1
ggctcgaggatatgctccttctgagctctgatcaacgagaactaacggccggaatataaatgaggagggacagtgccactatgcattgggcgcccttgggctttgggattcccaaggtgcagctcgctagcttcagctatgctccttctggcacggccaacactgctataccagggaatgaaccgaacacaaacggtaacgcgataaacgccgatttagccgccccaagtcgaaaaggacacgacgaataatcactgttgaaaggatgttttccgaaaccaattgctaataggaaaccgatatcacagccaattgctagcatataacctattgcacttccagtgaataaggctatagcaatgccaattcctgttggcaaggctat

SEQ ID NO: 59692 - DNA, 372 bp, Glycine max
  Clone ID: PAT_MRT3847_24913C.1
accggacttgaatttcggggtagacgtacgcgcgcgtgcaagcgtacgaccggatgcgagaagacaacggactgatcaccacagttaatgggggctgatagcctctgcgtggcgttggatgctaacagagcaggagcctaaaacctttgtgacgagaatcttagccatgggtagcaacggaatactggtacgaattatcacaaaccggtcacatcaaattcattcttgacttcgatagacacccatccttcgacgcctacggattatagaccggtcgcatctgcattctatacgacgtcattccgatcagcgaccgccgtacctatcgtacagtctcacatccctgatcttccccagttactgatagctgtc

SEQ ID NO: 59693 - DNA, 434 bp, Glycine max
  Clone ID: PAT_MRT3847_24914C.1
tttttttttttttttttttttttttttttttttttttttttttttttttttttttttttttttttttttttttttgtaaaggggggcattttaaattttaagcattaaaaacgaaggaaaaaaaaaaaacccccgggaaaaccccctggggggttccccaacgggggggggtccaaaaaaggaaaaataccggtttaaaaaaaaggggtttaaaagaaaactgggcaacccaaaagcctggggtttaaaaactcttgggggcgttaccccccaaaacaattataaaagggggaactcttttgaaaaccccaaaaacccccccagttttagggtgggttttggggacccccaaagggaatttggccttggaaaaaaaaacacccttgtgggtttctttaaaaagggtctttttattttctttgccaccaacgggg

SEQ ID NO: 59694 - DNA, 238 bp, Glycine max
  Clone ID: PAT_MRT3847_24915C.1
tggagagggagtagctatgtgctttggtggaagaagaaagtggggcgcgtgatttattggaaaaactgtgaatgtttattgcttgaaattaatgtgaaatgagccatgctttttatgtgtgatttttaattgatgcgacatattttaattggaggaacaagatctaagacacatttagtgagactggtgattttaatctttactccagtagaaaaatcaaacctaagttctagtaaaa

SEQ ID NO: 59695 - DNA, 169 bp, Glycine max
  Clone ID: PAT_MRT3847_24916C.1
accacactttcgataaataacatttttatcaaagcgatatcagacaaacgtgtggcatacatatgatgtggagtgttccaacgaaaccattaatccaatctatactacactaaatctaactcactaactataattagttaaaatagcttcaacaagccaaaatttccaa

SEQ ID NO: 59696 - DNA, 1296 bp, Glycine max
  Clone ID: PAT_MRT3847_24917C.1
tcctctagagcggccgctttttttttttttttttttttttttttttggaatgagtgatattaatatgatcctactatctttgaaacatatatactatcaatacagaagcaagttggactggtcccaacaaacttttctatatgttgttagttgttgcctgggattactccatcctcaccctcttttatccactttcctcaagtggtgttcctacttttctcaaaacatgcagaaatgtattgaatgtgaccgattgcatggtaaccaactcattactctcatttcaattcattccaatatgatataaaaagaattggatttcaagccaacaacattttatattatcaatatgtgtacatatgatgaacttaatttgaatgcatttgtagattctttacttaatataaataggatagtttgctatgatataccgatcgataaatcataaggtttaagtctaagtaattgatttatttttttggaacaattgttgaatgagtttaagtatatcaaatgagagaaagaaagagagaatttctctttattgtttgagaaacttagttttaattcttgtaattctttattcaaatagaccttattcttcctctataataaaatcagatcagatagagaaaaagaaggaattcgtaaatatagattaaacggaattcgatggacctccacaccaccactcaatagagatttaaaatgagaagttgaaagggttagtgattgttgatcaggatgcggctcctttttgtgctttgtctttttcttaattaaggaggatatttgtaaaagaagaataacaaattcaaggagacaatcaataaaatggattggtaaattaaactaatatacgtttggtaaattaaacttaattaattaagggtatcttcttttattccaccaacttcctcctcccaacactgtccaagaaaaaaatatatgatagccacagaaaaaagtttctgctagttaatggaggactaatataataatactacatttaaattttttcaggaacacatgtatccaatttatacttagaatccagagtccagacaacatataaaattatagctagctgcaccatttctctaaacaaatataagtaaaaaattagcaaaatatatgacagcaaaaatagttattagtactttatagtatagttaaaagcttgtcatacttaagcagaaaatttttgcaagtaatatataagggagacaaataacaaagtaaaatatgcacttcctcgggaatgaaaaaaattgatctactttaatcggacgcgtg

SEQ ID NO: 59697 - DNA, 226 bp, Glycine max
  Clone ID: PAT_MRT3847_24918C.1
tgctctacgtaaagtcacaatatctaaataccatgggttcactccttattgtagtgactttactacacagagcacggtttaacttatactttattaccaaaaagaacacttcttagatactgtcgtatgtaaaattactttcaatcacatgggagggggattatatctttaggaggattgtaactttgtcatcgagaatacaaagaaatgaatgtgttttaatact

SEQ ID NO: 59698 - DNA, 352 bp, Glycine max
  Clone ID: PAT_MRT3847_24919C.1
gacgaggacggctactttgccgagctttatgggtataaatggacatcactctgtcttcatactacaacaatgcttattgcgagttcggttgggattgtagctggtgtatcctatgccattcacagtggttaccagtctggcggtccactacttgggaggctgttctccgctatatgaatcattgaccatctattcccattgttgaagggtctcttatgcagagcaatatcgtaccccaaccattgttattgtatgagccgttcctgttgcttcaatatactccttgctgagggcgaagatcgatcccttcacctgtgtctacaacaaattcaccaatggccaatgagggatc

SEQ ID NO: 59699 - DNA, 391 bp, Glycine max
  unsure (1)..(391): unsure at all n locations
  Clone ID: PAT_MRT3847_2491C.1
ttctgatggccagtatcagctgatgccactggatgacagactgctgctagagttgcagagcattggcttatatcctgatatattgcctgatttagccgaggaagatgacgctatcaatgaagatattgtgaaactcgagatagcactgtacgaacagaatgggagtcagaagaataacttggacaagattgatagagctgttcacgaaaggatggatgaggcaacgcagaagattgaccaagctgcctttgaccatcttattgaaatagcttacataaagagatttgcatgccgtggtagcaacaattcaaaagtgcagttcatcaagtgtctatacangttgctgcgcttttctcaacgtactcttgcacgatgtacagatatgaagaag

SEQ ID NO: 59700 - DNA, 624 bp, Glycine max
  unsure (1)..(624): unsure at all n locations
  Clone ID: PAT_MRT3847_24920C.1
cgggagaatcgggaacctctattagaaaccaaagagagccatacccaccaccttcacttttaagactaaaatctgttactaggatatctctaataaaagttttcagaaattcaacatggtctcacatagtcataccacatctagtatgccagattgatcactcacatccatgcttgagaacacaagaactaggatagtcgcgtccctatcatcgtttcgcaacacccgtacaatactttattattagtgcatgagaatagcggggtgaggttggacatcatttgccacctagaactgcagaaccttggacaactgaaaaaattcatactcttgtggcatacgacacactctgctttgctggctacctgatggcggaagccttgcaatgtgactcgagcaggccttgctacaagagacttgttggaacacttctngccatcatttggcagcaactgtgtctgacattgtaagagcattactctcttcctggctagagggacgagccttgaaacctgccaaggacctccttccacgatgacatgccttaaccggaagtctgaccacatactgactggctgtgggccaactgaacttaccgatcaacccccctggtcttccaaaaga

SEQ ID NO: 59701 - DNA, 2346 bp, Glycine max
  Clone ID: PAT_MRT3847_24921C.1
cttaaaagcaattatatatagccataggagtttgtattttttgttaaggggttggtttttggcaaattcagtgggttacgacatggggaaagtcaggataatgtgagaggcagaattggaggggatactgcaataagtgaggctggagaactttattcaaagaagcttgccaaatttgttggaaagcgtctcaaatcagaacgggctgcttctatatggactagtacactgcaacgaacaattctgacagccactccaattgttggatttcccaagatacaatggcgtgcacttgatgagataaatgcaggggtgtgtgatggtatgacatacgcagaaatcaagaaaaacatgccagaggggctggagtcccgcatgaagggcagcctgccgtatcggttgcctccggctcagtcctgctcgggcggcatgctatggtctggtcctctgctgcgagcgcttgtgcccccacgtccacctgttggggtgccatctcaccaggccgcgctctgggcgcgatatgcgccggtggctgtcaggccttggcacgtgatgccgcctagagcggctcccctgcggacgacgattcccgcactgagggcagtctcgggtgtccttgtcctcggggcaggtagctgcactggctcttcaagatatgattggatgcaagaaggtggccaggtggggatatttgatgccacaaacagtagcaacggcaggtcaaaaccggtgattaaattggctgagggatcaaggttgataattatcgtcgcataaagcatggtattattgagttttacttatttcttttgtgctgacaatccttaaggagtggcggcacgtaatgagatagccaagattgcatttgaagatataatattttgaatgtcagctggcgaatagtgaggaagtttatgatacaactaatattagaaactacatgaaaaaaaatgctgtggtcagtgggcgaggttgaaagcaacatcttttttttgtaagcgataagcattgatgatgactttacttttacttggtaaattctcatcttacaccacgcccaattttacttactcgaaatagggaaagtcaggataatgtgagaggcagaattggaggggatactgaaaaaagtgaggctggagaactttattcaaagaagcttgccaagtttgttggaaagcgtctcaaatcagaacgggctgcttctatatggactagtacactgcaacgaacaattctgacagccagtccaattgttggatttcccaagatacaatggcgtgcacttgatgagataaatgcaggggtgtgtgatggtatgacatacgcagaaatcaagaaaaacatgccagaggagtatgaatcgtgcaagaaagaaaaccttacgtatctttatcctcgggctcaatcatacttgaatgtcattcaaaggttaggacctctactgataaaacttttgacagcaggtccaattgttgggtttccaagacaccaggcagttttcatgacactatatacttatttttctgtgatgggaagacatatgaagaaatcaagaagaacatgccagaggagtatgaatcccgcaataaggacaaacttaggtatcgttatcctcgtggagagtcttacttagatgttattcaaaggttagaacctgtaattattgaacttgagcgacaacgagcacctgttgttgtgatatctcaccaggcagttttgagggcattatatgcttattttactgacaggcctttgaaagaaattgcagatattgagatgcccctccatacgataatagaaatacaattgggagttacaggtgtcgaagagaaaagatacaaactaatggactgaaatgaataactgaaggagagaagaaactggaaggaaagaatagatttaagtcagcattttttgtttttatgagagaagaataaatgatgattatcaatttatcgtgtatattgtaatcttctaaaacaaccccttttaataaattttatgagcattctttagcttccaatttgaaaaaatttgaaaatcaaaacaaaaaaaatacttattactcttacttggaattatttgggttggttcagcaaaggcactggggtggggagtccatgtttgtgagtttgaacgcagggcacttggagcagcaaagtaaggcatcgtccagaaagtgctatgcttttctaaagccaaaggtaagcataagttatatcgcattttcaccccatttttaatatatttacaagggaaagaagctgtaacttatttgtaggcagtatgggaatggaataatcgaatttggctttaaaaaaaaaaaaaaaaaaaaaaaccaaa

SEQ ID NO: 59702 - DNA, 622 bp, Glycine max
  unsure (1)..(622): unsure at all n locations
  Clone ID: PAT_MRT3847_24922C.1
ttatttcgaagggtcaatcccttattcgaaacgaatactatctttcattctctgcctttgaacatctctctaattattatatatgctttcatgagagcctccatttgttgttgatgcttttggactcatcctactttgtcatgttgtagcacctataaaggaatggatccgtaccaattccacagcgtcgtgtaaagatataagccactgggtcctcctcccatctgtttgcatttcccaacgcctaaaggagaaatggtgagctgtgaagaccaatatggagaaaagcttccacttgtccaaccagacccggtggtgttggagattaatcgtttgcaaaaccaactaaaagaaaaagaaaaggaactagcgacttgtcagggtgaaatcaaagctttaaggtcaactgaagctctaaaggataaggccatagaagagttgagaaatggagtcagtaaactggacgaaagacttagaatttcagaggatcatcttaaacaaaagaatctagaaatcaaganactgacagatgaaaagaaaaatgcattggcttcgcaatatgctgcagaagcaacacttagaagggtacatgcaaatcaaaaggatgaagattttgttcaat

SEQ ID NO: 59703 - DNA, 817 bp, Glycine max
  Clone ID: PAT_MRT3847_24923C.1
tttttggatggaataacatataaaactagaatttgggggacatttctgattatttccatcattcaaaatttcagatccattaatatttctgagcaaagatcacaacaacaaaaatggaaagaatcataggtatagattctcatcattcagatctatgcacttgaaaagattttatattttgcaaaccgaataacttattatagtgaatccatggtcacccatgacacttgctagcagctgtagccagtgacagccagcaaaacaattatagcaagtccggctgttgcccatatatttctcccttgctggtggtttgatggcgcagcattcaaattcagacttggtgatggtgctggtgctgtgtctgattctgctgtggaatcaggtggtgctgggggacttttgcgaataattgttggagctggagctggtgcttgatgccttctgtgtctgtgtctgtgcctgtgccttctatgcctatggtgtgcaggcgctggagccggtacctctatcactggcgctggcgctggcgctggtacctctatcactggtgctggtgctggagttgcggctggcggtggaggaacaggtgatggtgttggtgccggctttgtgggtgcgggtgcaggtgctggtgttgcctttgctggtgcaggggatggaggtgttttagctggtgttggtgctatctttggtggtggtaatggtggtggtgacgcaacaggtggtggtggtagcgggggtggtgagaccggtgaaggttttggtggttgtggtattggaatttgaggtggtggggcttttgggcttgaagcag

SEQ ID NO: 59704 - DNA, 1101 bp, Glycine max
  Clone ID: PAT_MRT3847_24924C.1
tacggctgcgagaagacgacagaagggcaatgggtccaaataattttcctggacagttaccacctagtggtattatgggaccaaacataccaatgcgaccttttggtcctcacagtggtgttgaatctgttatttctggccctgagtttaatgagattaatgcgctccacaaatttcaggatggtagctccaagagtagcatgggtccaaactggaaaaggccatctcctcctgcaccagggatgctttcttctcctgcaccgggtgctaggcttcctacaagatcaacctcgggtgcatgggatgtgcttgacataaacctatcattcaggaagagcaccttggtctccaagagattctaaacgttcaaggatagatggacccttgcctgttgatgaaggcccatttcctttgaggaatatagatgatcgggggttagctctagagcagacatatgggattgacccagctattgatggaggtggttctggtccatatgtaaacattcaaggaaagagtcaccttggtccagttagctcaaggattacagctggagtacatggtgtcgcccaacctgatattgatcatatttggcgtggagttattgcaaaagggggaactcctgtttgccgtgctagatgtgtaccaattgggaaaggaattgggactgagcttcctgatgttgttgattgctcagctaggacgggattggatatactcacaaaacattatgctgatgcaattggttttgatattgttttctttctgcctgatagtgaagacgattttgcttcatataccgagttccttcgctatcttagtgcgaaaaatcgtgctggtgttgccaaatttgttgataacaccaccttattcttggtgcctccttctgattttctcacaagagttttgaaagtcactggacctgagcgtctgtatggtgtggttcttaagtttccaccagtgccaagtagtgcacctatgcaacaaccatcacatttgcgtgtaccaactactcagtatatgcagcagaatcctccttcgcagactgaatatggtttgattcctgtaaaagaggaacatattttaccaatggattataac

SEQ ID NO: 59705 - DNA, 284 bp, Glycine max
  Clone ID: PAT_MRT3847_24925C.1
aaaaaaaaccaaacccttagtttttggttaattcccgaaaggtccaattcaacggggggttggttacctgaaacggccctttttcccggactcaatccttgttagcagggggggggaagccccattggcaaatcaacaaaacatttataattgcttaaaaaagcccccccaaaaaaaaaaattcaaattccaaaacccttctaagattttttcatgaatcataaacatttcatcccgtttttggcatgacgttaatagttgggccttccacatatggcctaatt

SEQ ID NO: 59706 - DNA, 412 bp, Glycine max
  Clone ID: PAT_MRT3847_24926C.1
ggaaaagtaataataataaattttttaattttaaaaagcaaagggaaaaacatttgcttttactacataacatccttaatccgcgtccgtttcccgaatatagtataaacaaacaaataaatgaaatactcctccaaaaatgtttattaaaagctttgtacacccccctaatccggggtttctaacatcatcggaggaccagcatggaacaaaacgatcggcttcaccaaaataaccctttagatcaaacgggcgttgagcaagactacctaaaaggatcttccaaagcaggaacaagggccttcctcccattagccccttttacattggagcttgccccaggggtagagtcaaccaggaagtccccaacattaccagggaaagcccctttcccataaaccccagggcaccc

SEQ ID NO: 59707 - DNA, 312 bp, Glycine max
  Clone ID: PAT_MRT3847_24927C.1
acggaggctttgagcagcctttctactcgcactcaagtcattgcaagggcaatgcagacaacattgcgcagacgaggaggtggaattacttgcactaatgaatgcattgtagctgagcaaagagcaagaagtgcgttgcctcgagcactgatgtgcaaagacgcagggcacactcagcaagctagacgtaattgggttccgtggacaatcgtcgatccacacgtctggaaaaaaatactggcccatcatgcacgtattgcgacggtcaagctccgtggtggtgggctcgtccgttgaaattgccaaggccgt

SEQ ID NO: 59708 - DNA, 225 bp, Glycine max
  Clone ID: PAT_MRT3847_24928C.1
gctgtatttcaccgccgtagatgcgcattttccagtaaccggtgaccttccaacgcggcgtgaggcgctgggataccggaatggtagtgtatgacgaaagcggcctcgaaggaggtacgcgattcagattgcgataacacttcacgcgacctacctaggaggctcgtctcctcgatgttctctgcgctacagcggcgtcacgttcggagaacgtcgtgatacact

SEQ ID NO: 59709 - DNA, 399 bp, Glycine max
  Clone ID: PAT_MRT3847_24929C.1
acgaaaacgctcatgtgcctgagaagaaattgcactctttcaagaaggtgtctcggtccatgggatatggagataatgatatcacgctcactatcttgttcttcaggctccagaggctaccacagggcctgtggctaacgatgaggtatatggaggtgactgggctgtctgcagaagtagcgggaacaaatatctatagtggcctctgtcacactttgctctaatatctctggtcgaatactggctacacttagacctgagtcctactgcggccggagatgagctctctgactgattctatactgacaaagataatattttcgagtcccttgctaggcgtatccacgacgctacgcgatgcattctacacaataaagggaggaacatgcaacaaagccg

SEQ ID NO: 59710 - DNA, 252 bp, Glycine max
  Clone ID: PAT_MRT3847_2492C.1
cctccttttttttatggggggtaaataaaaaaattttgtttttttcaaccccaaccaggaagaaaataacacttttgtctggaggatcctgagtattaatgcctgtatcaaatgaagtgccgaatctcagtttgtccttacatgagaaggaaagacccctcgcttacttttttctaggtgataaaaactcccacattttgatatttttcaacccgcaagcctgcttaagaattgctaaaccatcctacttgt

SEQ ID NO: 59711 - DNA, 451 bp, Glycine max
  Clone ID: PAT_MRT3847_24930C.1
gtcagcgtgcctcctttggtatcggtaccttcaactctttctgggcctacaccactcccatcattggtgccatcattgccgacgagtaccttggccgcttcaacaccatcttcatcgccattgccttctcgattctcggccacatcttcctcatcatctctgctctgccctccgttctcgccagcggtaaggctattgctcctttcatcctcggtgtcattacccttggtttcggtactggtgcgtttaaggccaacatctctcctttgatcgccgagcaatacaagcagaccaagccccgtgtcatcaaggaccccaagactggcgagcgtgtcatctctgatcccaacatcaccatctcccgtatcttcttgtacttctacatgttcatcaacatcggatccctcactggtcagatctccatggactacgtcgagaagtatgttggttt

SEQ ID NO: 59712 - DNA, 247 bp, Glycine max
  Clone ID: PAT_MRT3847_24931C.1
aagaaaagacagcgaataaactgcattagaaattatgaggaaagcttattaatgggataagggctagctcgaaaggcattttttttacactgggacacgggttccaagaaaaaccatgaggagttcctatgtttttgacaaatatgtctagccacgttgaacaaaaagtcttaaaaatatccgagcacatgcccttgcacgcacgctggaagcaccggagcttgtcaagggattctgaataatcttt

SEQ ID NO: 59713 - DNA, 581 bp, Glycine max
  Clone ID: PAT_MRT3847_24932C.1
gcacgaggaaaagggctcgagtttaagttttgcataatcttgctccttgttattgcttcgtaagccatggcaaccgattgcaattgcaacaagggcttcgctgatagttacatgttgttgaagcccgaagatgcgagtttctttgatctctttcgtgtcttatttaagggaaacttatcacagaggaactttgtggaaagccatgcagatgatgatgctttggacgaaagtttgggccatcgatggcttatagttatttctattttggcccagaagcttttgcagcttgttgccaagccactctcactctttgggagttgcgttgagtttttgctcaaccttgtagcccttaatggaggtgtattcagcatcgtccttaattttctcggaggtaaattggtcttgcccaatcctgaatcagaaaattatttatcctttattggaaatttggacattcgagcaaagttggaagacgccgtccagcgcgaagattccaagtactatccagcactttcgatgatggcttccaaagcatgctacaataacgcggcttaccttaaaactactgtggaagattactg

SEQ ID NO: 59714 - DNA, 294 bp, Glycine max
  unsure (1)..(294): unsure at all n locations
  Clone ID: PAT_MRT3847_24933C.1
ctgtgtttttnttgtttnttttntcttttttgtgttgnttnttttttttgttttttttaaatttgacatacttttgaaagggtgttttagaattttgatgaaattttaagaatgtatcatgcttgattactgattggggggcagtctaaataacaaggggagaccatcgttgttttctctgttcatgaaaatgggggggtcacaacatacacgcccataactctctcaaaattcatccattcgggattacacgtgaagggcccaggcttatccatgtctttggatacaaactta

SEQ ID NO: 59715 - DNA, 468 bp, Glycine max
  Clone ID: PAT_MRT3847_24934C.1
ctcgagccgacttcggctcgaggtatgctatgatatcacatcatataatctatggtacgtgccctgatgctataatgtatgtcatgacatacatgctatgatatagactgtcgacttattacatgccatataatcgtattacgctctgcttcataaccaagatattgcgacatactcaactagaagcatagcctccaccttatgtacttaaaacatctattaatggagttgttactgtgcagacttcatctgtaggtctccgacatgattccaccaactccttgcttgaaagggataccccgtctatcagaccactttttacgattcagatctactgaccactacaaatatatcatggtatccctttgatgcgactcactagtatctgggaactctacgagccattaacataaacacgacgatgtgctgacactcacttgaacatccttgtcgagcattatttttcat

SEQ ID NO: 59716 - DNA, 266 bp, Glycine max
  Clone ID: PAT_MRT3847_24935C.1
attcccgcatcggcccacgcatacacccacgcattcgcccacgcattcgctcacgcttcctcctacacaaaatcttcaactgggtaacggcaccctttcataccctgattctctaccagattcctaactttaaatatgctcattctatcacatacaataattataatgatgcgatcattgagtaacccaaaacgaatgtcaatcattattcaaatagctaagatactactttccctaattgaataccaaccaaagtgatttccacc

SEQ ID NO: 59717 - DNA, 397 bp, Glycine max
  Clone ID: PAT_MRT3847_24936C.1
gggaaacctttttttttttttttttttttttttttttttttttttttttttttttttttttttttttttcaaaaaaaaaagccggggggttccttaattggaaacgggccccgaaggaaaaacgggaaaaattaactttaaggcccctttcgcacggggggtgtaaatccaaaaaaaaaacccagaattccgaggggggggttaaggggggggggaaaaggccatttttttttaaagaggggggaaaaaagggggcccaaggtgtgaaaaacaataaatataggcggagggaaaaaccaggattggggcttaacgtaaaaaccccggaaagggggggggcccggccggggtttaaaattcaatgggcgaaaagaaaaaagggggggaacaaccttgg

SEQ ID NO: 59718 - DNA, 270 bp, Glycine max
  Clone ID: PAT_MRT3847_24937C.1
tgtgatacaacagttatagtgcgaacggaactagaaataatattacggaaagaagaaaaagaagcggcacaatggagctaactcctgcgagtgttgattggtgacagctgaagtcgaacaaaataccgctagaaacgcagcatggcgttgcctaagcttgtctcgactaatccagatctgccactaaaccctagtccttctatatcacccctttcttctctactatccgatctgtaccacatacacaacctgcttaattacattaccccc

SEQ ID NO: 59719 - DNA, 697 bp, Glycine max
  unsure (1)..(697): unsure at all n locations
  Clone ID: PAT_MRT3847_24938C.1
ccacgcgtccgcaaattgggctctaagcggtctcgaacaggggtgacagagtcattaagtacagctacaaacattcctgtgcaagatgcttacatgtctgattttggttccatggaagtgaacaattcagccattacaggagtaggaaatgatccaattgggtcttactgggactgggatgatgatgatagaggcatggaaatggatattcaagcccttctatcagagtttggtgattttggtgacttctttgaaaatgatgttttgccttttggagagcccccaggaactgcagaatctcaggcacttatgctttctgccccggattgtggagatgtcaacagcagtccaggtggtgtgatagatgttccaggtcaaatacttttgcctgttgggtttccttcctttgagagctttaacccccctccttcaacatccatagaggaatgtcttaacaaaagtcaagataacttgaataactccatgtctttgtgtccaaccaatcaaactcaactgttgtatacgagggagtttgatcatattatgaaagctgaagcaatgatgacatttgctcctgaatttggagctgttgatacccctacttgtgagttgtccacaacattattcanaagcccatattttccaaaatctcgaaaagcaaagagttcaaattcaagttcaaacaattatttatatg

SEQ ID NO: 59720 - DNA, 178 bp, Glycine max
  Clone ID: PAT_MRT3847_24939C.1
gcacattttcgcgatcactatcaccgttaagactattacccaccaggtggagagctctcacactattgacactgtgaaggccgttattaaagacgccgaaggcgtacgctcggaccagcacaggctgattcttgctggcaagctgctcgaagatcgaaggaccctgtctgagtactca

SEQ ID NO: 59721 - DNA, 379 bp, Glycine max
  Clone ID: PAT_MRT3847_2493C.1
cctaggcgtgcgcccacgcgtgcgaaggaatgggtacccaggacctattgggtgtggaatccccagaatccttttgtgttaaataggaggatgggaaaactgactttgccccagggcacttaccgaggtgttaaaagaatgcctgtctctatagggggaggagctggtgcaaagaatgctgttctcatgaatatgccaaatgctgatctttcaatgaggtgatatgttaggggagatctcgtctctgaagttgataggatgactgctacttacatcaaatagacagcttctatctccatcgcattaggaaatttgtctgatgacaccatggattttgaggactatcaccacaagctggtgcagcttgcagagattcacg

SEQ ID NO: 59722 - DNA, 174 bp, Glycine max
  Clone ID: PAT_MRT3847_24940C.1
gggggttgaaagaatagggaaaaaccaccccaacggactccaaaagcgggcaagcaaggcgaaagcgcatcaagcactcaaagagcaagggaagcaaccaaagccaagacggacagaaagaaacgccaaaccggaagaacggacatgggagaacaaataggagggacaacgacc

SEQ ID NO: 59723 - DNA, 440 bp, Glycine max
  Clone ID: PAT_MRT3847_24941C.1
ccaggtcgactcacgcatccgaagacgacagaatggggagaaagaaagagaataaaattattagagtaatcatatgatgtaaggtgctggctaggcccgcttcctcagtgtttgatgcctctgctggcagattaattgtactcttcaagtctgagaaagtagattctatactattcctgtctcactttcgccatgggaatatcatttttgctttttactatgtccaaggatgaatttatatgaataattttactttacatcttcctttctccatgattcttctcagattaattttaaggtgaaatttgtatcattttttgtacatatttttatatcatcatgtttcatgcccctcgtcttcagttcaacactactcaaatgaatcacatgattacgatcgattcaacacaacacacacgcacactccttccattttaatg

SEQ ID NO: 59724 - DNA, 514 bp, Glycine max
  Clone ID: PAT_MRT3847_24942C.1
gtttttttttttttttttttcaggacaaaattgacgttttaatcatttcagtctctcttgaaagacacaactatattacgtagagtagtgtggtagcattctcaaaaatcactattcgctaaggttgcaaactcgaagatatggattatcgaacacagcatatctggaccagtacgatttatatttggaaaaagcttgattcaaccatggcttgtagtttccattctatctcttgtaaaaggtgattagtcatgggggtaaggttccaatcttccagagggttatatcctcattcatgatgatagataccagtgatgtttcgtttcttccactccttcaagtcaaacatattcatgccaaatgcccagccacacgcatcaggactgaagttgttggaaatcagtggattactaaagtttaggtatttatcaaacctatggaaactctccttgcaggtctccacggcaccattcaccatacctttcaaatcaattgaccaaagaggtgtcaaatt

SEQ ID NO: 59725 - DNA, 307 bp, Glycine max
  Clone ID: PAT_MRT3847_24943C.1
cttgcacttcactaaggcaggaccccttatcttaaaagagagaaacagacagaacaaacgactggtgtcttattaaaactcactccacattacagatatttctatctctgggcttaatatttacagatcaatcaagccttggtcctgctttatggacagtagtaatcatagggggttttgcctgaactgacaaagcactggatctatgctctgaaaagctgagtaagaattatctttaaccttggctactggcagaccaatttttccagagacaaaggtaagcgcgactatcttgtgttgcttcatg

SEQ ID NO: 59726 - DNA, 348 bp, Glycine max
  Clone ID: PAT_MRT3847_24944C.1
aggacgttctttcttcgagtggtggttttttttaaaacactattaatagctttagattacaaacctgccaatgttgaaaacttcatttgtattacaccccgtggatttaatagggatgtatatctaacttttacatgacccgcctaataggtgtgccctaaacataggtgtctgtggagggtaaaactaaactaggtcttgggggaactaagtacaaaatcagacaagtaaaactggcgcatactataaatcatctgggctctacaagttctctagtaatgaccagttggattacaccgactacaatgcaccggatgtttctcgggattaaaggcatccacacacatc

SEQ ID NO: 59727 - DNA, 292 bp, Glycine max
  unsure (1)..(292): unsure at all n locations
  Clone ID: PAT_MRT3847_24945C.1
ggcagaaagcaagctcatcctagagttttaaaaatggcagcagcntcctgccatggctctctctttcccccatccttggctggcaanggccgtgaaagtggggcccatcagcccccgaagtcgggaaggtcagcattaaggaagaacgnaacaagnanggcttcctcgggaaggccaatggtacggcccaagaccgcgtnangtacttgggcccattcttctggcgagccccggtcttacctnatggcngagttcccaaggtgantacggntgggnnaatgctgggtttcgg

SEQ ID NO: 59728 - DNA, 1026 bp, Glycine max
  Clone ID: PAT_MRT3847_24946C.1
taggatggaggagattggctttaacatctctcacctttatggcctcacagaaacatatggtccaggaactttctgtgcatggagacctgagtgggacttgttgccccatgaagagagatcaaagatgaaagcaaggcaaggggtgccccatgtggctttggaggaaattgatgtgaaagatccttccacaatggaaagtgttccatctgatggcaaaacaatgggggaggtaatgtttagagggaatacagtgatgagtggatatttgagagatttgaaagcaacaaaagaagctttcaaagatgggtggtttcatagtggggatctagctgtgaaacattctgatggttacatagaaatcaaggacaggttgaaggacatagtagtctccgggggagagaatattagctcggttgaggtagaaacagttttgtatagccatccagcggttcttgaagctgcagttgttgcaaagcctgatgatcattggggccaaactccttgtgcttttgtgaagttgaaagaggggtttgatttagatgctctagaaataatcaacttttgcagggaccatttgccccattacatggctcctaaaactgtcatttttcaagatatgccaaaaacttcaacagggaagatacagaagtttgttctaagggagaaagccaaggcttttagaggcaaccaagcataataaaaaactgagtttaagggtcctatcatcctcttttatttctatcatctctattttaatcctctaaaccaaacacaacattaagagtgtcgattggatcatttttcttaactttttcggtcgggtcctctattctctgcgagttccaatctttgaacttttgtttttgacaaatattgtggctaaaacgtggatcgatattctcatattcttactcgggatcaggattacttgcgatcgatcactcttgggctcttagcacgagcaatcctagccatgatcatgtagctgaaaatttttcttaatattatttgaagtattaatctcat

SEQ ID NO: 59729 - DNA, 677 bp, Glycine max
  unsure (1)..(677): unsure at all n locations
  Clone ID: PAT_MRT3847_24947C.1
gggaaaattgttgaatttctatattccaatacaacaaaattacagtttacaacacattaatcaacaatcctatgctcccacatgttggctgagagtagagaaagggagacaaataatagagtcctgtctttacatcacttatacattcctacaaaaaaaactaagacctacttggctacttcatcaaggccgaacacgacctagaactagaaagcacacttgctattgtacatgattaatacaaaattacaatccaaatatagggtcatttgcaccaaatatagaagaaccaaactgtcttgtattcaaatcattgccatccaaggcaggaccaaaacgatccagccactgtgttggacttgcagtttcattttcctccacccactcagcagtcatgtcaatatcatcaaattgaagcagatcaacttctgaagactttgcactcatctgcctagctaacttgagattgtagtttatataaactaggtcattaaatgtttctctatcaatcttgttccgcttctcagagagaatttgccaaaaggtactccactgtctgtgaaatgagaanntgctgcaaacttgacttaatattctaatggcaactcattgcaaccccggagcagagtcaccatactgctcccaccaaagccaaggtgcaactgtattccttgcct

SEQ ID NO: 59730 - DNA, 575 bp, Glycine max
  Clone ID: PAT_MRT3847_24948C.1
ttttctccttttttttttttttttttttttacttttttttttttttttttttttttttttttttttttttttttttttttttttttttttttttttttttttttttttttttttttttttatttgggcccttgagccggaatattcaaaacccttcggaaggggggggaaacccaaaaattggggaacggaccctgaaagggaaacactttttcaaaaaggggggcgaaaaaaaaccgggggaaaaaaggggaaaaaaggtttccggggaaaaattgggttccctaaaaaattcccaaaaaaaaaaaaaccggaaaaaaaaaagggaaaccttggggggccaaaaaagggacccaacccacaaaaatatggggggggcaaaccccccggtatcaaaaagaaaaacaagggggacccagggaaaaaataattcccccaacccgcggggaaaaggggttttcgtatttaccccctgggggtttttttttttcaccagagaaaacggacaaagttgttagccctttacaacttggccttaaaaaagaggcaaaaaggggaccaaaatttattcccccc

SEQ ID NO: 59731 - DNA, 197 bp, Glycine max
  Clone ID: PAT_MRT3847_24949C.1
gctcactagtcgcgccgtcgttttttttgtttttattcatataagagtacgaaccgaaagaacaacaacaatggtgagaggattgctcaacaagcaagaatctcgctacctctcggaagcaggaacaacggcagctcaattaaatatgccgactgaaaatccgactagaaccaattttttgaatcggggagcacaca

SEQ ID NO: 59732 - DNA, 231 bp, Glycine max
  Clone ID: PAT_MRT3847_2494C.1
aatgttaaaatggtgtaggtttatcatggctgaaatttttgggaatcaaagttataaggaaagtggttgttgtgggtagtggttgaggttgtggttggtaaaaaaaaaaatggattctgcgagaagttggttacaaaaatttcaaccacgtgataaattgagggcctctacaaggaacaaagatgatactaatggcacaaatgaaattccaaatgtgcctatggctgatac

SEQ ID NO: 59733 - DNA, 978 bp, Glycine max
  Clone ID: PAT_MRT3847_24950C.1
ccacgcgtccgctatctcattttcccacaaccacaaacttagagcgggttcgtacgggtacggacggatacggattttattgccatctaaaagagattagatcatggaattgtgggcaattgggcggagcaaggtccaatatagtgttttgtgtaggtgacagtcactggcaacgttggttgttgggttcggatcccaacaacgttatagagaaaataagagtgaatgaggaacacacatcacatgacataacagaggaagaatgatgggagcgaggagaaggtgtatcttagccactctcgcttttctaatgttaatgggcatcgccgtctatttcagactctgggctattcactacaacctttcttccgatgacacccaactcttaaggcaacagtttgatattgctaacagggaggcaatggatgagtctgcagagtggaggctgaggtatgatcaggaggtagataggacaaaaaaatgtttacaggagcttcaagtgtttcaggagtcctctcagaaggggcaggatgcttctgatattaaccataaattggcaatactgcaaaaggagaatgcagtcttactcgaaaggttggaaacattgaaaagagagcttgaagaggaaaggttgaagtgcagttcatgatacatgaactaaccacgaaagcgttaacatgaaggtctatgtttgtcattttgtccataagttgtttattctttggcacaagtgttttaaagatatttgcagcatacaactagtattcaaccatggaagaatattggctgtatgatttatggtctcaacttttcaccttagagatacaggccatcctgggaatatgaaaacacacagcatttctccttttcccccattttgacgggggttaaattttcctctgtactttattatgggcaaatacatacatacatatatatatatatataatctccaaatatatattaaaaaaaagaaaa

SEQ ID NO: 59734 - DNA, 1047 bp, Glycine max
  Clone ID: PAT_MRT3847_24951C.1
aattcggctcgagctcgagccgaatcggctcgagtacggctgcgagaagacgacagaaggggaaggtccaatgtagtgttgcgtaggtgacagtgactggcaatgttggttgttgggttgggatcccaacaacgttatactgaagagaagagtgaggaacagacatcacatgacagaggaattatgggagcaaggagaagaaggtcgatcttggccactctcgcttttctaatgttaatgggcatcgccctctatttcagactctgggctattcactacaacctttcttccgacgacacccaactcttaaggctacagtttgatattgccaacagagaggcaatggatgagtctgcagagtggaggctgaggtatgatgaggaggtagataggacaaataagtgtttacagcagcttcaactgtttcgggagtcctctcagaagggggaagatgcttctgatattaaccatgaattggcaatactgcaaaaggagaatgcagtcttactcgaaaggttggaaacattgaaaagagagcttgaagaggaaaggttgaagtgcagttcatgatacatgaactaaccacgaaagcgttaacatgaaggtctatgtttgtcattttgtccataagttgtttattctttggcacaggtgttttaaagatatttgcagcatacaactagtattcaaccatggaagaatattggctgtatgatttatggtctcaacttttcaccttagagatacaggccatcctgggaatatgaaaacacacagcatttctccttttcccccattttgacgggggttacattttcctctgtactttattatgggcaaatatatatatttctttaatctccaaatgtacctgatagtgatagttatgttgttttactttctttaaagaacaggtgtcaggcgtatgccttgattgtgtactatgggccagtatctgattaatccagcctgtccttggtaaatttattcactctttattcactatgatgccatataataagatcaagaacatgcagcatttttact

SEQ ID NO: 59735 - DNA, 473 bp, Glycine max
  Clone ID: PAT_MRT3847_24952C.1
ttcccgggctcgacccacgccgtccgaaaaccctaatcaatcaatccttcttttctggtttgggttcgcgaagggttttgatttttcggcggcggaaaatcttgagatcgctttgcgaggaatactactgctgctgcaacaaagattcgttcttcccaggggttggcatcactgcgcccaaagccagaacccgcgacaaactaatcatccaaaccctctgaaaattcatccaaaattagggtttgtgttgcattacggtacggtgtgaattgaaatgactcgcgttttggttcagaggggttcttccggtggtggttcgacttcgtccaacccgaaccggagtgggggtgggtcttcttctaattcctcggcgcgggcggagccgcaggttccggttttgccggagaataccgaccaggtttgtgttggtgttgtgtcggatgaggttttagagagtggtgataagggaaaaa

SEQ ID NO: 59736 - DNA, 491 bp, Glycine max
  unsure (1)..(491): unsure at all n locations
  Clone ID: PAT_MRT3847_24953C.1
ggcaatggaaagctttaacacttaccatggttgggtttaaaaatcatacatgctttttaacaattttggtttggttacacacaaatttcaaaccctgggcctaattgccaattttttttatttttttttacaaggaaccggcccttctttttgggacaaataaaaaagacctttcatttgaaataaaataacaataggggctaatcaaccaaccaatcacattatgaactggatgggtttgaaccaagcaaacccaccaccaccaccaccatatccctccctttttttttttgcctttttggcacaagacgcaaacgacggggttaccccattttccactggtggagctggctttctgggacctagaaaaaagttcctagatccaagctttagcaggttttccttcctatccaaactttttagggtaaactgggaataagggggggcgaattcggagacttcgctggacggnaagattggccggggacctt

SEQ ID NO: 59737 - DNA, 331 bp, Glycine max
  unsure (1)..(331): unsure at all n locations
  Clone ID: PAT_MRT3847_24954C.1
acacactacatgggattcacgatctatcaaaacattgatgtctgctcatcgtggaacatcgagagtatctcgaatctaatactgatataacgctgtaaagaaagaacctactaaaacctttaaattaaatctacggngcagggaacccactacttattttccatgtaactatgaagcataataacacaagttcttgtcaccttgacctacggactaaaaaaaaacttttgtgaaaactatattctcaagacctacggactactgttgtgggggagttcttaaaaaaacccacagacaacactgtttgtgtatttagttaaacagcggaaac

SEQ ID NO: 59738 - DNA, 953 bp, Glycine max
  unsure (1)..(953): unsure at all n locations
  Clone ID: PAT_MRT3847_24955C.1
cccacgcgtgcgtttcaacgtaggagaaaaagaaaagaaagccatcgacgaagcaactacaaacaacctagcacacagagatatatagcggaagcaaccaacagaagaaatttccacagttccacacgtacaacaacaacgttatagaatcaccacttgcatgcttacaataatggccagcagaaaaaaccacttcacttcacgaagccaccgttttctccctgtggcctcagatatacacgactctgtatccttaaccatggatttggaatccgcgttcgagttcgacgagtcggagatttacaactcggcccgagccaacaactcgttcgagttccgcagatcgcttcacggccgcggctctaattcctcggccaagaaaaaaccctcttcctcctccggtgatccggcttcggtgccggtcaacatccccgactggtccaagatcctcggggacgagtaccggaggaagaacaacttccacagcgacaacgacgacgacaacgagagttacaatgatgagaggagtgggagggtgccaccgcacgagtttcttgcgaggaatagggtagcttcgttctccgtgcacgagggtgttgggagaaccctaaagggaagggatctcagcacgctccgaaacgccatttgggccaaaaccggtttccaagactaaaaaagaaaaaaccatagccctctcactcaccgaaccgaatcttcttcttttttttttttttggttttaaaccctttttggttctacttctgttactgtaattggtatgtatttttagccgagatttgtttttgtgaattttggaggtaaatataatttataagaggtttcggttattaatttcgaagcctgaggtttgtaattttgtactgtatacgtacgtagtaccctcaaggaatattattatatatatattttttgaataaaaaaaaaaaaanaaa

SEQ ID NO: 59739 - DNA, 211 bp, Glycine max
  unsure (1)..(211): unsure at all n locations
  Clone ID: PAT_MRT3847_24956C.1
aacaaaccaacttanatacatatattttaactcttttctacgagactcaaaccaccgcgttcatgtcaaattattactggtgctatgctaactaaacactatctaatttcatctaaactcccttttagtaatcacctatactatacatattatccactagttgtattttctctcttttttcacatctcattcacttactacaaaacttttt

SEQ ID NO: 59740 - DNA, 617 bp, Glycine max
  Clone ID: PAT_MRT3847_24957C.1
gatacactaactacacccttgagaccctgcaaagtggcaagcgtcagtgcaaagccgccttgcaaaaggagctcggtttgcctgtccgtgaggatgttccgttacttggattcattggaaggctggatcaacagaaaggcattgatctcatagccgaagcaattccttggatagtgggccaggatgtgcagacatattgctgatgccatcaagatttgagccatgtggattgaatcaactctatgccatgaattacggaacaattccagttgtacatgctgtcggtggattgagggatacagtgaagccttttaatccatttgaagagtcgggccttgggtggacatttgacagtgcagaaactaacaagttaataaatgcattagggaactgcttgttgaccttcaggcagtataagcagagctgggaagggctccaacggcgagggatgacgcaggatcttagttgggacaatgctgctcagcagtatgaggaggttcttgttgctgctaagtaccaatggtaaattcttggcttctactctacctaagcagactgatcaatatggagtgctctcatgctgagtgatatcaaggtctgtgcagggaaaggacttg

SEQ ID NO: 59741 - DNA, 612 bp, Glycine max
  Clone ID: PAT_MRT3847_24958C.1
atgacagaaagtacacctcacattaacccaaatggagttaaaatagctaaaactgtattaatgccaggcgatccattacgtgctcaatatattgctgaaaattttttagaaaatgttgaacaattcaatacagtacgtaatatgtttggttacacaggaacttataaaggcaaagaagtttctgtgatgggctctgggatgggaattccaagtattggtatttattcttatgaactttaccatttctttgatgtggatacaatcattcgcgtaggttcatgtggcgctcttcaagaagatgtcaatttatatgatgtgattattgcacaagccgcttccacaaactcaaattatgttgatcaatttaatataccgggtcactttgcgcctattgctgattttaatctagtagctaaagctaagaaagctgctgatgaaattggtgccatatcacatgtaggtctatatttaaatgccatccatgcaaataaaaaggctttaggtatttttacagtaagtgatcatattctaagagatgaagccactagtgcagaagagagacaaacatcatttactcaaatgatggaaatagcgctcgaaatagctgaatag

SEQ ID NO: 59742 - DNA, 231 bp, Glycine max
  Clone ID: PAT_MRT3847_24959C.1
gaaacaagaggacgccaccttattttgtatctcattgaagcttatcttagttacaaacagaaaatatgcacacaacaattattgatatagtttgatcccccgatacccatccaccttacaacaagtgggtgggctataaactaatgcctcctggcgagactcacacccgtggtcctgacctgttcaaaggttgaacaaaggccataccctccgggtgcacatctacaatgg

SEQ ID NO: 59743 - DNA, 624 bp, Glycine max
  unsure (1)..(624): unsure at all n locations
  Clone ID: PAT_MRT3847_2495C.1
caaaaactgctcacctaatcaactcagtgtaatgcaaggtggacatttctggtcctaataactagcgtcacactgaaacttgcttattcctaaactctaggacttctgctaggcttctaaccaacctcctaaagctgtctaaaattttttctgcctctgaatactctacttgacatatatcatttggtttatttgggccataagcacttacaacagaaggaaataaaaaggaaaaatgaaataaatttgtcaataagctaaaattagcttatgaagaagttaatttgtagaagttgtctcatattagcttctccagaagcatattttttacttattcataagttaattttagcttatgaagaaacttattttatttttccttcttattttcttttcctataagtacttttgggaaagtttatctgaacaggctccagtttataaatgaaactgacatgagtaaaaacaaaagcaacggaatcaaaactagtcattataatcttctactattttgggtgaagccttttaggggcctatggaattcttgacatccacattntacaacagtttgtgaactcattcaatgcatgatttcaggattcaggacagatttcttaagggcat

SEQ ID NO: 59744 - DNA, 2969 bp, Glycine max
  Clone ID: PAT_MRT3847_24960C.1
gcgagctcatactagacacgcgctcttcggactttgaagacatgcttaggtagtttgagtcccacctccgtgacaaagtccgaggatgcgttgcctcttttcactccacggcatttgcataacttcgctgatctctcgttttcaccatctgggtctccccaattttcgcctcgattcttgttcttctcgatccattggtgatggcatcgatgggttctttaccgtttcttgtggaagccaatgccgactccactttgatgatgatgatgcttcagaacaggaatcacaagttttcttcatcaaagtttaacactgtgaatgcttcatcgttagtaagaggatgggggcgtggaagagtgaaacataggtgtagtagtaggggtttgttgtgtttggtggagaagaataagcacataagtgctttagggaagagttctgggacaagtgaggataaggatgagtcagaggaagtgcttcacgccacaattgagaagagtaagaaggttcttgctttgcaaagggaattgcttcaacagatttctgaaagaacgaaactggtttcttcaataaatagtgaaagcactcctgaaataggaggcaacagcatttcttatgagcacagtgacgaatccttgtcaagtgactcaatttcggttaactctggcacataccaatgtagctataaacatcaatccagcaatatataaaataaggctagaaactttattgtcctttttggcaaaaataagaaaagtatcatatgcagtcattgagcaaaaaatggacaaaggtgaagatgattctgtgaaaaggcttcacctaggctatattttgatgaacagttgaatagcaagagatatgagacaataacacctgataccctgacaagtgaaatcccacgtagcactgaaacctctaatcgaaagattgaaatacttgaagctttgagtgaatcaagtacaaaggaggttgctaatgaaggcgacaatgtggagagtaaaggtgaaaaccccccaccgttggctggggccaatgtcatgaatgtcatattggttgcagcagaatgtgctcccttcgtcaaaacaggtggtcttggagatgttgctggatcattacctaaggctttggctaggcgtggacacagagttatggttgtagtacctcggtatagtcattatgctgacgcacaagatataggagtatggaaacgatacaaagtagatggtcaggacatggaagtaacatatttccactcttatattgatggtgttgacttcgtttttattgacagtccaaactttcgccatttacaggataacatatatgggggaaaccgagaggatattctaaaacgcatggtgttgttttgcaaggcagctgctgaggttccttggcatgttccttgtggtggagtttgctatggagatggaaatttggccttcatcgcaaatgattggcatactgctttgctgccagtgtatctgaaagcatattatcgtgaccatggtttaatgaagtacacaagatctgttcttgtgattcataacatagcacaccagggacggggccccattgatgatttccgctacacagatttacctgaacactacatagaccttttcaaattatatgacccggttggaggtgagcacttcaatatcttttcggctggtttaaaggcagctgaccggattgtcactgtgagtcatggatatgcatgggagattaaaacttctgaaggtggttggggtttgcatgggatcataaatgagaatgactggaaattgagaggaattgtgaatggaattgacaccaaagattggaaccccaagattgatgttcacttgaaatcagatggatacactaactacacccttgagaccctgcaaagtggcaagcgtcagtgcaaagccgccttgcaaaaggagctcggtttgcctgtccgtgaggatgttccgttacttggattcattggaaggctggatcaacagaaaggcattgatctcatagccgaagcaattccttggatagtgggccaggatgtgcagctagtcatgttgggaactggaaggccggacttagaagatatgcttaggcagtttgagtcccaacaccgtgacaaagtcagaggatgggttggcttttcggtcaagatggctcaccggataacagcaggtgcagacatattgctgatgccatcaagatttgagccatgtggattgaatcaactctatgccatgaattacggaacaattccagttgtacatgctgtcggtggattgagggatacagtgaagccttttaatccatttgaagagtcgggccttgggtggacatttgacagtgcagaaactaacaagttaataaatgcattagggaactgcttgttgaccttcaggcagtataagcagagctgggaagggctccaacggcgagggatgacgcaggatcttagttgggacaatgctgctcagcagtatgaggaggttcttgttgctgctaagtaccaatggtaaattcttggcttctactctacctaagcagactgatcaatatggagtgctctcatgctgagtgatatcaaggtctgtgcagggaaaggacttggtcaagttgttaaaaccttcatgttgcaggtcctggaggaacatttttgcccctaaactaaggattatgtaataatacacttgttatatatgtcatgtctggcacatacctatgtagctaaaacatcaatccagcaatatataaaataaggttagaaactttattgtcctttttggcttaataaagtagagtattaccccttcaggaaattccagatatggctatgggggactctctaggcctatatttcatagctttgggaagtatctgaacttcccctcaaataaatttttatctgtctttcccttatgtacactaaatgagaattgcaatgacagcttgacgtctcatcagataacccc

SEQ ID NO: 59745 - DNA, 365 bp, Glycine max
  Clone ID: PAT_MRT3847_24961C.1
gactaaagacttaatggcgatgtgcttacttggatttccacttttgttatttttagccataaagacaacaactgagttattgcagaaaattctcaaatgccttgaaatagtatcaactatcttcagtccagaaatgaaactcttaagtcatacaccatgtgatgtagcctcaaaacaagagacaaaatcagcttccatggtagaagtagcagccaaattttgcgtaacactcctccacgaaatagctccacccgccatcataaaaatgcacccagatgttgatttgcaagagtcaacatagtaagcaaagtctgagtctgaataaccaatcacatctagagtgcttgtctgtctatacataagca

SEQ ID NO: 59746 - DNA, 593 bp, Glycine max
  Clone ID: PAT_MRT3847_24962C.1
ggccggccttctttttttttcttaacacctcgccctatggaacgaggcctttcacatactccttacggaagccaataccccttgttgaactgctcgggattcgaccttactggctcttgccccacaaacatccaggaccataggagttgtcccacctccgacaagagtccacaattacttcccaaaggatccactaggattaggggctttgggcccgaacggacttcaggcgcgatatgtgtggatagggcacatcggacggctaagtttacgttgtgacttttatggggtatggcttatataggagacttactgacggtgctatccaacaagggatgattatagcggatgggggattctacaattgatgacaaggccccctggcaggatacctgatttggagcttacaatggccctgaagtctagcaccccactactttgattacggcactgattattataaagccctggcatattgtgttgggagagttgcatagtaggcactactgggatcccgtggctgacacagagagccttatgcgtactggataggtgaaccagctgttgatcataccagaaacatcttatggatg

SEQ ID NO: 59747 - DNA, 139 bp, Glycine max
  unsure (1)..(139): unsure at all n locations
  Clone ID: PAT_MRT3847_24963C.1
cggnttaaagcaactgatgatggnagnatactaactcatgagagacagaatctcggcaaacgggatcctcagcttaaccatgaccggcaaaagaacnaaccacccgccncccccttgctttcatgggggtcgtgggggg

SEQ ID NO: 59748 - DNA, 266 bp, Glycine max
  Clone ID: PAT_MRT3847_24964C.1
ctgatactgtcagacttaggcgtatgacacgagagaaactgatcctttagctgacctacagaatatgtataacagcactcacaaaggtacgaccttaggggcattgatgatgggagtgcctggagcagtagctggccttaatgcagacgggatgaagcatgggcgaatggcatgggaaaccgtactgcaaccagctatagcacctgctggagagggttgtggtgctaatggtactgtgctggaggacatggctcatgctgccaaaa

SEQ ID NO: 59749 - DNA, 363 bp, Glycine max
  Clone ID: PAT_MRT3847_24965C.1
gacgtgagagacgacgagggatcggggctgagaaaaagtcgtgagaaagaaagcatgttcaacactaagtgccttaaagttgacccaactggacaagacttaagagctaggcagcagaattttatatcaaactagtgatcaagccatcatgagtggaatggggcttggctttgtgtaattcaggggtggagagcaatcacaaataatgactaacaggtaatttatgcaggatcaacttccatgatatcgaggttatgccatatatagatattagctgagcatgcactagctgatgcttcattgtgctggatgggagacacacgagaggtttctatgtggggtttggcattgactctaagctct

SEQ ID NO: 59750 - DNA, 2195 bp, Glycine max
  Clone ID: PAT_MRT3847_24966C.1
atttagtatttgtagtttatgaccgtgttactttcgttttctctagtatcacattatcaattcaatattgtatcactggttcaaaatattcacctgcttgttccaattgattatgaatttccttggttctctcaaggtagattccataatgatatgacccattacacatggcatactgacttcattctcatattcacagatagccttgttttatgctgctgtgcttgcggggcttctccatcgattccctgtaagcttttctcagcatacggctggtcagatacggaaccgcaaatcaggcccttctgctggtacaaagtcttgaacaaggtgaatcaatcacatttgctgatattgctggtgttgacgaagctaaggaggaactagaagagattgtggaatttcttcacaatccagatagatacgtgcgaacaagacttggagctcgtccaggtgttctcttggtgggtctttctgggggatgacttactggcatagcatgggtggcagacgggaaggatgtggcattgcatataagttgttctgctagtgagtttgtagagttatatgttggcatgggtgcttccggtgtgagagatctatttgcaagggcagatagggaagcaccgtccataatatttattgatgagatagatgctgtggctgaaagtcgtgatggaaaatttcgcattgtcagcaatgatgaacgagagcaaaccttgaatcagctgctcactgagatggatgggtttgacagcaattctgcggtcattgttcttggagctactaatagttcagatgtcttagatcctgcacttcgacggccaggaagatttgatcgggtagttatggtagaagcacctgatagaattggaagagaagccatccttaaagttcatgtttccaagaaagaacttcctttagccaatgttgatctcattgacggaattgcttgtatgaccactggttttactggagcagaacttgcaaacctagtaaatgaggctgctttactttcaggaagacaaaattcaattgtagtggagaaaaaggatttcattcaagatgttgaaaaatcgacagcaggaatagaaaagaagactgcggagttgagaaagtgtgaaaactgcaaaacagcacggcatgaagctggtcatgctgtggtaggtactgcagttgcaaaccttcttcctggacagccacgtgttgagaaactaagtatattgcctatgtcaggaggggctttgggatttacttacactcctccaacaaatgaggacagatacttgctttttattgatgagttgcatggccgcctggttaccctacttggaggacgtgctgctgaagaagttgttttttctggtcgagtgtcaacaggtgcacttgatgacatacgacgagcaactgatatggcatacaaagctatagctgaatatggtcttaatcagacaataggccctgtttcaattgccactctttctagtggtggaattgatgagtctgggggatcagctccttggggaagggatcagggacatcttgttgatctagttcaaaaagaggtgaaaacattactgcagtctgcactggaagtagcactttctattgtgcgggccaatcctactgttttggagggtcttggtgctcatttagaagaaaaagagaaagtagagggtgaagagctacagaagtggttaagattggtagttgcaccgacagagctggaaatcttcatagacggcaagcaagggtctctcctcccattgcagacaggttcctgaacatttgagagttgtctatttatgctaccaatgtcgagtgaaacttaaggtatgatttttgacgttggcgggctaaagccagtgcagatatatctcaaacaaatgagttcacccttacaacctttgtatattcctgtaaggtgaattttggcatcatttttaacacgtagccagcctgttatttaactcataattcactcatccaaagccccaggggagataaaaagataaagaaaaatacccagtagtgcttctccccatctacatatatactggtagttgaatttgttgtatattgactattatttcagtcatgatgtggctgtttgcaaatgtaatttggtatatagttgttgtatacattaacgattctgtgaaatgtaaacggctctgctatatgttacccccaaa

SEQ ID NO: 59751 - DNA, 250 bp, Glycine max
  Clone ID: PAT_MRT3847_24967C.1
ccctcgcgtttttccacgcgttcgtagagatgtttttggagcagaaggtgattttatcacctcacctgaagttagccagatgtttggtgagatggttggcgtctgggtgatgtgtctttgggagcaaactgggcccaccacatggagttactctagttgcgcttggcccggggcgaggaactttcatggtcgatctccttcgcggtgcttcaatgtttaagactttcattgtgtcgttgcatgtacactt

SEQ ID NO: 59752 - DNA, 266 bp, Glycine max
  Clone ID: PAT_MRT3847_24968C.1
ggctcgaggagctatcacttagaccttatgctctggggctggtgagttttttcttcttcttgtaatggctttgagctcctctttcagttgaatgaaactcttttccagaagttcttcttggtttcctatcacaagcgatgcttgaaatgtagccgtatgcagtccacatcattgtaagtttgtaatagatctatctggagatgttagaatcaagcactcccctaggattttttttggtagtcctccaatactaactgaccatgcca

SEQ ID NO: 59753 - DNA, 229 bp, Glycine max
  Clone ID: PAT_MRT3847_24969C.1
tctcatatgagacttgagttcccatatcctactctccaggagctaattctagctggatcgaataacagcccgaagtgctgctgatatagcctgatatgctgagagtgctattggagggagcggggagagctgagccagctggcagggatacgcattatctgacatctgttatggagacagacatgattgcgcctattaggatccatgagagccagagactggatgacga

SEQ ID NO: 59754 - DNA, 255 bp, Glycine max
  Clone ID: PAT_MRT3847_2496C.1
ttttctattgcagaaaaggttgatgtggttgcagttgtagtagtagatagagaccaccaaaattacaatattgcagttgcagatcgtaatttaaaaccatttctctttcatactattcttgtattacttttttaagtgaacctttttgcttgctttattcttcaacctgttctcagtttaccttttttatcttaacattaactgttagcactccctaaactactggcttcgaggcaccagcaaccttctaaggag

SEQ ID NO: 59755 - DNA, 103 bp, Glycine max
  Clone ID: PAT_MRT3847_24970C.1
aaattggcggttgctgacgcctcaactcctaggggctccatgtcggatcttaaggaagctcaagatagaatcgcacttgccatggacacggtttgaggaacca

SEQ ID NO: 59756 - DNA, 224 bp, Glycine max
  unsure (1)..(224): unsure at all n locations
  Clone ID: PAT_MRT3847_24971C.1
gtcgcatgcacgcgtacgtaagntnggaattcggctcgagnncnaggttncattncngctcntncccactanttaaaaaggcttttccttggngntgnatgngcaaggncaagttcggnntcaacggcctttcgaangacttggcaggtntagctgncaaaganccntttgnnaagngnncnangtngaancccnttggacggtaacgancctttcattaccac

SEQ ID NO: 59757 - DNA, 406 bp, Glycine max
  Clone ID: PAT_MRT3847_24972C.1
cccacgcgtgcgtcgggctgagagaagacgacagaaggggacgtccgttaaacataaaaacaaaagcactctggctctttctactttcccccgaaaaacccttgaaccccgaccttcatatttagggtgctagtctgtttattaattgaggtatgttcttgtcaataacacttggacgaacactattaggtgcagctggcagatcaaatcaataggccactacagcagctgctggtggtggcagagaaggacacaacccccttcaggagtcctttgaggcacacaggagccctggtgatgacaaacctggttgttatggccggagttgggaggcgtctgaactgcgtgtgaagtcttgggacgaccttgaataattgggggatgcgctgctaaagggcaagaacct

SEQ ID NO: 59758 - DNA, 452 bp, Glycine max
  Clone ID: PAT_MRT3847_24973C.1
gaaaggttgatggaacttcaaacaccgaactgttaattggacccgggtataaaacaaacaaacaaaaagttgcagtaaacattacatttaattttcacaagctactgatcattcttgccccaaaaaacgttgttgtcactctccatccaggtggaataatataataataagccatgagaaaacaaataccacatcataatagtaccctgagttggactaagatcctcaaacaatggagggcacattgcataatcctcttgataatcagcagcatcagctctgaccttattgtagggactattacccattgggctttcaagcctatcatctaaaggcctagttaaccgtgggcttctactattaaccatggttggtcttgcgttaagtggcccacaatgcccagggctttttactgggccactgaacctaccatcaagaggcctagtaagggt

SEQ ID NO: 59759 - DNA, 430 bp, Glycine max
  Clone ID: PAT_MRT3847_24974C.1
aagcagtcaaaactgtttccaaaaccttttataacataatgggtaatccttagggacataaaacaaaaaatcccttgaaaacgaggtttttgagttcacaaagggatcccctataaaaaaaacctatttatagccctttccttctgctttacctccaagataaaataaaccccacataagctttaagcaggttttttgttggggactccatcaccaacatcacgatcacaattttgggggctttatttacaaaaaaggggaaataaagggggttcaaaaaactcctgccgtggaaggggggtcgtcaaaactccaaaggtttatagggtttccgggggcgtaatgagttgggtttccgccgaccaaagaccccaaggaggcatcagcccaggcttaataaaaaaaagagggggtctcaaagaacttgagc

SEQ ID NO: 59760 - DNA, 288 bp, Glycine max
  Clone ID: PAT_MRT3847_24975C.1
cacgatgtaaccttaactgagaaaaccaacacaacctcacaacttaactccatctccacgctttctgaactgagtcttctctgcaacttcttctattaaaaaccatatttgttttgcttcttcactatgttcctcgaccaccttctgacttctgagtaagtcgtcttcttcagcgcgacaccatccacaaattgatgaaggcgttcatgatggtaaactctgctcctacgaacacactcgaaatgcctctgtagaggttagtgcagccaataaaattggagagggggg

SEQ ID NO: 59761 - DNA, 409 bp, Glycine max
  Clone ID: PAT_MRT3847_24976C.1
aaggttctggcagtaaagagggtgtttttttccagattaggggtgcatattagcacttaaatctagtttataaaatgtgagaggttatgcttgctcaaaaatttcaggctatgatttaacctgggaattgctgatcaaaagcaggttctagtacgccctttaaggagactactggatcccctgctgaaaccgaagtacattggaccatctgctcggtggagttatcttaaaaagattcagtggtaataatagagaattgtaggttatgtaatgggggatttgctatggagaaagaactgtacagggaccagagggttggttgtacaaattcagcaattaattcaggtgtggtataatgatcaggaagtgtgtgcctgcaacagtcttaagcttttttaagattgctgtg

SEQ ID NO: 59762 - DNA, 1527 bp, Glycine max
  unsure (1)..(1527): unsure at all n locations
  Clone ID: PAT_MRT3847_24977C.1
gttgatttagtggagcaatgtcgaacatacaagcagagagtggtaaaccttgttaattcagcttcggacgagtcactgctatgccaaggcctaactctgaatgatgatctgcagcgtgtcctggccaaacatgaatccattgcttcaggaacttctgctcaaaatcctgctgagaaaccgaaacctgcacctactggagcacttgtagatgttgatgatcctttggttgatattggagatactagtaaacaaacagatgtgagatcgtcttctagtgctggagctgggtctcaaacattgaatcagttaatgcttcctgcacccccaacatcaaatggatcagtcccccctgcaatggttgatccccaagtggacctactcagtggtgaagactataactcaccaaaagcagagacttcacttgctcttgttcctctaggagaacagcagccagccagccctatatctcaacagaatgcccttgttctttttgatatgttttctaatggaagcaatgcacctatttctgttaatacccagctaattaatgttgctggccaaaccagtccgttagctcctcaatttcaacaacagactttcatatctcaaggactgttttaccctaatgtaagtgtgccaaatgtggggtcacctcgatatgagcaatcaccttttgcccagagcacaggtccttcttggaatggccaggttgcgcaacagcaacagcctccttcaccagtttatggtacagcaagtggtggatcatttccgccacctccctgggaagcgcaacctacagataataatagtccagtagcaggcagtcaatacccacaaccactgcaagtgtctcaaatgattatgacgagtatacagagtggtacacatcctcagggacctcaagcaatggggcatgaccaggctgttggaatgtatatgcagccacatgctggccatatgtcaacgatcaataaccatgtccaaagcaatcaattaggcttgtaccgacagcatattcagggtgctgctggtccctatatgggcatggtttcacatcaaatgcataatagtcccgtggcttccatgtatcctcaacagatgcatggcaaccaattcggaggatatggctatggtcagcaaccaggagttcaatatcttgagcagcaaatgtatggtttatctgtgagagatgacggtgctccgaaaaattcttaccaggtttcttctccatcctatgtgccaccggggaagccttccaagccagaagataagttatttggggaccttgttaatatggcaaaagtgaaaccaaaacctactcctgaccaaactggtagcatgtaaaactgtgattgggcttgcatttttcacctgtttgctaaatcttgtcgtctattttcttgattcttttcatttttgttttacatatattaattataataatgtatgtacattatttattttgttatccataaagtgttgcttgtttggcaattggcaataaaaaatgtacatttttctngagaa

SEQ ID NO: 59763 - DNA, 311 bp, Glycine max
  Clone ID: PAT_MRT3847_24978C.1
aatcttggttttttttgtaagaagaccaaaaaaattttccgtataacgcagaagaaaaaagaggtaaaaaaaggggtccaggtgttccacccccaagggtcccccctaaaagcccgaaggaacccagcgcggcaaatttaaaacgtaaataagaaaattctgcaaccggggaaagcggcctgtatttgtttttgtgggcccaaagggggggggtttataaatactaaccaccgggaagagacctctgtgcagccgccccccgttcaaacctctcttcaaaaccataaaaacccggggggggaagacaaaaa

SEQ ID NO: 59764 - DNA, 890 bp, Glycine max
  Clone ID: PAT_MRT3847_24979C.1
aattcggctcgagggttttcactgatgtgtgcattgggtggtctggttcaatgggtgttgatcaggttttggaaaagtcagcgctttttcatagggctaattattcggggcttaatctaagtggggtttgggttgttgggggttgtgggtatcctttgttggattgggttttggtgccttatactcagcagaacctcacttggacgcagcatgctttcaatgagaagattggagaggttcggagggttgctaagggtgcgtttgggaggttgaaaggaaggtgggggtgcttgcagaagaggactgaggtgaagctccaagatttgccttttgtgcttggggcttgttgtgtgttgcataatatatgtgagttgaagaatgaggaaatggatcctgagttgttggagaatattgatgatgatggtgattatgctgaggtgatggagccagaggttgccttgagatctgttagctccttgaaggctagggatgcaattgcgcataacctcttgcaccatggactagctggcacttcttttgtttgattggaatatggaattgaaaattgaaggttgggattatgtataattaattcttttgcttgtttttatttctagacatatggtgatagtattcagtcaaggcattcatcattgtttgttgaaggggctttgtaactaaaaggtatattcgcccctccgacgattatgtggttaattgtaatagtcgtcggtgtcaggttttatgtaaacattctgggaattgtaatattctagttcctttaactattcacgtgatgatatttagacatttataaattacaaacatcctattaatacttttaatttttttttcttattgcattatatcaccaataaaattaataactt

SEQ ID NO: 59765 - DNA, 1207 bp, Glycine max
  unsure (1)..(1207): unsure at all n locations
  Clone ID: PAT_MRT3847_2497C.1
gctaagggtttatttaggtgatggtcattagtaaatttgttcttatttcttaggcattattaaatttgttctcctgtgtttcttattcgcgatctagaactagtgtttaaatttaaatagcaagtttgtgtgattattcctagaggaaaaatcaaatgtagttaaagccaattgttttacccaaactctaaaatttgtgatacaggtagcaaaagccatccaaggtcttctccctgtaccaggagccaaggcgcacgagtcggtaagaagagaattcgaagtaatggagaaaaagaagtcagccattgacaagaaagcagacaccatggttcggcgtgagctcaggggagagttaggtttttggttcggccaaacaatggcattcatgaggcttacgttttgggaactctcctgggatgtgatggaacccatatgcttctatttgacctcgaatgtactgcatggcaggctacaccttcttcctaaggacctcaaaagaaccttcctttgaaggcttctaccaagtccgtttcagctccaagcagaagcacctcatgaagcttcacaattttgacattgaaaagtataatcaactcagggctgcttgctctcccaccaccatgcctccaaagtttgatccctccattgctctcccagtcgacaattcttccattcatcaatgatattgaaggtggtgtggtgattggcctaatatgaaaataaagatgatatggaaggccctcaataacattaatcatttttcattcacttcagaatacagcacattgctgtctccttcggcaaatttggggttacaatcccctccaccgattcatccccttaatggtgtgttagaattagatgcggctttatgtagaacagatgctgagtgttcttttcgattttcctttaaatgtcttttttgagaatgacaaaatgtcaaactctcttcatcaaactttttcttcaactgcataaaaattcattacagcaatattctctccacgagtacgacaaaatttgtccttcagcaacaaagttcttcattttcttaaaacctgacaaattttagatattttcgcacactaaacatccaaagaaataacacaatagaagtaattggacaataattntctgttgtacacactcttaaaaacattaatattttagagtcacaaaattagatttccatttaaattatccttcg

SEQ ID NO: 59766 - DNA, 259 bp, Glycine max
  Clone ID: PAT_MRT3847_24980C.1
taagcccgatcctgttagcgggcgcatccacctcgccacgcgtcgagaaaggtgatggaacgcctggcatggtttacatactaggacggggacctctctgataacactctgtgccggcttaaagggatggaaggaaatccgaccgtgacgggaatttgctgcaagctatgagtcgtaaccccgtagaggcccaaaaagtattttttggggacagcctgcccaccctggaaacggctcagccggaggtagggtccagcgg

SEQ ID NO: 59767 - DNA, 372 bp, Glycine max
  Clone ID: PAT_MRT3847_24981C.1
tacaccatcaattttgaggcttttccccacaagttggtgcagtttggagagattcaggaagtccccttctttaacttttctcacgaggaatttcttacctctcggttaactcattagcctcctgcaacaactctgtctgctgatgagagttcctatttgtatgctatggttcatgataccttagtgtctacaataccaattgattttgctattgatgttttcttgacaaccataaactatttccatgcatttggccctcaatcctggtatttcaggttctcttcttttgggcaccattcctccttctatttcacatcatccctgtctgtaatcaattggcaacagtgataccaccacccttttttgattcta

SEQ ID NO: 59768 - DNA, 744 bp, Glycine max
  Clone ID: PAT_MRT3847_24982C.1
tagcttactactccacctacgggcattggcatatattaatatggttgaggacatctcgtggggaatttgtgaaggctttcacttgtgagcttagaaaactgaagatgggtttcacaggggagttggtaagaagtgtcttctccaaaaatcgttctgatgggtctcatgaaaacaaagtgaggcgcaatagtgctaaaaatagaagaatgttatctgtgaggtcattcttgtgtggtgatgaattcaattcagtccttgcagagaatgattcagcttcagttaagagctctgaagtcacggtttcacagtccgtacatgagggcttgttaaacgatgaaggagacactgaaagtgaagaaactgtggagaatgtagcacagaacaggccaagttcaaactccaaaaagtcattgaatgaggaagaagcagctgttcttattcaatcagcatttagaggcttcctgttgaggcgtcaaaatggagaaatcaaatcacaaactggaaaagatgagttcaatttagtaacagaaagtccagacaaaaagtccatagtgcacatcaattgatgtccatacctcaaactcttcggtagttttctttgtcgaaggagaaataaagggcatttgccaccgtattcagcgcaggatccagaactcaagcaataaagcaaaaggtactacagaagacaatgatgcttgtgaactggcactccatgattttggttaaaagagaaaaaattaaaat

SEQ ID NO: 59769 - DNA, 571 bp, Glycine max
  Clone ID: PAT_MRT3847_24983C.1
ctttttttttttttttttttttttttttttttttttttttttttttttttttttttttttttttttttttttttttttttttttttttttttttttttttttttgggggaaaaagagccccaaaaaatggaattaacggaaaccaacccaaaggggggcctagggtacattacagggtggggtcaaaccccaaacatggttggaaaaataaagaggggggtggaaaaaaattgttccggccaaggccaaaacccaagcccaagggaacggtgtcattttgggttttgccaggggtattaggggtacaaggggaaaaaggaacatgacccttaatatgaccctgatgttttttggagggggaactgggggaattggaatccacattaaaaggaggagggccatttccattgccttttgcaaattaagaaggggggggggaggttccatttgccaaggtggagctttttgccaaaagcaaaattccaaaacccccctttggggtaccaaatttttaaaggcactcaacgttttgttgggaaccattgaacaaaaaatcaaaacagtttttttt

SEQ ID NO: 59770 - DNA, 644 bp, Glycine max
  Clone ID: PAT_MRT3847_24984C.1
catgtatgttggtcaattgaagttctttaatgggcaagccccagatggaataaaaagctttgggagctcactttgcatggcttcaatttctcttggtaactatgtaagcagcatgcttgtgaacatggttatgataatcacagcaagagggcagaataaaggttggattccagagaacttgaacacagggcacatggataggtttttctttctccttgcagggctagctgcctttgactttgtgctgtacttgttctgtgccaagtggtacaagaacatcaatattgaagatagtgacatgggagaccaagaggaggagctggaggatgtaaatagcaaggtttgagagtttcatcttatgtgtccaatgcaagtgtgttgagtagtatttattttctctccccccaagcattaatattaatgtattcagtcaataagaactgcattctctctctagccaccatatactgctgcgttaggcttctgtttgtcattaatttttgttaaagtgaattggatgtgtaagccagtgatttgtcaattgctggtaagttatccatttataccttagcttaatcattacatgacaattcatcgtgtacatttccaattaatgaatatattattgatgaatagcatgtgtt

SEQ ID NO: 59771 - DNA, 398 bp, Glycine max
  Clone ID: PAT_MRT3847_24985C.1
atatttttcgttttaaaatttacgaaacataattatgtattggtttatttatataatgagaggaacataaactaacaatcatattctgctagtcatttttataataaacaacattatgatttattcatatcacatgatcactttacttataatttatggatatcatctcaataccacattattcaagttatattaccaaaatcaaatccttatcctacattattcttatcatctacatttatcattacttcattactcaagtttaaaaaccaaatttttacatacttttaataaaattacacttctacttacatatttattctatattacacaataacttttaaatattatattataccatatttttaatcattctaatatacaatttcttacattac

SEQ ID NO: 59772 - DNA, 1480 bp, Glycine max
  Clone ID: PAT_MRT3847_24986C.1
tccttatcttggaattccggttgaggctcgagccgctcgagccgtgtgtattctggacattaagtagcctaatagttgcggattagtaaaattgctctacaattttgcttccaataatccatgataatgtctgtaccagaaagaactaaagcgataatttttcataacagcatggaattgcttgttaatttctatttatcttcatgaaaataagatcttttcaaatgctactctattgttaactattctgccttgcagtgctctgaatgaactgaccaataatcatggagaatggagatatcaaggaaatgggaaagttattccaaaatcaggtagcactggctacacagagtggttcctctcaaaggatcatcttcaggtgggcgacgtggtccgatctagaaagccttccaatgcatgcagacctcaaaacatggacatcccagaaggaactgtcgttggtttagagcgaaatgcagatcacggattcgccctcgtgagggtccatggaattcatgaccctgttaaaattcatatgtcaactcttgaacgtgtcacatttggcttagtagctggtgattgggtccgcctgagggatgaaaatgagaaacactcactggtgggcattctacatgccgtcaatcgcgatggtagagtggctgttggatttctcgggctgcaaactctctggaatggaaactcttcggaactcgaaatcgcggaatcatactgcatcggccagtttgtcaggctcaaagacagcctttcaagtcctcgattcgaatggcgtcgcaaaaggggaggagcctcggccgctggcaggatttcatggattctaccaaatggatgcttggttgtcaagttcccaggaatgctccctttcggaaatgaaccaagcacctacttggctgatccctccgaggtggaagtggttgagttcaagacatgtcctggaatgatagagaagtaccaacatgtagaggatcatcactgggcaattaggcctgttctaattgcaattggtctattcactgctctcaaactaggcatatcagttggaaagaaagtgaggaggaacaacaaggtaactgcaatagaaactgaaactcaatatcttgatggtcaaaatcaaaatgctgccacctctgctacaactacaactactacaaagaaaccttccacttccagtgctacaataccagttagctcaatgtgggttcctgcagttgctaatatgatttttaaggaaagtgttacctcgtccaatggtcggtagtttatttattttggtgtttctatctcaaaacagttacataataattaaacatggactttaaattaaatggtaggcactaattatacatgaatatgacatcaggattcaggactgactctgaatgttgacattgtacatatatccttcacaagattagctctagtacagtctccaatgctttgcacaatgaacacaaatttcgtt

SEQ ID NO: 59773 - DNA, 989 bp, Glycine max
  Clone ID: PAT_MRT3847_24987C.1
accacgccgtccggcttgatttctatactcccaatctccttctccatctctcgccctctctctcctcactctactctactctgttggacttttggagtacgagcctgacttctagacggtttcatgacccccctgggcttcctctggacttcaactttttaagtggttcccctcttctccttgcccttctcttttgccttctccgtcattgcttcttgatccctcttcacacaccacgttttcctttcaagccttcttgccacttggccactgatttctgatctttacacttcaacaacccttccaaccaccatttccacttgctgtgaccaaccgtcttcagaacacccgggtacaccccatttccctttctttgatttttcttttacccttctggattgttatgcttcccaacatataaagattgcatcttgcttcctctaaccctctttatatatatatatatattttggccttttgaaataagctaagggtttgagatctttttggctcctagaaatctaagattttggccttgtatgcattgattggtttttggttttcctttcttaggttgtttaatgtcctctctgacagtttcttgttgatttgttaaagttcaaattaagcttctattattgttctttttcatctgagaaatctaggttgtagatctttctgggagtaatagtgggttcgctgttacaacttacaacacccctcccactgattttaattacctttaaatggtccactaactgatttgaggtttcatggttaagaaagttctaggttggtaattaatgtctctggtttggaaaagaaattaaattgactaaaatgttttactagttgtcatttacctgttctgaagttttgaattatggtaaaaaaaaaatcgactctttctttgtttaggtagagtaggcattgcagatcacaaagcccccccccaagggcggccgctccttatggatccaagcttacgt

SEQ ID NO: 59774 - DNA, 233 bp, Glycine max
  unsure (1)..(233): unsure at all n locations
  Clone ID: PAT_MRT3847_24988C.1
caagaaaattattatacccatntangatgaaaccgnacctacgtgaaatattcntattattccntatncttccttcggcgagatggggcgaggctaaaactgataggacgacgataacantggtttgggncaagggtaaagatgcgacnctaaaaaatttcccgagtcctggtcaggcggaaaacactgagnncagtatttacgaaaaattccacggaacttcatgggaatcg

SEQ ID NO: 59775 - DNA, 178 bp, Glycine max
  unsure (1)..(178): unsure at all n locations
  Clone ID: PAT_MRT3847_24989C.1
gttgngangcctatgatcgacaatgtgatgaggctggcaaaaatatttgctgaatatcataaatgtctctgttactatgtaaatcaagcgatggattctcaaagatcgggtgtggattcttctgttgaaatggccaaaagtgagaaggaagctgtttattctactgttaagggcagta

SEQ ID NO: 59776 - DNA, 493 bp, Glycine max
  Clone ID: PAT_MRT3847_2498C.1
aaaaaaaaaaaaaaaaaatttataagggggggggaaaatttaaaaaaacccccaaaaaaaacgggggttttttttaccccttaaccccccctgggggggggaaaacactttgggggcaaatttttatggggggggggggtaataacaaaaaagagtccccctcccttaggggagacctaccaggggaaaaaggggacttttaccccccccctgggtaaaacagggaatccccgaattttccccctttgcaaaaaaaaaaacccttttttgcggcggcggggggggggccccaaaaatttccaaaagtgattcctgggggaaacttttttccttttaaaatggcaaaaaaaaatctggccgaaaaaaaaagaaaaaaatcctggggggccaaaagataaatctaaaacacttccaacccaaaaggcccccggaccaaaaataaatccgcccccgggccctcccaagggcacaaaccaaaaaaatagggggcggg

SEQ ID NO: 59777 - DNA, 427 bp, Glycine max
  Clone ID: PAT_MRT3847_24990C.1
cgccgatcctgattccggtctgtcggtttcaggtaaccgtaccggggagctttggatcagggttccctgcttaatgaaaggttcttttagtaacgaccaatcatccacatcatcccttgattcatactgatggtttagaacgagggatattagttccattgcccatgacggatccatatctattgtggatctgttaaaggagctcatcacatactagggatatcaggttcctccatcgtaactagaggtcacgctactgaattatactgttatttgagatgccgctatacttccgtatacagatatggaagctacgcataatctgatggcgtatgtagtgacgagagctggatctatcttatcagaaactcataatactgattacgatgcaagataggtggctacatacaatctgattcgaaatgtg

SEQ ID NO: 59778 - DNA, 232 bp, Glycine max
  Clone ID: PAT_MRT3847_24991C.1
attacctcagagacgatcttaagatactgcaaacaacttcgcataccaacaaaagatcaaacaagtcatcatgtttgccaccaatctggtcagtgagatcaaccgtaacttcgacaaccataccgtaaccgaccgggttggttacccggcggcgcaacaaaagggttaagggttgcgtgcttaaaggcaacttggcttcaacccttgaaggggtgcgcccaaaggttgggat

SEQ ID NO: 59779 - DNA, 294 bp, Glycine max
  Clone ID: PAT_MRT3847_24992C.1
ggtcgaccacgcgtccgggctgcttccatccagttagcccagcctagctcttgagcctatcccatctgccaccaggctgttaccacgtgctgttatagctgtcttcactgactgagcaacaatgcggatcgacattattacattgtttcttatctacagaagaatctcggatacagactcttaattaatctctgtgttaccttgtagctagaactagcatcttatctcgacaatgtacataatatatagtttcattaaaaaacacatcagcatgggcggccgttctagatgatc

SEQ ID NO: 59780 - DNA, 322 bp, Glycine max
  Clone ID: PAT_MRT3847_24993C.1
acctttcttccgtggccgtcacattcagtacttccactgtatcttataaaacatcctgacccgaacacggccgcacagcggcatattattgtgagtgaaggaaccaccagggccggggatccggagccaagactacaccatgccacggccacagcaccagcaccgcaaggggagagcccaaacctgggagcgccgctatcgcagagcctaaacgctgctagtaaccgaagcactattgccaagaacgagggaacatgcggagctgcctggaaaactgggcgcacaacagcccaccattgcgattaggaagctggcaacagga

SEQ ID NO: 59781 - DNA, 261 bp, Glycine max
  unsure (1)..(261): unsure at all n locations
  Clone ID: PAT_MRT3847_24994C.1
ntnncntatgttnttgctcnttggaatctctnctaagttttcttgtgtgtctatcatgcagtctgatcatttgagactttatatngttgcgagtcgtngtgnagtngattgtaaaagcagttaaggcnaagcangtttcattcaatgcncnncanctggcnaattgnggccngtgnttcccgnttnttnnaanggtattcaagacattccnagtgatcccccaanacacttttgncccatctncncggcaaaaaantaccc

SEQ ID NO: 59782 - DNA, 129 bp, Glycine max
  Clone ID: PAT_MRT3847_24995C.1
ctcacaattcctgttttgaataaaggcttaataatgttcacgagtttttttttatggtgatgcagcattcacaatttacttcattgtgcctcattctttcaatccatctataacatacattatccttta

SEQ ID NO: 59783 - DNA, 391 bp, Glycine max
  Clone ID: PAT_MRT3847_24996C.1
tacggctgagagaagacgacagaagggggcacaagattgttgacatagctagaaacattaggatgaacatgaaagtgcttgttttgattgttgctacagtatggatggcatatgaatgccatggctaagactaccataagttccctctcgaaatgaaaactgggtttggtgggcaatacagaaatcaggtgggatatgccagatggaggcttggcgtggaagcaaacaacgtaatcaagcgtcaaactgttcctgcggcttgatgagagtacataactgactacgttctaagagacctatatagatcagattccaaaacagttaatcaaaacgcttatttatatgcttaatccctaagactgaccaacaatgatgcctttggcttggactt

SEQ ID NO: 59784 - DNA, 451 bp, Glycine max
  Clone ID: PAT_MRT3847_24997C.1
tttcaagtgcctaacaaaattgtattgtggaacctaactaccggggatttcaaggtcattcctccaacctagttgaatttgtaccacctaacgaggaccctcacattgttcttgatggatttggttatatgcgtggtagagatgactataaggtgattattaggcaagtacattttatccaaaatgagatcggtaccctgcaatgactccttatgggagatatatataacctaagaaataactcttgaaagaaacttgatgtccatatgctatatcattgtgttgataatgactgattatacttggatggaatgtgtcattggttgggtgaaaataatgaagataaggatgaagaatgcttggtgtcgtttgacttgagcaatgaggtgttctttccaacacattttcctttagacataccctcacacatgtatgatagttttgattttca

SEQ ID NO: 59785 - DNA, 458 bp, Glycine max
  Clone ID: PAT_MRT3847_24998C.1
gcgcgcacataggttttttcaagacagtgacagtgtgacatcacgttcttttccttcgtaggtgcgcccgcactcaccaaccaccagatctctccaaccttatttatttacactctcctccacaccccactcttttctttttccacattcgcattcatggaacgtgcccggaggctagcaaacaaggcgattctcaagaggctaatttcctcggccaaggttaattcccattcgcgttctctttcatctatttcccattccttttcattacccaaaccagagaacccgatcggaaacaaccgaaaactctcacataatgtcccatctcgattcatttcactggatgcgctcaagccgagcgacacattcccacggcgccacaactcggccacctcggaggaacaaagcaagatggcccatacatgcggcttcgacaggctggactccctcattgacgc

SEQ ID NO: 59786 - DNA, 754 bp, Glycine max
  Clone ID: PAT_MRT3847_24999C.1
ggcgggacgcggggctgcgcacgcgggaaaagcttccccggcatcccttcccccgcatccctaccccctcccctgcgtccccctgcgcccaccgccctcactgtgccgtcgcgaggctgcagctcttagagattcccaccctgctggacatctacacaactaaccaggaattggggcacagcatccagagaagggttcgttttctctggtgcagcctagggctgtgtgctcaggccaccacgggcaggtgaacatggcagagacattggagttcaacgacatcttccaggaggtgaaagggtccatgaatgatgggaggcttcgattgagccgtcagggtatcatctttaagaacagcaagacgggcaaagtggacaacatccaggctggggagttgacagaaggcatctggcgtcgggtagcattaggccatgggcttaaactgctcacaaagaatgggcatgtctacaagtacgatggcttccgcgaatcggagtttgagaaactctctgacttcttcaaaactcactatcgccttgagctaatggagaaggatctgtgtgtgaagggctggaactgggggacagtgaagtttggaggacagctgctttcttttgacattggtgatcaaccagtctttgagatacccctaagcaatgtgtcccagtgtaccacaggcaagaatgaggtgaccctggaattccaccagaatgacgatgctgaagtatctctcatggaggtgcgcttctatgtt

SEQ ID NO: 59787 - DNA, 240 bp, Glycine max
  Clone ID: PAT_MRT3847_2499C.1
ggaaaggagctggttacacatcagagaagccacttgatgcaaaggttttgaatatgatacaaatacatacacatttatttataatctatgatatcaatattatatattgcaaggtatgtctttggttttggattttttaaatgggaggtaagtcaagatattcttgtttggtttggattcagacactgagacgtttagctcaaaacaaaaaagctgcaaggaaaagccgtcttaagaaaa

SEQ ID NO: 59788 - DNA, 381 bp, Glycine max
  Clone ID: PAT_MRT3847_249C.1
gctcctacagatccggcaggggctgcgattttggatcggaacctcttctgcggcgtaacaatgggacactacatcgtttgaaattatcacccaataaactacggtcctggttatcgcacttgccgagtgtgtgggaacacacatggattgatcaagaaacatggccttatgtgctacaagcaatgctttcctttcaatgccaaagaaactgacttcatcaaatatggcttaaagagctgctgtcacctactgaccaacattatgttctaacactagaatgctctgaagatgttatgtatgaagaaacttgagacttacttttttcatctatgttattatcagacataatgtgtgaaacgaaaaatactcttatataaattg

SEQ ID NO: 59789 - DNA, 321 bp, Glycine max
  Clone ID: PAT_MRT3847_24C.1
catgcccgcgtacgtaagctcggaattcggctcgagctcgagccgtggttatagagggaaggaaaaataattagagtaataataattagagtagcaaatcatacacaaagtaataataattagagtagcaaatcatacacaaattattattactttggttatagagggaaggaaaaatgagttaatgctcatagtttggaggacatgtataaaatcattttgggtatcgtgactatcatgttaattacttgaatgtaatttgtcttaattataatcaaaaataacaaaaacattttggggcggccgccgactagtgagctc

SEQ ID NO: 59790 - DNA, 388 bp, Glycine max
  Clone ID: PAT_MRT3847_25000C.1
tttttggaattttctccttcttaactggtctgtcctcctaagcactattttccttcttcatttccacatccggtgccaaagcttaagtttctgatatgaaatcacccattgacaagtcatccacttctggggacagccccataggaggaggagccatcagatctgtctcaaacttgcctactcgttgggtgttggcctctggaaaagcagacatcactctgtttgaagatgaatatggtttctcagcatccaacatagagcatgatggcgattccttagtaggagaaaccgatcttccatctgctgaagcatccccaaacccagcacttgaattcattctgtcttccccaatgtcctcttttggtgcctctaatgatggacaaacatg

SEQ ID NO: 59791 - DNA, 650 bp, Glycine max
  unsure (1)..(650): unsure at all n locations
  Clone ID: PAT_MRT3847_25001C.1
taatgcgtaagttataatgtttctgacaaacatgattgtttaatcctgttattatcgatgatactttaaatattgtttagacgattcaatagtatatttttggagacctttttatgaagttcatgcaagttgttagaaaattcctttctacaattagaatttgaaatggtaatagttgctattccttatagtgcttattctatgggagaaccaaattctcatctgtggctactgacttgttgaattttgggcagactaacatagcatgtaaatgaatagatgacaaaagaatgcaatttcttgtaaggatattatcctatcacactatcttccgcttaggacaatattcttcagatgaaactctaaatattcttatcttcagatgatattgtcctatgacttgttggatttcttgtaaagatgatacttcaaatatttttcagatggattcaatagcaaattttggtggtttgcatatgaagctcatgaaagctgttagaaaattctcttctactattagaatccgaattgagaataggtgctattccatacagcttattctacgggactggagaaccaaattctattctgtgactaccgacttgntggattttgggcaaaccaacatggcatgtaaatgaaaacataac

SEQ ID NO: 59792 - DNA, 1259 bp, Glycine max
  unsure (1)..(1259): unsure at all n locations
  Clone ID: PAT_MRT3847_25002C.1
taaacactaccccttctcaaactctccaacactaaaatggcacttccatacccattttcctatctcctcttcctccttctaattctcttatcttctctcccaaacatttcccaagccacctctcgtgccccaaatcgcatgttagccttggttcaaaaccaaccgcttgtactaaaataccacaagggtcctcttctaaagggcaacatcaccctccatttgctatggtacggtacatttacccccacgcaacgatcaatagtcatcgatttccttgaatccctaacctccacgtcatcacctggatccccttcagtttccacgtggtggcaaaccaccgagagctacaggggaggcccctgcaccctcgtcgtagggaaccaaatcctcgatgaaacctactccctcggaaaatcactaaaaaacgaccacctcgtagctctggcgtcgaatcctaaactaaattcggcgcccggggatcgtgtcatccacgtcatcctcaccgcagctgacgtggcggtggaggatttctgcatgaaccagtgcgggacccacgggaggggcaagaacggaaattcagaaaagatcgcgtatgcgtgggtggggaattctgttacgcagtgtccggggcagtgcgcgtggccgttccatcaaccgctatacggtccccagacggcaccgttagtggcgcctaacggcgacgttggggttgacggaatggtgataaatttagcgacggttttggctggggcggttacgaatccgtttgaggacggttactatcagggtccggcgagtgcgccgctggaggcggtgtcggcgtgcaccgggattttcgggaagggggcgtacccgggttacgccgggaacgttctggcggagaacgcgacgggggcaagctacaacgccgtcggggtgcgcggccggaagttcttgctgccggcgatgtgggacccactcacctccacctgcaagacactggtgtgagatgaatgtaaagtgtaaacaatataaaaggaccataaaatatgggtttgtgtgtgagagagagaaaagagagatttgcaagtttgcctcggacggttgttattggaatgataggttatgtgtggtaataggtaataatagttaattttgatactttttaaaataaatatatatatgtatgaaataattagagattaatttccatcatctcagtataaagtttttttttgtaataaatataaaatgggtgaatttttttttnttaatttttg

SEQ ID NO: 59793 - DNA, 1073 bp, Glycine max
  Clone ID: PAT_MRT3847_25003C.1
tttttttgctataaataggatgacaaattccttgactggcaattcagaagatattgcgaaataacattcaccatagcgtgatagaactatacaatttaatatgtaataatgctcataaatatgcacactctaaacatcacgtacgaagtaggaactcatcaaggaaagaaggccaacattgcacagatgagatcagctatccaagttctagcagctaggaactcatcaaagataattaacgataaatgattaaaaaaaattcctcaccaggtacgcattctgatactacatttccacaataatgaatacaaaggtacttctctcataattctgctagcacttgattcacatttgttgatttaacaagactgattgatggttcgtgtttctcatctctagcaaggaactggactcctgtaggaaatggccacaaccttgagacagattattcatccattcagattaggatattcattgtctaccctaaaactgccacactcagccagagcttttgcattgagctccctaccatatttccagacataatttagacccacaagaagctcagtaattacttcttctgtcttttcttgatttgcaaagtaaagggtctgtactagcagcacgtttgtccgggaaataaagctctgctgttcataacttctctcagactgccatcttatcatgttatgagcaagtggtgccagccattcaagtatgcttgacattgcttcattccattcttctgctagacttgggtcatagattgatgatgatgatgatgatgccagggtcttggtatatggttttagcttggccttaagggaagctctcacacgtcttggtaacatgttatacaggtcatctcttgcatccagaccaatcaagtgtgaagaagctgctagcttctcaatcacaatgataacatttgcatagtgcagtgctagagcagcagcaccaagggtttcaggtggaggattaaatagcttgcaaagaggtttgaagactgattgagtatgatgaactacttttccaggaccaagagggttttattaatatctttgagattctgc

SEQ ID NO: 59794 - DNA, 867 bp, Glycine max
  Clone ID: PAT_MRT3847_25004C.1
cacgcgtccgaagaaatataggcattacaccagtagtcaactatctatgttatctctcctattagggcctttaagcctaggctccattttgggggataagatgtagtttaaaactgtaatttgattctggttttatatttgtattgcacaaggatttataaagtaaattgtaattttacatttaagtctatgttgttgattagatgtatgatttagattttataataacacataatattgttaccataacttcaaacttaaatgcataaataattcaatgagtattttattttgatggtggtaaggtaacaacacttgtggctatatcagtagagtctctagcggaaaaatggaaaatgttagagatttaatataaaatcattgatgccagtgttatttccgggtgattcttttttttgctgaatattattgcagttctattttataattgtaaaagtgcaagatttagagaaaggaagttctatttttattttcaactcattgtgtatttttatagggatacttcagtgagagatctgagagctagttctggggatcttgtgaggattgggaacagtaatgaaatgctaaattctgtggttaatcaagacaaagagactgacatgaaccatcagaataaaaaagataattttggtagtgatgcaccacattttcagagtggagttctccgtaccaactgcattgactgcttggaccgtacaaatgttgcccagtatgcttatggtcttcaagctttaggacgccagctccatgcaatgggtttgactgatgttccaaaagtggatcctgatagtagtattgctgcaggtcgactctagaggatccccgggtacagagctcgaattc

SEQ ID NO: 59795 - DNA, 138 bp, Glycine max
  Clone ID: PAT_MRT3847_25005C.1
atgaaggtggtgggtgacaagcactcaacatcaagcaagccaaggcggcggataacggaacgtgatgtaccacttagccaaaacgagatctccaaaactatgttggagagagagagagagaaagaggcttatgtgtga

SEQ ID NO: 59796 - DNA, 581 bp, Glycine max
  Clone ID: PAT_MRT3847_25006C.1
ttcccgggtcgacccacgcgtcccaaagttgtgattttgtgaactgggtatgctcaaagttgagattttgtgaactgcggatgctcaaagttgtgattttgtgaactgggtatgcggctgtgttgaacttgacttgatcctgttttagggtgtttcaccgtgttattttgatcaaattattgtttttgaaattgtgttgttgttgatttttggttgacttgtttgatactgtaattggatgtggctgaggaaaccggttttggggattgtttgtgtctatctgttttaatttagttatagattttgttctctctgtttcttcatgtagcatttggtgtttttttttttttttaatttgttttatgatgttttggccttaagaagttgcctttagaattaagctcaatatttctggacgaatctcttgcatgtccttgagatttgcttgcagatgcagatattagtattgggtttcctaactttaaagtatctgataacttttagtgaattaacatgaagtaattgtcccttccagggtgatgggattctattagtttttcaaatccatttctcgtttaaag

SEQ ID NO: 59797 - DNA, 171 bp, Glycine max
  Clone ID: PAT_MRT3847_25007C.1
cggatacaaggccgagacgggcgaccacttacaggggaccaattgataacaatgggcgctttaataccccccccaccgcatcaatggagttggaccgcgttctcctccgccagtgcaacccactccccgacatctctgccggcgcccaccaccctttcttgcaaaaatacc

SEQ ID NO: 59798 - DNA, 177 bp, Glycine max
  Clone ID: PAT_MRT3847_25008C.1
ctgcaactctgaagagcacagtctgaagcaaaagctaaaggctttctttatgtttcataccttgactgtgtgcacaaaaaatatttggaggaagatggttcatgctacatttttggtgcaaaaggaaacattattatatcatcatctattaaagggacaatactaccccgcattact

SEQ ID NO: 59799 - DNA, 637 bp, Glycine max
  Clone ID: PAT_MRT3847_25009C.1
gcaagagaaaataataagtgcttgaaataagacttgttaaatcaaactaagtaactatttattggtttctttattatctttatttttacttactcccagaatttttctatactattgaagaaattaagcccctctgtatattttctcatctttatcataatttcagtttaaaaatcaaacacttttagaatgaaggcataagtgcaagagtcatgataaacatttttaagtatataaccattagagttaacttaatggtgagatttggataatatacataaagttctagattttaatctttttaatattactgtaaaaaaaactgttgaagtatataatagaaaagaagagatgtaggaattcaatcaatcaacctaatttgattctaacagacaatcatcaattctaatcacatgtttattgtctatgtaaagagaaattactgcgtaaagatgaataaaatctcattgtgttttcatactcaaaatcatgatgaaaactaaatacgaaagtgtacctgaattagtctaaatggagtgctgaaaggttgatgatgatcaagaatgattttatgatctcccttctgtcgtcttctcgcagccgtacccttctgtcgtcttctcgccggacgcgtggg

SEQ ID NO: 59800 - DNA, 366 bp, Glycine max
  Clone ID: PAT_MRT3847_2500C.1
cacgagaagtaagatggaaggggatgagaaaagcttaacaggaacttacgttttgtttttgaacaactacaatggggggggttatttaagggggatgggacaatataagctaatatattatatactttttaatcaaacaatagcacggaagcttcaaaaatatataaaaagtataaattgccataattaataaaaaaattataacaccattggaactttgcagaaaatactggaagtttgctataacttcaaggtcacgaaagggaaatattataaacaataaattatggatccttaaaacctattacgtgatttgaaaaaaaaaaagatatgatctcgacttaattgactggacatctaaaatat

SEQ ID NO: 59801 - DNA, 387 bp, Glycine max
  Clone ID: PAT_MRT3847_25010C.1
aaataataaaaaaaaaaaatagagagagaaattaaacaaggcaaatcacggaaggggcgaacaaggatcatggagctgcttccagtttctctctctaaaacgcgtaaaagcgaataactgaaaccctagcctctgtgtctgttattattagtatttacttcgattccacgcagcgaattcaattctctgcgatctgtatccgtgaaatcaatgtgcctctcttggaatcgtactgctactcgcaacggtgaccgccatcaacgatgaagcagtcacgtcgccggcagaggactctgctcctcgctctgctctttctctccgtcgtttctccgctcgttttcgtctctcaccacctcaacaccatcactcccgacggacgacgagatt

SEQ ID NO: 59802 - DNA, 1734 bp, Glycine max
  Clone ID: PAT_MRT3847_25011C.1
atatttcttgaatgttccctaaaaatatgtttttctgatgcctaagattgttagatctatatgcttttgttgtttaccatctacgcattgtcattgttaaggtatgtgtgccttggtgatcagcatttattaaagtgtccagttttgatgacagcattactttgtaaagtaaagaatgaggatatgagtgatgtctctgcttgcccaaccagattgtttttctgcaaattctgttgcaggagaatgaaaaagattttaaaaattctgcaatgcttttactgaattgtgaagtttgaccaaaataaaaatttctcccacgcgtccgctccccatttccatcgcttctgtgtaatgttgaatactgggtgctaatcttatcttatccctctaatcactctagctgttgcaaatttctactatttttcaatggcttctgcagatgttgagttccgttgctttgttggtgggcttgcttgggtcaccggcaacgatgccctcgagaaagccttttcaatctacggcgacatcgttgaatcgaaggttatcaacgaccgtgagactggaaggtccagaggattcggatttgtgaccttcgcctcagagcagtcaatgaaagatgcgatcgcaggaatgaacggccaggaccttgacggtcgtaacatcactgtcaacgaagctcagacccgcgccagccgtggtggtggtggaggcggtggtttcggaagtggtggtggatacaaccgcggtagcggtggatatggtggtggtggtggcggcggcggatacggtggtcgtcgtgaaggtggatacaaccgtaatggtgggggtggaggtggaggatacggcggtggtagagaccgtggttacggtggtgatggtggttctcgctactctcgcggtggggaaggcggtggatccgatggaaactggagaaattaggcatatgaccctgtaaattagggtttatgattaagttcaattattttaaggtgttgtctgtgtgtggtttaagtttcggtatctgtgttggtttcgtttcgtgttcctgtggttttcgtttttgacctacaattctagttgtgtttatagtcgatcgaatgaaatgatagtaagaaattatcgcatcaaatttctatggattttgctatctgtttgctggacgtggaaatcgaattggattaatggtgatggttcttagtttaccggattcggtaaataccactgtagtcaatcccataccagggatagttagatttggctaatgaatatcgtagacaattattgtttccaacatctgtcaaggagtcaccaatgatatatgtcacaggcagagctgccaacccaattgatgcaagtgagacgatacatgcagcaaaaactagccttggcatcttcggctaatcataagatttatttcattggatggtcgactcaccctggatggcaaatggtacgcgccctggagagtagcattaaccacggtggctgtggtaggccacggcctttttcaccggcttatctttcagctccactaccaccattacggttggatccactttcaggacgaccaccgtatgcggcggggtttccaccaccaccttttccaccgttaccgcggttgtattcaccaccatttcctaaaccaccgcctccaccaccatcacggttggcgcgggtttgaccttcgttgacagtgatgttacggccgtcaaggtcctggccgttcattcctgc

SEQ ID NO: 59803 - DNA, 768 bp, Glycine max
  Clone ID: PAT_MRT3847_25012C.1
ccacgcgtccgcccactcgggctccagctccctctaatcactctagctgttgcaaatttctactatttttcaatggcttctgcagatgttgagttccgttgctttgttggtgggcttgcttgggtcaccggcaacgatgccctcgagaaagccttttcaatctacggcgacatcgttgaatcgaaggtccgtttgatgcaggcaccgcaactgatctcacacgattcggattcggattttttctcgatcctcttctgatctgtgatctctgatctatttgcgttacttgatctatgatatgatacttgtgttactatatgattcttttattactcacgccaataggtacgttcatcttcttcctttcaccaaaggcgaagatcgatcggtttctattcggttctgtcgttagttttcgtgttttttcttttgctttggatctgatgcatcgcgtttttgtgtgcaggttatcaacgaccgtgagactggaaggtccagaggattcggatttgtgaccttcgcctcagagcagtcaatgaaagatgcgatcgcaggaatgaacggccaggaccttgacggtcgtaacatcactgtcaacgaagctcagacccgcgccagccgtggtggtggtggaggcggtggtttcggaagtggtggtggatacaaccgcggtagcggtggatatggtggtggtggtggcggcggcggatacggtggtcgtcgtgaaggtggatacaaccgtaatggtggaggtggaggtggaggata

SEQ ID NO: 59804 - DNA, 532 bp, Glycine max
  unsure (1)..(532): unsure at all n locations
  Clone ID: PAT_MRT3847_25013C.1
cggtggtagagaccgtggttacggtggtgatggtggttctcgctactctcgcggtggggaaggcggtggatccgatggaaactggagaaattaggcatatgaccctgtaaattagggtttatgattaagttcaattattttaaggtgttgtctgtgtgtggtttaagtttcggtatctgtgttggtttcgtttcgtgttcctgtggttttcgtttttgacctacaattctagttgtgtttatagtcgatcgaatgaaatgatagtaagaaattatcgcgtccaaaaaaaaaaaaaaaaaaaaaaaaaaaaaaaaaaaaaagggggggcggttttaaagatccaaactttcgtacccgggccttccaacgaaataantggttttttgggttaactaaattcaatttactggccggggcttttcaacgtcttgacttttaaaaacctggccttaacccaattaaatggcctgggggacaaaccccttttgccgggtaaccccttagggaaaaggaccttaccggtttgcctttc

SEQ ID NO: 59805 - DNA, 1993 bp, Glycine max
  Clone ID: PAT_MRT3847_25014C.1
ggtggttggtggcattgtgggcggagcaatggccggaaaacaggtcggcggcgggggcctagcggttcacgctggctggaatgtcgaagaaccagatctacgatatcatgtctcagatgaagagtttgatcgaacagaaccagcaacaggccaagcagatcctaatccaaaaccccatgttaaccaaagcgcttttccaggcacaaattatgcttggaatggtgcaagcacctcaaacggttccaaaagttcagccaatggttccgcagaacaatctgcagtcagtacaaccaacacaaaaaccaaatattcagcctgctccattattgcctgggcttggtggtgcacaggatcaagcaggtgtatctcaaacccagattcctctgaggaaacaccagaaccaaccttcagtgccagtttcatctgctgttcctgcattgagtcatcaatctcagcccatggctgcacaatctttgacaatgccacaacagcctaaaggacatctggctccccaagtggctctagcgtctcttccacaatcatcacaacttccaaacataccttcgccttctcttcattcattgtcacaacctcttcatccaactcaaatgtcaactgcttccagtcacttacagcatccattgctgacacctggatttccacatatgcctctgccaccacagattagacaacctgcaatgccaaccttccatcctcaatatccccctcaaatgggtgcaaacttaggttttcaacatgctggtgcttctcacaatctttcgcagtccatgtttcatccaggcacaaaacctccttgctagtgttggatccacattcccacaggggcttccaagtcaaaaatcatctcagccaccttttcaggttggaaaagttccttcagggcaccgagtttgacaatatagctgaaaatgctttgcaagtggacaaaggggcctctaggatgcccggtccctcagataacctagcacatctttctggtcctcctggacctccatatctagtatctgttcagatgggtgctgctaatcagcctcttcggcctcctgcgttgacaccaggtatgaagaaggcactgcttcaacaggtcatgagcctcacagtgtatcccacaatcatcccaacttccaaacgtacctatgaattctcttaaccaaactcaaagggcaaccacttccagtctgttacagcaaccattgcaaacaacggggtttctaactctgccactacctctgccactatagatcagatcaattcaaattcttggtctgccaagttattatgaaattaatacaagttcatgtatcaaattgtagacaatagcattattttcttctggaatttggctccaattaaatatcagccattaattgttcgagctatttgcaaaacttctctccatattccatattttattgttaccaggtcaaccatcatctcagccaccttatcaggttgggaatatgcctttagggcccgattttggcaatcaagctggaaatgctatgcaagtagatagagggtcttcttggttgcctggtccctcagaaaacctagcacatctttctggtcctcctggtcagatgagtgctgctgctaatcagcttcttcggcctcctgggttgacaccagagatggagaaggcactgcttcagcaggtcatgagcctcacaccggagcagataaatctcctgcctccagaacaaagaaatcaagtgctgcagctacaacagatgttgcgtcaatgatataatacgcatatatactcaccatgaaagttaggcaatctttaaagtttaatcctagtttggaagaggttattatgtcgtatatattcaaaccgattggctgccaagttttatagaaattaatacaaattcatgcaactaattatagaccatattattcgtttcttctgaaatttggcacgactgcatcttttcttagttttgtataatgaaagagtaaattctta

SEQ ID NO: 59806 - DNA, 174 bp, Glycine max
  Clone ID: PAT_MRT3847_25015C.1
gcttgtcatctatgactggcaccgcataccatatgccgtggtacatgccaaagggacttgagcatatgtttacattacagttacaccacattggttttatcacccatgtgcaaatcaacattgtatccgatggggatagacccgctgaaaaattctagcctcatgtgttattca

SEQ ID NO: 59807 - DNA, 1862 bp, Glycine max
  Clone ID: PAT_MRT3847_25016C.1
gcggcgagggcttagcggcgaacctcgccggaatgtcgaagaatcagctctacgagatcatgtctcagatgaagaatctaatcgaacagaaccagcaacaggccaggcagatcctcatacaaaatcctatattaaccaaagcgcttttccaggttcttagggctttcaattctctttcttctttttttttttttattcactaaatgcttcgaattttgcttattcaagttctgaatttcagttaattacattgatgaccatatgcgcgtgtttgatacttgatagttactttcgtgtagttattttcggttgattagatttagaggagctattttccctaatgctttgtcatgagattaaacctaaatcgattaattttcgtattgagttgtcgtctggtttaaagaaacagttctcactcttcacccgtgattagtgtttcaattgttgatgcccttgacaatgtagttacccagtttgaggtgatggagatttatttatttctttaaatttgaacacttttaagattcttttagagggtccctgatgtttcgtgcatgtatgagtgtatctttttcttggacttcccttgaattatatttggaaaaatcggacttccactttggttttattgttcagtaaccatagtatttacctgagggtcttcactcttcagccacattatactttgaaatttttgtccgttttcttttgtttaatcaggcacaaattatgcttggaatggtgcaagcacctcaagtggtttcaaaagttcggccaatggtttcacagagcaatcagcagtcagtacaactaatacaaaaaccaaatattcagcctgctccattattgcctgggcacggtggtgcacaggatcaagcaggtgtatctcaaacccaaattcctctgaggaaacaccagaaccaaccttcagtgccaatttcatctgctgttcctgcaatgagtcatcaatctcagcccatggctgcacattccttgccaatgccacaacagcataaaggacatccaactccccaaatggctccagtgtctcttccacaatcatcacaacttccaaacgtacctctgccttctcttcatcaaactcaaatggcaactgcttccagtcagttacagcaaccattgcagacatcggggtttccacctctgcaaccacctctgccaccacagatcagaccaactgcattgccaactttccatccccagtatcccccacaggtgggtgcaaacatgggtttccaacatgctggtacttctcacaatcttccgggctcgatgattcatcctggtacaaaaccttctgctagtgttgggtccacattcccacaggggcagacaccacttccaggtcaaccatcatctcagccaccttatcaggttgggaatatgcctttagggcccgattttggcaatcaagctggaaatgctatgcaagtagatagagggtcttcttggttgcctggtccctcagaaaacctagcacatctttctggtcctcctggtcagatgagtgctgctgctaatcagcttcttcggcctcctgggttgacaccagagatggagaaggcactgcttcagcaggtcatgagcctcacaccggagcagataaatctcctgcctccagaacaaagaaatcaagtgctgcagctacaacagatgttgcgtcaatgatataatacgcatatatactcaccatgaaagttaggcaatctttaaagtttaatcctagtttggaagaggttattatgtcgtatatattcaaaccgattggctgccaagttttatagaaattaatacaaattcatgcaactaattatagaccatattattcgtttcttctg

SEQ ID NO: 59808 - DNA, 431 bp, Glycine max
  Clone ID: PAT_MRT3847_25017C.1
cccccaaacccaggggcaaaagataattaaggttggtttggtttaaccaaaactaatttttagaaaaaaacatgcaatatagttgggccacaaaaaaacctagttcgaacgggaaatatccataaaacaagctggtaaagaaaaaaaatggaccaaacaagttcatactttgaagctaaaaagtaaaaccagccttttccccaagcaaaaacttaagggaatctaccttctccgggtttttttttaaaaaattgggaaaaacctttttttaaaaaccttaagaattaaaaaacttctctagcctttttattggctttttaagctaattaattttttggatcttccccttggctttggaaaaattagttccttgaagctctaaaaaaacaaaagggttttcttttacaacagcttcagcttttccagaggga

SEQ ID NO: 59809 - DNA, 712 bp, Glycine max
  Clone ID: PAT_MRT3847_25018C.1
cccacgcgtccgcgtttctggctttgcgggttgagcaatggccggaaaacaggtcggcgagggtttaccggcgaacctcgctggaatgtcaaagaatcagctctacgatatcatgtctcagatgaaggtacttacaatacttcttctttttcactcttcacgaagaacaacacgctaaccatttcgtttgttgtccctcagaatctgatcgaacagaaccagcaacaggccaggcagatcctcatccaaaatcctatgttaaccaaagcgcttttccaggcacaaattatgcttggaatggtgcaagcacctcaagtggtatgcttttttgctttcttttgatgtctttttcacaaccatccatcagtagaaatttggatgacaaaaattatttgcttctaggttccaaaagttcagccaatggtttcacagaacaatcagcagccagtacaaccaacacaacagccaaatattcagcctgctccattattgcctgggcatggtggtgcacaggatcaagcaggtgtatctcaaacccaaattcctctgaggaaacaccagaaccaaccttcagtgccagtttcatctgctgttcctgcagcgaggcatcaatctcagcccatggctgcacattccttgccaatgccacaacatcctaaaggacatccaactccccaaatgcctctagtggctcttcccaatcatcacaact

SEQ ID NO: 59810 - DNA, 423 bp, Glycine max
  Clone ID: PAT_MRT3847_25019C.1
acgcgtccgatagaaataagaagcagaacaatggaaaatggcatacgcagattttactgttccaccgagcgacatttctgcatcacgttctgcgattcccttttgagaggcagaagatatgaatgaaatagatgcagggagtggaagtgagttaatagatgccattgtgacataagcactccctctactttcaccaatcacgcggcattagctgctgccatcactgccatgtccaaaagccgaatctatccattcaactttatctttctcttcttcaaataacaatttattaactaatttatatgaagtaatattaactttcttctaaatcaattattcttaatattaataacacatactcttaattatttgttaatttgaaaattattattttctctcttcgttaatatattcattagtcta

SEQ ID NO: 59811 - DNA, 421 bp, Glycine max
  Clone ID: PAT_MRT3847_2501C.1
gaaccaacacaaagatggaatggaagggaataccgttcttgtgcaggttgatggatagatagggatgttggggggaataatagagcgggaaaataaaaagacaacatacataacgctctctcacagcggttgctttataccattgtctatatcataagacgggagttcgtctacactgatcacttgttagagcatgaattcacaatgcccataatttgttcactaaaaaacgatgaacgtgtacgaaccgagccaccaaatcagtatgagggagagaacgcttttgaagtaatggtaatttaagtgcacccatgcctctaattgatgagacagacatgaagtgtgatagtcagccagaggatgcttgtcatgcgatactacgagaggcctagaattatgatcaagaagctaacaaacctac

SEQ ID NO: 59812 - DNA, 505 bp, Glycine max
  Clone ID: PAT_MRT3847_25020C.1
ggctcgagcatttttggtagaaggtttgcaatttagcatctgataactcaagaagtgatgagggaaattagctcgaaaatgtatgtaattgattcatttagaactttgtggaggaggaatttgcatgtcgagaggacttgttggcttagttgtaagacccggcatctatcataatgactacatcatcaaggatccaatggttagattgaaagagactggttcatgggcatagaacaccctatataataacctgattctttctgccaggagattcttcgagcatatggctccacggagaattgcatgactctatctaacccgttctagttgccctggagtattgtatgcctatgctcaagtcatatatacaatatatccaagtatcgtccaggagagtatgttcttaacaactacttttcgtgacaggcaatgattatatatcatctaatagatagtgacctgttgattgatgatcttctgcatcctaaattgtaaatgttacctg

SEQ ID NO: 59813 - DNA, 403 bp, Glycine max
  Clone ID: PAT_MRT3847_25021C.1
tccgcccacgcgtccggccggaaaacatgtcggcggcgagggcttaccggggaacctcgccggaatgtcgaagaatcagctctacgatatcatgtcgcagatgaagaatctaatcgaacagaaccagcaacaggccaggcagatcctcatccaaaatcctatgttaaccaaagcgcttttccaggcacagattatgcttgggatggtgcaagcacctcaagtgggttcaaaagttcggccaatggtttcacagaacaatcagcagtcagtacaaccaacacaacaaccaaatattcagcctgctccattattgcctgggcatggtggtgcacatgatcaagcaggtgtatctcaaacccaaattcctctgaggaaacaccagaaccagccttcagtgccaatt

SEQ ID NO: 59814 - DNA, 342 bp, Glycine max
  Clone ID: PAT_MRT3847_25022C.1
gcgtacggacggctgctataagacgacagacgggggtgtgaggcgagggtaaggtcccgttgtgttgggtcgggtcgagcgctgctcctctgtttctcgtttttagtgttcagaccgaaccctagctccgcatcgcaaccatgtcgaccaagcggggtggaaaagctaagcctttgaagaaacccaagtctgataagaaggattacgacaagattgatgtggctaacatgtcagactaaaaaggaagaggagaaggctctaacggagttgcaagccacggcgcaacagaagggtagctttggaggttctgggctcaagaaaaggggaaagaaataagggctc

SEQ ID NO: 59815 - DNA, 208 bp, Glycine max
  Clone ID: PAT_MRT3847_25023C.1
aaccattctgcgttgtgatctatcgacaaattatttgacagagggcaattttagagcaagtgttgatttgcagatcactcctcgcattacaggaatgatctaaatggtggccacagacggtattacggagaatacaggcatataactggcctgtgctataaatagctcttctagggtgcacgccaactctgatattgacaccaactga

SEQ ID NO: 59816 - DNA, 248 bp, Glycine max
  Clone ID: PAT_MRT3847_25024C.1
tttttcattaaaagatcaattcattatcaacgttattgaacatatctgttaatataagtgacgagataattattcaacaatacatctcccatataacatatctcttaaatataagtgagcagacaattattcatcaatacatctctcattcgattatgcaacctattcttcataattttcatatcagaaaagactatttctactattggtgttacaacaagtaaaatcaatgctatcttcaaaagatg

SEQ ID NO: 59817 - DNA, 358 bp, Glycine max
  Clone ID: PAT_MRT3847_25025C.1
gctagctctctgctatggctcggccacttgtaatgatccaccctctaccaaacaattattcacatattggcttcactcttgtgagccttatggggggtgccattgcattgctcacgtgtgcttctcattcgcaaaaatggcatcagtggatctcttgctatgcctttgcagaagaacctgtcatataattcaacaatgaagctgtcatgagcacttgtgatgatgagcaagaagaagattgttcacttttgcagaagaacattctaaagggtgtgaagtggcagcctcctgatttctttcgcgtcatcattatatgattctgattgcaatattacgataccttcctaaactttttccc

SEQ ID NO: 59818 - DNA, 529 bp, Glycine max
  Clone ID: PAT_MRT3847_25026C.1
gcggatgtacaccgtgttatatctcgaaagatattagtgtgtactcaccgaaccttgtggggcgtggagatcttgatggtatacttgggtttctctggacgggaaatttttgcgattggacttatgaatttccacacatttatagggtgaacggcagatggggagcgactcaatattgccatttgatattcctgtggacgtcggatagaggaagctacaatcatggatttcatgaaattgctgtccgatatcttccttctcccatgagtcaaactacctctgctgaggtaaacacatgatctcatactggcttttctataagaaatcctattaattaaagggctataacctgacagtggtggaatttctcaagctgtgacttacagctccatactatgtaaatagttactaggtcttgaacaccgatactcacacaatggtgattgatgcctcctgagtacgtgagaatgagaagctaattacgcctatcttagagtactcccagcccacctcatctgatgctcccact

SEQ ID NO: 59819 - DNA, 434 bp, Glycine max
  Clone ID: PAT_MRT3847_25027C.1
ctggattttcgattcccagggggttttttaatacacggcctgtgggtgtccccgaccacaaattagtttaatacttatgataaggattgaaatgctgaggctcttgcactcagtccagatgtgagagctgttggggatccaaatggtgcactgagggacataaggaatttggatagttttagcttgttagattggtttttatccaaagggggcacactcttgagtattacaaaatggtgggatccagttggctatgcccttgggtctatcgactgtgataatatgagagatcgctggatgctaaccatatttgtattgtttagccacaaagactgaggtttaccttttgcgaatgctggaggtggcaccggatgttcatatgagtggccccatccgaaagtacatttttgacagagggggcaggtttcatctta

SEQ ID NO: 59820 - DNA, 289 bp, Glycine max
  Clone ID: PAT_MRT3847_25028C.1
aaatatggttcctttgcccacaaacgaactttatttttctggtgtaactgccccctaagtcaaaagaccatttttcgagcactccttcttatttttcgaaaagggaacagaaaaaaacttatgcgtggggttattcctaaaaaaaaatacccctatttctgggtgactgcgcaaaagcgccggaaaaaaaaaaaatgttggcccctcaaaaaaacaaggtatgccagacgtttttttttaaacccccccttggaaaccccggccttgtaagggcttaaaaaaatttttt

SEQ ID NO: 59821 - DNA, 106 bp, Glycine max
  Clone ID: PAT_MRT3847_25029C.1
tctacacgtgcacgaaaggtaaaacctcttctatattgtcatctaaattcaattcattggcagtcgttttataacatcataactgggataacacatactttaccca

SEQ ID NO: 59822 - DNA, 1834 bp, Glycine max
  Clone ID: PAT_MRT3847_2502C.1
cttttaaaacccccacttctccctcctcttcttccccaccatctcaccagacgcgtccgctcttcttccccaccatcacaccaaccaaacctcactctccctgccatggtcatgggagcctttcgccacttcgaaccggtttccaaatgcagcaccgaaaaccggtttaaccaaaccgtggcctcggacttggacggcaccctcctggtgtcccctagcgcctttccttactacatgctcgtcgccatcgaagccggcagcttcctccgtggccttgtcctccttggatccgtccctttcgtgtacttcacgtacatattcttctccgagaccgcggccatcaagtccctgattttcattgccttcgcgggcctgaaggttaaggacattgagatggtcgcgtcctcggtgctgcccaagttctacaccgaggacgtgcaccccgagagctggagagtcttcaactccttcgggaagcgttacattgtcactgctagtcctagggtgatggtggagccgtttgttaagacgtttcttggggctgataaggtgcttgggactgagcttgaggccacgaaatcggggaggttcactgggtttgttaaggagcctggtgtgcttgttggggagcacaagaaagtggctgtgtgtgaaggagtttcagggtaatttacctgacttgggactaggagatagtaaaagtgattatgacttcatgtcaatttgcaaggaagggtacatggtgccaagaactaagtgtgaaccactaccaagaaacaaacttttaagtccaattatttttcatgagggtaggtttgttcaaaggccaactcctctagcagccctcttgaccttcctatggttgccaattggcatcatactctccatcttaagggtctaccttaacatccctttgcctgaaagaattgcttggtacaactataagctattaggaatcagagttattgtgaagggtacccctccaccacccccaaagaagggtcaaagtggtgtcctatttgtttgtaaccaccgcacagttttagaccctgtggttactgcagttgcacttggaagaaaaattagctgtgtcacatatagcataagcaaattcactgaaataatttcaccaattaaagctgtggcactctcaagggaaagagagaaagatgctgccaatatcaagagactacttgaggaaggggacttggtgatttgccctgaaggcacaacttgtagagagcctttcctcttgaggttcagtgcactatttgctgaactcactgataggattgtcccagttgctattaacacaaagcaaagtgtgttttacggaaccacggtttgcggacacaagttgttggacccgtactttgtgttcatgaatccaatgccaacatatgagatcactttcttgaaccagcttcccaaggagctcacatgcagtggagggaaatcagctattgaagttgcaaactacattcaaagggttcttgcagggactttgggatttgagtgcacaaatttgactaggaagagcaaatatgccatgcttgcaggcacagatgggacagttccatctaaggagaaggcttgaaaagggagagaaattaagttctcccttttgattattctgtattggtgcccaatgtgtttccaaaacacttagaattatgatagaaataaaatctgatcactggctggaaaaaaattacagtttatgtatattttgttgttctgatatatacaaatcataactactattattgggtcgactgttattgggtcattcctgaaaaaaaaaaaaaagggcggccgctctagaggaatcaag

SEQ ID NO: 59823 - DNA, 390 bp, Glycine max
  Clone ID: PAT_MRT3847_25030C.1
ttgaatgatgggtgtgtgctctctacctcacccgccgaccgacttgtgttgtctcatacattgcaacaagcacttatctcttataggtactatggactaagaacaagattagattctcattctgatatcagattgaaatttttttaaaagagactcactctggcggagaagagcgatactgcggcgggggtgggggaagaggaacaggctaacatgactctgatttacaattccgacgtttaaagccacgccttcgtccaaatccccgacacgcgggcatgaaattaacaccgattcatggtttcaagtggggttcgagatgaccactggcatcaacaacgcctttgtgctcggatattcagggaccatcatgggcccccttgggtgggc

SEQ ID NO: 59824 - DNA, 354 bp, Glycine max
  Clone ID: PAT_MRT3847_25031C.1
tacaagacaaaaagtggagtgtgaaattgggggagaaaagttaaacaagaagaaaatgggaaacatcccccacttgtttctattttctagagtttaaaacacgtacttgttttggaaataattttcgaaactgagtagattttgatgaaaaattgactgctgagtagtttggaattgtgttggaaaacagtttttaaaaccaaaaagttaaaagtgagaagggaatcaaacatactattattatattcttggaaagtgttttatgctaacaagcttttatcaagaattgaattctaatttatatttgaataggtcttggcaggtactcaaacacctggagaggccgggaagaag

SEQ ID NO: 59825 - DNA, 213 bp, Glycine max
  Clone ID: PAT_MRT3847_25032C.1
ggcaggactataaagttgggactttggtgaggggcaagtccaacaataataatatacaacattttgaaggggattttacacagatttctcctaataaaaaggaaaaagggagcataaagttatacattataaattgcaaggcacaaaagggaatgaaaaaaaaaagaaaaagcgaaagcgtcccatagggttgggaatgtgaaaagggctgtg

SEQ ID NO: 59826 - DNA, 278 bp, Glycine max
  Clone ID: PAT_MRT3847_25033C.1
gacagaaaccatgacgacggtggtgcccacctccgaagaaaacgctgcgctctctgttgtccgattcgcctctgagatcgcctgggccgatgccagtctcgaggttgctgagcctcaaattattagactctgcatggaggctgaagaatttttcgttatgggaaaaaggtttgtactagcatcattgatgattaccacctctgcagaattggtttccacagttgtttctgaaacttataaatcctccatcttcaccatcatctgcattcttgtgacaa

SEQ ID NO: 59827 - DNA, 1278 bp, Glycine max
  Clone ID: PAT_MRT3847_25034C.1
cctcgtggaccaatccgtccgcccacgtgtccgaagcggaaaggagttaaagagtaaaagcaccgtctccgtctccactctcggcttcttcttcgttgcgctttttcccaaaaccaattgcatcactctcgtccgttaccgccgctgccctagaccaccgcaagcgacgtcgcacaccgccttcatccgttagggcaaaaatgagtcgaggaagtggaggtggatacgatcgtcacatcactattttctcccctgaaggacgtctctttcaagtggagtatgctttcaaggctgtgaaggctgcaggaatcacctcgattggtgtccgaggaaaggattcaatttgtgtcgttactcagaagaaggttccggataagcttttggacaacacaagtgttacacacctctttccaatcaccaagtaccttggattattggctactggcatgacagctgatgctaggacactggtccaacaagcaagaaatgaagcagctgagtttcgctttacatatggatatgagatgcctgtagatgtattagctaaatggattgcagataaatcacaagtctatactcaacatgcttatatgagaccactcggagtagttgctatggttttgggtattgatgatgaatatggacctcagctatacaaatgtgatccagctggtcattactttggtcacaaggcaacaagtgctggattgaaggaccaagaggcaattaatttcttggaaaagaagatgaagaatgacccttcatttacatatgaggagacggttcagactgccatttctgccctgcaatcagttcttcaggaggattttaaggccactgagattgaggttggagtggtgcggaaggataatccagaattcagagttttaaccaccgacgaaattgatgagcacttgactgcaataagtgagcgtgactgagttcttgataaggatgtagttgttcaaactttctgatggtagagattatattatgtacttgtttctggaatcatcgaattgatttccttgtgatatttgagtggtgagttactcaagaatgatgttgaagatggtatttgatttcctattacaagtttacttgggaaaatatttcatgtttctaccaatacttttttttttattattaaaaaaattgtttacaaaacgaagacgtgtgtataggcataatactgttaaaatttgttgggccttgcgtagggatttgagcttcggtgccggatgttctgtctttttaaaaaaatgatattttatgaga

SEQ ID NO: 59828 - DNA, 325 bp, Glycine max
  Clone ID: PAT_MRT3847_25035C.1
attttatctttccctaaatatgatgtacagtatcgtactgttcccttaaaaaaaaaaaaaaaaaaaaaaaaaaaaaaaaaaaaaaaaaaaaaaaaaaaaaaaaaaaaaaaaaaaaaaaaaaaaaaaaaaaaaaaaaaaaaaaaaaaaaaaaaaaaaaaaaaaaaaaaaaaaaaaaaaaaaaaaaaaaaaaaaaaaggatagctcctccaaattaaacattttaaccccttaaataatttctaaacctaatccatacgtaaaaaaaaattacaaaatttaggatattttaaaaatttacctaaataagtctaaaatctattccctc

SEQ ID NO: 59829 - DNA, 753 bp, Glycine max
  Clone ID: PAT_MRT3847_25036C.1
atcagaaccatccctgatgttattggggtggtcattcaagcaaaagtcgcgtttgctcggattgtcaaattcctggaggcacctgaacttcagagtgtaaatatcacacaaaggtgtctcaatgagaataagaggggttcaattttaatcaagtctgctgacttttcatgggaagataatgtatcaaagccaacactgagaaacataaatttggaggttagaccaaggcaaaaggtggctatctgtggagaggttggctcaggcaaatcaactctcttagcagcaattctcagagaagttcctaatactcaggggacaactgaggttcatgggaagttttcctatgtttctcaaacagcatggatacagacaggtacaataagggagaatatattgtttggagcagctatggatgctgaaaaatatcaagaaacacttcataggtcttcactattgaaggatcttgagttgtttccccatggtgatctcactgaaataggggagagaggagtcaacctgagtggaggtcagaagcagcgaattcaacttgcacgtgcactatatcagaatgctgatatatatctcttggatgatccattcagtgctgttgatgcacatactgcaacaaatttgtttaatgtaacaaaaacttcttttcttcaggtactacatttataacttggtgttagtatctttttacttatagatggcttttcaacggaacaggaatacataatggaaggacttgctggg

SEQ ID NO: 59830 - DNA, 1047 bp, Glycine max
  unsure (1)..(1047): unsure at all n locations
  Clone ID: PAT_MRT3847_25037C.1
caatcatcaaagaaacacttccattgaaccttaaccaaaccacctncttttttcttaataatccgtttctccatctttctcagtgcaaaagttttttctcatttcccctctttattcctcatctcactctcttttccccagtcaacactttcctactggtttcatctgattcctcaaccagtttacacccaaaagagtataagtctattgaacaagaaagaaaaaaaaggaaaaagaagaaagaaaaaaaagaaaaaagaaccatctttattcccttattattccttcctatacatacatattcatatatttcccttttggtggttaaatatggggttctcagagaagccacaagtggaagagtcagatagtactagaaaatgggtcatcgctggaatcccttcacgagcgccattgaagccaatattcaccaccaaagaagaagaaaaagatgaagaaggtgacttggaagagtgttcaacgacaccaaaaggggaagaagcaaagattccaaccacgttgaagtgtccaccagctcctaggaagagaaaaccttctttgaagtgcaactatcgtggtggtggagcaagagagttcttcactccaccggacttagaaactgtgtttatacgccatgttgaaaggactagctaattgatatcatagaggtgggaaaaatatataacccttcaccaattaaaactttagctagttattagttagagctagctataattaatttagttctgttatatgtaactttctatatattttatattttattaagtttttaagtcgttttaattctctgttattaattaatctagctagctagagcttaaacattgcaggagtttagagattattagggtatttgtatttgtataaagagctgaataaacaaattaaaattagatatttgcttgcttgttgcatgctttgatcttcttctagttttagttgcctgtgttaattttgtttcattttgagtctctctctctcttgaagaagagatggtaatatgatgaagtagctgacgtccaattg

SEQ ID NO: 59831 - DNA, 324 bp, Glycine max
  Clone ID: PAT_MRT3847_25038C.1
ctcgtggaaaaaaagactaaaaagagatttagagagagagagacataaattaagtagagaggtggagaagtgggtctgttatgaacttatgagattcaaaaaaaagtataatcttattttcaaactctttggttttggaactggtcctgcaacagcagaggcagagcccttgcagtttattatcctgtgggtggtccttttggcactttgttaaatcagaaggcaaagttttcaaaaaaaaaaaataacaacaaaagaaacattaaaaaaacaaataaactaaaattaaaaacaaatccctttcaagaaaatctaaaagaaaaa

SEQ ID NO: 59832 - DNA, 766 bp, Glycine max
  Clone ID: PAT_MRT3847_25039C.1
cggatttcgggcaagccggcaagcatatgagttgaccatcacattcatagaatctggaagtggcaatctgaaccaaacaaaccactctcaaggttaatcaaatcttggttcttttcatttcaccagcttctacttttcttgttctgaagcaggggaaaatgacaatggttttttggtagtggtaatttgtgaaacattgatttggtaaagatggcgtggagaaaagggtgtgaggaagtggctaattcgaagcctctgttcctcacgatctacactgttgtcatcattggaatcgtggtttcctccttcttcgtcttctctgctatatactcaaccaaccctccttctgctcaatcttctgcatggctctcttccatttcgagtgatgaaactcgtgttacagatcagacactaaaggtttctcggtcagcagcggtgcttattgtgcccactccttccccaggatcacaaaatgaatggccaacgtctatatgggatgatccaccacccaataaaaagatgccacctttggaggatttcaggctgaccaagaaactggttcagcaaagggtgaaggataatgctgtaatagtgacctttggtaactatgcattcatggattttattctgacgtgggttaaacaattgagagatctgggggtttctaatttccatgtcagtatcacacatcaacagctcgaaaccaaaaggcagtattgagtctatcagaataactttttctctccccattttatgaaatgtcggc

SEQ ID NO: 59833 - DNA, 756 bp, Glycine max
  Clone ID: PAT_MRT3847_2503C.1
atccacgcgtccgcggacgggcggctcttcttccccaccatcacaccaaccaaacctcactctccctttctcccctgaccctctccctgccatggtcatgggagcctttggccacttcgaaccggtctccaaatgcagcaccgagaaccggtctaaccaaaccgtggcctcggacttggacggcaccctcctggtgtcccccagcgcatttccttactacatgctggtcgccatcgaagccggcagcttcctccgtggccttgtcctccttgcctccgtccctttcgtgtacttcacgtacatattcctctccgagaccgcggccatcaagtccctgatcttcatcgccttcgcgggcctgaaggtcagggacgttgagatggtcgcgtgctcggtgctgcccaagttctacgccgaagacgtgcacccggagagttggagagtgttcaactctttcgggaagcgttacattgtcacggctagtcctagggtgatggtggagccgtttgttaaggcgtttctcggggctgacaaggtgcttgggactgaacttgaggccaccaaatcggggacgttcactgggtttgttaagaagcctggtgtgcttgttggggagcataagaaagtggctctggtgaaggagtttcagggtaatttacctgacttgggtctaggtgatagtaaaagtgattatgacttcatgtcaatttgcagggaagggtacatggtgccaagaactaagtgtgaaccactacc

SEQ ID NO: 59834 - DNA, 442 bp, Glycine max
  Clone ID: PAT_MRT3847_25040C.1
agagctcggaggcggagtcgacggagctgagcgagattgtggagcttccgaacattgaagagagcttcgactcggttgagtcgagaagtgaattcgcgttgatcgactcggtggatagttgggtgtaccctcctccaatgacagtggggagcatttgtgacatgatgatgcttggggaacatgagtgtggattgttccaatttggaaccgatcaccaaacatgttctgtttagtttaaacagtttcggtttttcagaggctataaaactaaacgtgtccatcagacactctgttcttctgttgttatgaaatgtatgatcatcaaatcaaatactgtttcgctatttttgatctccccggtcagcggttgatggtttcgttagttccttcactttttaattaatatcacacacatatatatatatatgacacattactttac

SEQ ID NO: 59835 - DNA, 1181 bp, Glycine max
  Clone ID: PAT_MRT3847_25041C.1
aacagttgcagcagctgcatctccctattgtggtggttttgaaagcaaaggtgtcttcagattcatattatcacctaaagaggccattaggccaatatcataaagcataacaacaacaccaacatgtccccttttgattctccccaaacaacagcagatagcagcctcagcatgagcacaagcaccagtccaagtggtggtgatgcgttgttgaagtggggacacagaaagagatcaaggctttccagggctgccattgaagattcatcgtcttctgttcacaccaacaacagaagaatcacccacactgttcctccaaacttgtccatgccgccgccgccactcgtttcttctactgcctccagtggcagaggtagaaagcataatagccctaggaatttggaagacccctccttaggtggaagtgagtcaccttcaagaagccaggggagcaacccagttgtgtctagatctgctgcagcaccaaaactgtcttcttgtggcatggaaagaagtagcagaaggatgctttcttctggatcagcaaagtgtcaaaagccaagtggattttcaacaacacaagaagcctctgagagactgaacaatagtagtcatgcctcggtgcagtctgaaaaagaaggtggtgttgccactgctcctgctacctcatcccttgctgccaatggaaacaaggtcactgttggggtaattcagtggccaaagatctacattgctctctcaagaaaggagaaagaagatgactttctcgctatgaaggggacaaaaatccctcaaagaccaaagaagagagcaaagaatgttgacagaattctacagtgctgtttccctgggatgtggctatcagaactgacaaagagcagatatgaggttagggagaagaagtcagtgaagaagcaaaagcgcagcagaggcttgaaaggaatggaaaacttggacagtgattcggagtagcacttactcaaagttaggtatcaaaggcaatttaatttggttgattgaacaaaatatgagatgttttaaatttttaatatttatattcgactcttacaaataaaaaaaatattcagagttaggttgatgtaattggggagttaaaaaactcgagctttttttttttattacttattatttttttcaaaggagtcttaagagctgttgtt

SEQ ID NO: 59836 - DNA, 274 bp, Glycine max
  Clone ID: PAT_MRT3847_25042C.1
cagttcagttgtctctgtaggcggaggctcaaagactgttcgcgcagcacacaggtgtgatcagagccagtggtctgccctgcacagggcgttttgggccagaacttcctatttcactccagcagcagccagggcctgctatgactgagggttggaccctgaaagtgggactttctgtctccctctcttgctgcagaagaagagtcttcctgtatttgtgcaagtaaggagatgtgacttcttggctgggaaactcttgctgatctaactgtgt

SEQ ID NO: 59837 - DNA, 738 bp, Glycine max
  Clone ID: PAT_MRT3847_25043C.1
ccacgcgtccgcggacgcgtggggtgggcatctgtgatctggggggtcggagtttcggccgaaaccggggtcttccgcaatgagtgaagcccaaattactgagaaatgagcagtagctagccagtaactaacaagtatgtagagatagataatccataaccataattgaagatgtgcacggtggtttcaagttcagtccttgtgggatggctttcttcttcttgttctaaaacgaaagggagcgttggcaatggcataagccatttaagccctgccactcgtgctatatccgtactagccacggctatggctaaagatgtgtggacccgaacatcatcttccaacaccagtaggcaacgtagtagaaggcagcagtactgggaccgcagcgttgacatggaagagctattagcggcaattggacagacccagaacgaggatgaactgtatgcggttatgtctccctacaacgggaggcagttatccatgcgcttcatggtttccctgctgtcccgcgagcccgattggcaacgtgctcttgcccttctcgattggatcaacgacaaggccctctattctccctccctcttcgcctacaacgtccttctccgcaacgtccttcgggccaagcagtggcacctcgcacacggcctgttcgatgaaatgcgccaaaagggcctctccccagataggtacacttactccaccctcatcacttctttcggcaaacacggcttg

SEQ ID NO: 59838 - DNA, 388 bp, Glycine max
  Clone ID: PAT_MRT3847_25044C.1
attatatttaccactcaactatggattccatatataaccatacctctacaaagggttaaaaatttcagaaaaattatctcatttctcaagctacacaaattacgttaaaactgcaccagaagtttacgattgtaatgtacctgacagatacgctggacgaaatggttcataaaagaactctaagccccgatcttgagattcatgttctgattcaatttgataagttcatgactgaggctctagaaacacatgttaagaataaagtttttatcaagggacatcttcatacatatagatgttgtgacaatagtttgaccttcattttacaaaatgctttgttctaaaatctaatacattcatgaaattgttgaacgggttaaaataatgg

SEQ ID NO: 59839 - DNA, 369 bp, Glycine max
  Clone ID: PAT_MRT3847_25045C.1
gtgtgcgaacatgtcagatctccccgtaggagaaagtgactgcctaaaggactactttaccttatttgcacgcctagaatcttggtggactgtcatatataaacggtctgctaatgcggttgcgattctaaccacacgattccctcattttaatatggaacactaagtggtggaagcggcggccgattattttaacggtggaggagtaagagatggctgtgctgagagaaatattgattatctgtgcgaacatgagattgagaatcctacttgcgaaacttaaggtagacgaaagatgtgatggattgcttatctgagagaggtgcacaatgcagacatggattcaatagggcaaagtcacatgtctaa

SEQ ID NO: 59840 - DNA, 340 bp, Glycine max
  unsure (1)..(340): unsure at all n locations
  Clone ID: PAT_MRT3847_25046C.1
aagtgaaagcgtgggtttatatatatttttttccacggggagtgcaagagagtaaattacctaaaagaaaatatcacacactgagagagaggggagtgcgtnaaaatactaaagggggtttaccaatgggtcttgtgttgagaagaacctttaatctacataataggagcaaagaaaagggggcgataaaagcgcaagcgatggcgcattattgagaatatttttattattcttataatttcctcttcattttgagctcatcatgaggaagaaattaaattgagtcaaatagcggggggtggtcctgagtgagccaagagccttanccggacgcgtgggg

SEQ ID NO: 59841 - DNA, 328 bp, Glycine max
  Clone ID: PAT_MRT3847_25047C.1
aattaaggcaacttaattaaaaaggttggggaagagaaggtattttaatactttgtggggtatatttaaccacttaataagagtgtaaacatccaaacattaagaggcatttggccaatagagacacgcgccctgctcttatgagagaggggaaatttgcccctagagggggctgtaaaaatttttgcgaccccggggtcataaaaagagatgttttaacatatcccccagccctgtgtataaaaaatcccccggaaacagagtattgaaaaccccctacacaataaagcgaaggggggttttttctttgtgcacacattgaaacccc

SEQ ID NO: 59842 - DNA, 508 bp, Glycine max
  Clone ID: PAT_MRT3847_25048C.1
gcaccagctctcttctaattctaatttataaccgtccgcttatcagggacgcctagatcaagccctagttctttcacttttctctctattcccgattttcatcgccatcatgcatcctcttcaatttcacgattagttcatcgcactccgattcttcaccatgttcgaagctcacgttcttcatttgcttcgaagttatttgggtgaatatgttcatggactctctacggaggcgttgagaataagcgtctggaagggcgatgttgtcctaaaagatttgaaactgaaggcagaggctctaaatgcactaaaactaccagttacagtcaaagctggctttgttggtacaattacattgaaggttccatggaaaagtttggggaaagaacctgtcatcgtcttgattgatcgtgtgtttgttctagctcatcctgctcctgatagtcgaactatgaaggatgaggatagggaaaaacttttcgaagccaagctccagcagattgaggaa

SEQ ID NO: 59843 - DNA, 120 bp, Glycine max
  Clone ID: PAT_MRT3847_25049C.1
cccgcgtccgagaggatacaagctaccaatatagactagtgattattcaccatcattcttggacataacgttgtaaatacatgtgatatatcaattagtccaaaatttactttgttcagt

SEQ ID NO: 59844 - DNA, 169 bp, Glycine max
  Clone ID: PAT_MRT3847_2504C.1
gtcccaaccaaaaaaagttagtgctgccacgtggcggacgcagttgggttgacaaagagaaaattaaaaagaagaagagaaatttagaaaacacggtcggcgtcgtttgggctggatgatgcaattcaaattctggagtacgttgttaacacgagggaggaaaaactcg

SEQ ID NO: 59845 - DNA, 588 bp, Glycine max
  Clone ID: PAT_MRT3847_25050C.1
cccacgcgtccttcgcatttgcggcatcgctgtgtcctttttatatcttcactagatctactacactcccaactccacacttcttcttcttcttcttcttcttcttcattgcacagtgcatccataaacatgaagtaatgaggtaatctaaagtggaaaaaatgggtgggggccggttcaaaccgacgcagaagaggaagagggttccaaagagggtgtggttaagcttccaaaaatcaatgggtgtcctcgtgggtggaaaccatacctcctccaggttttgcactcgctaactcccctcccttccccctttcggctttcaaaagatccatctttctctcactttctcttaactcgattagttcaacatggacaccaaggcattcaaattccagatccttactagctccatcgccaggcgcgtgctccttcgcacaatcctactcgcgtgcgctgtctcgtttgtctctctgtaccgcgccctatccctcttcgatttcggaaccctcgctcccatcgccacctacttcgactgcgtctccggcttccagagcgtcaccttccgccccggttcccccttactccgaa

SEQ ID NO: 59846 - DNA, 540 bp, Glycine max
  Clone ID: PAT_MRT3847_25051C.1
attcggctcgagaatagcatcagtgatatgaggcacgacctaaagatgaaaacaccataataagaataagaataataattataatgataataataatattaggaccaacatgtaaaatgaaaaccttggtttataaattatcatcacaataaaaacatagtacaaattggtttaggccaaacctgaacagtttttcctaaatagtctccttttctttctttgtcaatgacagactgtcatgaaaaacaggaaaagaaaagtaaactttagtgaaaaattttgtaatgatcttcaaaatctgcgtcataactctaaagtctaaacataaacaacttgcctggtaaatcttcccagtagttatgttgttatcacgggtcaacttgatgtctataaaacgctcatagtttccaagatccaggtccacctttgaacagaaagaggggtcaggtttttaattattttgttagacaccttcttttgataattttgcccacctttttttgggaatatgcacataggtggcacattcttttttttttt

SEQ ID NO: 59847 - DNA, 794 bp, Glycine max
  Clone ID: PAT_MRT3847_25052C.1
aacagaacaacataatgattttaattgtcattaccggcataatactccccgggctatacaattctgattatcattaaacaaatttctgacttggagcaaacattatccaatgtttaggaatctgagtataactcacattacacttcttcaacttgtaattttaaatcaaattttggaacaagaaagacaaaagaatgataacatttcccgtgaaaattggactcaataacaagtttataaatgcgaataacacttgcttgtataaagatcttccactaatttgtgttttccaagtactctagtcaatataggtacctgatcctataagatgccggactaaaaccaaaaatacaaaaacaagaacctgattccaatgtgggggaacatggacattctaatcatagttaatcatcatcaccacccttcttcttagacttacgatatttttcctcaatttgctttgcctgtaacaaggcagtgtcagctaacttcctgatgttagggatttgataattctgagccaagtaaaccccaaaggctgtccctgcaatgaaagagaatgtactcctgattatacccattgcagttgcttgagtgcttgcttgctctgaaatatcgaatcgctggaagctctggatattgatttgacttggcgagttaccgagcgaaagaatggaatggttgtacagtatagcaatcaaagagaaatgaaattctgcaaagcctaagacgatgattcagagaagaagaccgtaacggaacaaggcagcgccgccattgcccgtcacaaattc

SEQ ID NO: 59848 - DNA, 235 bp, Glycine max
  Clone ID: PAT_MRT3847_25053C.1
aaggaaaggaagggagtagggagtgagtatttttgaaattaaagaggaaggcttgaaccagaggaaaaagatgtcataattttaagccctggccaggcaattaaagcagttgaggaggggtgggccttttaagagagttaaatgaaaggggctttgcctaaaagccatgaaatacctcgtcgaaaaaagcaccgttaaaagggtcaaccttcctgcaaccttttggggggatttt

SEQ ID NO: 59849 - DNA, 202 bp, Glycine max
  Clone ID: PAT_MRT3847_25054C.1
accttgggtttttttttttttttaaaaacaaaaatcttgcattggtgggagtgttgttatctgtgtgcattcctattgggcaatgtgaatggaataactgtggacctgcttgatggcaggagcagctactggcgcgtgttgctgaggattgggaaacctttcgatcaggtcccaaaggtgggtgtacgggcttcttggaaag

SEQ ID NO: 59850 - DNA, 496 bp, Glycine max
  Clone ID: PAT_MRT3847_25055C.1
gccaaaaggaaggcaggacttaaaattatggagaccaaaaatagtcatttctaaagccttgtttacacgcatagttggcagttaggagcactgaaatacataaaagacaaggccagtatcaaattatggacaaaacaagaaaaactaagggatgataaaggtcattataaagaattctatgaagagtatgccaatgcaatcacataggctatttccttgttgaagtgttagcaaagaactcccagatagcaagtaaatagacaaactctgaaaattgcaaatccttctcaagtctccttccttcggcgtaagatgaagctaccctggcaggcaaattctgctcccagtctgaatattcgtcaagagattgtgcaacaatcttacattttatgatatcatatgcaccactccatcagttatcatgactctattgtcgtcttgcaacctctctaataggagtagtatatctgcagcactgtaaggtgggtggatcttg

SEQ ID NO: 59851 - DNA, 276 bp, Glycine max
  unsure (1)..(276): unsure at all n locations
  Clone ID: PAT_MRT3847_25056C.1
tgtntttcnttttttcatttgcattgnaaagcgaaaaccttgcaaattgcaatggcttccaacaaggttattgccaccatcttgnttcnttctctnctngcctactcaaccntcattcaccnatgcatgtngnacatgccacccaaaacctactccttctccccctcctctatcagggaagtgcnccaaggncacattgaagcctaggggtgtgtgctgatggncnaggacttgtnaatgttgccggtggttccccngtctccagcaagtgttgtg

SEQ ID NO: 59852 - DNA, 1601 bp, Glycine max
  Clone ID: PAT_MRT3847_25057C.1
caacacgacaccagaggcacgagaacgcatggagcgggggcgatgatgcctgcgaacggaagcttggtctgaagcgctcttttcgacaagatgaacaggcaggcccttgtcgcgatgcatgaggttatggaggtccagacggtaaatgctggcccaccagctacccgttcacaccggactgcctgatacctcgtgccaccacttctgcttcccaaccatcgccctgacgctcctcaagtgactccagccgaaattattgaacacataaaacccatcctaactgcacatgccacactggcgatcctcggagatgttatcaaccctgatattgatcgtcgaatatcagagcatgtccttcgtatgcatcgatttcgttctgctgttgatggaggtgaggcagcacttgatgggagctcaagatatggaagagaagatgaagctgatatggactcatctgtttttgtcaaatataacagaatgttacatgggaagaaaactggaaggggtcaaaaacgtgatacgcttacaattaagtttcttaaaaaatttatccactatgctaagcataggattcaacctgaacttactgatgaggcatctgagaacattgccacggcctatgctgagctcagaaatgcaagttcaaatgcaaagactggaggaacacttcccataactgccagaactttagaaaccataatacgtctctcaacagctcatgccaaattgaagttgagcagagaggtttcaaagtctgatgttgaagctgctttgaaggttctaaattttgcaatatatcacaaagaactaacagaaatggaggagcgtgagcaagagagggagagagagctggacaggaagcgcaaggctgatcatgatgaaaatgatggtcctgatcatggtcctaaagatagaagaggtcctaaagataaaagacggtctacatcaacagatgccatggatgtagatgataactcagcaactcatgctgctgtcggacccacccctgaaagaattgaagaatttaattctctatttaatcagcatatgcatgccaaccgcctggaacaaataactattgcaaacttagggaatgttatcaacagagggcaagatccaccaccttacagtgctgcagatatactactcctattagagaggttgcaagacgacaatagagtcatgataactgatggagtggtgcatatgatatcataaaatggagcagaatttgcctgccagggtagcttcatcttacgccggaggaaggagacttgagaaggatttgcaattttcagagtttgtctatttacttgctatctgggagttctttgctaacacttcaacaaggaaatagcctatgtgattgcattggcatactcttcatagaattctttataatgacctttatcatcccttagtttttcttgttttgtccataatttgatactggccttgtcttttatgtatttcagtgctcctaactgccaactatgcgtgtaaacaaggctttagaaatgactatttttggtctccataattttaagtcctgccttccttttggcaaatggtatctggattttaacgtacctgataaaaaa

SEQ ID NO: 59853 - DNA, 723 bp, Glycine max
  Clone ID: PAT_MRT3847_25058C.1
accaccccaaccatggtccctgaccagggccccaaagatacaacaggtcctaaagacaaaacccggtctacatcaacacacgccatggatgtacacgataactcagcagctcaagctgctgttggactcacccctgaaagaattcaagaatttaattctctatttaatcagcatatgcatgccaaccgcctggaccaaataactgttgtaaacttagtgaatgttatcaacagaggggaagatccaccatcttacagtgctgcagatgtactactcctattagagaggttgcaagatgccaatagagtcatgataactgatggagtggtgcatatgatatcataaaatgtaagattgttttcccaatctctttacgaagattcagacagggagcagaatttgctgctagggtattatgtagcttacaccggagggagacttgagaaggaattgcaattttcagaactctttgctaacacttcaacaaggaaatatcgtgtgattgcattggcatcctcttcatagaattctttaagttataatgaactttgtcgtcccttaagagagtttttttttttgtccataatttgatactggccttatctttatgtatttcagtgctgctaactgccaagtatgcgtgtaaacaaggctttagaaatgactatttttggtctccataatttaatgttccgccacttgtgatacttttgattgacccct

SEQ ID NO: 59854 - DNA, 421 bp, Glycine max
  Clone ID: PAT_MRT3847_25059C.1
taatgggctcgagcacataataaggggcactgacaaaaaccatgtactggtatattaacaacgcggaccggagggaggatgtcaatacctctttacttccccatccaatgatgccgatgatgcccggtgggctatagagacaaattcatggatctgactagtaaaaactggcatactgtgtaaccagtcaaaactcgaatggaggacttcaccattaagttgatgtgaactgggtggacacacttcatttataagcacttgttctatcggagaacatggtggattgagggaatgctctggatgttctcttaagaacaacagactccctacaaatatggaaaaagccagatctgggaccgctcatcacttgtgcctggtttgcagaatgtgaaaaccctcgcacatttttaatgcaaaacga

SEQ ID NO: 59855 - DNA, 883 bp, Glycine max
  Clone ID: PAT_MRT3847_2505C.1
caaatagtaagaacaagaacaaggcctgctttgtgcttttggccttaagcttaggggaaaccgcgtattgaaagaaagagacacagccaagggcttcttcttcttcttcttcttcttcttcggataacgtgttaagggaacactcttgttataaccgcctaccgtttctcctgcaaaacagagcttgattctcaatacaccattctttcttctcctttcgaagcactgccaaataaaaatggagtggcctgcgtgtacggacgaatacgaaaagctcataattcggatgaacactcccaggttgacagcgccagaaggcatggtattctattggatgctgtagaagtgctagctgacctgaacctttcaattaagaaagcgtatatttctgctgatggcaagtggttcatggatgtttttcatgtcaccgatcaaaatggaaacaagataatcgacgagagtgttttaaaatatattgaacagtcacttgggaacattcactatggaagaaccaacctctctaacggtctcactgcgttggaattaacaggaactgaccgagttggtcttttatcggaagtgtttgctgtactggctgatcttcaatgtgatgtggttgagtctaaggtttggacacacaatggccgtattgcctccttaatctatgtaaaagattctagttctgggtctgctattgaggactctcagaaaattaataagattgaattgcgcttaagaaatgttttgaagggagacaatgacattagaagtgcaaaaatttctttctctatggccgtgatgcacactgaaagaaggctacatcagttgatgtttgttgaccgtgattatgagaggactccaattcttaaattgacttctgata

SEQ ID NO: 59856 - DNA, 383 bp, Glycine max
  unsure (1)..(383): unsure at all n locations
  Clone ID: PAT_MRT3847_25060C.1
gataatctgatatagaattgaaattgtacttgccatccgacattcttttccaactagttgagcttgtagccttcaaaactacttgggatctacaaccaatggaatggacactagaacgtttgctggtttatcatgtaaaatgggttcattacatgttgtaaatgttaccgtgtcttgtttaacaagagcatgatgcaattttggtgttnaaaaaaaaaaaaaaaaaaaaaaaaaaaaaaaaaaaaaaaaaaaaaaaaaaaaaaaaaaaaaaaaaaaaaaaaaaaaaaaaaaaaannnaaaananacaaaaaaaaaaaaaaaggggggggccgttttaaggaaccaaagtttacatcccggggctggcagaggaaaagtttttt

SEQ ID NO: 59857 - DNA, 314 bp, Glycine max
  Clone ID: PAT_MRT3847_25061C.1
ttcagcccagggattacttctggcattacacggggtccacatttgactttgttttaatatccatgtaagttaccgctcaatgggctacaggagtatgatgagaaatacttctaacaatattgatccgtggcacctcatagggaatatgagagagcaatggtcttttacgacgttattcaataaggtggagctgataacatatagaatctaacatctatggggtgactgaagagatcacagtgctaattcattatgtcttatatgtgattcatcacaccctttaggcctgctattcgaccatataaaccattcta

SEQ ID NO: 59858 - DNA, 347 bp, Glycine max
  unsure (1)..(347): unsure at all n locations
  Clone ID: PAT_MRT3847_25062C.1
ggtttttcgttttttttttttgtttttttttttttttttttttttttttttttttttttttttttttttttttttttttttttttttgttttggggttgaggtgttcccggtccgtcccggggtaaatttccccctcgggcccccccggggggggtgggggggnntccgccnnggaaccccccacaccgggcaaggtcgaaagaggccaagggcccgaaacccggggggggggggcccccttaaaatccgggccccggggccagcgcttcgaaccccccaaaatgtcaggctggggttcggagggaggggtggggcggcgccaaacccccaggcccaaaagtagggg

SEQ ID NO: 59859 - DNA, 1504 bp, Glycine max
  Clone ID: PAT_MRT3847_25063C.1
gaaatgaccgttaaacgaaagtaagaactaacatctcgttcaccgcttgtactttggatgatgatgaggtgagtgtgtaacgagaaggtagggtagggtgcagattgcagaggattgggaattttgaatttgaacaacaatccgagcttgcttgtttcctcgttctgttctgagctctaatggaagcactatcccttcccataaacactctcaccaattcctctgccaaacaacacatttatctgagtgcttcttccaattatgcctcagtctcttcttccttacaactcaatccttctctcccaaccagacccctcactctgaggaaaagcgcggttcgagtccaagccgagaatgaggattttgaattgaagcaaatgagggacatggctgctgccagaaagagatgggaagctctgataagagatggaaaaattaaagttcttactcctagggaagctgggtatgcagttcagctatcaagcaagccccttcttgatgtccgtccctcaaatgaacacaaaaaggcatgggtgagagcttcaacctggattccaatatttgatgttgataataagctagattttggaaccattcccagaaaagtcacaagctttgttatgggaggttggtggagtggcatgcctacactgtcttatgacagtcagtttttagccaaagttgaggagaagttccccaaagatgctgaattaattgttgtatgccagaagggactgagatcacttgctgcctgtgaactgctgtataatgctggctataaaaatctgttttgggttcaaggaggatatgaagctgctgaagaagaggatctcattgtagagggcccaatgcctctcaagtttgctggaattggtggcgtttcagaattccttggttggactgatcaacaaagagcagctgcagccaaggaaggttggggatatagattagtgttttctgcacgcctgattggactcattctcgttgttgatgcactatatattggtgctcagcaaattgggcgctatcttcaggatatcaggacccattgaggtaagttttcggttaatcctcacggagacaatattccttgcggataagcatatacagacagcaggctaaggaactcaattttggaagctgacccttggcagaggctttccgagattgtcataattgccccatcttatttcactactggattataattgcaaatagttaggcagccattttaatgtaggtttcttccatgtagctatgtactaataccttgtttggccaaaatgcttgtgttttttctttgaagtttccataacaaaaaattcaatagtgtcatattactgctccattaatgttactgttatggttatgtgtatgtattgtaactggccatgcattgtatgatatactaactagattaattctgaatcctggttacattgctgcagaagccttctggccacagtgactgtttattaatgtactgtgtgtttgtgtacgtttg

SEQ ID NO: 59860 - DNA, 403 bp, Glycine max
  Clone ID: PAT_MRT3847_25064C.1
gggccccaaattcaatctattatctattattatgggaaaactttttcaaattcaaaccaaaacctaaaattcgcgggaaaggggggtatccaatttttccccatataaaccctgaagcccaggggcttcattattttttacccccccaagggtttcgggccccccagttacaaaaaaaggattttgcagggaactatgaattttggcaaactaatccccccacggggagaaacaactaacttcggccaaaaactcaaattcctttaacaaaatttaaaccctgggctgcacgttcaacgcgtactggttggctacgaaatccagggcccccggcacttgaaccctctttcatcaggcgaagcttggctttttgattatgcagggcccccaagttgaccaaagg

SEQ ID NO: 59861 - DNA, 123 bp, Glycine max
  Clone ID: PAT_MRT3847_25065C.1
tgtcaaaatcggcaccaattaatttggcgggagacaaattggaggacattctgagtgcctatgaatttgtagagaacccagttaattcctgctttttgggggaaataaggtttaaggcggttc

SEQ ID NO: 59862 - DNA, 479 bp, Glycine max
  Clone ID: PAT_MRT3847_25066C.1
gcgaggaagcgcggaggcgactcgagctagatgatgtctgtagtgctgtttatgcacacactttcactgacttattcaaggaatgcgctatgggggctctgaaaagcaagaccgagggtcttggtacacaccatgtatactcccttcatggtgaggatcttatcgtaggtgataagggacggaatgatacatcaatcgcggaagtacgatgatctactcgcgtgtggaatggatcttagtgctattgttgcagcacatgacacctatatggtactagtggagcaaggtgccgacctgactggataaaatttgaacaagccatttaaatcaccaaaggcaccttctattaacatacaagccgtagctgaaagcaactctcttgaccagcccatgtcttacaaggaatgatcaaaactcatcaaaaacgaggtgagagagactggagacggtaccttacatatctataaactctacctcac

SEQ ID NO: 59863 - DNA, 568 bp, Glycine max
  unsure (1)..(568): unsure at all n locations
  Clone ID: PAT_MRT3847_25067C.1
tcaaggaggatatgaagctgctgaaggagaggatttcattgtagagggcnccagtgcctctcaagttttctggaattggtggagtttcagaattccttgggatatggttgcaaatttccgacttcataattatttccagttggactgatcaacaaagagcagctgcagccaaggacagaaggggatatagattagtgttttctgcacgcctgattggagtctttctcgttgccgatgccctatattttggtgctcagcaaattgggcgctatcttcaggatatctggacccattgaggtatgcttttggttaatcctcacggagacaatattccttgtggataagcatatgcagacagcaggctaaggaactcaattttgaatgctgacccttggcagaggctttccgagattatcataattgcccccatcttttctcactactggattttaatgtaggtttcttccatgtagctatgtattaataccttttttgtacaaatggttgtgtttttcttagaaatttccttaacaaaaaaataataataattgtgtcctattactgttcc

SEQ ID NO: 59864 - DNA, 403 bp, Glycine max
  Clone ID: PAT_MRT3847_25068C.1
cccacgcaaccgtacagctgtcagtagaggagagaatgggacacatcaagagcagaatgaccaagttcacaatcctcctcatctctcgtctcctctgcatcgcccagacttgcagcgcctccaaatggtaggaccagcaagatacctgccgcaggcagctccagggggtgaatctcacgctctgcgagaagcacatcatggataagatccaaggccgcggtcgatgatcgatgatgatgacgacgacaatcacattctcaggagcatgcggggaatattcagctatataacgaggaaccattgaatacacgatgacgaacaaaagattgcgacatgcagaactgctgcacagaaatgagcgagctgagaaacgccaaatgcgactgcatagcaccgcacaaga

SEQ ID NO: 59865 - DNA, 1548 bp, Glycine max
  Clone ID: PAT_MRT3847_25069C.1
cggaacttggctcaccggcagtttcaatctcacaagcaatttcacgctttttcttcaccacggtgccgttattctcgcctctcaggacccaaaagaatggccaataattgagccattgccatcgtatggaagaggcagagagaggctaggaggaagacatattagccttatacatggaaatggcattagcaatgttgtcattacaggacaaaatgggacagtggatggtcaaggaaggatgtggtgggaactttggtggaacagaacattggagcacacgagagggcacctccttgagctaatcagctcggataatgttcttatatcgaacctcacctttcgaaattcccctttttggaccatccatcctgtttactgcagcaatgttgtggtcaaagggatgacaatcttggctcctcttaatgccccaaatactgatggcatagacccagactcaagtaccaatgtatgtattgaagataactacatagaaagtggggatgatcttgtagccattaagagtggttgggatcactatggaataaccatggcccatcctagcacaaatattatagtaagaagaatatcaggcactaccccaacttgttctggagtaggcataggtagtgaaatgtctggcggaatttcaaatatcacaattgagaatttgcacgtgtgggattctgcagctggtgttcgcataaaatctgacaaaggcagaggaggctacataacaaatgttagtattagtgatataagaatggagagagtgaagatacccattaggttcagtagaggttcaaatgaccaccctgatgatgggtgggatccaaaagctgttcctagattcaaagacattttaatcagtaatgtggtcagtgtaaattcaacaaaagccccggttttggaaggtgtagagggttcatcatttgaaggcttgtgcttcaaaaacattaccctacatggtgtagccttatctgcgagatggcgttgtgaatatgtctctggttttgccaccgaggttttccctgttccatgtcctgagttgcggaacaatagctattcatcctggtgttcagcttcctgatctgctatatggatcctggatggttcaaagttccagcaaaggaaaaagcaggcttttgctcacattatgatttgatgaagcagttttcagtgttgcttaagtatattatttttgtgaggcacaacaaattgagctgaattgaactgggttttgaagcctgaattaaggtgacaatttcctattttgggtggcacgggcatataatctgatgagtaaggtttgtgattggaacgtgcagagtattatttgattgatattgtgccccctctctcgccacggttggtggctatagaacatggagtttcaatgcacattggtttggttagcggggaagcaagtgattcttttgttttactcaacgagatggtttttttaacatttttttgttactgttgtatagggcagtttattcttggttggagagcccaaagttgaatatagagtgaaccaattcattgaac

SEQ ID NO: 59866 - DNA, 355 bp, Glycine max
  Clone ID: PAT_MRT3847_2506C.1
gatattcacatatgaggatgaaaacacatcccctgtggggcctgcgacactttacaaagatctagatacagatgccgacaaaaacatctcaaaaggtgtggaaaacttcaggagagttgaaaaccttgaggggaaaggtgggcctggaaccatcaagaaaatctctttcgctgaggatggagaaagcaagattgtgttgcacaaaatagaaacagatgatgaggcaaacttgggatacagctatatcgcagaaggtggagatggggtgccagacacagtggagaagatcacattctaatacaaattgggtgctggcgccaacagaggggctgctgtgaagataaaagtgaaatac

SEQ ID NO: 59867 - DNA, 414 bp, Glycine max
  unsure (1)..(414): unsure at all n locations
  Clone ID: PAT_MRT3847_25070C.1
atgtgacatatgagcatcttagctatctcgatcgaactgtcaaggtcctgtcactgcactggtgggggcgtaagccttgggattagtcgagagtgcgtaacttaacctaatgccacagtttgtggaggcgtagccaagacaatttacaccctatgcactaaccaaatggcagtggtttacagggctagcctgcgctaggagatatatgatactccggcgaaggcgatagtaaggatgtagatacatgggggggggggccaacaaaggatgtagaagaatgaggtacagaggaccgctgaggaggagtttgtgattttaaaaaaaggaggggaggtgatagtacaaggccgagagtggcgaggggagcataaagacntcgtgaaggaggcctgacggatggggagcntgatgggg

SEQ ID NO: 59868 - DNA, 292 bp, Glycine max
  Clone ID: PAT_MRT3847_25071C.1
tgcccatactattactaatctaacatacgcaaaggaccttatcaacattctctatgcttaaaatggacctgattctacagctatcactgctggtgatggagataaaaatatgattttaggaagaagaatgtttgtatctccttcatactacataacagttattagcaccaatggcccataatctgcttcatacttgaaaaaaaggataaacggttttgctcgaacaataacaacaagtagtactttgtaccgcttgctgaaaaaatggaccgtcctatctttcgaggccccg

SEQ ID NO: 59869 - DNA, 244 bp, Glycine max
  Clone ID: PAT_MRT3847_25072C.1
ttgacgcgtggggcggaaaacgttgttgagttcacagtcttacccgtcaagaggccaagagaagaagaagatggaacctatggcgtctccttcgacgccgtgtcagcgctgccctatgaccctcattaccctgacatctctgcggttattcccggttggttctacaaaatctgcccattgtagcccatggaggcacatgccctgaagatggaaaagagtttgttccaagggatgccggactatc

SEQ ID NO: 59870 - DNA, 237 bp, Glycine max
  Clone ID: PAT_MRT3847_25073C.1
ccgtatggaaagggcagctgagaaaggaaaagcaattgcagcagctgttgaaggagttgaaaaacactggggaacatcagactccaatacatcattcattgagactctgcgggagcaaatattcaagccatcattgtccacaatcattcccgagcattcaaaacttgtaacagtatcaccaacagattcagttctgacaacaacaaagaagaggttgaatttcgtgcaagttgtgca

SEQ ID NO: 59871 - DNA, 438 bp, Glycine max
  unsure (1)..(438): unsure at all n locations
  Clone ID: PAT_MRT3847_25074C.1
acgnaagctcggaattcggctcgagacggctgcgagaagacgacagaaggggtctgcatcaatttcttctatctcaacattactgtggccatcttcgtctgtgatctgtccacgacttctggcattctttcgtgacgagcccacatctccattagcagccccagttggtgtcctaaatgaattaattggaactgcagtagatattggacccgcagccacgcgttgactggtcggggtttgcgcattctgttcagagagcctctgggattctggggagatgaagaaaggatagaagggtgcaacccctgaagggaaagggccagaaggagaaacacacacaaaaggggcaccaccttgtggagttgaagatgaagcangattagatggtgaagggaacacaggaacaagagttcttaatggcttcacatttaaaaccct

SEQ ID NO: 59872 - DNA, 465 bp, Glycine max
  Clone ID: PAT_MRT3847_25075C.1
cttgggggggggggggggggggggggggacgaaattaaaattacaggtgatatagtaggttggcaggacgacagtagtaagtcacggataagactcctaatagggcctacgggtagacacctaaaaaaatggggataggttaaggtaatggttaacagaaagataagaccagatagctaaatttcgatactaggcagtgtcacatatacctcgtctttgcgaaagaggcgatgccagagtgttgggtaaaggccacgccagaatggtagaactagaacaaaagagagctaagaaacaacgccgaggtacccaataagaacgggggcaacaaacctggagagacctgggaataaagcaaagggcggggccgagaacttgcagtagaaaaagccaaaagcctgagccaagaacgggccaaaggccaagaacgccacctgggggaatacagcgaaagcctgggcccag

SEQ ID NO: 59873 - DNA, 195 bp, Glycine max
  Clone ID: PAT_MRT3847_25076C.1
cagttccaaacttacatgtggatttctatccattatgggcaaccgtcgcttattatattgtaaaagggtgcatgaggaggtgattactatttaattatctttattatgtgttctcatgcattgtactagtatctacaattatcattttttcttcgtctttttctgctaataaactcttccacttttattttttta

SEQ ID NO: 59874 - DNA, 467 bp, Glycine max
  unsure (1)..(467): unsure at all n locations
  Clone ID: PAT_MRT3847_25077C.1
agaagacgacagaagggcatttcctgagattatcaatagaatcgatccaactacccaagtattttttatgtctatcaatgcatttactacaaatggaacatatatagattcaagtatcaagtaaaaaattccatgtatcaaaacaagttatttggtgacagcagatgaaagaaggtgaaataatttggataaaacagacctccgctaagcttatcactatgataactaacgagcttttttttcagcttcgaatgttagaatatgtgttatcttcttttaagagaattaacggacgtgcacaccagaagaacaaagtgaagcagaagaattcaattattaaaggttctaacaacaaatttatcttctggaggatctgttcattgtgtggctgtttttaggatgataaaacanaccnaacattatcaagtatatttttttaagtcactatcataataccctagaaactg

SEQ ID NO: 59875 - DNA, 522 bp, Glycine max
  Clone ID: PAT_MRT3847_25078C.1
gttcacggtgaaggagaagggcgtgacggggctgaaggcggagacgagcgtgaaggagctggcgttgaacgagaggcagaggagaaggattaagagcgccgtggagagcaaggcgttggtccccagcgtggaggttcgaaccaaaaccggtttgggcttggggggttggaactcaccctccatctctgtcactatcgtctgcggagacgtcaccatgagacaactccaaaaaggagaccctcccctttgctccatcactctcctcaaatggtatttttaattaactagtactattattctctctcactcttgctgctcggtgggaccacaggatcaaaataccatcagttctggatgccgcttctatctaaattatttttttatattctcccaaatgccatctgggatgcacataataccaatacgccaggttgtatttatcattttttatgtgcttcgtgatcataggaatcataagtactcgggaaaatgttctctgtctactcttttcaatatgaagaa

SEQ ID NO: 59876 - DNA, 289 bp, Glycine max
  Clone ID: PAT_MRT3847_25079C.1
gccatgaactgctacaacagctccatcagtcgaaaatggcatgagccgttgaatactagctagtgttgtagcagcattaacttaggtatgtatgaagcagccagctcagatccaagaaagccatcggcaccggccaccggtttcccggtgagctacagcaccagcaccacggaggctgaggtgtattcgtattcatacggtccagttgtagtaccagtaccacctccccaccctaaacctattgtggaatggtcaaccggcctctgtgattgcttttccgattggggaa

SEQ ID NO: 59877 - DNA, 399 bp, Glycine max
  Clone ID: PAT_MRT3847_2507C.1
gtgaaaacaccacaaagggggtggggatgaaaactaatcttacaacacgtgggtgaggcggaatgtaaccaccggattaataataactttcatttgcaactatgtgattgtaattgaactgacactccatacatatatattaaattatacgcccatataccttcgattaataaatctttcattaacatcttttttgggtgatccaatagagactcttttccatggataataagctgtgaacccttcatgggcttcttataactataacaagtactatctttcttatctaacatccttctaagataggaaagatcgcatttttgcggtcagatctgatgcaacaactggaaacaatcactttctaaaaacaggatcttataaacatgaattgttcattac

SEQ ID NO: 59878 - DNA, 546 bp, Glycine max
  Clone ID: PAT_MRT3847_25080C.1
ggctcgagtacttaaacttaccaattgagcacaaacaatgttttgcttattgcgcaatatttcccaaagatgaaagcatagggaagcaatatttaattgaactttggatggctaatgggttcatttcatctaatgaaagattagatgttgaagatgtcggtgatcaagtttggaatgaattatatcaaagatcttttttttcaggatattgagacagatgaatttggcaaagttacaagtttcaagatgcatgaccttgttcacgatctagcacagtctattgcagaagatgtttgttgcattgcagaagacaatcgagtaactactttgcctgaaagaatacaccatctcttagatcataggtccatgtggaatgtatatggggaatccaaaaattcagtgttgctgcatccagtcaaatctttgagaacctatatattgccagatcactatggtgaccaactttctcctcatcctgatgtgttgaaatgtctttctttgcgggtccttgattttttaaagcaagaaacattgtcatcttcaata

SEQ ID NO: 59879 - DNA, 311 bp, Glycine max
  unsure (1)..(311): unsure at all n locations
  Clone ID: PAT_MRT3847_25081C.1
aggaagtagtataacttaatttatatgtgaccaatacatccaaagctggggggngggggggggcacttttgtcttaaaataaagggggggggggggcattttgtcttaaaataaaggaaataaacataaagaggggggggaaggaatccttattattaacaattctgaaaatcttcaactctttccccttaaacccacttgttcacagagtttcccgttcatgtgattntgtgaacatttcatttccacttttcccaattttccattgtccacctttctccaagttaccccttctcaagagtccccccttg

SEQ ID NO: 59880 - DNA, 629 bp, Glycine max
  Clone ID: PAT_MRT3847_25082C.1
gaccctttgaagcccgatagaggacgaggccctcctgaagcttgtggaacgaacggccccgcaaactaggacggtcatcagcaccaacattccgagccgggcagggaagtcatgcccgcttatagggcgcatccagctgacgccccaggacgagcaccgaacctcaacaccctaaaaggacgagggggggggtggatccctggctcgttttggtaacaagagagccaccattgcgcgcctcatctgcggaccggacggataacgcaataaagactcactggaacgaaagcctaaaacacaagtgcgcgtgcttcatgaaggacagtgatgaaggcggctgcgggagtgccaggacgttgaagcgatccttaagcgccagggcggggaggaccactcccggaagccccttcggatccgattacatagagtccagcgctcctggtgtgcgatcggtactctacttcgacgcgtgtaaccgcgagccgaaactactcgatacgtggaaactgcgtcagcgcatgacgatgccgacaaggcctgacccgctagttcactgtcactgtctatctccggtggggagacgactgaaaatgcaaataccacaactaccgtgccggagacgccactga

SEQ ID NO: 59881 - DNA, 706 bp, Glycine max
  Clone ID: PAT_MRT3847_25083C.1
tcggtttcactttctgttctgttttggatatttctcaacataaccaaaccaaagcgttttactattttgttttctagtttcctccatctccctcccatactcaccttctctctgggtcaatgcaatctaagtccaaccttgactgcttcctccggcgtacgacacctgttgtgccgtctcagtttcttcccaagcacgagattcgaaaccttaaccgattgtggcacccgtgggagagagaagctgttgagtacttcactttgggtgatctatggaatcgtttccacgaatggagtgcttatggagctggagttcccatcacgttgtccaatggggagacacttgttcagtactatgttccttacctctccgcaattcagatattcaccagcaacactttcagggaagagactgagtcatgtgagtgtgagacaagggattcgtacagcgattctacagggaagagagtgagagtgacaaactatggaggtgggatggaacttcatcagaagaaggaggatctgagcatgattgtttgtggcacatgaatgaccgattaggtcacctttacttccagtattttgatagatcaactccacatggtagagtccctctaatggataagattacttggcttagcagaaagataccccggattgatgtcactaaaaagtggtagatcttttccccagcaagttggatgggc

SEQ ID NO: 59882 - DNA, 622 bp, Glycine max
  unsure (1)..(622): unsure at all n locations
  Clone ID: PAT_MRT3847_25084C.1
ccggnccggattcccgggtcgaccccgcgtccgattctttgcaaaattacaattttgtgctaaaacaatttcttttatatacatnagacataagtttgaagactaatgaacgtaaagtacacgttatgtgttagaaaaagagacattgatgattttattttcccactcttgtggatgctttttcagtttcaaacactacaacaatatttatcagtaaaagaaaaattctctacatcattattcaacggagaaaaaaaaatactctacaacaaaaatgattggtggatctaggaattttctttactgaggaaaaaaaataattaacactcctttcatctttcttattataagactatgtaaaaaatatatattttttataagactaacgacaaatgaacggaaagtacacgttaggtgctagaaaaaaagacattgatgattttattttcccacccttgttgatgtcttttcagcttcaaacactacaacaatattcaacgaaaaaaaaacactacaacattattcaacggaaaaataacatatactacaacagatacaaatggtggatctaggaattttttttatgaggaaaaaaaaataacttagactcctttcatctttc

SEQ ID NO: 59883 - DNA, 257 bp, Glycine max
  Clone ID: PAT_MRT3847_25085C.1
tccggttgcgagaagacaacagagggggaaggagttaattatttttgtaaagatggtaccttagcctttataagaacttgcactcaaggcatttcctatacacatgtggtgatggattattatcaacctatatgcctaaaccacttactagcgttacgcgtgtaaatattgcactacatgagtctattccaggattagctcactttgtgcatccttttcgagagataatgttctaatgatgaataatgcataatgga

SEQ ID NO: 59884 - DNA, 435 bp, Glycine max
  Clone ID: PAT_MRT3847_25086C.1
ttagaccagctatgtataaccattgacgcgctactcgggtaacaggtagattgaaatactcaaattcttgacatgcgattattcaaacgagtcctaagctttctaagctcaacattttaccatacatgtaaccaaagtcaaaaacatgatcatttgataggaaaaattgagcgcaacaaactacagggttactctactataacactactactcatgtactgcaattcgtgagcgcatatgatctggctacaaaatgtcacggcctcaaaacccgtcaatcatatacatcttgaggcatactctaacgccaccatcatagtagatgaatacctggtgactgctaatacaattgaaaatatcattggtcaataatcattaactacgtcaacttacctaatgcatatacttgaactattacaatactgtaatccccta

SEQ ID NO: 59885 - DNA, 269 bp, Glycine max
  Clone ID: PAT_MRT3847_25087C.1
cgcacctgctgttgccttgtcggtcacggatggcaatttgtaggagagatggtaggcgagttgaatgtggaatcccttctggatttacgatcacagttatttgcattagcattattaatgagatgctcattcaatatagctatgaaaaattactgcgccacgctaaagctgcaaatgtgtccttccatgcttcaaaaattttgcctctttgtgcgtgttggcgatgatgacttaattggtgttcatgactgttgtcaagccttacttta

SEQ ID NO: 59886 - DNA, 507 bp, Glycine max
  Clone ID: PAT_MRT3847_25088C.1
tcggaattcggctcgagaaattctctcattttaaaatcacatggctgaattcacagaaaatatgcaattgcaaagcaatattagaccctcccagtttccattcttagagattgatccaagcatggaactcctaaaccagttcttagggatgaaccaacatgtcctagaaaactcaaacttgattcctatgcacaacttggtgcctttctcctgtgacacctttttgggccctcaagagcctgagtgtccaggaaacttggaagaaaatttccctgcccatgtcaaccacgatgcacttacaatagccctccccattttccaagcagaaaatgagatccatgaaggtaaaaagaggaaatcaatggatcttcctgagacaagttcagctaactcaactcctgcagtttctgaaagtggaagcaagatcaaacatgtaaattccttcgggtagtgtgttctccaattatttttggccacgcaccatgttctgtatcatggcaagacaca

SEQ ID NO: 59887 - DNA, 349 bp, Glycine max
  Clone ID: PAT_MRT3847_25089C.1
tttgtttaaacataaaacttgaaacaagataaccatttcttagaataatataaagcttagcttacataggacatttcccagcatactcactggaatgcttacacaggctgacatgcacacagagccacacatgcattagacaaagaaaaacagagaaaataattaaaaagatgctatggcaatgttgcatgactgggtataccaggcagatcagagaattatggaggttgaacagggataccaatgttggccctcatagagtcatagaacaattatgttgtgcttggcctttgtgatacaacaacttgatgtaaggagaagccgaaagaccatttcctttctatacatt

SEQ ID NO: 59888 - DNA, 460 bp, Glycine max
  Clone ID: PAT_MRT3847_2508C.1
caaatagtaagaacaagaacaaggcctgctttgtgcttttggccttaagcttaggggaaaccgcgtattgaaagaaagagacacagccaagggcttcttcttcttcttcttcttcttcttcggataacgtgttaagggaacactcttgttataaccgcctaccgtttctcctgcaaaacagagcttgattctcaatacaccattctttcttctcctttcgaagcactgccaaataaaaatggagtggcctgcgtgtacggacgaatacgaaaagctcataattcggatgaacactcccagggttgtcattgacaattccgttttctcctcagctacgctagtcaaggttgacagcgccagaaggcatggtattctattggatgctgtagaagtgctagctgacctgaacctttcaattaagaaagcgtatatttctgctgatggcaagtggttcatggat

SEQ ID NO: 59889 - DNA, 2485 bp, Glycine max
  Clone ID: PAT_MRT3847_25090C.1
ggctataccattagcgaagtatgttaaagctgtgtatcatactcgagtttcagttggtatgcggttcaggatgctgtttgaaacagaggagtcaagtgtgcggagatacatgggtacaataactggcattagtgacctggatcctgtccggtggcaaaactcacattggcgctccgtcaaggttggctgggatgaatccactgcaggagacaggcaacctagagtgtctctttgggaaattgagccatttactacatttcctatgtatccatctccattcccccttaggcttaaacggccatggcttccaggattgcattcattccatggcatgaaggatgatgattttggacctaaatcaactctgttgtggctccgagatcctgatagaggacttccgtctcttaagtttcttgggattgggattaatccttggatgcagccaagatttgatctcaccatttagaatatgcaaacagacatgtaccaggctgcggctgtacaagacattaggagttttgatccttcttcaaagcagtctgcttccttacttccatttcagcaaccacagaacttcccaaacaggactgctgctttaatgcaggcccagatgttgcagcagtcacaacctcagcagatttttggaaatactcaagagaatcaacattccccacaatctcaggctcatcttcagcaacatctacaacatcaacactcgttcaatagtcagcatcatcatcaccaccagcaacaacaacagcgacagcaacatcaagtggtagataatcaacagatttctagtgcagtctctacaatgtctcagtttgtttcagctcctcaacctcaatcaccacctatgcaagttatctcttccatgtgccaacagcaaaacttttctgattcaaacgggaacactgtgactactattgtttctcccctgcacagtatcttgggttcttttccccaggatgaaacatctcacctcctgaaccttcctagaacaagctcttggattcctgttcaaaattcaagtgggtggccctcgaagcgtgttgcagtggatcctctcctttcttccggagcctctcaatgtgttctacctcaggtggagcagctagggcagccacagagtaccatgtctcaaaatgctatttctttaccaccttttcctggtagggagtgctcaatagaccaagaagggagcaatgatccacaaaaccatctcttatttggtgttaatatagagccctcgtcccttctcatgcctaatggaatgtcaagccttaagggggtctgtggaaacaatggctcctcaaccttgccatatcaatcttctaattatctgaatactaccacacggactgattcttcattgaatcatggaatgacccccaacataggcgactcgggtttcctgcagtgtctggaagaggcaggacaaggaaacccactgaacaaaacctttgtgaaggtttataagtcagggtcctttggaaggtcattggatatcactaaattcagcagctaccatgagctgcgtggtgaactcgctcgaatgtttggccttgaaggcgagttggaggaccctgtgagatcaggctggcagcttgtatttgtagaccgagagaacgatgttcttctccttggtgatggcccctggccggaattcgtaaatagcgtatggtgcataaagatactttctcctcaggaagtgcagcagatgggcaacaatggccttgagctgttgaactcgtttccaattcaaaggctctctaatggcatctgtgatgactatgtgagccgtcaagacccaagaaatttaggcactgggataacaaccgtggggtctttagactactaaatagtcttcacttcttctatcacatgtaatattattacccttacttctcaaccctttctttgtgtacggtgggaagcacctttgcctaagtgtagtttacatagcctactctttagcctttggatgttttcctgttttttcctgctaggacatttcataaactaatactgtaactatatggcatctagtcattgtgctagccacaatatatacgatacttaatccgttaggaaatcaatgcgtgagatatgttctcttaacttgtacagaactttttctttctagtttggaaataatcagaatcagcagggctttctggcgcagcagcagtaacaagggcaacgtctgcagttgcaacatccacaagtggtcgatcatcaacagatttcaagtgttgtctctacaaggtctcagcttagcacagcagctcaatgtcaattaccacccatgcaagctatctctacacttggccatcagcaaagcttttctgattcaaatggaaaccccacgactactgctattgtttctcccctgcataggatataggattcatttcctcttgatgacacatctcacctttttaggctttctagatacacttgttgcgttcctgttcaacattct

SEQ ID NO: 59890 - DNA, 310 bp, Glycine max
  Clone ID: PAT_MRT3847_25091C.1
cccacgcgtccgatcaggcgttcgggcggtatttatgggcaaggcgaataaaccgatttgcaggagggaggtcatcgctgataaaatgctctgagaggatatttataacatgaactccaacacagttatcacaggtgatgattattctgtagacaagctatgtgacttgtataacagctagtatacacgattgaatactatacaggagtgctaacaagagaaacaaatttgatctgtttgaatgcaagtatatgacctgggagaagactatagagactgaagatgtacatgggaaggctatgacttactt

SEQ ID NO: 59891 - DNA, 673 bp, Glycine max
  Clone ID: PAT_MRT3847_25092C.1
caaaaaacaaaatcacaaaccaaccttagcctagagaaaattaacaagctagtttgcttgtttttcagtgaactcaaggaatacactttatctcttgagatacgtactaagattcatttaagaaattgatatattcccataattaatttgaaagaagatggaagtggtggtacaaagtcctagtagtccaaacatggatactttcgattttggtggcaacatgggttcgatctttcaaagtgttccttcttcaccaaaagggtttggtaattactacctaagcgcaccggcgagtccatctaggatgtctgaattatacaccgaatttgaatattattcttcggcttcaccctcttcattcgaagcaggcaacaaaattgatgatgacgatgaagacgaaaacaacaacgattacagctttgcgttttacgtgaatcgcgatcaatcagacaagtcgtctcgctccgccgaagagctcttcgacggtggcaaaatcaagcccttgaacgagtcatcacgtgcgacttctgttgctgaacaaaaaagaggcagagaaagagagagaagttcttcttcaacaagaacaacaaagttgtcgtcctcgaactcgggtgttcgtacggtggcacgatcactttctccttatagaaaatcatgggaagttgaacaacag

SEQ ID NO: 59892 - DNA, 464 bp, Glycine max
  Clone ID: PAT_MRT3847_25093C.1
atccaaagccaccaaatcagtttgtggcataaaatggagccaagggagatagcttttcttctgcctttctctatttctctctagagcttaatttctttctctatcaccccttgcttgcactttccatcatattttggatcatttaagtttttgaaactaggcgaacattattgtattgaaaacactttcatttgatcttcttcttgttcatagtcttatgaccatagagatattttaataagaagatcggtttgtttctgatatagtttctagtgtttcatcaagtcacgtgcttcttattgttttttttttacaagcttacaactcaggtacccatcatatatacccatataacagaattattagggaatttggtgtttttgtccccaaagaatgaagggccaaaataatcaataccccttaaactctgtttccaagttttcaatgctcaatttactttattc

SEQ ID NO: 59893 - DNA, 368 bp, Glycine max
  Clone ID: PAT_MRT3847_25094C.1
cccacgcgtacgatcgagcatccataaaaaacacctgccctggtgacgataacatactagaagaaagagaagcattatcatcatatatctgctgcttcacactacagtagtgctagcgaataaagctggacccactattcggaccaaccatagctgcataaaaattactaccattaggcaaggtagtgctgtggagtgtgaaggaaaacgagcatgaatggaagagtactctgaggaagaagagtccatgatccctgacgcttcttgtgaacctgcacattatgataatgattgctatcgacagaatcggaattctagacttgcttccatagccaaagcatcccaaaagatgatcatgtgagtcaaag

SEQ ID NO: 59894 - DNA, 123 bp, Glycine max
  unsure (1)..(123): unsure at all n locations
  Clone ID: PAT_MRT3847_25095C.1
ggctganacacactgtcaccaaagaccaacccttttttcctacatagtgctctgccctaaggatagggtttaggtccccatacacacactcacaattggtggttgagtgcttgtacagaaaat

SEQ ID NO: 59895 - DNA, 372 bp, Glycine max
  Clone ID: PAT_MRT3847_25096C.1
aaagagcttcgctgctcatatgtaaacggacggacacctatctcgattccccagtaagtgcctccgccattcaaacggaattttcgcaagaaaacaagttccggccaccatggcaggaaagtttggattaggggaaagtttacttccatgtaaggtcgaagaagaccatcacactgagcaaggatttatggcaggtatacgtgtcacttatcaaccggttgttctggaatcgaaccgaagcccatgccttgaaatagaagaaggcccaccagggatgaataaaaaagtataccagactcgtagttctagtgacaaagagaaagcaaagtacatggtttggacaaatgaaatggacaagtgcctcaccaaggt

SEQ ID NO: 59896 - DNA, 1047 bp, Glycine max
  Clone ID: PAT_MRT3847_25097C.1
gaaacaatgggactgttgcactgactgtaggggttactgtatgctagctagagaggaagaacgaacaaaaggaagtaagctcggaattcggctcgagggaaaatggccattccgtcgtgtttatggaattcaggaacctgtggctgttgctctgtctgccgtcaatcttgctatgcagtttcatggttgggtatcttttttcattcttgtgtactataagttgactttgaggccagataagaagacttactatgagtacactggattgtggcatatttatgggattttatccatgaacgcatggctgtggagtgctgttttccatagtagagccgtggaattaacagagaagctggatttttcttctgctgtggcattacttggattcagcctcattctagcaatattgcgagcttttaacgtgagggatgaggctacgcgagtcatgatttctgctcccttgattgcttttgtgacaactcatatcatgtatctgaatttctatgaacttgcttatggtttgaacagaatagtttgcacgggaatggttgttgtccagcttcttatttgggccatttgggctggtgcttcgaaccacccggcgcgatggaaattatgggcagtagtggttggaggaggcttagctatggtgttggagacatatgactttccaccttacatgggatatgtggatgctcatgctctatggcatgcaacaagcattcctctcacatttttttggtggggttttataagggatgatgctgagtttagaaccacagctatgctcaagaaggtaaaatagtgctgcagacacaatttggcagaggttggatctgatgaagaacatgtcatatatgttgctgcttactttgtttttgtacatcagaacttttttttttaaaatttgttttcctcgtgtaggcgtttatttgaaatgcttaacccgatggtttctgtgcttttgattttgtaactttttgttttcctcatgtatgaagcatacttttttagtggaattaattgcaatgctttttacaccttttc

SEQ ID NO: 59897 - DNA, 311 bp, Glycine max
  Clone ID: PAT_MRT3847_25098C.1
agcagcgggcgcgtttctttttgtgttttttttgcggcgcccagcaactaaaatatttttattggcaaccaaaaaggcattcgccataggattgggacttcactagactaaaagcgcaagcacttaagccttacatataaggcctttaaggcttgtgaaaccaagcgaacccaaaataaaaaagaaaatcccgggcttagaacaaagcccttgcttggaagaaaacccattatctcactagaaatacaactgtagactgaaactgggactgtgatttaaaaaacttgggactgaacaacaaaacccccggc

SEQ ID NO: 59898 - DNA, 379 bp, Glycine max
  Clone ID: PAT_MRT3847_25099C.1
caagattccataatttcaaagactttgtgtgctccacaccaccatggggaatgaaaccagaaaactctcagatgagtatgaagtttcagaagtcctaggaagaggtggattttctgttgtcagaaaaggcaccaaaaaatcaagcagtgacaccaaaacacatgtagccatcaaaaccctgagaagggtaggcactgcctcaaactccaacaacccttctggatttccaagaccaaagggtggagagaagaagagcacagcagctatgatgggattccccacatggagacaagtctcagtctcagatgccttgctcacaaatgagattcttgtgatgaggagaatagtggaaaatgtttcaccacaccctaatgtgatt

SEQ ID NO: 59899 - DNA, 287 bp, Glycine max
  Clone ID: PAT_MRT3847_2509C.1
gtacgtaatctggaattcggctcgagctcttaataaactccaccaccactctacccgttttctccaacgttattaacaacccaaacgttataactccaccaccatcttcctctaattttattcaacaacaacccattacaccccatcttgaacccaacttggagaagaggaattctgtggcggctatgatggagatgattttccgcgtagcagtgatgcaacctattcatatagaccctgaatccatcaagccaccgaagagaatgaacgtgaatatttcaaaagat

SEQ ID NO: 59900 - DNA, 2218 bp, Glycine max
  Clone ID: PAT_MRT3847_250C.1
ttttgtgtgtgtcagagaggaaaaaaaatgaaaacatagcatttggttgggcaacttaagtcgtggactttttgccagtttttcttcaatcagatccaccaaacccatcacacaaaatcacgtaagattgtacctcccaactcaaaagcttcaaactttttccagtttccaaattaattaagacacagagagaaaaaccacaaaaaagctgcaaaattttcttcttttgtcacttttttttctgttttttcatcacaaaagtttgaaccttttctttccttccattgaatttggatggctggcggcggaggtggggaccggccgccgtggaaggaggcggcgccgccacgacccaccatcactctgccgccgcggtcgggttccatggagtcccttttcaatggaggattcagccctggtcccatgactctgctttctggctttttgggtgatggggatgatggaaagtccttctctcagctcctcgctggagctatgtcttctccggtggccggagctgtcgccgccggcgtgatggactcacctggtctcttttcatcttctcaggtgtcttttggaatgacacaccagcaggccctagcacaggtctcagctcaggcttcacaagccaactccaatatgcatatccaagccgaacattcattgacacaggctcctgcagctgcttccaatacaactcaacagctgatgccacctctaacttctgactcttgggctgcaatgactgaatccattgatcattctcactcagaacaaagattgcaatcatcattgttgaatgttgataagcctgcagatgatggctacaactggaggaagtatgggcagaaacaggtcaagggtagtgagtttcctcgaagttattacaagtgcacgaatccaaactgtcctgtcaagaaaaaggtcgagcgctcgcttgagggtcatgtaactgcaattatttataaaggagaacacaaccatcaatgtcctcatcctaacaagtgctcaaaagacaccatgacttcaaatgaaaattcaaatatgcaagggaatgtagattcaacgtatcaagggacgagtacaaactcaatgtctaagatggatccagagtcaagtcaggcaacagctgatcgtctatcaggaacaagtgacagcgaggaagtagccgatcatgaaactgaagtggatgagaaaaatgttgagcctgagcccaagaggagaaaagcagaagtctccagtcagatccagcttcttcacataggactgtcactgagcctcgaatcattgtgcaaacaacaagtgaagttgatctcttggatgatgggtatagatggcgaaaatatgggcagaaagttgtcaaaggcaacccttatcctaggagctattacaaatgtacaacgcaaggttgcaatgtgcggaagcacgtggagaggacatatgaaggaaaacacaatcatgatgtgccagcagctaagactaacagccacactatggccagcaatactgcatcacagttaaaatcacataacaccaatcccgagaagcataattttggcagcagaggtatgggaggaaatgaacaacagccggtcgcacggcttcagttgaaggaagagcagatcacctagttttctggaagaaacatcttagtgaggaagaatttttctcacctcacaagtcatctttatttagatgctatcgcattcttttttagtcttaggcctaagttttgataggggcctatcagtgcaaaccctaataaacaaatagtttaacactgatgaaagaggtaagggcaaaaggtttaaacaaaagtttgaacaatgaacgcaggttttggatgatgatgtactattagtaccttttgtgtacattgaaagtgtaagttatgttgtctaatatagttgttcatcatgttattccttgctaaaaaaaaaaaaaaaaaactttattaatatacatatattaagtatatgtgccatcaaatgctgcaactgagtggtaaaaaaaaaaaaaaaaaaaaaaaaaaaaaaactcgagactagttctcctcgtgccgaattgttttcaacgaaattttggatcatgaataactttaggcgtaagtagccttcgtctttgaaagtgtgatgggttgacaaattagtccttaaaagatgaagattttaaatttaattccccaatggccaaaaaaaagtgtgataaattaatgcgc

SEQ ID NO: 59901 - DNA, 2267 bp, Glycine max
  Clone ID: PAT_MRT3847_25100C.1
ccacgcgtccgcttgtgttttgggaacttgaggactgaggtatgtctactgccagataaaactattcatgagctttcatccaacactgtaagcttttgggatatttagttaatggcatggtgttgccaactctctgacctttatagtttgattaatactgctcccattatttgaataaaaaattgaattttaacactagtcaaggtgggcttgtgcatactttacactccaagttcaaagacttttgtgtgaggaggaggcatgttgggtataaaactgttcatgtgctttttttacccaatggcttaagctttcgtgatggttggttcataatagactttattattgacccaagggaatttgtttttcaattaatagcttccatatcatgtatagaagttctctttcttgtatagtatctgatgtttttgtaaaaaatggtttccttggagcacaggtgtgacgacgattgaaacatgcttcagattcggctcagtaaggctcctgcatcagaaggttcggcagggttgaagctgtcgccggttgagactgttacagttgcgtgccccgatcatcttgtccttgctgatcttccagttgcaaagggcattggcgccgccactgttgcctcccgtgttaagactttgggccgtagatctcgccgccagcttggcgagcgagtccatttctgtgttcgctgtgattacccgatcactgattatggacgcctgatccattgtgtgcatgcctattgcctggactttgctgtgagggagtcgctgtgcggcttgtgtgctgttcgagtcctgtttttacccaatgtcttaagctttcgtgatgtccggtttagagcagcctttagcagtctccagtgggtatttgtttttcaatttattgcttccatatcatgtgtagacgttctctttcttgtatagtatctgatgtttttgtaaaaactagaagtgattcaatgtgctacctgtgtgatgatcgaattcagaagattcaaacaattaaaatgatggaaggaatcctcatttgtgcggctcctcattgtctcaagtctttcttgaagaaagctgattttgaatctcatatccaagacagccacggaaaccttcttcgacccaatgcagataaagaagatggaaatgagtcggaggcacagagtgttaggcaatcaacggcttcagattccactgctcgcggtccccaaagaccagttttttctcctggttcaaattcccagcaacatgatctggaagacaaatctcgtagacagacacctagagagcaaccaccttcaaggcaaacccagcagccaaagccaccatattatggtcaacaacaacacccttcagataccatgtctgcctctgttggtggtggacaacagggctttcatcaacaaatttttgacatgcagcatcccccacaagatccttcccagtttgctgacagacaacaggcagttggtccagaggccccatttcccgagtatccagcaatgcacccagcacaaccttccaatgttcccttgctggttacttcaaacccaatgctgaacccacccatgacatttggctatcccccatacctaaacgaacgagctcagccattttatggtgctccctatgatatgcctaggcaggactcaggttctgatataggtggggaccagagttcattagtgggtttcccgcaaggtgtcccaaatggcccaaattttccaggaaattatccccagccatggaattcaggaatgggtggtgtgccttttgaacaagcacagggtggtatggttgtggatccaagggagggcaaaggtatattggcaccacagcccatgcccctcccaccgccacctccacctccatcccacatgtcatatgggaaacagaactactattctggggagcttgggcatgatggtcagagttatggggggtggcagcatgatacccgtgatagctttggtagccaaggctagtaaggcttccaatctttactttcttggattaggtttggttactgttcaggatgtttctgcaaccatatttgtctcatgcatcattcaaattgctaaacagcgattagactatttacttttgggccaatttgtattttgtatattttaatcgaattttgagtttttccattatcatttaccaaaggtaatgaaaagttttatgtcttgtttggtagtagaataccaatataagataccaagaatcggaatgaaatgtctttccaagccaatattcggt

SEQ ID NO: 59902 - DNA, 688 bp, Glycine max
  Clone ID: PAT_MRT3847_25101C.1
cccacgcgtccgcccacgcgtccgcccctgcgtcgcgaacgaatgaacgaagaacacagaacgacgcaaatccaagactgaaagtttctagattcgtcacctgcgagaggtggagacatattttgtgataaccctatacccaatttggagcagtggtttgaaaagttttgggattgcggaaagaagtttgattgaaacatgcttcagattcggcttagtaaggctcctgcatcagaagggtcggcaggggtgaagctgtcgccggttgagactgttacagttgcgtgccctgaccatctggtccttgctgatcttcctgttgcaaagggcattggtgcggccactactgcctcccttgttaagactttgggccgtaggtcccgccgccagcttggcgagcgagtccatttctgtgttcgctgtgatttcccgattgccatttatggacgcctgatcccttgtgagcatgccttttgtctggattgtgctagaagtgattcaatgtgctacctgtgtgatgatcgaattcagaagattcaaacaattaaaatgatggaaggaatcctcatttgtgcggctcctcattgtctcaagtctttcttgaagaagctgattttgaatctcatatccaagacagccacggaaaccctcttcgacccaatgcagataaagaagatggaaatgagtc

SEQ ID NO: 59903 - DNA, 349 bp, Glycine max
  Clone ID: PAT_MRT3847_25102C.1
cagctccctataaagaacataaaccttttttttaaaaataacaagttaaaaaagggggggttcctaaacaaactcccttatctctctttttcaagccttaaatgataaaaagaggaataaggaaaaaggacaccattttggttgagaaacatatcatcagagagttcaatggggaagagagactaatggggggtgttgatgatgctcgtttgtggattcgtggtgcacagccatggactcataccacaaaccattgggttgatggcaaaaaagaatttgatctctgctccattcatatcccagagcacaccctaatgtggccagaccttattcaaaagccaaaaatgga

SEQ ID NO: 59904 - DNA, 614 bp, Glycine max
  Clone ID: PAT_MRT3847_25103C.1
tttccctttttttttttttttttttttttttttttttttttttttttttttttttttttttttttttttttttttttttttttttttttttttaaacggaaccccccccccccttttttttccggggaaagccccccccccccccccaaggggtttgggggcggaaaaaagaggcaaaaccccccaaaaccaaaaaacaaaaaacccggaacccccgggaaatgggggaaacccggaaaaaaaaaaaaaaagggggattttgaaaaaaacaaaggcaattggcccgccccccccggcccaaaggaaaaaaaaaaaaaaggggggggaaaaaaaaatcccaaagctttggcccccccgggagccccaccccggggggcaaaaacccgcccaaaaaaaaccctaatctccaaaccaactaggggtggaaaaaaacccgtcccattggggcggccgggaaaaacaacaggcccaaacatcgggggagaaccccccccaaaaaactttgaaaaaagggggctaagggggcccccaacgaatataagttcatcaaggcgggaaaagggcccccccattttaacaagggaccccccatttccgaagaaagccccgggccc

SEQ ID NO: 59905 - DNA, 548 bp, Glycine max
  unsure (1)..(548): unsure at all n locations
  Clone ID: PAT_MRT3847_25104C.1
tcataagttgaagaaactnttttaagttgctcgagatcttagggtcgaaagggtaaaaatgtattatttcataatattaatataatataataaaaacttcgtaccccattgtccggaggctcttcgctatgcgaaggtatgggggagggatgttgattaatataatataataatctaatattattttaaatatgaaggagcattaaatttaaattttaaactgagatgaaatcacactaaaaaagtagattttatataaaaactagtaaggtacctcctggtgtattcacacaaattatttctatttttacacatatttaaaatacatttgtttataaaattaaatattttcattaataagataaaaataattaactaattaagttctccaacgagagggctccgtttgatattgggagcatagtgcacaaatgcagagattatcttggcaatggttgttgtacaaaaaggggattaaacggngttgctctatctcttcttgtattctcaacctttagaatgcctatagacagttttagttggattta

SEQ ID NO: 59906 - DNA, 642 bp, Glycine max
  unsure (1)..(642): unsure at all n locations
  Clone ID: PAT_MRT3847_25105C.1
attttatattattttgtttgtactgtccattctccaccaaacaatgcacaggataaaaagttgttctgtaacttacaaattttttttgtactattctccttgtgctatgccttggtgtgtatcaaatgcaccctatggtgcactattgaaagtgcatctttttcaaggaatgtagaaaaaaatgtgcagctcttacattgcacacatatcaggggtcttacattgcacatatatcaggggtcacagctttgctaaatgtacaaaactgcaaaatgttatgagaattaatactataaagtagtattgtccaatggaatatttgaccatagaggaagctttgaacttccaatggacataagatataggagtatgctctactggaaaacacatcataagaattagtctatcatacccttttgactgtattaaaagataaattaattaaatcaagcaaaaggaagatttaacttgctttgagctagacttcctttcgtggtttcatgtggtgctcttcacataatttctttcaaggtttttccctgtttgacctgcagaggaattggaaaactttntgttttctgtattggcctacttctatnctaatcctctctttccttctaattccaatattgntattctttt

SEQ ID NO: 59907 - DNA, 247 bp, Glycine max
  Clone ID: PAT_MRT3847_25107C.1
atctcccaaggcacataccaagcggaagaaaactgatagtaccaaagacaacgaggacgatgcgaagacttcccacccattagataacaatccttgtgaagcggcgacaagaaaatacggctggagcgctaacatggagagaatcatgcagacacaaactttgacagatgccagcaagcaagaatacatgttttttaaaagggctactgaggacaatcccaggaaacccaggacaaaggagacccga

SEQ ID NO: 59908 - DNA, 1260 bp, Glycine max
  Clone ID: PAT_MRT3847_25108C.1
ccacactagagagaactagaaaccataaaccattccacaccttcacaaacacacaaactcaaagaaacacacacacatagagtgagacagagagagaggcatggggaatcacaggtttaagttatcagatatgattccaaatgcttggttttacaagctgagggacatgggtaaaggaagagattcaagaaagcaaaacacaacaccctctaggaaaaagaagcaaacttcacccccttcaaccacacattcatcaatacgaaaccaaccccaccaacaaaacaacaacaaccccagaaaatcctactatttcacaagagacctcaaaatctcaccctcaaacaccccaaaaactatttcccctcctagaaaatcaaccaaacaaagaaccaaaaaaagaacaccaacaagaacaccaaaacttgtctcctcctcaggttgtagctgccgcaccacccttgaatccatgtggaccaaatcagattcaccacaagatgaacactcttcctcatccccatttgacacctctcccgagtcacaatccccagaattcagaacagaccgtgttcttctcccattttcttcatcattcgatgaaatggtgtccttgtccaccacctcttgcgcctcttgcagactcaacacaaacaaaaacaaaaacaacaccaccaacgacaccatcatagacgtggacaaaaactccatagcaagaaaagataacaagcttgatggctactacaattacaacaccaacaatggctatgatgacaccttctcagagcttgagcttcctccaatcataaccaagccatcatccaagttactaaagaagagagaactcaaacaagggtccttgaaggtgagaattgtgaaggaacaagactctgcaatgaaggaacagaggaaccatcatggttctttgaggaggctatctgtgagttctccaggggtgaggttgaggatccactcgccgagaatcgccggcaggaggggccggaaaagcgtgtcgtcgtcatcgacgagacaagttccggctcccggagaagcctctccgagagctttgcggttgtgaagtcatcctttgacccacagaaggacttcatggagtccatggtggagatgattgtggagaacaacataagggcatccaaggacttggaagatctacttgcttgctacctttctcttaattcagatgagtatcatgacctcatcatcaaggtgttcaagcaaatttggtttgatttgactcaaccaagg

SEQ ID NO: 59909 - DNA, 561 bp, Glycine max
  unsure (1)..(561): unsure at all n locations
  Clone ID: PAT_MRT3847_25109C.1
ggctcgagctagaatgtgtagttgatactgtgtattgtgtgtgtctaggagttctggtttggatttagatatttttcaattacttaacacgaagttcttgggattttagtgggtgatttgggtgaaataattggaaagttttgctaaattatgtacaaggctgtcagtgttggtggattaccttactaggctcaagtgcttccgattgatattagtcagcagggttattgggagtcacatcaccaccatttatcactatggtttcgccaatcttatgctctacaggtaatcattttatgatgcttttgtgaatgttttttatataatcacatggatttgttgaattgatagcttcgtaatgttcttgaatagatttattttggtcccttgtacaatgttggttggccttttgggccatatgttctccttgccatttgtaactgaagattgtgaatgtctcttgtttttttgcttatgaaaagaaaatggctatctataaattctaaaccatttattcatttgaggaacctttgctctgtatgcattacctatnggttaaat

SEQ ID NO: 59910 - DNA, 299 bp, Glycine max
  Clone ID: PAT_MRT3847_2510C.1
agagcagcagtgcacaacaacggaactcttttcagatcttgattcattgcattccaattttatccacattgggtcgggtggggtttaagtgcagtgcttccacccccaacgatcttgattcgatttccaaacctcctaggttaggtttcgagacacttgcataaacaacaaatggcgtcatttgtttgtgcctgataccttaccaggctgaggctgggcttcactatgtctatggcggacacaaatacaaactcagttgacgtgattttggactttcttaggaggaaccgattcaccaa

SEQ ID NO: 59911 - DNA, 385 bp, Glycine max
  unsure (1)..(385): unsure at all n locations
  Clone ID: PAT_MRT3847_25110C.1
tcttaactcatttaacttcacaactttctcttactaatagcaccatttttaatttgagtccatctccaaagccttcaaaacctacccttagcaattcggtaccatccttaagaacggctacatcgtcttcaaatgccttccttgatagtttttttaattttttcttacattattgtaatgcacagncacgctatattttaattttatctaattgttattttcacttctcagaaacttgacgatattttgccctattcttacaattatgatgttcctcatgttaatcgttctgattaccatcttattgatattgctcaagatggatttttgagtctgcttactgaaaattgtaacactaatgttgacctcaagctttccactgatt

SEQ ID NO: 59912 - DNA, 337 bp, Glycine max
  Clone ID: PAT_MRT3847_25111C.1
ggagccaaacagagagtgatttcagtgagcgatcggcgctcactcgatctcatcataatcgccagcatcaattgaaaaacatgccgatcacatacatctccgtcggacggcctaaacaggcgactcacccccacacgttgcaggcggctctgactgaattcatatcaaccttcatcttcgcgttcgccgactcacgctcctgcattacctacaactagctcaccgacgacctcgctgccacccctgcctgacttatgtccgcctccatcatgcatgcattctccctgttcgtcgccgtctccgtccgcacctacatctccggcaggcacatcaaccc

SEQ ID NO: 59913 - DNA, 265 bp, Glycine max
  Clone ID: PAT_MRT3847_25112C.1
gaaacaagtacctcccatgactcacagcatagagccctgaagttgtgatgttccgccatacccatattcctcaatcaggacaccgaatgtcctaattcgggtaactgctacctacatcatggctactgtgttcacattgtggtggtaataagcacaggtttttcacatctcttcacacacagaaccacctcggtttcatccttttcagcacccttatctcaaagctttttcatttttggtgggtttttttctcgtacatagttgt

SEQ ID NO: 59914 - DNA, 601 bp, Glycine max
  Clone ID: PAT_MRT3847_25113C.1
acaaattaatcaacttgggagattgaaacatctttcattggttcgaagccaagagttccaaattacctacttccgaagagtgaatgatctgggattacttctaatggctgacaagtgtgcaaacatggagagcatatgccttggtggcttttgtcgtgtcacagacactggtttcaaaactatcctgcattcttgcactcgcttatacaagcttaaggtcactcatgggactcatttaactgatctagtttttcatgatatttccgcaacatcccttactttaacacatgttagcttaagacggtgcaatctgttaactaaccatgctgttttgagtttggcatcaaacaaggtacttaaaattcttgacttgagagattgcaggagccttggggatgaagctctccaggccattggcactcttccaagactgaaaattttactattagatggctctgatataacagatgcaggacttttgtacttaagaccatctgttattagctcactgtatgcattgtcgcttcgagggtgcaagagacttacagataaatgcatcacagctctatttaatggctgctgtgtgctggaattacgagac

SEQ ID NO: 59915 - DNA, 380 bp, Glycine max
  Clone ID: PAT_MRT3847_25114C.1
tgctcgttgagatcgatgtgaatctggaccttcacgaccggagcagcatccttgcagtgttgcacatggctccaagtcgtgcatatacactatacactcccaaacctgaaaagaagaacaagaaaccacagagatttccaaaaccaaaagcaaagcgaagaggaactgagacataaaaaaaaaaaagagaacaagaagaataagaaaccctagctcagcaacgacacttcaaaacagcaaaacgagagatccaaaaggggatcagaaggaagcaaagaagaggcaaatgaacatgtttgctattaatcgcatcagaactatgtttaagggtgaagattttggaagattttgtaaggaaagacagattcggaggacaaagg

SEQ ID NO: 59916 - DNA, 1249 bp, Glycine max
  Clone ID: PAT_MRT3847_25115C.1
attacaaatacacaggtattaggctgcgtccatatttatatctcatgatttcgtactctttcaaacactagacttggaagggaaaaaaaaaagtgcaaagaagaataagaagatgggaggtaatgaattaacgtacgtagatattacaatcttaaacaaattaacatagacagaatgctaattatcaataatcatatccttcataacaaaagcaggaattaataattgctacctcagaaaatgcatgtttagaaaaactaaaattgcatcttaattaatgttttgacaacacttattaataacttattgtgttaacctaattagattagagacagtacatcataatggataagttttttttttcttcaattcatgaatgtcatatagcatcgtgagcaatcagccttttcattatcacagattgactgctcacgatgttatatcatccataagttttcttccatgctgttaaaatccacttccatatgctggtgcccagtaatcagctccattttcatttccaacatgttgggtacaagacacaggaaccaagcacagtcctctactcttcaagtcgcttggcttatcttttgcatcctggtttggagctccctttcttttcaggccattgtcattcaacagctgaccggggtcctcaggaaatacagaatttctttctccgtgtacctgttgagactgtggattcctcatgttttttgatccattgcccaagtaaggagaactgagtgcctcaatttgaccctgaaggaatcttatgtatccaatggcttctaacaagacagaagctgtgtcagtctgcaaaagtgaaaaaactacatacacacataccacaataccagtcatatgtctcttttaaggttaaaaatgagattaattacgataaatgaggaaaaaagaaagaggaaaacagtagtttggagagttgccatcttctgccacaaattgagccttgccttgcttggctgaaattcttggccgttccattcttgaatcctgcaaaaaattcttaataaaggaggcaacaagtagacaagatacttcaattactttggccttcaaatgagagtgaaacgagtttggagtggacactcattgttaatttgtgtatagattatattactttgccatatattttggcttttgatgttttctttctcttgtataatttgaatatatttccgtatataatgtatgtatacaattgagtaaatgttcaggcaatccttaa

SEQ ID NO: 59917 - DNA, 265 bp, Glycine max
  Clone ID: PAT_MRT3847_25116C.1
tataaggcaagaaatcttatcgaaagaaggggcaaactttaaaagaaggctcctatatatacagagagagggacgtagcaacaaatatctagcacacactatatgtgattattgaatcaaggagtgataacagactctgcattgcaccaaaaaatatggtatagtacatgtccagagcacgtgatggaaaaactacacggtgagacggacgatcgtgactcacaacaggatcatgaagctgccggtcttaaggtgaagaatgcag

SEQ ID NO: 59918 - DNA, 4825 bp, Glycine max
  Clone ID: PAT_MRT3847_25117C.1
ggctcgacccacgcgtccgaacagagcctaagcaagaaaagaagctaaggtgtgagtgagcagagagaaacagggctatcaagagaatggccctgaacgattttttcgcgggggagatcgcgacggagcttctgaaaatgctgatcagcatctcccgcaagtccctcctctgccgcgccagcgccgaccagctcatcagctacatccacgacctcctcccctccatcgaggagatcaagtactccggcgtcgagcttcctgcactgcgccaatcgcaactcgaccgtctctcggagattctccgctccggcgtcgagctctcccacaaggtcctctcctccagccgctggaacgtctaccgcaacctccagctcgccaagaaaatggacaagctcgagaagaacgtctccaagttcctgttgggtcccttgcaggcacacatgttggccgacatacaccacacccggttcgagatgaccgagcggttcgaccgggtcgataactcggttcaaagattggagaagtattttgggaatatgaagataggtgttggcggcggcgggtgggtggaggaggctgtgaggagcgtggacgaggatgttgttgatagtagctctgctgtcgggttgggtttcgggaagaataaggttagggagatggttgtcgggagggatgatctttgggttgtcgggatttccgggattggtggttccgggaaaaccactcttgctagagagctctgcaaagatgaccaagttagatgttatttcagggataggattttgttcctgaccgtgtcgcagtcaccgaatgtggagcagctaaggacgaatatttgggagtatattatgggcaacgagaggttggatgcaaattacatggttccccaatggatgccacagtttgagtgcagaagcgaagctcgaactctgattgttttggatgatgtgtggacactctccgtggtggaccagcttgtgtgtagaataccaggttgcaagtttcttgtggtgtcaaggcctaaattccaaacggtgttgagttatgaagtggaattgctgagtgaagaggatgccctgtctttgttctgtcaccatgcttttggacagaaatcaattcctttagctgctaatgagaatttggtcaagcaggttgtgactgagtgtggaaggcttcccttggctcttaaggtgattggagcttctttgcgagatcaaactgagatgttttggttgagtgttaaaaacaggctatctcagggccaaagtattggggaatcccatgaaatcaatctgattgacagaatggcaatcagtatcaattaccttccagagaagatcaaggagtgctacttggacctgtgttgttttcctgaggataagaaaatcccccttgatgttctcatcaatatatgggtggaaatccatgatattcctgaaacagaagcttatgccattgtggtagagctctccaacaaaaatctcctcaccttaatgaaagaggctcgtgctggaggcatgtatagcagttgctttgagatctcagttactcaacatgatgtactgagagacctggcccttaatttcagaaaccgtgagagcattgatgaacgccggctattagttatgccaaaacgggagaatggaatgcctaaagagtggttgagatacaggcacaagccatttgaggctcagattgtttcaattcacacaggtgaaatgaaggaagtggactggtgtaatctggaatttccaaaggctgaagtgttgatcattaatttcacatccactgaatactttttgccccctttcatcaataaaatgccaaatttgagggcattgataataataaactacagtgcaacatatgcttgccttcacaatgtttcagttttcaagaacttgtccaacttgaggagtctctggcttgaaaaggtttccatccccgagttatcaagcactgtcttgcaaaacttgggaaaattatttgtagtcctctgcaagattaataatagtttggattggaaacagaagtagacttggctcaagtcttccctaacctctctgagctcactcttccaacttaacgtgtagggttttcagtcccattcgtcttttgatccgtgctctgtgattcccagaccttattttttctgtcatttgtgcttcaaatttcaggagattaattatggctcaacccacaacaagaataggccttgctggattggctgttatgggccaaaatctggcactcaatattgctgaggaaggcttcccatttctgtttacaaccgaaccacttccaaggttgatgagactgtagcatgatgccagaccttaatttttctctcattcgcttcaaatttcaggaaatcaattatggctcaaccctcaacaagaataggccttgctggactggctgttatgggccaaaatctagcactcaatattgctgagaaaggctttcccatttctgtttataaccgaaccacttccaaggttgatgagactgtagaacgagcaaaacaagaaggaaatcttccagtttatggctaccatgaccccgaagcttttgttcattccattcaaaagcctagggtgataataatgcttgttaaggctggggcacctgttgaccagaccattaagaccctatctgcatacatggaaaaaggtgactgcataattgatggtggtaacgaatggtacgagaacaccgaaagaagagagaaatcggtggctgaattgggtctgctctaccttgggatgggagtttctggtggtgaggaaggtgctcgtaatggtccctctttgatgcctggtggttcgtttggtgctttcaaatacatcaagcatattcttctccaggaggcagggaaaagccaatacagtggttctgtgcgtgacttatattggtaatggtgactacctgctcttaagtgagaaggatgatctcttgaagccgatttgatagcctgcagatgaatggaggccactagtattttcagtattcagctgggtggaaatctatagattccttatagagtgacctcatggcatggaagtagagagaacttctgagtttcctgattgaagtcactgaggatatatttggaattaaggatgataagggagatggatatctttttgacaaggtcctagacaagactggcatgaagggcactggtaagtggactgttcagcaagctgctgaattatcaattgctgctcccactattgaagcatcattggatgcaaggttcctgagtgggttgaaggaggaaagagttgaagctgcaaaggtctttaaatcaggtggtattggtgatatcgtgactgatcaacctgtagacaagaaaaaattggttgatgatgttaggaaggctctttatgcagccaaaatctgtagttatgcacagggaatgaatttgatccgtgcaaagagtattgaaaaaggttgggatttgaagttgggtgaactggcccggatttggaaaggtggttgcatcattagagcaatattcttagacagaatcaagcaagcgtatgatagaaaccctaatcttgcaaaccttcttgtggatctagagtttgcaaaggaaataatcgatcagcaatctgcgtggaggagagttgtttgccttgctatcaattctggtatgagcactccaggtatgtctgctagtcttgcttattttgatcacttacagaagggaaaggatgccagctaatttggtgcaagctcaacgagactactttggtgctcatacatatgaaagggttgacatagaggggtcttaccatactgagtggttcaagcttgccaaacagtctagaatttagattactgtatttgaaccaatcaggattttcctaataaatgtaatgttttctgctcagactgtatgctgagttgagtttacatagccacaacgtggtgaagttttatttatattatttccaactgaattgcttgatgtttgttttccaactatgttgtatctttgctgatcatgctttgtgcttgatactagagatcctacgtttatatgcttgtccttatctgaaaacacttcctaatagcatctgtgacatgatgagattgaagtatattgacatttctcaatgtgttaacttgacatgcttccctgaaaagattggtagattggtaagcttggagaagattgacatgagggaatgctccatgattagaaatgtgccaaagtctgcagtgtcattgcaatctctgaggcttgtaatttgtgatgaggaggtatctgggatttggaaagaggttgccaagcctgataatgtgcatattcaagtatcagagcaatactttgatttggactggctcaaagagtgacatatatgtgtctatgtttttgtgatattttactttctaatttgatgtttttttttcttctagatcacacggatcctccattagaggtaatactgtatgactattatgaacagaactttccaatttgatgtgaatacttgtacataacttctatttgaagtggaaattatctttttccaaaatctaaagaaaaggaatttagaacccaaaaaaaaaaattataaaatgtaagggtattaaaggaattcccattaaatatggaatagtttgttataccaattctgttataccaatagtaatgttgtctgcccccaaattaacaattctgtcataactagtgttgtctgtagtggggtaggtttgttaattgctgctgcttgattcttatctttaggccttgggaatcctatatataggtatgtaattgaagcttgtgatgatatgaaggaattccccctcc

SEQ ID NO: 59919 - DNA, 1613 bp, Glycine max
  Clone ID: PAT_MRT3847_25118C.1
caaagtgagagcagagagagtggggttacctattataacagaatggccctgaacgattattccgctggggagatcgcgacggatcttctgaaaatgctgatgaacatctcccggaagtccctactctgccgcggcagcgccgaccagctcatcagctacatccaggacctcgagccgaatcggctcgagaggctacttaaagggcttggaaagaagaaaggaaataattgatcaccaatctgcctggaggagagttgtttgccttgctatcaattccggtattagcactccaggttatttcagggataggattttgttcctgactgtattgcagtcaccgaatatggagcaactaaggacggatatttgggggtatattatgggcaacgagaggttggatgcgaattacgtggttccccaatggatgccacaatttaagtgcagaagtgaagctcaaactctaattgttttgatgatgtgtggacactctccgtggtggatcagcttatgtgtagaataccaggttgcaagtttcttgtggtgtcaaggcctaaattccaaacggtgttgagttatgaaatggaattgctgattgaagaggatgccctgtctttgttctgtcaccatgcttttggacagaaatcaattcctttagctgctaatgagaattcggtcaagcaggttgtgactgaatgtggaaggcttcccttggctcttaaggtgattggagcttctttgcgagatcaaactgagatgttttggttgagtgttaaaaataggctatctcagggacaaagtattggggaatcccatgaaatcaatctgattgacagaatggcaattagtatcaattaccttccagagaagatcaaggagtgctacttagacctgtgctgttttcctaaggataagaaaatccctctggatgttctcatcaatatgtgggtggaaatccatggtattcctgaaacagaagcttatgccattgtgattgagctctccaacaaaaaatttcctcaccttattgaaagaggctcgtgctgcaggcacgtatagtagttgctttgagatctcagttactcaacatgatgaactgagagacctggcccttaatttgagaaaccatgagagcattgatgaacgccgactattagttatgccaaaaaaagagaatggaatgcctaaagagtggttgagatacaggcagaagccatttgaggctcagattgtttcaattcacacaggtgaaatgaaggaaatggactggtgtaatttggaatttccaaaggctgaagtgttgaccataactacaccttgaggacaaggtgtttgtgaagaggggtggaattgttaggaacctagcctaagtaaattagttactgtaagggtattaaaggaattacaattaaatatggaatagtttgttatagcaattctgttataacaatagtaatgttgtctgccaacaaattaacaattctgtcataactagtgttgtctgtagtggggtaggtttgttaattgctgctgcttgattcttatctttaggacttgggaatactatatataggtatgtaattgaagcttgtgatgatatgaaggaattatcaatc

SEQ ID NO: 59920 - DNA, 578 bp, Glycine max
  unsure (1)..(578): unsure at all n locations
  Clone ID: PAT_MRT3847_25119C.1
gttaatttgcaccttgtggttctctctagaaattagaagttcatgcttaaactttaccttgatacttctttctcgcatgaattttcgaacattgaacaggaaattaaccatggctcatcctgcaagcctcacaagaataggccttgctggcctggccccacgcgtccgtacggctgcgagtcaacaacagaagggggatccgtgctctgtgattccacaccttaatttttctctcattcgcttcaaatttcaggaaatcaattatggctcaaccctcaacaagaataggccttgctggactggccctaatgggccaaaatctagcactcaatattgctgaggcaggctttcccatttctgtgtataaccgaaccacttccaaggttgatgagactgtagaacgagcaaaacaagaaggaaatcttccagtttatggctaccatgaccccgaagcttttgttcattccattcanaagcctagggtgataataatgcttgttaaggctggngcacctgttgaccagaccattaagaccctatctgcatacttggaaaaggtgactgcataattgatggtg

SEQ ID NO: 59921 - DNA, 427 bp, Glycine max
  Clone ID: PAT_MRT3847_2511C.1
gcagctcgaattcaaactttttatttacccataatttaggggggcgaaccccctagccaaacccactatctttagtggaaatatgcccccgcttataaaaagtacaacccgatttgctgaatgggtggcctttctctaatcttatttctcatcttcgttaatgtcggcaagaataacaattggggccccaaccaacgcctaatcaagggggggatacactgggaccctgaattggtttttcccaaccaaaatactctgaaccgggggctttttaagcatttgggctaccatgtggttagattcaccagcataaacaacgcaggagcggtccaaccaattacctttgaccttaaagtcacaaacatttttttttggggtattggcccaaaacacatataatttggtcttaaactggttaagggacgaa

SEQ ID NO: 59922 - DNA, 397 bp, Glycine max
  unsure (1)..(397): unsure at all n locations
  Clone ID: PAT_MRT3847_25120C.1
gggtttaaaattccttattttatttatatttttgttggggtggggttgttacttgataaacatgaaaaacattctccctataagggcatctctgccccgggcggtggtgcgggggcttgaaactgctagggggcatgccatggcggtgggcacccagatgcttagaagcagggncataggggctgcttacacctgggggcacttggcggggttcccccagagccaatcgaaccgcctcccgtgctggggttcgcatacttgcaaagaaataagctcggggtggtgttccctatagccaatcccccccccgccggctgaagagataaaagactgcctaaaccccgggggggggcggctaccggggggtgagggcattagggggtccccctctccggtt

SEQ ID NO: 59923 - DNA, 222 bp, Glycine max
  Clone ID: PAT_MRT3847_25121C.1
tcgagtacgtttgggcggacgcatgggcggatgcgtggattgagcatggtaatgtggcgtgtattaagattagaaagtataaatcaaagaggttgctgaaggagcaatctaatagactttttgataaggaattggggagcaaaagtgtaaaaattactgtatcatagtgatttatttagctactttagaacgaaggatggatttgatgtaaaaaattggatg

SEQ ID NO: 59924 - DNA, 2691 bp, Glycine max
  Clone ID: PAT_MRT3847_25122C.1
cacgcgtccgaaaatttaataattatattatattactaaagataaaataaatggtcatgtactcatgtttcgttggtctaaaaaattcgctggttggtctcgttagccatcgtcgactttcaattttctactgcgaacaataataataataataataataatttttcgttattgataatctttctcaccttttattgttatcattattatataatatatatatagcttctaccctcgctcgcatcttttcatccgtgctctgtgattccagaccttaatttttctctcattcgcttcaaatttcaggaaatcaattatggctcaaccctcaacaggaataggccttgctggactggctgttatgggccaaaatctagcactcaatattgctgagaaaggctttcccatttctgtttataaccgaaccacttccaaggttgatgagactgtagaacgagcaaaacaagaaggaaatcttccagtttatggctaccatgaccccgaagcttttgttcattccattcaaaagcctagggtgataataatgcttgttaaggctggggcacctgttgaccagaccattaagaccctatctgcatacatggaaaaaggtgactgtataattgatggtggtaacgaatggtatgagaacactgaaagaagagagaaagaggtggccgaattgggtctgctctaccttgggttgggagtttctggtggtgaggaaggtgctcgtaatggtccctctttgatgcctggtggttcgtttgaggctttcaaatacatagaagatattcttctcaaggtggcagctcaagtacctgacagtggtccttgtgtgacttatattggtaaaggtggttctggtaattttgtgaagatgatccacaatggcattgagtatggtgacatgcagctgattgcagaggcctatgatgtgctgaaatcagttggaaagttgtcaaatgaggaactacaaagtgtcttttcagaatggaacaagggagaacttctgagtttcctgattgaaatcactgcagatatatttggaattaaggatgataagggagatggatatcttgttgacaaggtcctagacaagactggcatgaagggcactggtaagtggactgttcagcaagctgctgaattatcaattgctgctcccactattgaagcatcattggatgcaaggttcctgagtgggttgaaggaggaaagagttgaagctgcaaaggtctttaaatcaggtggcattggtgatattgtgactgatcaacatgtagacaagcagaagttgattgatgatgttaggaaggctctttatgcagccaaaatctgtagttatgcacagggaatgaatttgatccgtgcaaagagtattgaaaagggttgggatttgaagttgggtgaactggcccggatttggaaagggggttgcattattagagcaatattcttagacagaatcaagcaggcatatgaaagaaaccctaatctggcaaaccttcttgtggatccagagtttgcaaaggaaataattgattaccaatctgcctggaggagagttgtttgccttgctatcaattctggtattagcactccaggtatgtctgctagtcttgcttattttgacacttacagaagggaaaggttgccagctaatttggtgcaagctcaacgagactactttggtgctcatacatatgaaagggttgacatagaggggtcttaccatactgagtggttcaagcttgccaaacagtcaaagaaattagattactgtatttcagccaatcaggattttcctaataaatgtaatattttctgctcagactgtatgctgagttgagtttacatagccacaacgtggtgaagttttatttatattatttccaactgaattgcttgatagtttgttttccaactatgttgtatctttgctgatcatgctttgtgcttgatacaaaattgtcccagctcatggtgcctttttaattttcacattttgataagatttccttcagcgtcatggatacatgttatgttacaccaggagttgaaatttttacatttattgttaacttgttgagtttaatgttgatctactgtcaacagtgaataagtttgatattgttggagaatattaagaatatctttcttgagttatttaggttttggtcttgttattggtgggcttgggcttgtactactagtactagtgctcgacctaagtattagtataaagagatcctccgtttatatgcttgtccatatctagaaacacttcctcctagcatgtgtgacatgaagagattgaagtatattgatatttctcaatgtgttaacctcacatgcttccctgaagagattggtagattagtatgcttagagaagattgacatgagggaatgccccatgattaggtatttaccgaagtctgcagtgtcattgcaatctctgcagcttgtaatttgtgatgaggaggtacaagatatgtggagtgatgttgagatgtccaactcaaatgttcttattcaagtagcagaacaacactatgatctagactggcttcaagagtgacccatgtgtgtctacgttcttgggatgttttacttcccaattctttgtacttgtatattcttgttcatagcctcaattctgaaaaggaatttttcttatttccaaaaa

SEQ ID NO: 59925 - DNA, 496 bp, Glycine max
  unsure (1)..(496): unsure at all n locations
  Clone ID: PAT_MRT3847_25123C.1
cccataaacgggacgtctcctctataaaactctatccaaagggaagacagaacaggaaaaaattacagatcaagagtatttccgagccaacatcttttctctttccacaataagcaataatcggaccggcggctcaagtttaatatcgaaaccacttttctgtccgtctcaacaaatttactttagcagttttttaaagaaccgcaaggatcaaattttatggcctctatataggggatggaatagaaatttaaaaataccttaaatagcagaataagtaaaaaaaaaaaaaaaaacgagggctgaacccagggccaggttacaaacacggaaaccttctataccctcctcatcaatcattacccctaaacaggaacgggcttcaaccttaccacagaaaaggggggggagggcagaaaaagccccataccacattggggacaagacttcttgaaccacaagaacattcaggttggcnaaaaaaaaaggcttaatt

SEQ ID NO: 59926 - DNA, 371 bp, Glycine max
  Clone ID: PAT_MRT3847_25124C.1
aaggctacaattggtgactatttaggtcaacatgaagagtttccccttgctgtgatggatgcttatgtagattccatgaaattttctggatttaaatttgatactgcaatcagggagtttcttaaagggttccgacttcctggggaagctcaaaagatagatcgaatcatggaaaagtttgcagagagatactgtgcagacaatcctggcctttttaaaaatgcagatacagcttatgttctagcttatgctgttattatgttaaatactgatgctcataacccaatggtgtggcccaagatgtccaagtcagattttgttcgcatgaatgccagggatgatccggatgaatgtgctcctaaagaactact

SEQ ID NO: 59927 - DNA, 343 bp, Glycine max
  Clone ID: PAT_MRT3847_25125C.1
ggctcgagctgcctgacaccattttcagttcacaggggtaggtttaggtcccttgcctggtctggggtgcaatattccccatacaataacaatacacccactttattaaccaattagtcaatatacctagtagtgagaagatttagtgatcgatcctttcctttcgcaatctaaccgtggatttagattttagggttgctctgttaatataatcttttgacactttcgtaacaaagaacaagattacatacattttcccttatcatgattattatctggcttttatgtatggactaactaggcttgagctgtcacaaagaacagttttggagaagggaaaaga

SEQ ID NO: 59928 - DNA, 271 bp, Glycine max
  unsure (1)..(271): unsure at all n locations
  Clone ID: PAT_MRT3847_25126C.1
gtctcctttntgctantattgcatttccaaccaataaanaattctagnccctntgaatgaatgngctnnnanaaatatanaatgcaatcttaaaagttgcncagcatatnanggcttggctgggatgncacaanctncagcaccatgtgtttgntacatctaatgtatagaagnagcannantgggtgtttnggacttggntctctccttgccaaaggatgcaattacttcnttngtngnttccccagttctggnngaatgttgacnctgt

SEQ ID NO: 59929 - DNA, 861 bp, Glycine max
  Clone ID: PAT_MRT3847_25127C.1
tgtagtatagttagagatatcactactacaccaccctgcatagtttgttcagctataatactacttgagcttctttacctacttttcaaacctacattgcacacaaaatggcaacatcttggtcatgttatctacttgcattgcttctttttatgtcaactattgtatcagagagtagagtggcaaggaaggacttgggcctggaccttggtgggttgggggttggacttggactgggtttgggcctggggataggaggtggcagtggctctggagctggtgccggagcagggtctggtggttctggttctggttctggttctagttccagttctgcctcaagttcagcttcctcatcttccagttctggctctggcggctccggagctggctccgaagccggttcatatgctggctctcgtgccggatcaggatctggaagaagtcaaggaaggggaggtggcggtggcggtggcggaggcggtggtggtggcggtggctcaggctatggtcatggtgagggctatggccatggtgagggttacggtcaaggcggtggtgattaaggaattatgttggaaaatatgtaatatagtttactcaaatgaaagaaaatggtcttcagtgttataatttgtgtaataaaaaagtagtacgtggtctgtactgtgttgtctgtaccaaaataataaacacatgcatgtaagggggtggacaccatgcatcctgtgtgttttgttgaagaatcaagtgaatttcagtttgaaacagtttacaaaatttgatccatgactctaattaattaagtctgcctatttcatgattaaaaaaaaaaaaaaaaaaactcggactagttctcgt

SEQ ID NO: 59930 - DNA, 381 bp, Glycine max
  Clone ID: PAT_MRT3847_25128C.1
ggaattcccggcgggacgccacgcatccgcccacgcgtcctcatggcagcttcttttgcatctgcttcctccaaacttatactattcccccattctacatcttgttcccttatctccacacccttccgttcctccaccaacacccacaaactatcccctctctcctactccttcctccaccccaccaccttcctccgccgcaccccctactccaccactactcccacgttgactgccccggtcacgccgactacgtcaagaacatgatcaccttctcctcccatatggactgcgccatccttgtcttcttctgcgccaactgtcccatgccccaaaccaaataacacattctcttaaccaatcaagtcagtgtccccaaca

SEQ ID NO: 59931 - DNA, 273 bp, Glycine max
  Clone ID: PAT_MRT3847_25129C.1
actggcttaagcatcccataagcctattatttagtgtgaatttgggacttttatttgtatgttgtcttaacttactgagcctgtgacttgtatttagctgtagtcaagcctcaccagccatatctcatctctgagaggaagactggatagtgagtttggttttggttttggttttaaacccttttaccttttcagtctggcagctcctactgctgctttcctaagttactcaaagcactgcttcttggtccttgttttcttttgccttgtact

SEQ ID NO: 59932 - DNA, 281 bp, Glycine max
  unsure (1)..(281): unsure at all n locations
  Clone ID: PAT_MRT3847_2512C.1
cggaggggttcatagntttagggaatcgattactatnactagtaataaattgtacaaaaaataanaatatanatnanatnaatataaanagaccaaacacaaattttntgtgattagtcgcggtnttnccnctaaaanatgaaagtagaccnctaaaaaaggcaaggagatgtttgnntaaanntaattcccctttcaagttcttcttttctgagcggacagggacnatatgaatgttnnattnngctcctatcaccacttacnnagcatctnatgntcnc

SEQ ID NO: 59933 - DNA, 540 bp, Glycine max
  unsure (1)..(540): unsure at all n locations
  Clone ID: PAT_MRT3847_25130C.1
cgtttctctccttggtcttggtcgcgatctgtgtcatctcggggtctttttctacttgtttttggacttgatatatttaattttttagaatgccttcattttggcttatgttcttttggatatctttgatgaacttctcattcaaatgctgctccattaattaagtattgttttactcccattggtttcaaacatcgacttgatgaattaccctctcctcattgataagaactttgggagaagctcaccacaaaagctagacatagctatagaattgactgtggccttataaaccccttactagaattagatcctcacatctaaccatgctcggcaacctcgtcacccatgtgggttaggtgtgctcttgccctttgactagttgcgggaaaacatggctggtgtcaccagctgtgccacttgtttgcagctgagaaacatggtgaaaagctttgatactaatggataataaccttgggagaagaggacaacaccaaagctaactattgtactangagaatcccaacactagaatcccgt

SEQ ID NO: 59934 - DNA, 1027 bp, Glycine max
  unsure (1)..(1027): unsure at all n locations
  Clone ID: PAT_MRT3847_25131C.1
gcccgctcgaggccnnggccgggccgggnaatcaatacaaacatagcagagaattagtccatagcaatggcagagcaagacaaggtgatcctacacgggatgtgggccagcccttatgccaagagggtggaattggcccttaattttaagggcataccctatgagtatgttgaagaagacttgagaaataagagtgatttgcttctaaagtacaaccctgttcacaagaaggttcctgtacttgttcataatggaaaggccattgctgaatccatggtgatccttgagtatattgatgaaacatggaaagatggtcctaaactgcttccaagtgattcttacaaacgagcccaagctcgattctggtgtcatttcatccaggatcagttaatggagagcacttttctagtagtcaaaactgatggagaagcacaacaaaaggccattgaccacgtgtatgagaaactgaaagtgctagaagatggaatgaagacctatctgggagaaggcaatgctattatctctggtgttgaaaacaactttggaatccttgacattgtgttttgtgctttatatggtgcctacaaggctcatgaagaagttattggcctcaagttcatagtgccagaaaagtttcctgtgttgttttcttggttgatggctattgctgaggttgaagctgtgaaaattgcaactcctccacatgaaaaaacagtgggaattcttcagttgttcaggctgtctgcactgaaatcttcttctgccacagaatgatatatacttcaacactttaatagactgtccatcgtttgcttcttctgcgagtctttagtgtatgtatctttcaataacaggatgagtaacacctgagtatgtaaagcgtgatgatatagagatatacctctatatatcaaatactcttctataaacacttctttctttccttatcatgtgatatcgtttatcatatttatacttatctctcttcctttttgtttttctcactgttaaatagcattcattgtgt

SEQ ID NO: 59935 - DNA, 216 bp, Glycine max
  Clone ID: PAT_MRT3847_25132C.1
aaaacatctaaattaaaagatgcaagcatggagggaatccaatagtcagtgaccagagactagaggcatggtgcttgatctgtactgccaatggctgctatagtactgaatctacgtgtaccctagcaggtactgaaatgcttgctatgtgagcttcaacatgtttgaagatattgctacaggcaacacaagctggttcttttatgtcatcccatg

SEQ ID NO: 59936 - DNA, 494 bp, Glycine max
  Clone ID: PAT_MRT3847_25133C.1
tttttgatcttgagagtgaaagtgcgcccctgcactccacaaccctgcaatcgtaacgagacctccttgcaaaggtttattaggaagtgttcacagtcttttatatctttgaatctcacaccccaatttacatcagccccaacagacttactttcctgaaagcctccaactaaccggttatcaattcctctgctataaatccacagcatttctcctgttttcataccatagtccttctgcaatgaagccttggaaatcatgcgcaactgtccacacgtgtgaacattctgtttcttcaacttctcctgtaagacataccctattccaggaagtgcattaattgggagttgacataaatgatcttcaactttttctgtagttatgtgatattgaccattcggttttgcagttctagtagcaatacgagccataagcatatttccagctataccagcactagctgtacatccagtggtcttatagatctcttctct

SEQ ID NO: 59937 - DNA, 274 bp, Glycine max
  Clone ID: PAT_MRT3847_25134C.1
tacgtcaccattgaatatgatgcatgtacaattccacatgattgtggtccactgtttggggacgaaaatggaaatctcaaacgtactgttggtttccatgttgctttattctccacacgactgttatttgctgcactgattccatatttagatccaactgtgcgtgctaaatgaactgatgctgactctgtctcagatctctggtgaatttcaagttcaagctggggagatcacatcgtagagctgccactctcctatcatgtttcactgccta

SEQ ID NO: 59938 - DNA, 1314 bp, Glycine max
  Clone ID: PAT_MRT3847_25135C.1
cctctatgatctccaagataggcttggactcaaccaaccaagcaaggttgttgattggttgctcaatgcagcaaaacatgaaattgatgaattgccaccacttccaattcctccaggtaacttcacccttggttatccctctcttgtttcttgtaatgaagttagcacctctcgtgaaggttcaggccaaaacactttattatggaaaccaaagccaggagaaataatggttagtgatcatgataaggcaaattggatgaatagaagagaaggagatgatgatgatgataataatcataataatagtaatggtgataaacaaggaagcaataataattgtcatggtggtgcacttgttttgccaaataatctcttgccaacaagaccaaaccatccttcttttttgggtttgatgaacactatgccatcacttggttaccaatgggaacctaattcttcagctgctgatgttaatgttcaatggcaaaaccatggattttttaaccaaacagatgtacacagcatcgatgtggttccatttccgtcaacactggctctatcaactgggaatagtactagtactactactacttctcagattttggtgtgtcctcctcctccgggagcaacaacacagccatattttccttcttcacattttgcaacaatggagatgaatgcaaggcaaatcaaccactatcagatgctgagttcaagttctcatcaaaatctcttggcaaattctctcaatcatccatcatcacagcaactcatgagccaatccgggaaagcaccattcagcttgcgaattaggcctaaacttttccattctcctaatagcagtgaaagccattcccaaaaagatcaggatttcccttccaagtgatgcacaaatagagcaaaataaagttgtcaaaattcttcttctcctcacaaattatgcatggattgatatcttgagggctgtgtgggaattagttgcaagacatattattcaacgttttggggtttgaataaacattccgtttttgtcaaagttatgtttggttttatgattttccattcagtttgatctatatggatatgccatgcaaaggtctacaaaagaatggttttcttttcaagggtaagagctttttcctgaagtgatgatgtgattgctacactaaagagaacgcatgctcagataagttcacactctcttctatgcattgagaaaggttggaaggtggaataataatattatcattttgatagtgcgttttggatttgtttttgttttggttaagtaaacatcttatgtgtttgaatgag

SEQ ID NO: 59939 - DNA, 1203 bp, Glycine max
  Clone ID: PAT_MRT3847_25136C.1
aagccgggaataaaactttaatgattaattatcatgatgctgctattcagaataagcatcgttgctcaatatcgtatcatatatacatgacactcagttgggaatgagaggttttctgattacagggctaaagaatgttcatcaacaagttacacagggaaaaaggcagatgcacactgctaagcatgataatgacttctgtttgctttttgattcatcctattcattattcgggaagcatcattaagtctatctgctctctcataaatgctagcaacaacaagatgcaactctttcttgttgatattaggattggaatccagcttctcaaacaatgactctaccatcacgaaatcttttcttgcaccatatagactcagcatctggaaatgaacttcatctggaaaaacacacccttcttcatgcatctgtctatataaagcatctgctttatcaaattcacgcaactttccaaaagcattcaacacaagagcaataacatcagaatcaggaaaatatcccaccactctcatcttctcaaacacttcaactacattgccatactttttgttcttagagaaaagattaatcatgcaaccaaacacagatatatctttgacctctcgagcatcaaaagcctgccggaaaacccaggtagcctcttcaattctaccagctctggcaagaattgcaattgcagtgtccctgggaatgttgtccggtcgcttgagctcatgaagtagacgctttgcatgagcaactaaacccgccctctcgtaggctacaatcattgtctggtaaagaacctcatcaattcgaactcctgaactccttaatttctgaaacaagatggcagcgcggtccagtttccctgccttctcccatatagatattatggtggaataggtgatggcattgggttcaataccccttttcttcatttcttgaatgagattggtagccttctcgtgctcgagagtcttgccataaatattaatcatagtgttgtaggtgacgacattctgttgtacatccttactttgcatcaaacggaacagatggatggcttccccaaataggtcagcctctccataaaccctcaagagcgtattatagctaacgacgttgggttgaatccccattttcctcatactccagaagaggcggtcggcttccttgggcatgtgaagctggccataaacc

SEQ ID NO: 59940 - DNA, 169 bp, Glycine max
  unsure (1)..(169): unsure at all n locations
  Clone ID: PAT_MRT3847_25137C.1
aagtangaatgggacttagatctctnanncaganaaatactgcataatggactaagacttttgaanncggtggatgagntacttaanaganacccaattaaaaccaatgcantgnangctatgaggaaggganctnaaggnanaaatgncaggnctaaaggcatcnaga

SEQ ID NO: 59941 - DNA, 303 bp, Glycine max
  Clone ID: PAT_MRT3847_25138C.1
tttttgaacaatacagcttgctaaggcttggggggtatgcgaatcgcataattggaatctgggtgttcactgggccaaaccccaaaaataggggggagtgaagatgttatatcccaatgaaaagaaaaatgtgaagagatcatataaacggattttacaagttgagagcagttattgcttctgacttaaaatgaactcccagacccgatacacgtttaaactatggtggagttgatcttcaggccatagggaccgagctttcaccccagaaatccgtagtctgagaaaccttttctaaattta

SEQ ID NO: 59942 - DNA, 393 bp, Glycine max
  Clone ID: PAT_MRT3847_25139C.1
tccacgcgtccgaagacaacacaacggaagggtacggctgcgacaagaccacagaatggatatcataaaatcattcttgatcatcatcaaccttgcagcgctccatttagactaatacaggtacactttcgtatttagttttcatcatgattatgagtatcgacacacagcgagatcttattcatctttacgcaggagtatctctctacatagacaatgaacatgtgactagaattgatgattgtctgtgagaatcaaagcaagatgactgatggaatgcctacatctattcttttctattatatactgcagcaggttgttgtacagtattattaagaagattaacatctataactctatgtatatgatgcaaatctcaccatcaaggtaact

SEQ ID NO: 59943 - DNA, 871 bp, Glycine max
  unsure (1)..(871): unsure at all n locations
  Clone ID: PAT_MRT3847_2513C.1
ggtgtctacgtgtattcagcacacacgcgtcctcctctctcccccatggtttggaatcgaatgccgtagaaaacaaaaacaaaccctttcttgtagcatttctaagctatcacagctccagctcctggttccactttcgctcttcacaaaatgaaccgagtgataaagaagaccgtttcaaatatctgtgctctcaaggttccaagaaagtctttttgtagtactgagggtgtgaaagttgctggttgctctattccagaggtttccaatgaccatgagaagaagcaggctattagcaaagttattccacaatatgatattgctattgttggaggaggcatggttggcatggctttatcttgtttcttggcaagtaatccaatgacaaagcagttgagtgttgcaattattgatagcaatccagctcttggaagtagcttgcacatcaagaaggaagatccccctgatccaagagtcagtacagtaactcctgcttctatttcttttctccaagatgctggtgcatggaaatatgttgagcaaaatagacatgcttattttaatacaatgcaggtctgggattatactggtttggggtatgctagatatcatgcaagagatgtaaataaagactttctagggtgcgtggcagagaataaagtgctccataatgccttattgtcatgtgtaaaggattctgatttcaagacaacaatctagcggtgggngttaagttcaatgaggttgagagcaaagtctaagtcgagggctgaggagaggcggagagcgagagaaccatcagctgctcaagggcatggtgcgagaggggagcttaggggtggcagtagcatatatgcagagttggtggttg

SEQ ID NO: 59944 - DNA, 249 bp, Glycine max
  Clone ID: PAT_MRT3847_25140C.1
cgcaaacttattaataccttaatgtacttgggagcagccacgattacataaataagcatcaggatgtgttcttatctattgagaagaaggctacatgcaaagactcgaacgctataaagatcttggtgtatgttacatctccgtctgctgactatgatctgctactattgtgcaaacactccatttggtctagacaaaacttccaagggtctcatctatgcatcgcttggatgagattcttgctggatc

SEQ ID NO: 59945 - DNA, 485 bp, Glycine max
  Clone ID: PAT_MRT3847_25141C.1
ctgctgtgggttgccttggcgcctctgcattaagcgatctcgtcaatgagatttttcttcaagatgcttgtttgctccttccaaccctctgcttgagcttcgatgttcctggccaaaccacttcattatttactaattgtgaaggtggatgcaatacaggcttgcggaggccagaaaactgctgatggtagacgattccggtctggcgcgggaattgtgtggtgcttctgatgagtcagggaaccaaaggtcttcaaagagataatgaaaaaagcaaaggagtttgagaaacaattcaggcagcctactgtgatgcaacgacccgcgtcaaagaaagaggattcttctcaaggagtacccttttcattttctggcagggatctgggcaatgtttcggacagcgatattcttgcatcccagatgcaaaatcaacatcagccggcaacttctgaagaaaagcctatgtctgttcatgataggttaag

SEQ ID NO: 59946 - DNA, 237 bp, Glycine max
  unsure (1)..(237): unsure at all n locations
  Clone ID: PAT_MRT3847_25142C.1
cgcaaccgcaagaattgtgtcttaaccaacgcttacactaaataataatttttgtgatacaaaccttaaaacattgtaatgttatnataagttacaagcaaatgtcaataactctctcacagctatcatgaactctcaactctgctttctccacaatgttaatattattatgatagcgattgatgccataaattgtcatttcaagttttgttttttcaaactacaacccccaccact

SEQ ID NO: 59947 - DNA, 193 bp, Glycine max
  Clone ID: PAT_MRT3847_25143C.1
ttaatgcgtgcttttcttgaggcagataacaagaggtgtcactcctttgatgttaatttgtcctttggagaatggaggttcatactcaccctgtgtcatgatcttcaaatatcttaatgaaaaataaaacttatactaaaaaaaaaaaaaaaaaaaaaaaaaaaaaaaaaaaaaaaaaaaaaaaaaaaaaaaa

SEQ ID NO: 59948 - DNA, 269 bp, Glycine max
  Clone ID: PAT_MRT3847_25144C.1
cggtccgaccaacccttccggaagctctggggttgggttttcccctaacttttttcccgcaccggggtaaagtcgggggaagcggtttgtttaagaggccggtcttaaaatattaagggggggggggctggactccttgggcaccccaagcctgttccttgcccaaagctttcttgccttctgggccacccaatttatttgtatgggggccgttgaggtttcccgttttgctggtgggccctttgggaaggtgatttgtcccaattttt

SEQ ID NO: 59949 - DNA, 183 bp, Glycine max
  unsure (1)..(183): unsure at all n locations
  Clone ID: PAT_MRT3847_25145C.1
ctgttatgacaagaatttcaaaaagaattatcttctctctaatgtcagggctggaggctaaggaaacctaatctctggcatangagagaagagataactgttatgacagagattaggtttccttagtttgaagccctgacataagagcgaagataaatcacttttgttttctggacaatacag

SEQ ID NO: 59950 - DNA, 373 bp, Glycine max
  Clone ID: PAT_MRT3847_25146C.1
agaaaaccattggttctaagctcagtatcgcggattacaggattaggagcataaaagatatctaacactggaatagctgcgttaagataggatatgaagcgtatacaaggcctggctgggtaagattctttagaagcacttctatgagaagaagaaaacggaaatgagcttcttgatatgctaagactagcacttcattaggtaagctctatcatataatcattggcagtaggtttggtaactgaaacttcatatatagagttgacgcctaaggctattttgctgcccttatatattggcttttgctgctggacgtaaaagagcggggcttattaaatgttaggctctttcggacagtggtctcaggttgtgt

SEQ ID NO: 59951 - DNA, 265 bp, Glycine max
  Clone ID: PAT_MRT3847_25147C.1
aataaatcatgaagaatatgacccccatttaggaaggcacagacaaaaaattttaacgacaaataattgtaggaacaaagcttctttgaagaaaatggtaacaagaaaacatgaaatcggaggctagctgtttgcgatattagacaccttagtacagaacacgacccaaatttgggaatgccggggaaggccccacaagaaaatttattagcctcattaaaaaaacaggactaaggggcctaaagataagagctattaaaacctc

SEQ ID NO: 59952 - DNA, 188 bp, Glycine max
  unsure (1)..(188): unsure at all n locations
  Clone ID: PAT_MRT3847_25148C.1
cagtttagggtgtaanaaaaaaatanccatataccaatccctttctttanttnnccncaaatattacacnccccacattnncccaatcaataaaaaatttccccccccataacacaaaattcaataatnnntattccctattnataatccaaccctctaagaagggggataaataaataacctccact

SEQ ID NO: 59953 - DNA, 461 bp, Glycine max
  Clone ID: PAT_MRT3847_25149C.1
gtctttctgtaatcactgctgatgttagttagcatttgtatggggttctatgctgcagttgatgtatttggatatttttttttatttgggatcaagcaaggttttaaattacgattgccgtcacagtttcatcgtgttacttggtattgccgaaaattgtagataagtgcagctggaattgtggtcacgatgcagtcgtcaagagccacggttttgccgcaatccttgatattgcggaaaatggcaattgtagataaatgcagccacaattgcagtcgcaacaaagagcccaaacaatttaacgttgaggctgaaagcatggtcccagaccgctttttaaaaccttgggggtgaagagatttcttatgtcatgtatgcatgggatctgtgtgattcaatccaaagcatgtattgggagcaaaaatgggtgctttgaaagtacattatttgaaccaatgatg

SEQ ID NO: 59954 - DNA, 684 bp, Glycine max
  Clone ID: PAT_MRT3847_2514C.1
gcgtgatttcgaatgagtgggtcagagtccgggtccgatttgcagcgcagcaaaaacccccctatcctcacctcacggggttggccctctcttccaaaccaaaccctttttctcttcaaatcctcaaaaccttaattgggtttgggaattgggaaccaaactcaacgttacaactcaatccacttggaaggaatttttgtatataaatattagacattgagattgaattagggttttgatgttcttcgagtgccgatttttgatgacttatgaatggagattttctctgtcttgtcggaaccgtttctcgttgccctcgccgtgaccgcgctctgtttcctcttcgcgctattcgctctcctccgatcctccttctcccttccccggagattcacgcttccgaggaagcatcactgcgcttgcacctccaattccgacgccgccgccgttccctacctcaacggcggccgcactgaaatgctcgagcccagtcccgttccggcgccggcggttttgacggagcggcgaatggggtcgtcgatgatggaggaactggttccggagattacgacgcacgcgctcagttacttggattatccgagtctctgtcgcctatccatgacaaattcgttgatgcgaaaggctgcgaatgatgataatgcttggaaggccctttatcacaag

SEQ ID NO: 59955 - DNA, 1211 bp, Glycine max
  Clone ID: PAT_MRT3847_25150C.1
gaacctgcaacttgccccaaatccaatcgcgttggtgttcatcgtgtccccgtgcgcgaccgtgatcggcgccttggtttccgcgatcggttttcgcttcttctaccgctcctaaccgcacgccatatcctcgctaaacggcaccgtttcctctccccgcgaccctgtcgactcctccgaacgcaaaggatgcatatcgtgggatgactatgttatggcaattgcatttttgtcagctgacaggtccaaagaccacgttggggcttgtttggtgagtcaagatggtgtaattcttggaattggttataatgggtttccaagaggttgttctgatgacaagctatcctttcgacccctccaagcgcaaaggatacttatcgtgggatgactattttatggcaattgcgtttttgtcagctgagaggtccaaagaccctaataggcaggttggggcttgtttggtgagtcaagatggtgtaattcttggaattggttataatggatttccaagaggttgttctgatgacaagctaccctgggcaaagaaatccaggactgggaatcctttggagacaaagtacccttatgtttgtcatgcagaagtaaatgctattctcaacactaatcatgcctctgctgctggacaacggctatatgtgaccatgtttccgtgcaatgaatgtgctaagatcataatccagtcaggagtttctgaagtgatttattttgtggagaagagactagaaaattcagatactgcatatattgcctctcacaagctactttcattggctggtgtaaaggtcaggaaacatcaaccactgatgaatgaaattcatctgaagtttgaggagcactagattttgaagcttggcttaaattttcactttgtaaggaaattcttcacatttaagttatgctcataatatattacaaagtgaaaagaagacagatagaaggttttgaccaagtcaatagtaccccccccactgctaagtgcctagtagaacatgatcatgttcagcattagtaaaagaagttctataggtgtaggtgcagttgttatttatgccttgtgtgtagcaccctataaatacacttcatggacgagccaaggtagattttccgtatgtttaattgtttatgtaaccttgtgcgagtgagtccactccttacggacactcttgttggaaatgttaaacgttgagatt

SEQ ID NO: 59956 - DNA, 319 bp, Glycine max
  unsure (1)..(319): unsure at all n locations
  Clone ID: PAT_MRT3847_25151C.1
tttnnggatgcgtagtnattnggaattcggntcgataccaaaagnancaacanaacacnttctcaganncatatnccatcttctgcgncnccntcttctgaaaaccagggagggngagngagagatagngagagnancgtgnctancatagcgatggcantggncaagaaggagnnggagaanaantcttctntgtagggtcactagtnnatacgcanctgaagtaaagctcttctngcaactctctttccntctttntggtgttgccagtctnctgcanttccttcccttnncgnntcancatntnctcntccgattn

SEQ ID NO: 59957 - DNA, 902 bp, Glycine max
  Clone ID: PAT_MRT3847_25152C.1
aagctcggaattcggctcggcttctcagctgtcactatactctacgagtctcttgctcacgcctcacaatgaaaccctaaatccttttgtgtcagtttccttcctaatcgctgctcagccatcaccgtcgcgactcgcgaggagacacgttccatcttctggcaccccctcttccgattccggcgttccctcttctagttctggagtttactcgacgtccttcatcaaagtttccggggtctgttcgagacatggatgagaaagccaagaaaaaggggagaaaagatgaagtaatgaatattaatgttgctgatgataaagaagtgcagttcttggatgacaaccaagaaagcaagatgaagaaaagaaaaaaagatgattcttcattaaatggaatccaagaattggttttttcaaaaccaagcaagaaaatgatgaaggataataggttaaaaagcaacaaaggtaaagatgatgaccaaggcaagctgatgatgaagaagaaattgagtgcagaaaaccaacatgtggatcacaatgaatttaaaagtaatgaagataaagatgatggccaatacaagaaggaggaggaggaggagaagaagaagaagaagaaaaagaagaagaagaagaaactgagtgaagaaagtaaaagtaaagagtataatgagtttgaaagcaatgatggtggagatgatggcaaaggtaagaaaaagtgcgtttctgtttatgcgttcagactccatagcttacttttctgctttcatggtttttttagtttcacgaaagaacatagcagatttatttttgcttttatttcatgctctggtgtttcttctcttattaatttttaatttatgatttactgctttccttttaattggtgcccgtgacatactctg

SEQ ID NO: 59958 - DNA, 1303 bp, Glycine max
  unsure (1)..(1303): unsure at all n locations
  Clone ID: PAT_MRT3847_25153C.1
ccacgcgtccgaataaaccaaattctgtcgcaaaatttcccgcttccaactcttgcatttattttatttttcatctgagacattgtagttgacaatttgaaccccgaacctgcaacttgccccaaatccaatcgcgttggtgttcatagtttctccatgaacaactgtgattggcgccttggtttccgcaatcggttttcgcttcttctaccgttcctaaccgcacgccaaatcctcgctaaacggcaccgtttcctctccccgcgaccctgtcgactcctccaaacgcaaaggatacatatcgtgggatgactattttatggcaattgcatttttgtcagctgagaggtccaaagaccaggttggggcttgtttggtgagtcaagatggtgtaattcttggaattggttataatgggtttccaagaggttgttctgatgacaagctaccctgggcacagaaatccaggactgggaatcctttgaagacaaagtacccgtaagtgttgtgtcttttgtccattcacttttgttgattgaaaccttaatcataggtttgttttaaagagagattctgttttgcattgaatcttctgtgtgccttaataatgtccttgctcaagttattgtattttttcattagatgcaatcttgttgacggttttttttttttggtggtctacttttgttatgtttgtcatgcagaagtgaatgcatttacaacactaatcatgcctntggtgcactaccaagtatatattgtgggcatctttatcttgctattctttcttgcagtcaggagtttctgaagtaatttattttgtgagaaaagactaaaaaaattcagatattgcatatgttgcctctcacaagctactgtcattggctggtgtaaagttcaggaaccatcaaccaatgatgaatgaaattcatctgaagtttgaggagcactagattttgaagcttggcttaaattttcactttgtaatatgatacaatacctcccctacaaacttatttcaggagaaagaaccatgaaaagaagccagagttagaaggttttgaccaagtcaacagtaaccacccccctactaagtagaacatgagcatgttcagcattagtaaaagacagttttataggtgtaggtgcagttgttatttatcccttgtgtgtaggatactataaatacccttcatggacgagccaaggtagattttccgtatgtttaattgtttatgtaaccttgtgcgagtgagtccactccttacggacactcttgttggaaatgttaaacgttgagatt

SEQ ID NO: 59959 - DNA, 228 bp, Glycine max
  Clone ID: PAT_MRT3847_25154C.1
gacactacgggacactggggcagacttaagttggtcggtcaagagaattacaaccattgcgctgaaaaggaaggcccttgtttcctacgttgcaaaaatttgggtaccacggaaaggcaatgcgtcccaaaggttccttctccaaatcaaaacgggtcaaggtccccgtaccccggcggtgaaatgcccaagttggaggcttgcggtggcagcacacacaaccgttgg

SEQ ID NO: 59960 - DNA, 709 bp, Glycine max
  Clone ID: PAT_MRT3847_25155C.1
cgcttctctcactctagagtgcggtcacttctctcactctaaaagtctaaatcaccttgttttcaactgtctctctttccttttctagtcgagtacttttctttcacttttcacttagctgataggtttcaacttgcaccatcttttcattagcattctgtatcagtcctcatcccactgtatgcattgctagctctcatattaccccaactccttgattttctttttgtttgagtcgtagaagatgttacttagaagctcctcggcaccgattctaacttcattgttacactattcaaaggagtcctcctccgaaccagaacacattcttaaccttcctaaaacagcatcagctttaagtctaagccaaaacttggtggagatagaccttaaaaagtcatcaagtcccaagagaaaaaatcgtgtgccacttagtagtgttcctaaaaatcaacagagtaaaaagataaaagaaagagatgaagggaaagatccacaacaaaaaacttgcatgaaagcaaaatcttcaattcaagaactgttttctagtttggatttagataagggactcctggatcatgaagagcgtggttcggggaagaaagatagttggttacagacttcagtgatgggtggtggaatggggagtgatggtggttggattttggtggtgggttgcaatggaagtggaagaggctcaggtggtgga

SEQ ID NO: 59961 - DNA, 390 bp, Glycine max
  Clone ID: PAT_MRT3847_25156C.1
acccaaaaaacggctcctacaaaatttaatggtacttatcaaacaaaggaaactagcttctacatgggttttccaccatataaaacatacgcaagtctataattcttataaaagattaccgaagaaatggaacaccctcttttcaactatatcctattttctgccgttgacgaggaccctgggaaccaggatttcccgcattactgccatacatgttgcgaccctgtccaaccagagcttatccatatttttcatatccttgggcagctttcccatcttatccaccaccagaaccagcgcctgcattaccattacactggtttggatctgccttagcctagccgttttaaggactgctaccccatgaaagacacacattttgttcaccca

SEQ ID NO: 59962 - DNA, 375 bp, Glycine max
  Clone ID: PAT_MRT3847_25157C.1
atctaaaaaaaaatgtgaattcaattttagcaactgatttaagaactttgttgctggataatttgtaagtatctttataagcattcttgaaccttaaaatttgtcttggtctagtgagtccttggacccaactcacgcaattaaaaaaacctattatgaactattactatagagcttttcgcttaagtttgtgaattgtgactatttttgagtattgaccaatgaccataactcattcttggtggatttctgaggccacttgtttagcccagaaccgaagatgtttctttatgttggaagatgaacaacatttgggaaatttcaaatttagtagcggtgaattgggtctctttataagccatgccttctataaat

SEQ ID NO: 59963 - DNA, 332 bp, Glycine max
  Clone ID: PAT_MRT3847_25158C.1
gattgctcttttctccttcgctcttccctttcccattcccattcctattcctcctttccctctcctctccgctcctccaattccccccaaactttctccctccgccgcttcgccgccgcctcgctcgcttgccctcgaccggcgccgccgcccctcgacgccataggccagaaaatcggaaagtcgaggcgccgccccgggtgcccttcaagggccgggttaaggcgaagtgtaagtctttcggcccaagggatattgggacaatgaatctctcaacgtccagttgggggagcaagatgattatgaggtggtgagaaaggtgggtacgggga

SEQ ID NO: 59964 - DNA, 656 bp, Glycine max
  Clone ID: PAT_MRT3847_25159C.1
gattcaatcaatttatattaaattaaatttaggaactttaaatttgaaaattacaaatgaaattgggagaaatgcacaaattacagatgttatcatacacctggagtgcaatttaagggtactctaacgccattcatggcatataaaaaaaaaaaatcccaacacctgtactgtagagtctaacaaactgcgcgtgtaaagttataaagaaaaacaaaatatcaagactcctaccccaacacgttttaaacttgttgaattacaataaccatttaaatatcatcatgagaatgttttcctttctatagcaatgcaccttttgtgtcctgtgtgcagcatgtattgcctgagattccaaaactccaaaagcagtaaaattttcctacactcatgataagccaggtgcttcacacgatatcgtgcatttgttgcatctgaacaggtcacaatagtttcgaggcgaggtacattaatctgtatcataacaagacaatccctaaagaaaaaaatgttgcacgtgttaagtgctgctctccatgcttttttcttgatcacaatttggatgaaccactagatagtgcataatcaactaattctcttctcaaaattttcccagccggagattttgggatagatttgataaaagaaactcgtcg

SEQ ID NO: 59965 - DNA, 383 bp, Glycine max
  Clone ID: PAT_MRT3847_2515C.1
ccgacgcgtgcgtgctgacgcatgctaaaaccctaacgtgccctgtttcatcagtgcgcattgtgcatatcacaaaagctctgattctgaggggaagcatgcggtagtaggaggcgaatactaccagactgtatccagatgacaagctactcaagggagagtgaaaacatgggctgatcagaaccactacatcatgaagagtgtcaaaagcccagtgagagaacgagacattcttactctacataccaccgcaagggaatcaagatcgggactctcaacgggactgaccacaaaaaactgatatggtgaaactggtgcaattagtaacactggcacagcataccctgttgtatacactgagcaaatgagggttgtggacatgg

SEQ ID NO: 59966 - DNA, 489 bp, Glycine max
  Clone ID: PAT_MRT3847_25160C.1
gatcattcattcattcattttacagcaccaaccagactcagacgaaagcatttctgacgacgacgttttccccaacaatgcgccttcattacaccccaccaacaagcaagaattgccacttctggtgcggctggacattctaagaggaatcagtaatcagaatttgaatgggaaaggcaacacctcttcatttgagaaaccgcttgaggatgaggttagaatgcctgatttcaacgagggagaggtgggtgccaattcgactgacgaagaaaacaattctgcagatggggtactcataaaagttcacattgaatatttttcttctgatctttcagccatctattcagtaataagcatcaatttggtcattgaagtgaaattggcaccactgatattggttggtcccctgatttggtgtgtgttggactgttaagcaccaaattgattgaaaattttcagtgataggactgaagttagttttttatatta

SEQ ID NO: 59967 - DNA, 684 bp, Glycine max
  unsure (1)..(684): unsure at all n locations
  Clone ID: PAT_MRT3847_25161C.1
gtaaaactccacctaagatgcttgtaattttaaacccacgatcaggtcggggtcgttcaagtaaagttttccatggcattgtggaacccatattcaagcttgctgggtttagattggaggtagtcaaaacaacatctgctggtcatgcgagaaatcttgcatcaagtgtagacatcagctcttgccctgatggaattatctgtgttggtggtgatgggataatcaatgaggtcagcacactattttaatgattcagtggcttattctatgtattggtttgttgatgaaaatactaacttctttgtgtgttttacttgttttacctccaaaaaggtctttcatatgttgtctgtgactggatcataagctatctaggactgattgaaatatgttggttacctttcttgttaattccagtggctcaaggcttctttcattatcacattaaatgtgatgatgtagttattaattgttttgataggaactggattagatttacacagaacactgaaactgatatatgcatctcctcttctgaactggtattagatcagtgggatggggtcaagtatgtgtatactagtatgaaaactaacatagatggaaagaanactcantgatagtccatgagttcagcatctttggttgtctctccaatcgcaccactgactctttcttttcccc

SEQ ID NO: 59968 - DNA, 336 bp, Glycine max
  Clone ID: PAT_MRT3847_25162C.1
cggacgcgtgggcggacgcgtgggcggacgcgtgggcggacgcgtgggatttcataccttttctcccgttgatgtttgtagtacctttaggacgtggtactcaaaagagtattatatatttgctgtaatcagattattacatgttttgggtggaaaattgacggcaatttttggttggttaaaaaaaaaaaataaaagaataaaaaaaaacaaaaaaaaatataaaaaaaaaaattgggtggccatattaaaaaaaactattcttttggccgcgtactttcgggaccaaatttttcaaaaacttgctgcgaaaaccaacttacttctttgttggat

SEQ ID NO: 59969 - DNA, 252 bp, Glycine max
  Clone ID: PAT_MRT3847_25163C.1
cccccccgccgcctagtttccgtacgatcgattgcttatgaatgacgcgcatttgcctgactctacgatgagacaccacgagctgtgggaaagaatttgacgctccaatggtgcctgactggcaagactcatgcttgcatgacaactgtttcagagccaccttgaaagacatgtcaaagattagagagctaaacgagccagcacgcatggcgcccacaccaaaggggtgtctgatgagaacgctaacactct

SEQ ID NO: 59970 - DNA, 881 bp, Glycine max
  Clone ID: PAT_MRT3847_25164C.1
tgatgtaatgctgcgccgttattcgaaagcacgatcagctgctgctggtggtggttctctgaacggagacatttctagtaattctaaaccacgttcctaatatggaattatatgagaagcgtgttcaagaattatcaaaacatattgaagaatctaaaaaaaatgctgatcaattgcttgaagaattacgtgtgaagcaaaaacaagaagagaaaatgcaagaagaattggatgacttgaaagaatccttaaaagctgataagcaaaatctggatgcagttacaagtgaccgtaatagacttttatcattatgcaatgaaaaagataaggaactacaggctgctattctagacaaaaggaatatggaatctaggatgtccaagttaaataatgcggtgatagagaacactgccaaaaaggatcttgctaatgctggaaatagacaagtgactcaaaagcttgaagatgagctaaaagtttgcaaatatgagctgctatcagccaatgaaactatcaaaagcttgaaaagtgaaaaattggttttggaacagaagttatctgcacttcaaacgaggaatgctggagagattagttcccttcaatggaaacttgagcaagaacgcaaagttgtgaagtctgaagcatatgagcttgaaagaaagatagaaggttgtaggcaagaattattgattgctaaggctaccatttcaatgaaggactctgaattggatgcattgcagaataatttgaaggacttggggctcttgtggctgaagtgagagcaattgaaagaatgaacaaacagctgccatactgaaaatgcaaggggttgtgaagccaattttataataaataaaatcaaatatatgctttgtataaaa

SEQ ID NO: 59971 - DNA, 243 bp, Glycine max
  Clone ID: PAT_MRT3847_25165C.1
ccttgcccaaacaaatacaaattttgctccaccatttaaataattccaaacattttgcccttttttgaatttaacaatctgctggaacccaggaaacagggttttttacataaccatcgggggttgggtgataatgaataccatgtttttttaaatttgtttttacagggcacccgaatccaataaagttcccaccaaaaatctcatttcccttttgtcgttttcttgaacccccctaaccct

SEQ ID NO: 59972 - DNA, 249 bp, Glycine max
  Clone ID: PAT_MRT3847_25166C.1
gtaaaatagacacgaatcaaagcgacaagggtctgaaacgaatgggatctggggagcacagcccctctgacacttacaataccccgcggcgtatttaaaaatggtgcaaaggcttactccctcccaataggtggctattgcactaaaaggctaccggtatggctaattcacctcaccagggtcaccaaccgcacatgcctatgcggggcctaggccccataaccgtggtcagccaaccgatcgcactat

SEQ ID NO: 59973 - DNA, 1467 bp, Glycine max
  Clone ID: PAT_MRT3847_25167C.1
ggctcgagattttattaaccgcttctacaaataagctatccgtgacacatgatgaagcagaggactatgcttctttgatcatgaaatttctagacaagaaaaacaaaggctacattgagatatctcaaatggggtctctattcaaggcaacaaatctatcaaattcaaaggcacattctccaatgaaacaagtatcatcagtaggtagcagcacacacaatgttcttcataacactagcggtgacttttgtgaagaacaacaagaaccaatgtcaaggactgaagttttgttcagaacttattggagacgtgcttggattgttctggtttggttgcttgcatgcttgggattgtttgtgtggaaatttgttcaataccgccatagatcagggtttgaagtcatgggttattgtcttcctactgctaaaggtgcagctgagaccttaaaactcaacatggctcttgttcttcttcctgtttgtagaaacacaatcacgtggctccgcaaacaccgtccgatcaactctgttgttccattcaatgacaacattaacttccacaagcttattgcaggaggaatagtggtgggtgtgatcctgcacggtggaacgcaccttgcgtgcgatttcccaagaatcagtgagtcggccggatcaatattccggcaaactattgccgcaggattcgggtaccaccggccaacgtacacgcaaattttggcgacgacggaggtggccagtgggataggcatggtggtgttaatgggcattgcatttgcactggcagccaagtggccacggcgtcggtcaccggtgctgccggtgtccctccgtcgtgtcactggttacaacacattttggtactctcaccatttgtttgtccttgtctatgccctgctcattattcactccatgttcttgttcctaaccgacaagttgatggagaaaacgacatggatgtacattgcttttccagttttattatacgctggggagaggatctttcgagccctcagatctggatcgctcgaagtttttttcatgtaggcaagtctatatccaggaaaagtattgtacctcaaaatgcaaaaaccagaaggttttaagttccatagtggcatgtatatattcattcagtgcccccaaatttcgccctttgaatggcatccattttccttgacttcagggccacaagaagactacctcagtgttcacattagaacactcggagactggagctaccaaatatatgatctattccaagaggcagtgttatcacgatcacaagggtgtccaaaactgtacatagatggcccttatggttctgctgctcaagaccatgtaaagtatgacattctagtactaattggtcttggcatcggagccacacctttcattagcatccttaaagatgtagttaaaggtgtccagacaacgcaaaatgatcatgtaagttttttaattgggg

SEQ ID NO: 59974 - DNA, 249 bp, Glycine max
  Clone ID: PAT_MRT3847_25168C.1
atgctcaccccaaagttgtttatactattctttgcttgtctcctaataattgctcccaatttatctcccaacccaaatggtgtggaagctactcaggttctaaccatccataaagggtacacaaagcgtcaagtttattccactctggggctcgtgtgcaaatgctgtgatggtaaaggtggcgaatgtacaagcacatgggaggatgatgcttgctccaacctcgtgtgcaaaccatggaagtattag

SEQ ID NO: 59975 - DNA, 247 bp, Glycine max
  Clone ID: PAT_MRT3847_25169C.1
aatgtaataccttgtacccacgtgaacttaggtatcagtatttgcatacacttacttttttctatataaatattagaggactaaggtgtgtctttttaatgtttcaaatcaggtcactccttctgaacagcgtgtattttactcaccatatcttggtgtgcaccccgtgcaagcacatataaaaactcctgactaacaagcctaaactattaataatattttcctctgaatgatcaaacgatactga

SEQ ID NO: 59976 - DNA, 232 bp, Glycine max
  Clone ID: PAT_MRT3847_2516C.1
aagaaatgtctaacagacaaaaaaaaagaagtaaaaagccagcttatcatagggagaagggagctgctgtaccatcaggtacttctttagtgtcatcacgtggacatcttgctgtccaacttcacatgggacttttgggcatacatccaatctctgaagcttaaatttcagaactgtattttagatttgagttttgtcactccaacgaagaggcatctagacttggggcttc

SEQ ID NO: 59977 - DNA, 660 bp, Glycine max
  unsure (1)..(660): unsure at all n locations
  Clone ID: PAT_MRT3847_25170C.1
ccacgcgtccgggaatttctagacataatacttataaaattgttaaatcctcgtatcgtgattgaaaaattggagaaaaaaaatggacttgtgaggagcatagatatctgtcagcgaatctgtcatataggtgagtccgaaattacaaaagtcaaaaccaatccacggaaagcaaaacagtggtgaagggaattgctagaaagaaacaaagttgaattcatgggacacccaccgccacgggcgtgtttgttggcctccaatgtcactagaaattatcaacaatggtaattataatctttgaaagcttagaagaagaaaaaagtagaaagaggagatgaagcttatgattaaaatgcagactaggattttagactagtatccaaccaccaaaactataaagtaagttccatcttctaaaacagaatgatgttattttttgagttttgcttaagaggttggattctttggtggacttcactacagtttggttttttgcttcattttgcaacattgcatgggtgcctctgacacatgttcagggaagatagaaacaccaagattgagatcacacacagcanaagataactaaactttttgtgccaattgntcaactttatcgtgatanatattttggaatataagcntaaacatacttatgtc

SEQ ID NO: 59978 - DNA, 428 bp, Glycine max
  Clone ID: PAT_MRT3847_25171C.1
cggggaaaaaaaaaatgaattttggggaaactttttagcccaaaaccgttttttaagctaaaaatcaatttaccacggggaaaacttggttccctttagcctttcccctgccatcgggggcgggggccctttaaatgggggggttccccctccttaaacctatccgcccctggggggttttttggccctaaaaaaccgggggctgaaattttggcccccctttgctttttttttgaaaaacccgccccaacaggcccatggtggggcggataggcttcaaattcttttaaaccccaggcccccttaaaacattgggcattttgcccgggaaaaccaaaaagaaaaaggccccctgcctgccccccgtttaatcaaccccggcttacaggggggcctttccttttaccttgggcattttctttggggaa

SEQ ID NO: 59979 - DNA, 350 bp, Glycine max
  Clone ID: PAT_MRT3847_25172C.1
atcagaagcttccgagcaatctctcaatggtattccgccgtaaatccggcccacagatgttatagaatatactaaactccctgaaaaaaaacttttcaggactaggacacacgtgactgaaaaacttcctgatacatcttgcaatacaccatggggccactgcatttatttcacagcttggaggcccggtgtaaacctccatgcttaccaatcgtcctctcaaagtacacttgaaacgggggacagcatttgcgagtctcatttacacacctgtatttaccccaagctattaatgctttacttgaacgcttgcatagctgatacaggcctagagcaccccttggacaaga

SEQ ID NO: 59980 - DNA, 3219 bp, Glycine max
  Clone ID: PAT_MRT3847_25173C.1
aaaaaaagaccattaaaagggttgcttttgggttactaggggtagataataatcttgtcaaaatcacaaaagttaacgatgagggtaaatgctggaattataagaaaaaaatgatagaaaaatcacttgatacatggttacatacctagagaaacactaaaaacaaatctttgcttaccagtccccccaactaaagaaaacatactaattaaactacaaaggcattttgctgggcatgccaagctacaacatcttcataagccaggtttcccccaaaaatatccaaggcactgcccacagtaacattcacacggtccattccagccgtttttatcctctccagatcagacatttcagtcacaccaccagcataagtaacaggaatcggtgaatatttgccaagcaaagccacaagctcttcatcaattcccaacttcttcccttcaacgtcaacaccatgaaccaaaaactcatcagcaaaattggcaagaaattccattacatcaggatcaacaaaaacatcactgaacttctgccatctatcagtgacaattgcatatttaccatccttttttctgcaactgagatccaacacaagcctctcttttccaacaatttgaacaagatcttttagccttccaatatccatttgtccattattgaatacataagatgtgacaatgacatggcttgctcctttctcaatgtaactcaaacaattttcagaatttagtccccctccgacttgcagaccacctaaatattaccagtcctccacattaaattgagcggaggaaaaatctaaaagttttaaagatatcgggtgagtttggtactttggttaagcttttttcttttaaaaaaaaagcacttattttataataaaaaaagcgcttattataaaattttagatgtttgtataaacttatgttaaagagcagaagctgaaaataagctaagcgtgaagcaatcttgcaaagacttatcagactctccattggtgacgggatcggagcctttcaagtcttgaagggtggaccttacaatttgcttcactttccctttgtggatatcgatgcaggggcggaattgaactgcaccgcactggatggaagggagagatcttcgagagagtgaggggagagtgagaaaaggaggcttattggggcgaaagatgaaaacccccaaggaatgaggtgcagccagattgcgcattctcgatgatgatcggagacgactacaacaaagcacaccaccgcaccgtttcgttaaccattgtcgccgtcgacttcgtcctccgccactcctctgctcccatctggtatctgtatgtagcgtgtggtttcaattgttggctggtgggggtaatttgcacaccaaatccttcatggatgtggttcaaggcaaaggcttttcttcatctttttatgattgtccgaatatccagctttagtatttcaaaattttgatccattcttaagctggtctttggagatttgattttttgatgattctgggagttgggatgattgaaggcaaatcacaatttattgttgagtggggcgagcaacactaatattttgttttattttcttttgttgcatcaatgttatcaaatattttatttggggtttgaacctttgaggttagctacttaattttctggtttgctgcatctatgttatcaaatattttatcgacgtttcattaagggatatgcttcgattgcggctcctttaaccaagctattggcgaaggaccaattccagtggacctctacagctcaacaggcgtttgatgctcttaagcacaccctgtgtagtgccccggtactagggttgccggatttttctcaacccttcgttgctgagactgacgcttctggggttggaatgcgggcagtgccctcgcaatgctcttcagtaaggcgttttcccccaaactgctccgatcttccacatatgtgagagaacttgccgcaatcaccgccggcgtcaagaaatggcgtcaatatctgttaggacattcctttgtcatcttaacagatcatcgaagccttaaagagttaatgtcccaagccatccagacgccggagcagcaaatatacttagctcgtctcctcaggtttgattattcaatccaatatcgggcgggaaagtcaaatgcgacggctgatgctctttccaggatacctgaaaattgctctggtcaattattggcgttgatcatgcctcatttggtgtttatggaggatttgaaggctgagcttcattgccaccctgcttatcttgaactccgatagagtatccttgacaatcccgctgctcaccctcagtatagcaccattgtggacttcatttcgcagaaacaccgaatttggttgcctaagggattcagcttcatccctctgctacttgaggaatttcattccacacctactggtgggcatatgggcattactaagactttggcgagggtaactcagaattttatgtggcaaggtatcaaggatgatgtgcgtagtttcatcctttattgcctgcactgtcagcagaccaaatacaatcaccgcaaaagccccgatctactgtgcccattaccagttctggcacgaccgtgggaagacctgtcattaaacttcattggtggcttgccatcctttcgtgggttctctattattctggttgtagtggatcgtttctcgaagggagtccacttgggaatgctccactcaaaccatacggcttccacagtggctcatctctttttggatattgttgttaaaatccatggcatgcctcacagcttagtcttcgatcgggatcctttgttcctaagcaaattctggcaggagcttttcaaacttttcggcaccaagcttcgaatgagctcagcttatcatccgcaatcggatggtcaaacagaggtcttgaatagggtcaatgaacagtatctgcgatccttcgttcatcaacgaccctcttcgtggggcaaattcctcctttgggctgaatggtcatacaattcctccattcacactactacggagatggcgccgtatgaagttacttttgggaaaccgcctccgcccattcctcattatcttttcggcacttcaaatattgacgccgttgatgatttttttacaagttgtgaagcagtctttgcattagcccggaagaagctccttaaggcccaacagactatgaaacactttgc

SEQ ID NO: 59981 - DNA, 271 bp, Glycine max
  Clone ID: PAT_MRT3847_25174C.1
cagggctcttattgctgagtacattgccactttgctcttcctctaccttagtgggctcccggttatagggtacaagcaccatacggatcatgctgatgcgcgtggtggggtaggcattcttggcattgcatgggcctttgatgggatgatcttcatacttgactactgcactgctgggatttcaggaggtcacattcacccaggcgtgacatttgggctgattttggctcacaaggtgtctttgatccgagccatcatgtacatggtgacc

SEQ ID NO: 59982 - DNA, 547 bp, Glycine max
  unsure (1)..(547): unsure at all n locations
  Clone ID: PAT_MRT3847_25175C.1
ctttattaaaggaataaaagaagaagttatactctcccctacacatactctatcccttatagctaccgaagaagaacacanacatattaaatccacaaatttcaacctactcagcaccgaaagccatacaatatttgccctaactatagagaatagtccatataataaaaataatgaaagagaancagtaacactatctcaactaaacctcatcaatctaacgaattctaagagctcaaagactaaaacaactaacataagaaagagacaaagatcttacatcaataaaactcttctaactcttaaaactattatttcaaaattgacgtaaaacagagctactcgcataccttataagaactccaaattaactaaattacttgactcttcactcaggaagcataaacatatatctctcatgtacacagtaacaccttcatctagtgatactaaatacacacataatacattgaatttatccaggctacaaagcgcattaaaatacagacgagccatacacaataatggattaaagagcacttatcaa

SEQ ID NO: 59983 - DNA, 401 bp, Glycine max
  Clone ID: PAT_MRT3847_25176C.1
aattgaataaaatggatgatttattacaacaaccaggcatcaatccattttaattggtcattccgacttattaattataagggctaaactcactggcacactatgaaacaatttgtattacaccaatctaagtaacccaccaactaaactctgtcacaataagtaaatttcattaagtcctctctcaactcaaatttcacaaatgcagctttttattgaagatccagctaaacttaactccatgagggtttattttacgcgctcgctcataagcacgcttttggaacttcctaatcctgggggctaacccacacacaaaatcctgcgccctttttccctcagccgggaaaccttccagtttttccaatctccaccgggagatcaaaaacttaaaaatgtcc

SEQ ID NO: 59984 - DNA, 1827 bp, Glycine max
  Clone ID: PAT_MRT3847_25177C.1
gaacaacaaacatcgaccacgggtgcttgtcgggggttctcaaatccaaaacccggatcgactcgattgccggtgtgccttgtcgtcgtcgtcgtcatggcgacgctgctaagaaaactgtgcgaatcggcgacgatgaagcgatccggctctcactctcaccctcaccctctcccgtcctcggaacaagcacgcccatcctcccctcttggcgccttcgaccctctccctgccgacatcctcatgcaaatcgtccgcctcttaggccccaaacacgctgccagactctgcctcgtttccaagtcttggcggtcactcgtctccgacaacgccctctgggcccacttcctccaaacccaccacccccactccccgctcttcgccgaaaccgccctcagctccggctaccctctcccgaccttgcctgctcagaattcaccacgtgtctcgttccagcatgcttacgcgctgcgtgaacgagtccctccttctgttgtcatcgacgggggttctggctattgcaaattcggttggagcaaaggggcctctccttcggggagatttgctacttttttggaatttggtaacgttgagacgcctatgtatactagactgcgacattttttctccactatctataacaggatgcaggtgaaaccaagttctcaacctgttgttgtttctataccaatatgccactatgacgataccgaatcagccaaagcatcaagacaacaacttaaagaagcaatctatgttgtcttgtttgacatgaatgttcctgctgtatgtgctctcaatcagggtactttagctctgtatgctgcaaatcaaacatctgggatagctgttaatataggctttcaagtcacatctatagttccaattttaaatggtaaagtgatgcgaaaggtgggtgtggaggttgtggggctgggagcactaaaacttactggatttcttagagaacaaatgcaacaaaacaacataagttttgaatctttgtacactgttcgcacactgaaagagaagctatgttatgttgctgttgactatgaagctgagcttttgaaagatactcaagcatcatttgaagctgtagaagggttgtttacactctcaaaagagcggtttcaaacaggagagatcttattccagccacgtcttgctggggtgcgagcaatgggtttgcatcaggccatcgctctttgtgtggatcattgctattctgcagaattggcaggcaacaacgattggtataagactgttgtcttatcagggggaactgcgtgtttacctggtttagcagaaaggttagaaaaggaactccattcattacttcctccttatatgtccaatggaattagagtcatacctcctccatttggtgtggatactgcatggtttggtggaaagattattagcagtttgagcacctttcctggcccgtggtgtacaacgaaaaagcaattccgtcagaagtctaaacttaaccgcatttggtgattactctgatatggattttcttttctgtgttgtaaattatataacagcaacaactgtttcataatttccactgctgggcagcaacactaaagaatcaaatttagttatacttgtgttttagtaacaatacttggatacataacctgttgtgataaaaaaaaagcctttttaagtatcaagtttgtttagaataaaagggtacacagctttcaaaatgtattgtactgtacctgtgaagaaattgttaatacagtttaagattcaatcccaagctgagggcttttatttactagaaataatactgagtttggaattccccac

SEQ ID NO: 59985 - DNA, 470 bp, Glycine max
  Clone ID: PAT_MRT3847_25178C.1
tttgagagtatcaaccttgattcacatttaaatttaacaggtactacgccaactctaactgttaaaaattaaaaaaactcctaactgtcattggatcttcgtataaggattatgaggcaggcagaatttccatcaaagaccacgagtattatagtatattttgataagatatgttgccagacttacaacaaattcttaggtttgagcatgcagacgtcaacaataccttccagtttgggtggttggggttcgttggccaatcggggtgtttaagactaaagcctatagccacatcaggatagatcaaatcgagcaacaacccaggtgatgttatctgagcttcctcgtgcataagcttattttataaggtctctggacgccacttctgcatctgtgatattttgtactaaagacacgggctccttggttgatatgacattccagagggcctcactagccattataataaa

SEQ ID NO: 59986 - DNA, 745 bp, Glycine max
  Clone ID: PAT_MRT3847_25179C.1
attatcatcatttgttcattccgcttctaccgagttgtcaccacccaccggactcagtgaatcaccataatgggaaactgcagctcctccgattcgactcaggttgccacggcgaagcttgtgctgcaagatgggaggctgcaggagttctcgtacccggttaaggtttcgttcctcttgcagaagtatcccgcgtgcttcatatgcaactccgacgaaatggaattcggcgacgtcgtttcggccatcgacgaggaccaagttctgcaacccggtcagctctatttcgcgcttccgttgagccgcttgaggcaccccttgcagccgcacgagatggccgcattggccgtcaaggccagctccgcgctcatgaaaactgccgacaaatgcggctctcgccggaaacagattttgttctctaacgaatatgactctaaccctaagcgcgtgtctcccgcactcgctgctggcggtggaagaggaaggaccaccgctggtgccggtggtaaggggggatttgcagcgttgttgagctccattccggagtaggggcagtttccgaagaaaattatacgccggtgattttgttcgtttgtatataaatagtttttttttctattaaaaagtaatattataaaattttggacattgtagagcttgttttaggaaacaatggaagcgattagattccaatcttggagagttgaaccaaatggatattcatattcatattctatcttggagg

SEQ ID NO: 59987 - DNA, 553 bp, Glycine max
  Clone ID: PAT_MRT3847_2517C.1
taaaccattgtagtaaggccaaacaatggcaattgctttgagatttagtaaaatttgggcataaagatccccgggccgttcccgtacttatgcgatgtttcccgaaaccatttcgaagttgggaggatgccacgtaggcatagctaaactaagcaccgttaaggcgagcttagattgcaaaataaagttcatttagggggaacaaaagcccgtaacttgaaccttgggaatttcaggcgccgtctccagtatactagcaagctgacgcggggttctcatttaattattctagccgccactaaacagccataggccaccagcggcagaccgccgacaacaaaacagacaccaagccttgagggagagaccaacgaaccaggggcacaacgccagttaacttaactatttcagttaggtcctgctagttatccgtagcgcccacgctttccaggggagtttcgggtgggcaaacccaaaaatcccggacatagagctcgacggcccaagacgaagaggtactagccgtgtaacagacttggcattggagaccagc

SEQ ID NO: 59988 - DNA, 133 bp, Glycine max
  Clone ID: PAT_MRT3847_25180C.1
aattgaaccgtaattgtcgtagtggacagcctcaccatgagccacgaacagctcaagaaacctcatggggagcaggaccccatcaaatacagcgacgtttgtaaagtctccgacggactcgattataaaccca

SEQ ID NO: 59989 - DNA, 476 bp, Glycine max
  Clone ID: PAT_MRT3847_25181C.1
tacggctgcgaaagacgacagaagggtaccgctgcgagaagacgacagacaggtatcccactaggaaacttaattccaatatgatggaggttgccaagggggagaatgctaactccactgtcaagatgaatgcgtataaattcaacgtgtattatgagggattccaacacgtgttaaacattgtacacctttccaacctttaggtgacttaacatgcacacattaagcttgtgacattaaacatgcgctatccgagaggcaactcatgattggcatacatttatttactgtttgttgcatgttttcttttaaattattaagacaaattgtctatcattacaacggacgtgatcatttggccgtaacccaagcagttagcgtatgtgtcgagtacggccgtggtgactgtaccacaatcatagtcggttaattttttagtttcggcattttcattcagttgttatttcagcaaacta

SEQ ID NO: 59990 - DNA, 485 bp, Glycine max
  unsure (1)..(485): unsure at all n locations
  Clone ID: PAT_MRT3847_25182C.1
aagagcnatgacgaaaacggcaggcggacggaagcncggaanncggcncgagaaaacccaaaatccttcacacacncccagacacacacaaccagggggggcacagaagcaacaccacaaccaagcacgacgccannaccaccccaaaagcgcgaccacaaagacacaacacagaacccgaagagccacaacggaaacaaacacaaacccgccccgaagacccagcgaacccaaccaaaaccaacccgacaccaacccacgaaagaccaaacccgcaccacccgaaccacaaccagcacccgaaccaaaaacacaagcccgccccccacacacgccggacacgcaacgcgccaggacgcgcgaggacaaccganacgagaaggacgagccgccgaacgcgccggaggcagacgcccagcgcggcggcaaggcgccaacaccagaagacagagcacccgaggaggacgccggaaagagcgagagga

SEQ ID NO: 59991 - DNA, 365 bp, Glycine max
  Clone ID: PAT_MRT3847_25183C.1
cctcacgacccccatgcgcgatgccgcctcgtagctcgtatccggctcgtcgagcttcgcagaagggactccgtcctcttaacccaagaccggatcgctgagatcggagaaccctttctctcttctccttcttcagcagttgaaaataaaaaatcgcacctggtgaggatattcacccactcgtctgcgatcatgggacaggactggtgaaagctggatttgctgggggatgattctccgaggggctgggtttcccaccattggtggtcttccccgtcacaccggagtgatggttggcatgggccaaaaagatgcatatgttggtggatgaagctcactcccagagaggcatattaactcttaaa

SEQ ID NO: 59992 - DNA, 1346 bp, Glycine max
  Clone ID: PAT_MRT3847_25184C.1
tttgggtataaataaggcatttcagtacatattaagtgattgtactttgtcaacaatgatgcatgaatatgggaagatatatatggatacagggttcccaaattaatgtatgtttatatgaacaggcaaatggctgcagaagtaaaactgtttttaatgggaagatttaataatataatacatacaagaaactcagcaatttatgggtattcaatccttttattgatagattactggatcaattaaaagaaacttaaagagacaaagcaacttaagagaatcgccacaagcagttactgaggtaaaggagaaccattacagtagagttctctgaattaatgttcttcatagtacggtggtgttggctgaatatcctgttcatcttcatcctgttcatcttcatcatcctcttcagcatctacccaattactgcggtgatgttgtggcatcgcttctccaggttcttgccccgcatcctgtgccgctggtccatgggcctcttcgggtggttctccgggatctgtgggttttcctccgggaactgatgctactcctgaaatttgcattgtgctaatgactagtatttttaaatgcacttcatcattcaaaattgtttctctgagaatttctctctcttaaaaatcatccattccaatattggcattagctgagaggtcagaccagatacgggtgtgatcagatggaggctcaaatgacacatttgctctacaattctcttgcagcatgtgagatgcatttctttcttcggtatgagggtgtgttccggtggcccccacaggaggttctgaggcagccccttcatgaagctgagatattaacatggttgccagtacaagggtggcatcaaaatttgagtgagatccatcttccaaaccaaatttaggtgccataagaataggtctgcttgccaaacacagaatcataaaagagaattaaggtaaatagcaagtaacaactataaaaattactagcatgaaataaaaaataaaaccagaatgtaggaaaatgtcttttttatttcagtgtgtatagcatgtttctccacggtaaaatccaagacaagggtgtcttcgcaacttttcacatttcctcagttctatttggggtttaatagactattataagtacactcatcaataagcaatatgcataacaccataacctaaaatagaaggtatgcattcatattcataggataattcatgccattgaggataaatagtgtttagatactaaatacttcttactcgccagctttctcaaaatgcaaatggagatcaacttcacagccctcacaaaagaaagaaatagcctcaggcatcaag

SEQ ID NO: 59993 - DNA, 400 bp, Glycine max
  Clone ID: PAT_MRT3847_25185C.1
gacacacaggggaaatgatttgaaggtcggagagagagagagagtgagttggggattctacttcgatctatcatctaaactaagtcaataagatgactcagggaaagatagttgaagctgcagaagctcataaaacacttgaggatttcgatcctccaaagaagcgcaaaaggaacaagtatgcttttgcttgtgctgtgctggcctccatgacttccatcttgcttggctacggagaaactaacatagtcaatgatggaccgaagttcagttgaggggtgcacctgactttgagcgaaatacaagagtatatactagtgcgttcttatttttggcacctcctatttttataatttaatcccgttgccttcaatttattacttagtgtcaatttttatct

SEQ ID NO: 59994 - DNA, 228 bp, Glycine max
  Clone ID: PAT_MRT3847_25186C.1
tcacttagtagtcagatcaagcttagcgtgaagaagattcatgaagaagcccaaaggcgcgtttagtgtgaatctcgcgctaagtgcgtgcttgctaccatactcgctaagcccagatgccgtcgcacttagtgcgtgatcaccgccataccgaaacttagaactctctcttgaatacacccaaagcctgaacatctctaataggggaaaccctccttctataaccat

SEQ ID NO: 59995 - DNA, 390 bp, Glycine max
  Clone ID: PAT_MRT3847_25187C.1
tgctctctcgtccggagctagggcagctctccagggggtaaagtttgcagatcggggttttctcagagaaacggttaggcagatgtctcccagtcttgcggccggctcctgaggacaaggagagtgaatggtcacaccttaatgatgcatggtgttataacatgcaaatgcaggacgcttattttggaaatatggaaaatgtcatactagaatccactttgctcagaacagaggatgctcatcaatggagaaggaccgatttctgtcgtattgaagggctgcaaagagctgatgagcctaccatagtacagtttgaagagcctcattcgctgcaccagacgatgtaagctcctgattaaatgataggaatgtcctactgttgagcattgt

SEQ ID NO: 59996 - DNA, 340 bp, Glycine max
  Clone ID: PAT_MRT3847_25188C.1
tatacattatccaacctgttttactctttcatactactacataactatacgataggttcaattaaattcaagtcactccccatcattttacaacatcattactactaaaaccctcactttacccaacttaatcacctttcatcacatccacctttttccatctatcttaataactaataatccctcaccaatctaccttcccaacaattactcatcctcaattactaataatactcaccctttatcttctcattaatctcatcattaattatttttacacacaacatcacctctactctttccatcaccctatctacctctcctttctcttacttccctt

SEQ ID NO: 59997 - DNA, 454 bp, Glycine max
  Clone ID: PAT_MRT3847_25189C.1
aacgaagcataaaaaaactttcatttccatcatcttaattcggaattcgatctaatggctaaaaggtttaaggggggcgattccccaaagcgtttaattttcttcccaagagaaaaaaaaaaacccggggagagatcgttcttcgacggaagccgtccccggaaacccgtaaaaaattctatcgggggggaaactaagggacgggccccttgggggcccccccacgatttttggggggggccattattgttttgaactcctcaaagttgacccacccctccccgggggggttgacggactttatcatgtggggggattctccgacggaccacttgaggcccaggcggttgacccccagggggacccccccggcggaaatgaggccctttttgtcgcggtcgaaaaaatccaaggcgttggggaacttgccggatcccccctcggggggggcgtc

SEQ ID NO: 59998 - DNA, 390 bp, Glycine max
  Clone ID: PAT_MRT3847_2518C.1
tcgcccactcacaggtcgacgcgcccgagatacattaccaagagcctcggtcgactgcatatgcgaattcttgatcggcttcgtaccgggctgcgcactaccgaatatggcagagtcaaaccctgtctgcgctggtgacaggctctgggagctatccgcgttacgagccttgaacgcttcgctcgacactcggatactagatcgaggtctcaacgtaagatccaaacgaaatctgagagatgctcacaactgtgttcacgacgaaggtcatgcgagggacaaacagagataaggattggagtctcccacgcggaacaggcctttctggcgggtcatgggaaccataatcgatgacgtcactctatgagacatagtggtgcgcattgtctt

SEQ ID NO: 59999 - DNA, 488 bp, Glycine max
  Clone ID: PAT_MRT3847_25190C.1
attcggcacgaggcctctgccgaattttggttgttgctgactctgctttctctggactcgaaaaaaccaaacacgctgttgctcttctcaaagccttaaacgcttttgaagatgttgaacacagcaaaaactccaaaaaaatcagacctggaaacggtaaatcaagaaatagaagatacgtccttagacgaggacccctcgttgtttatgacgaagctggacctcttactctcgctttccgcaacttacctggtgttgaagttcaacatgtttctcgattaaacttactttccctcgctcctggaggtcacttaggacgatttattatctggaccaaaggtgcttttgctagattagattctttattcggaacctacaaaaaagctgcccccgaaaaagttggatacagactccccagaaataaagtcaccaatggtgatcttgcccgtattattaactccgatgaagtccaagctgtcgtcagaccc

SEQ ID NO: 60000 - DNA, 686 bp, Glycine max
  Clone ID: PAT_MRT3847_25191C.1
caattgattcatgtagctgacctcaactaatgagggactactgaaagcttggttgttactgtatatttatttatgatcatataataccataaatagttttagttataagattgatcatgaaaggctacttggttgtggatatcactttttttattcatgtgcagagtttgttgaatgttttttagatgtttattatatttttgttatttcgagtggaagtgtgcctcctatttgcttaatgattctatccatgttgtaatttcgtgttgagtacttgagttattcgcaaaaccttttccatttaacgtttttatttgttattgttcattctgataagctgactatacttactgttatataggcagcattgtgctctgcaagaatcataaagaaagttccagacttggctgaaaattttgtcaatcctgctactgccttactaagggagaagcatcatggagttatgattactgaggttcagctttgtacagagctgtgcaaaattagctcagaagctcttgaacatgttagaaaggcgagctaacgtggcttgctctgattggagagggatctaataatagtacagacaacagcatgtgctgatactctgcgccgaaagcgacctttggaagaatattatgagaatcagggaaataatcgttcagtgcaaagggaaccttgtgttg

SEQ ID NO: 60001 - DNA, 941 bp, Glycine max
  Clone ID: PAT_MRT3847_25192C.1
gaaaaaaccgagtgatagataactaatttctttgtttcattctttcccactttctaccacagagactagtgatcgattaagcaacttaacacagaattgcatatatgggaaacacttgtgcaccaactcaatacgcaagcaaaggcggaaaccatagttggcaatccacggtgaacatagttcacttagatggaaagttgcaacaattgaaggagtcaattaaggcatggaaagtgttgtctgagaacccaaactgctacatatgctgctcagaatccatgtatgttgggtcaccgatgcctcctttggctccaagtgaagagcttcaattgggtctcatatacttccttgttccaattcccaaatcaagaatcccactctctcttcaggacttgggggcactagccatcaaggctaatgcagctcttgctgctgctgcaacacctaataacaactaccctatcttaaaacccagttcacaaaaaaagttccgcacacaccctactttttctaacgtttctatgggatattcccattagatcttcgaagatgggtttgaaggttgaattgtgatatattcttcacctatgcatgttgtaaaagctgcggattctgcttgatgatgatcgatggtgatgaagttaagcgacaggaactatatatccttaattgcagtagttgcagacaattgcagttgcagtttacaagtcctacacaaactttcatgatataaaatgaatgaattatgatagttgaaaggtgacatgagctaaggaatttaataggctaaggaattaaggagacggaggaccagatcaattcctctatactttggaatacataccacatgtacaacttgtataagccaaattcaacaacttggctatgatatcttaaacattttgctataactagataataaacatttgtgccaaataatt

SEQ ID NO: 60002 - DNA, 512 bp, Glycine max
  Clone ID: PAT_MRT3847_25193C.1
ggggtcaaatgatacatacctctgacattatcggccaaggaactggtcctacaccaattgaatatgctgctatgtagatctgatcacaataagattcaaaaaatggaagaatttcaagtttaagtagaatttgagagaagggggatggtttttgtttcagtaaacaattgaacctaaaacttcatgtaaactactcaaatttcctccctaatgggtagggggatgttgtagaacaaaactcaccaacacaccagcaactgcaaatatcggtgcgcactcaagcattaagctttggtcctgatccatcaagtcatagagacgaattttagaataaagacacacacatacacacaatttatggagaaaatattgtacattttatactaaaagacttttttttttttaaagattattttataccaaagacttgccttgagaaagaaagcaatagcggcaataaagcaacctaagaatgtcccagttgcggaaacctgcatgtgtacaagagtttt

SEQ ID NO: 60003 - DNA, 408 bp, Glycine max
  unsure (1)..(408): unsure at all n locations
  Clone ID: PAT_MRT3847_25194C.1
gcaacttcttgctgctactgtcttctgtgatggtggacatactgcatcatactatcgaaggatgtattggagggggaatttancagagcctttacttcgtaaagataatgagttgcatttaggtgatgaaatttcagatgatgcttcactcttatctgcactagagaataataagcactgggagcaagcaaggaactgggccaagcagtttgaggccaatggtgcacccctggagatatgcttcgcatcatgttactgaatcttaggctgaatctatggtagctgaatggaaggagtttctttttgatgtgccaaaaaagaaggttgctttatggaaccactgccacacactattcatcagatatttccttcccttctctttaagcctggggtatttttttttaaaca

SEQ ID NO: 60004 - DNA, 205 bp, Glycine max
  unsure (1)..(205): unsure at all n locations
  Clone ID: PAT_MRT3847_25195C.1
aggcgggggggatgttatgtatctgctagtggtacaaccccaaccttttctgtttaatggtacacaaaaataaacatgaaccggtgatatcacaagattgcatgcgaagggaacaatttttagattgacntgncgtacaacgattgcgttatgacaattaatcatgcacctggctatgctataatacaaactatcatatttatat

SEQ ID NO: 60005 - DNA, 598 bp, Glycine max
  Clone ID: PAT_MRT3847_25196C.1
aaataatccgtgacaacagtggaaagaccagaaaagtgtgggaccatccctaacatcaccttcacagcttcgaccgattgttgaaaaaaaaggctcgagcagcaatagcctctgatttcttctttcactttctttaggttatggttttctcagaagattgaacttaaacaaaaacaacaagaaagaaagaaagaaagaagatgggaattgcagtgggaggtgttgatttgctgagtgaaaaagcggcgatgatgagagagtgtctgcagaagagtgaaaccatcacagacaacgtcgtcaccattctcggttccttcgaccaccgtctctccgccctcgaaaccgccatgcgtccaactcagattagaactcactctattaggaaggctcatgagaatattgataggactttgaaggctgcggaggttatattggctcacttcgatcaatatcgtcaggcagaggcaaaaatacttaaagggccacatgaagacttggaaaactatcttgaagcaattgataagttgagaagcaacattcaggtttttggtagtaagaagggtttaagagtagtgatggcattgtcgtgcatgctaat

SEQ ID NO: 60006 - DNA, 182 bp, Glycine max
  Clone ID: PAT_MRT3847_25197C.1
attgacggcgcaccgacctacattccactctatctgagtaagctcaaagggtacacccgacctacaggctgcaaggcagtagcagagtccataagaactgtccatcataaatttcactacactgttcaggatggcctagatgccatccagatgtgatctatcacttgaaccatatgctgtga

SEQ ID NO: 60007 - DNA, 346 bp, Glycine max
  Clone ID: PAT_MRT3847_25198C.1
tttaatcttactcatgaatctcgttagatctcactaactggtactttatcatgtcgatgagcacagatggccaagtcatcacaagcaatggtggggtttcatgggaggaagcgaagccactcgcgaccgaagagctagagggggtaccaccacaagttgacaaagtgccgacgaagagactctacacctctagtggccacactgatgctgactcttggaaagccgctggccaaactgcatagaggcctggtatattaggtgatgaagctaagagggatgctgagagcgaaggcgaggctgtggatgatcttattccatgcagaccatgccgtgccagtgcttacac

SEQ ID NO: 60008 - DNA, 2075 bp, Glycine max
  Clone ID: PAT_MRT3847_25199C.1
ctgactaagagggatatgtatgacataaaaaagtgctgaattagcatatgtacaatgttaaatctcaggttacaatcaacgccagccttttcattcatactaagaaataattgcagaaactctcaatcaacaaataggctattatacactgcctgcatttcatactagtaaaaggggcaacccaatccaaaggaatttaacaaaagaataatgagaacatagatgccattttcatactatatatagagagagagggcagcctcagaaggtaaaaggaaaacttaagctaaacacagaataaaccaccgtgagatatctctaatcatccaataattaatgaatcagaaagaatattcaactaccttcgcaaataagtcagccataatcatggccaagatttatgctgcctaacttcggacttggagaacacggcggtagcactaagcctctggccaatattcccgatgtcttacaggatggtcgcatcctgacgtaaatcttgctcaacaattcacataaattacctgctggacaacgttgtactatataccagcagaaccagacaaattaaacagaatgcatctcccactcccagtacatcacagtttgccattccattaactggttctcaaggttgttaaagtttcttaggcagatcatatgccttcttcagaaacttagaagctgattcatcatttctatagcacaaaacacgtaacaatgtgtttggttctgatggattccactgtccagaagttggaggtaatgggagtttggacctggcagaggatttatatgtctccatggtcaaccgtttgaactgctcaatgagggtctctgtgtcagttctgaaaaggggaaggatagaccttgcagtagttgaaaatttatctattaattcagaaggcaaaccatccccatttgcccaaaacaactccttgagaaacttgaaatcatcctctatgatctgagagtccttccgggtaaaagaacgtgagggacctccagcaagcaatacaagcaagaatccatcaaaggaagctctcattatttcagtaataattcgtgtgcgaattctttcatgaacagtatctgaaatgaacattaacttccgctcaagttcctgaagaaatggctcaatccttgaagatgctggatccccaacatataaaccatcccataaaacctggcttagatcatggaagacaattctatatgctgcagcctcacagagttgctggattccttcaagacatgcggctggaaatagttcaaacttctttgctaatccatttgaaaaatcttctacatgagcagactcagagttccgtaaaagggtaattattcttttttccagaacatcaaattcacccaggatccattgcaaagtatttatgcgaacacagagttggggtattcccgaggagctatccccatttgttgcaacctgaggatttctcttctgaggatttggagatttatcctttttcttcccaaagccctgaaactttgaaccaatagtgcatctggtcaacgcaggcattgttggaagaaatgtgttccgtgatccgcagccagattttgctttgataacatagtactgaaggcatctgtcaagaccattcattacttcaggaagcaatgcaggatgcattggtattggaagctgaaagaaagcatccaaagtttcatttataattcgcaaaacttcaacagaagatggggcatatccttcctgatttgcttgagcactccaaagctcttgctgcagatttctgtcgacccattccttcagtctgtctattctagtcttaatccatattttcacaaggttggcaattgcaccttcagcctcgtaaggaggcatctcacggataattgcctttccaccatcttcactttccactgaatcctcaactgctatctgcacaaggtctttctccaactgatctgcagctctcaaaacttgaacagcatcaggtgtcaattctgtgattcctgatatgaattgcttcaattcgtttccatagcatgcatgaagggtggccacagcaagacctgctgccaaaggatgc

SEQ ID NO: 60009 - DNA, 418 bp, Glycine max
  Clone ID: PAT_MRT3847_2519C.1
cgtccttttttttttttgttttttcgtttttttctctccctaaaaagcaaaaagggcttagtgtttttatataaaaagcgaaatgctaacaccgccactacaacaaaattttaattctttttttacctcaattccttacccccccaattgctaagttttaataaactgcacctagacaataccattcaaagaagcctcagatgtgttcatactcgttaataataataccctctaaaaaattaacccaagcattggtctaaaaagctacaactacacccacattattcattaataacgaaggggtctccacctacttattaaatatcccttgttaaaaggggctggttttgcggcccacaaagggatgtgcagaaaccttttcccttcttgggggctaggtggcatcccatagaaccat

SEQ ID NO: 60010 - DNA, 464 bp, Glycine max
  unsure (1)..(464): unsure at all n locations
  Clone ID: PAT_MRT3847_251C.1
ctaggagctattacaaatgtacaacccaaggttgcaatgtgcggaagcacgtggagagggcttcaacagatcctaaagctgtcataacaacatatgaaggaaaacacaatcatgatgtgccagcagctaagaataacagccacactatggccagcaatactgcatcacagttaaaatcgcataataccaatcctgagaagcataattttggcagcagaggtatgggaggaaatgaacaacagccggttgcacggcttcggttgaaggaagagcagatcacctagttttctggaagaaacatccagtgaggaagaatttttctcacctcacttgtcatctttattttgatgttatcgtattcttttttagtctaaggcctaagttttgatcagggcctatcagtgcanatcctaataaacaaaatagtcaacactgatgcaagagggcaggggcaaaggttaaac

SEQ ID NO: 60011 - DNA, 328 bp, Glycine max
  Clone ID: PAT_MRT3847_25200C.1
ccgggttggccccacccttccggaaaaataagccaactgttggccaaaagttttgcagcctcggggataagggcttcaatggcaaaatcctgcaaactggacggttcatgtaaccagtcgatatctagccggaaatactcagacctttacggaacaagaccaatgacgtgcaacaagtcgatctcccaccgctccttcacgttcggcggtctcgcgagctggcaaacgctcatcatcctcctactggatggcgaggacgtcatcaatacgggcaagggcatgcaggccatgagcaccaggatccacatggaaggccacacctggatca

SEQ ID NO: 60012 - DNA, 356 bp, Glycine max
  Clone ID: PAT_MRT3847_25201C.1
ttgcttcttcaaagacgagacaaacggagctgggccacattcttcagaagagccccctgcaaaagaagatcaagaaagacccaaatggactgatgccagattgagacatagaatagctcctcaatacaccgaggttcaggctcagacggacacaaattggtccaaattgtctcttgatgacggggaaactcctaaaggttccatgtcggatcttaagaatttgacagtataaaattgcgctttccaaaaacacaggttggaggaaccatgctgcgtagtgatctattgccaaattatctgacagagggcaatctgcgagcaagagtatgattgcagcgcacgcatgcgctgaaagg

SEQ ID NO: 60013 - DNA, 553 bp, Glycine max
  Clone ID: PAT_MRT3847_25203C.1
cgtatatagactagttgattgtgccacacaacaatgctatttgggcaattatttgatttttgaattcaacaaaagcatttatttaactgtgatgaactacaaaatccccctacaaggctgtgagattgcaaaaaaaagccaaagggattctcgtgcacgatctttaagaaatgtttgtgggtgtctactaaacactctggagttctatacgaagaaaattggcatcatcctgcatttacatttactacgaaagtaggggaaagtaaacaattgttttctggccaaaattattatgtaaattggtaaaatatattgaagcgtatcaacggatggataatcaaataggttgttattatttctgagagagattgtgacaactgcctcagaatatcagaatatgttattaccaggatgactgaagatgcagaacagatggaagcagaggatttacagaacaaaatgatgaactatcttcaattaatcatgtcataatttggtggcttaatatttcatatagatgtaatccttgtctttattttgtttcaactcaagt

SEQ ID NO: 60014 - DNA, 204 bp, Glycine max
  Clone ID: PAT_MRT3847_25204C.1
aaaacgggacgcgccctgcagcggtgcaattaagcccggcggcggtagaggtacgctcagcagtgaccgcacacttggcagtgccctacacgcacgatactggcgatagttgcctgcctttctcggcacgttcgtgagatattcccggcaagctgtacatggggggctgcctcaaggggcacgattcatggctgaacggggcct

SEQ ID NO: 60015 - DNA, 460 bp, Glycine max
  Clone ID: PAT_MRT3847_25205C.1
ggccggagcgattgcaagtgatccacgattcactttacgcttcacagaaccttcgaacccaattccacggaaattggactaggggtgaacacatattcctcagggctcagtgcacagagcacaagctttagctttttttttggttttattaaactgctacgggtaagccgagttttctatatgatcttgcaaactggttggtgtcgcatgggtgaagccataagttatcttcctttacgcattatgagactgcatatttgacgaagttttgattacaacctagaatactctttatggagctgagtctacatcgtaaactttacttcactctttagctagaattctgtaattgaagaatgtatttctcttaagcgaaacacttcgcatgtagtagaataagaatttttttgtttcaccatgctaccaaagcctttagactatggcccaagaattgaaaacg

SEQ ID NO: 60016 - DNA, 388 bp, Glycine max
  Clone ID: PAT_MRT3847_25206C.1
gctgtgtacatccccttgttgcacttttgcgcatctacattatgtcgtcacgcacacgttgtacgttggtctcgtcttttgtcacgggaaagctgaaaggtccatatcaccttcttaactacacacatggggcattgtgcccccaaatgcgcaagtaagaagagatgattttccgggctcttgtgtctgtaaatgcattcatatcatccactgcataagcatctcttcatcgcatcgtaatggacatatcatttctgcatttgtcacttatcatattcatgcattgcattttgcatagtcatttcatcaccatgcatatgcatctagcatgtttttgcataccctttattttcatgccaaacaaaaaccaaaaagaagcctgaaaatt

SEQ ID NO: 60017 - DNA, 253 bp, Glycine max
  Clone ID: PAT_MRT3847_25207C.1
cggctcgagcggctcgagcggctcgagaaaagtgttcgtgctggattttacactcttggactgtgtttggcacgcaatttacggtattctggaattgattttcatcgctaacacttgacaatctcaaaattacatcaatttgtgagttgccggatggtgcgcctcaatctcaatttcaaaactttgctagctcatattatattgggaactctttgattttaaagcatcgttcctcaacacgaatttaggattt

SEQ ID NO: 60018 - DNA, 876 bp, Glycine max
  Clone ID: PAT_MRT3847_25208C.1
aaaacaaaaaagcaaacccataaaaatcaataaacactattcacaatcacttctacaagcttgcgaatcaattaacacagaattgttacaaaattcaaatgatacatgatcaaatttatcaaaaaaaataaaaatgacccctgaagctatcttggtgacagtgacaataagttgagccttgtgcagcaaaacttagtgttgagtgaaggatgacttgttgttgttgaattgacttaaccagtttttgacagctttacctttggcaatgaagcagccattgttcttcctatcaaccttcaacggactccccattttgaccatcatcttctgaaccaacactctcaccggcgactctcctctgacactgctatgctttcccaacccacaaaccaccgtaaattccgcaggaactccataattggaatcattcaaccttcttcccatctcctccaaccaaagcaacacgatcaaatacgccgaagccaagtgaaatccatgcaagtccaacttgacctccgaagaatcccacaccatgacctcctccaatatcccacaagaccccaacaacaacaactccctcaccaccatcccctcccctccttccaaaccctccttcaattctgaaatcgacaacaacgccaatttgctcaagtccctcgtcattctggtaatactagggcaactattagagacggaattgtaagtcctgacagaaaacggaacacccgaattgctcatcctccgaagccacctcaccatctccacgtgctccccgtgaatgccgtaagtcgaaagaaccatgttgtaacaaacggactcaacagcaaagccattcctctccatttcatccaccactctattcatacggacgcgtgg

SEQ ID NO: 60019 - DNA, 331 bp, Glycine max
  Clone ID: PAT_MRT3847_25209C.1
atgaagctcaatattgccaacccgtccactgggtcccaaaaattaatcgagatagatgacgacaagaagcttcgcatcttctatgataaacgtatgtcagctgaggtagctggagatgccttgggagacgagttcaagggatacgtcttcaaaatcacaggaggaaatgataaacaaggtttccccttaaagcaaggtgtgcttgttcagggaagagtccgtttgttgcttaaacaaggacaatcttgctaccgtgagcgtcgtcacggtcagaggaagaggaagtctgttcggggttgattgttggacccgatcttgccgttcttaactt

SEQ ID NO: 60020 - DNA, 115 bp, Glycine max
  Clone ID: PAT_MRT3847_2520C.1
agggacacatcaaaatccgccaatatacctgcttttctcactctcacgcactcgtgttcagatacgatacaaacccaggataggacaagaagccatgcttctttcaccatgtttg

SEQ ID NO: 60021 - DNA, 647 bp, Glycine max
  Clone ID: PAT_MRT3847_25210C.1
ccacgcgtccgcgcatcttctctctccagtcgggctcccaacaaaaaaaaaaatcactgctcactcactcactcactcactcactccaacccaccacaacacaacagcagaacccattccttcaccaaaatcttcgtcacattctcactgcaccattcattggatctgactcagaccaaaacaaaacccattctcctctctccttcttcgggttggttgatccaaatgggaatgccccgtaagccatgacccaagaaaccgtggaccacgaccaccaacaagacgacgacaccgagtcttgctttttccacgactccaacgaccgtttactctcctcttcttcctcctgctccacttccacctccgacgacgacactcccactacccaaaacgacaccctcactcaccgaaacgacgcctccatcaatgccctcccacaattcccttttccaactatgtgcaagtacgacgcttggatctccgaaccctcctccctctccgaacgccgctcccgcctcctccgccagttcggcctccccgcgccgccgccttcctccgccgcaatcccccgatcagcctcctctcaccattgcaccgacacttcctcaccggcggctcgattccccgatcgaaatccgacacacctc

SEQ ID NO: 60022 - DNA, 321 bp, Glycine max
  Clone ID: PAT_MRT3847_25211C.1
aaatacaatgccccatgtaattcacggcttttataacagcctgttggttgggggacagaaatacgatctgaaaatcttataggaattgggcccaaaaatttaaatatttcacgtggacaaacacatgatttacacccttcaagattatgtaaagggagtaccatactttaaaaagaaactgattgtgcgcaagcctttctcatgaatgaggacatataaaaatgctcgattagagaaagctacctacctagttttgcggaagctatgccaggatagcacggccctcttttttagtgtttgaatatgcggaacacttccaat

SEQ ID NO: 60023 - DNA, 244 bp, Glycine max
  unsure (1)..(244): unsure at all n locations
  Clone ID: PAT_MRT3847_25212C.1
tataggattatttggaatttcttggttatgtgctcaatggcttcttaagaggaaagtcagatacttgatagtcacatttactttaccccgcactaaacttggatatttataatattattcttactgtagtttatcaaaaaatgttgttctcactatctctttccgttgtactactttttttccagtcttccttggcagggactaaaggctggcacccnnnnaaaatnatattttttttaatttt

SEQ ID NO: 60024 - DNA, 332 bp, Glycine max
  Clone ID: PAT_MRT3847_25213C.1
ggctcgaggacacaaacacgccccataccgtacataccgaggtcaacacttcgcgaggcctttaaacccacttatctattgggctgcgcttaacgcatcaaattatcactagactatatatatggaacgctacttactttactactggaaactttgaccaacctatcaagtgaaacctacccctttttgttctcccaccaacttaagccgtttatgacttgatcatgtctcactttaagggcaagtaccatgatgagcttattgtcaatgctgcttacattgacacttctggagagggcattctatgctgatgatgagtcaacagggacaat

SEQ ID NO: 60025 - DNA, 459 bp, Glycine max
  Clone ID: PAT_MRT3847_25214C.1
attaatccttaattggaacttaatcctacttagaattcatcttttcaagagtgtattaggtgaagataaaaaccattccaaaatttccttagttattgttatgatagctatcgacagctagtatattatttgagtttggttgcaagataaagtgtaacatgagaaactaaaaaggagggaaatctaaacaaaaaaaaaaaaactctactgtagtacctattgagaactcaaatggcgttacccataattaaaggtaattatttttttatgagaagtttaattacttctacaaatagtacaatatgtgacataaacttaatgatgacaggttttattatttttcttacgctaattatggagtatagtaaaaagcttaaaatgattttgagtcatttgaaagttttgaaatgtattccttccctataaagctatgatgtgtatggtatgttgggtagcgaa

SEQ ID NO: 60026 - DNA, 498 bp, Glycine max
  Clone ID: PAT_MRT3847_25215C.1
ccccaaacccagaccggcattagggaaggggaaaaaaaaagggggaccgggccaagctatggggggccccagggcaaaggcaaacaacaaaagggccaacagttcaaggaacaaccccaggtagggggggccccagaaaaaacaaaaatgggggggaccccttcccgggaaaaaaattgggaaggcccattccccgcctagggaacgcaaaaaaccctattggcaacaggggggcccccccaaaaggggggggggcaacaaaaaaaaccaaacatccccgggtccacaggggaaaaaaaaaaacccccccaccaggagaaaaagcccaggcacccaaaaacccaaaccgggccctaaaaaaaaactgggaatggggcaaaaggcccggacttgggctaaaaaaaacccccaaggcctggaagcaccttcaaaacatcggcgggaccataaaagaaaaatggggcctggggagggttcggccccacggggcgggcaaaa

SEQ ID NO: 60027 - DNA, 601 bp, Glycine max
  Clone ID: PAT_MRT3847_25216C.1
gatggcatgttttaggattgggttatgacctaaaaattgacacccgcctcattgaaagtgcagcagttattcccttcaatgggaacatgaagccatggttgaagttagctataggcaggtataagccactatgggacaagtacataaatcaaagtcaccctcatctacaagattgtgccacaagttgaaatgcactacttctcaatatctgatggattatgcaatctcagattattttatactcttgatctgtggttgccttaatgtagagtcagaagtagaaaattttgacttcgctaggaatattttttcgccccttctctttttcttttccccaatttttcttttgaattagtcttgaaagagaacagaatgatttcttatacactacaaagttgatatgcgttaggtgaagagatgtgggagaatccatttttggccggtggggctatcttttccccttctgcaagtggtagaatgattgttctttagtaattcttgtaataatttatcagctctttcaaatagcaatgtaatcgaatgaaaaacatttctttccccgtctccctaaaaaaaaatgttagagaaatcttacagtagt

SEQ ID NO: 60028 - DNA, 175 bp, Glycine max
  Clone ID: PAT_MRT3847_25217C.1
aaaaaattccacttaacctatttttgatccgggccagatggtttgaccaagggtcaaaaacctccaagggaagaaccacttttaaattaagggttaaggtccttaatgacaaaagaaaaacctggaatggcactttataaaaccggtaaaaacctgaagcttacatttaattggg

SEQ ID NO: 60029 - DNA, 265 bp, Glycine max
  Clone ID: PAT_MRT3847_25218C.1
tcgacccatgcgtacgctttgggcgacccataacgttcagccaatcttctaatactttaatcgctttgcaaccatgtcgaggagaatggtcagagagccaaacgaggaaaacgagactcttcgcccagctattagagatggctaacatgtcttaagcgttgatcgcatattagcgtcctataatgatacctcaattcatgtaactgatctgactgggagggaaactctattcacaatcactgccggaaagaacgttaaggcttac

SEQ ID NO: 60030 - DNA, 413 bp, Glycine max
  Clone ID: PAT_MRT3847_25219C.1
ctctatccattcgctgatcaaacaaaactttctctctttatctcaatctccttctcttgcaagcaccctcccacacactgcacaacgttaaccgatcaataacccatctctgtctacctctattcgatccaaatttggcttacaaaaacgtgtaacatttcattcctgtgagattttcctacaccgatgcacactgatatgtcacgaatcctgggtgtctgcgatacatagtcaccctttgcatgtgcttattcattctatctgtgattatcataatgccactcatcggaaacttcactatcgagggatcgtgttcaagcgtaccctgaattccctgagttgctactccagaggacttcgtcttttacctggaacgatacactggatgcgtattcgccacgtatacttgttga

SEQ ID NO: 60031 - DNA, 412 bp, Glycine max
  unsure (1)..(412): unsure at all n locations
  Clone ID: PAT_MRT3847_2521C.1
cccacgnnncgtccgggcccattttncatattccnnccagttttcttttctttcaaacnggtccttctttaacgaagcaggaatccccaatttcttcctttcccaggttttcaaaacccttaatttcccttcatttcccatgggcctcagaagaacccactggcgggggggaacccggttccgaacctggcaccggcgagccttccccggaggaaaagggggaacccaaacctggagcccagggttagaaaatctagggacccaaacctaaaaagggtttcagaacaagccacccttccaattattctttcttccaggggaagaataaagacgccattaccttggtggaggggaaaaccgggttgaggccacacgccaatggcaaggttattgaggggaagcacaagccggt

SEQ ID NO: 60032 - DNA, 794 bp, Glycine max
  unsure (1)..(794): unsure at all n locations
  Clone ID: PAT_MRT3847_25220C.1
ctattccctctctcaatcaacatgaagagtgtcacgtaagttttgatgatgtaaattattatttactttaattggttaaatactctatgttcaccatgtaagaagcttgttgaaaggaattgataacctttttatttgatatatggagaatcaaatcactcaatcaagcatgaggagtatcacttaagttttggtgatgtaaatcaatatctattttgattgatgaagtgatgtgcttgcctggtttattgtgctccatataaaaaacttgtaaaaaaaattgataatctttctatttagtgtatgaggagtcaaacagactagtcaagtcacttaatcagatatgacaaacaccacataagttctgatgatgcaaatcactatctactttgattgacgtaatgatatgtttgcatgatgtcacataaataaaaagctttgtaaaaaagaatttgacaatttttttgttgggtatatggagagtcaaatggaccagtcaaatcacttaatcaaacatgaggagtatcatgtaagttctgatgatacaaattattatctattttgattgtataatgatgagcttgtctggttctttgtactctatgtaagaaatttgtcatttggtgtatgggaaaccatggaggctagtcattggatcaatcggagatggtgaaatgatgataaatgttttcactttcaaaatctaacaagacaagcttatcatcttaattatgacatacgtaccatgcgcccttggntctattattattcatttttttctcctcatatatatt

SEQ ID NO: 60033 - DNA, 335 bp, Glycine max
  Clone ID: PAT_MRT3847_25221C.1
cgcgacatcagagcatcatcgacagcctgtcccgattgtcgcagtactctatttccgctatgtatcatctacgcgaagcgatcctttattgcattaccatatatctgagttttcatgcatccatcgactaagtcatcgggtatggcattcatcaggagttgattttttatcattgcacagacacgttttgtgatttacgtgactaaaggatattaaggtcctgtcttccagaaggaatctgacactgccttgttacacgccaagccagttgagtaagaatatagctagtcctagtaagaacaagggtggtgctgcgatcatgataatatctggtt

SEQ ID NO: 60034 - DNA, 231 bp, Glycine max
  Clone ID: PAT_MRT3847_25222C.1
tttgacagtgtcctcaacagggcatacactgtgggggcatggcaacaggtgatatgcgatcagcgtctgacgatatcgacgcggtggaacatcgtggacctaggcataagaggccatgagtgtagctcgagtatgaacattacacgaaacctatgagtctctataaggaatgaccgtgactgttacaacgactcactaagactgagagagactatgccgactgctactttt

SEQ ID NO: 60035 - DNA, 453 bp, Glycine max
  Clone ID: PAT_MRT3847_25223C.1
gttacgcgttgtaactcgttcttcttctttagttgttcgtagtgtattcgcgtcatgatcgtcatcacacctgtaaaagaggagaagctgtggtaactgtacatgaggcagctgctgcaagtgctggaccgactgcggatgctgcaagatgtacccatacttgacctacactgaagcatccaccacggagtccatagccatgggagcgacacccagtaagacttaatcagagtgggctgaaatgggtgtgcccgctgagaacgatggctgcaaatgtggaccaaactgctcctgcaacccctgcacttgcaagtgaggtgttgggagagcaagcttcaagcagagatagcccttaattaggaataatgataaactattaatgtgtagctaaaaacttatgtattatgtctgggataggtttcaggcactctggtgttttgtgttaaacaaaca

SEQ ID NO: 60036 - DNA, 217 bp, Glycine max
  Clone ID: PAT_MRT3847_25224C.1
aacctaaatcgacgctgaattttattattttcttaccagttctcatttcgaatcatcggggcattttttttatcctttctgaaacggcccttctgccactcaggttgcataacaccacactacttccagtgacttcaacaccacaaacaaacaggtccactctcaaaggggcaccaaggtgcacgatttattcaccaaacagaaactcaccaaagcc

SEQ ID NO: 60037 - DNA, 474 bp, Glycine max
  Clone ID: PAT_MRT3847_25225C.1
tttttccacgcttttttttcttttttttttttctttgtttttaagcgggcaacaaatttgccaattaggtcggcgggggataaaaccatccggaataaaaaccagagcaaaaatgcggggggcccgctttgaaaaaaaaagtgctccgccccgggggaacacccgggaaaaccgggaccggaccctgggggcccccaaccttcccttaaggggagcccaataaaacctggcggaaataagggcaaagggggtccccggtcaaaaaaaatttccccccccaattgccccccaacatacaagccggaaaccaaaggggtgaaagccgggggggctaagggaggggcccagcgcccctaaggggggggggaacccgagccggtttccaggaggaaaaaccggcctccccaatagctaaaacaacttggcaacgcgctgggaaaagggggcacccggatgggcccccgggggggtttt

SEQ ID NO: 60038 - DNA, 248 bp, Glycine max
  Clone ID: PAT_MRT3847_25226C.1
ggttcaaatgccaaatgatgagttggaagatcctatcagtgtcatcaatagcagagacgctgctgctcgctatggtgggattatgattatgaattaccccaagccacaaactcgtcttggtagatcattcaaaccttgatcgttttggtttagactttagatataacatataggtagcttctataatgggtgtgttgtaaaccacctcatataatgcatgtgatcagtaagtatatatatatatatat

SEQ ID NO: 60039 - DNA, 593 bp, Glycine max
  Clone ID: PAT_MRT3847_25227C.1
gagtaaatatttttttccagtttatttaattaatattagaaagtgtaggaagaaatagacacacctgatgagaattgagatgaggctaattaacttgttaatgaggtgagtaactcctttaactatatataaattaaggggtatatatattattagttgctcacctcatgttgttgctcatctcacgaagaaactcattttagattacttttttcctttcattatgtgtatgctggagcggtggactggtagctacatagattctcgctatgatggggcatatgatcatgaggtcttttctcaggtcggttgtgtgttgtaatttgtaacgagatatccgtaacacaataggatcaaattaaccgtgttttgttgtttcagattaactatattacttatgatttcatagttccaatcaaatattttacataatctccactactttatatataaggccggccgttttttaagacccaagttaccttcccttgccttcaaagcaaatacttttctattgtgtcccctaaaatcaatttcattggccgtctttttccaaacctctgcttggaaaaaccttggctttccccaactta

SEQ ID NO: 60040 - DNA, 437 bp, Glycine max
  Clone ID: PAT_MRT3847_25228C.1
caagattcctgtgcatattcaggggaaaaagcctggactaatatgccgggggggattccaattccttcagcgccaaggggcactaaaaggaaaaggactggaagagggacttcatctttctctaaacaattatttggtggatgcacatgtttacaacaaaaaatgtatccatcaaattgaaaatcacttacctttctcaatgccttttgaagataaaacttcaaaagtaccacagcttacttggaaggacagtgacactaatgtttttgttggcaaaatattccttccaaaaacccaacatcaaatgctcattctggaaaagtagttcattgtgaagaaattaatggtgcaagaaactcacaaaaaactgtttaatctgtgtaccaactaggttttaataaaagattcattgaacaaaaagtgtttgttttcttaca

SEQ ID NO: 60041 - DNA, 123 bp, Glycine max
  Clone ID: PAT_MRT3847_25229C.1
gtgtcgagggaagaagcctagagtatcaagaacctttggatttgaggattgggctagagctgctaaggaaggccctaaggttctcatgaacctcagggtagatttctgtgcccatgggccaag

SEQ ID NO: 60042 - DNA, 420 bp, Glycine max
  unsure (1)..(420): unsure at all n locations
  Clone ID: PAT_MRT3847_2522C.1
acgagatcaaatagttccttggtatagtataatctttttattaattaaaggaaattttcattgaagcttgctgagaacttgtttagagatcacacaaggaaattggttgaggaaaatatttcagaggcaaatagaatacttaaatctcgcaccaaagcagtgtaagattcatggtttttctaagtattcttttttttaagtattaaattttgaattctgggcatgtttttcttgccatttgtttcattagtgttactattcatttcttaatttttacaaaaatagaatttgccatatctgatcatctgtaagtttcagtcctggagctacgcaggcnaattgcagaagctggataaggtattggcatttaataatttactcatctcatttaagaatcatccagatgtggatcgctttgct

SEQ ID NO: 60043 - DNA, 258 bp, Glycine max
  Clone ID: PAT_MRT3847_25230C.1
cacccgtgggcccacgccttcggatctttcttttttcatctgttgtgcaattctagccatattcgaccgggttaacccctttctatattgcaccataggatttgtcaagaagagaatatgatgggaaagtcctggatgtttgttcttgttgggtgaccttatatgtaaagtcctttggagcatattcttttgaagacccagaagatccacgatacttcataactacacttcatctaattcttaatggacacatattca

SEQ ID NO: 60044 - DNA, 1314 bp, Glycine max
  Clone ID: PAT_MRT3847_25231C.1
gtagagggaaagctatcaaagcctaaaaataaggtaaagtgaataagaattagttaatattaatttaattgtttaattaattaatttataacatatagtatttgcggtagctgcgccacgtgtcctaccgaaagattttggtgatggctttgaagaagtgtgcgtgatatgcctatagttcagttgagagagagaaagcatgaaagtttgtagttggttttggttttggagttgggtttagaatcttcaatcttgtttgggagagagatgtacatagcttccatgggaaggtctttcaaggactccttgaaactgcttgaagctgatattcaccatgccaataccctggcgtcagattttccaagggaatatgatggtgcgtgccttcagatgagaatgtcatatagtccagcagcacacctgtttctctttttggtgcaatggacagactgcaatcttgccggagcccttggactgttaagaatcctaatatacaaggtgtatgcggatgggacaactaccatgtctacccatgaaagaaaagcaagtattagggaattctatgcaatcatatatccctctttagtgcaactgcaaaaaagtgtggcagatacagaggataaaaaacagaaggctgtatgcatggagaggtatcgcaaaagagatgatgaggagcacagacagccttcagacatagacattgaaagagaagaagaatgtggaatatgcatggagatgaatagtaagattgtgttgcctgactgcaaccatgtcatgtgcctgacatgttaccatgaatggaggacaagatcacagtcatgcccattttgccgtaacagtcttaagagagtaaactcaggtgatctctgggtgttcactgataatagggatgtagtagacatggcaacagcgacaagggagaatcttagaaggcttttcatgtacatagataagttgcctttggtcattccagactttctctttgacacatatgactctcacctaagatgagtgtttgcaacagccagattttactgtctctggtgtgtggtcttggagggttagttcctttcaatttagcaatgtaaactcaaaaatgtaatttgataaatttagtttatataaagttgtattgttgcttcccacgtcttccagaagtatccagccctgtgtttactgtgggttggtggtgaagttgagatggtaaattgtatgtaggtcatttgtatatcctgtacagattgaattacttattaagaagagttttgcttattctgtgcctctaattattgttaaaaatgtgaatctcttgag

SEQ ID NO: 60045 - DNA, 447 bp, Glycine max
  Clone ID: PAT_MRT3847_25232C.1
gaaaaaaacaacttcgtatctttaaagcacaaaagtacagttattatagtgttttcagtagaacaggactcataccacaatctcacaattacatttacatatactcaatgaaataaaaaggagacattacattgcaacataaaaggctctcacatgcagtgaaacattaggagtatttcatttcatgcaagacattttggaagttgctggtctataccgttttgtcttcactctcttactcctgctcctggctagtttcttctccaagtccttcactctgccagtcaaatttgttatcacgcttaactgttcattcccggcttcaagcaacttcttcatcatctcccttaaattctcattctcttccagtaacttcgtgtcaccgttgaactctccatcgcgcatggccgcaggcagctcaggttcttgtaatgcaggtggaggcga

SEQ ID NO: 60046 - DNA, 392 bp, Glycine max
  Clone ID: PAT_MRT3847_25233C.1
cccacgcgtccgatcaaaacaagcatagattttaaggacgatatattgcaggattcggcggtggcaaatacactcccagggcttcaatcaaacaaacactcgcttatcctttactgattgacctagaaagccaacggttgacctgtcaataccatgagaccagaaatgttaacttgttggacacagctacatgagaacatggaatgctggttctcggctacataatgacgaagcaataaatgtttacatgactcatgtgaaacatcttctgtaagcactctctatgcctgcttaataacattatcatgcattgctttcttattctgcgctacaaacacccaactgttggcaactacacaattgcactgcacaaagctctcattatcataaat

SEQ ID NO: 60047 - DNA, 574 bp, Glycine max
  unsure (1)..(574): unsure at all n locations
  Clone ID: PAT_MRT3847_25234C.1
ccgcncttttttttttttttttttttttttttttttttctctcttttttttttttttttttttaaacaaaaaagagggcaaagtctaaccccttattccttaattgaattttaaatgcccctttttccacaaaatttttttgttaacatcaaccccaagcctttgtttttaggggctccccccaggggaaatgcaaccattggaacttggattttgggatgtgagtgttgcttattgaaaaaaaacacagttccattgatttttgccaaaagtttgatagtaaaaattcatggcaaatgccccatgggatgctattgggttaggcttaaaacaaaaacctcctgggtgaattggcccccaatttataccttggctacaggcgtaataaatgttggcctgcaactgggcattaaaaactccagtttttgtttcccaccatccaaaagtgtttggggctggaattacccgagttgttggaaactgctggctaaaattggtttaaccaacatcgtacaacagggggccatcatttttgaacataccaaatgcccgtttaaaacctgggcccggtttt

SEQ ID NO: 60048 - DNA, 240 bp, Glycine max
  Clone ID: PAT_MRT3847_25235C.1
aagcatctatttaacgcttttcttaatcgaaagaaaaatacgggcataaaggccaacatgtgtacataaaaaggactaactataaccatacacgatattaaacaatgacaattagatagcccatcatcgaaggcttatccataagatcacagactaaaggatctttgattatcaccactttcaacaccaaccaactaagtacactctacatctgattgcagctcaactgttatcacttag

SEQ ID NO: 60049 - DNA, 143 bp, Glycine max
  Clone ID: PAT_MRT3847_25236C.1
cggggccgcgtgagcgcccttgtctcctcggatccacacgagacaagcatgctaagacagcgtgccaaccaggttcatcacgaaaagacagcgacctagccggagtccgagcgtcacatcaactacagaacgaatttaactac

SEQ ID NO: 60050 - DNA, 327 bp, Glycine max
  Clone ID: PAT_MRT3847_25237C.1
ggctcgagggcgtgtctcagggggcgctgtctaacttgtttattgaaatttatttttgtggcgagaatcatctgtatgacctcagaaattgtcaagaggaacaagccacatattccaatggcatctggacaattacccttaacaaccggtgggattatatgtgtataaccacacgctacaagtagaggatttactcggattaccggctctcggtcattgattcgttatctatgaaaacatagctggatccaaggacggattatccaatgttacgtgcccctactgagatggaagagatacccatgtgtagaagaaacgctcatgatg

SEQ ID NO: 60051 - DNA, 377 bp, Glycine max
  Clone ID: PAT_MRT3847_25238C.1
cgctcaccttttcttctctctcttctttctctcctctgctgctttctcatggaactactgttctggtgggtctccaacgatgtaaacagccttgtcactcttctgggtcaaaacttccttgtttttctgccttttgttgctgctcattagcttcaccattctatatggttttcactttcatgttaatttttctatttctcatttctgcatcctcttggatttgtctatttgtgtggtgactgtatttcattttttgtgattattttctacccttttgccttgtttgatggatttggtgaagtctatctatttatcacttctgttttactttccgtgttcgtttgtgcatagactgacacatttgatagtcaagacac

SEQ ID NO: 60052 - DNA, 2064 bp, Glycine max
  Clone ID: PAT_MRT3847_25239C.1
caacaacacagtccacgtgcattggaaaggtgctgcagagattatactggctcgaggttctaattacattgactataacggcatagagaagtcccttgatgaagatcggagtaaacttgagaagataattcaaggcatggctgctagtagccttagatgtattgcttttgcttgcatgaaaatttcagaagacattgattataacgataaggagaaagtgcatcaaatccttagaaaagatggcttgaccttgctaggtattgttggcctaaaggatccatgccgaccagacgtcaagaaggctgtggaaacttgtaaacttgcaggtgttagcatcaagatgatcactggagacaacattttcactgcaaaggccatagcaacagaatgcggaattttagaccttgatggccatgtgaatgcaggagaagtggttcaaggtgtggaattcaggaactacacagaggaagagagaatggagaaagtcgagaagatccgcgtgatggcaagatcgtcccctttggacaaacttttgatggtgcaatgcttgaaaaagaaaggtcatgttgttgcagtcacaggagatggcacaaatgatgcacctgctctaaaagaagctgatattggactctctatggggatccaaggaactgaagttgccaaggagagttctgacattgtgatcttagatgacaacttcaattctgttgccactgtcttaaggtgggggagatgtgtctataacaacatccagaaattcatccagtttcaactaaccgtgaatgttgcagcactagtgatcaattttattgcagcagtttcttcgggagacgttcccctaacaacagttcaactattatgggtaaatctcattatggatactctaggagcattggcactagctacagaaaggcctacaaaggagttaatggagaaaaggccagtgggtagaactgagcctcttattactagtattatgtggagaaaccttttagctcaagctttatatcagattgctgttctcttggttttacaattcaaaggaaagtcaatcttcaatgtaaatgggaaggtaaaggatactctaatttttaatacttttgttctctgccaagttttcaacgagttcaactctagaagtatggagaaacttaatgtgttccaaggcattcacaaaaaccacttatttcttggaattgtggggattactttggttcttcaagtattgatggtggaactcctaaggaagtttgctgatacggagagattgacatgggagcaatggggaatttgtattgtaattgcagctgtgtcgtggccaattgcttggattacaaagctcgtacctgtttcagatagaacgttcttcagccaccacgttaagtgggtaaaattatgggtcttcaagattaagcatttgttttaattttacctcctcacacgtttaaggaatcataaattccaagcctcttgaaacacttgaatatgatatattcgtgtatacgatgtatggaaatccaagatcctttatggtttaaaaacataagagatcttgaatttccatatgtcttacacctaaatatcatatattcaagtgtttaagatactaggaatttatggaatcttagtgaacacctcctttatctagggtaggaattatgggtagaggtagtagttgaaaaattcttgtattgtgaaagtagtataatatcgttaacaacccatctctaaaatgggtaattgggatggtgggaattaggatatatgtgataaatttatgtttatactactttttgatgtaccaaaaaaatatatataaaatggtcaagtttaatgttaagtataaaataggggttttacattattaactaatcacaaattatcattagtatgacttttaagataatgattgtaaaagtcaaaagcatactatacaagatagattgtgagtgactggttgatagtgcaaaatcattttatacttgagttcatgacctattttcacatatatttgggctatgagaccttcaaattgatattagcagagttgcatgcattcttcac

SEQ ID NO: 60053 - DNA, 376 bp, Glycine max
  Clone ID: PAT_MRT3847_2523C.1
atatattccaatattccgcacgcgtcatttttgtttaatactacattgtaagccaccgacaggagaaaaacctggcctaaaagctaaatttgacaaaagagaggtgaggcagcttcctcaaaaaggagagttaacaagcagcccatgcacgtatttgctgaaaatcctccggataaatggcgaagcccgcctccccatcatttactaaatcagcgatcggataattgctacttgtagcagaaccgaggactgtatacatcgttaacaatggccttataataaaaaggacgggaaaaacacctatagttacgggtgaggcaagaggcacatgactctggactactgccatgcggccgctagtagcatagaggacgag

SEQ ID NO: 60054 - DNA, 241 bp, Glycine max
  Clone ID: PAT_MRT3847_25240C.1
caagggatacaccggagcctgcaatacctaccctaaggaagccgaaacgatatgcaagaacggatacatcgctatcaaaagacgcgcctgcatgggtgaggaaggaaccactttcaaaactggaaagcacggacatcgccagagccactgtgttggaagtgataagtgcactgtcaagacactagaggatattgagccctcttctcacaactgcgatggacctcatgagagttgtactgat

SEQ ID NO: 60055 - DNA, 539 bp, Glycine max
  unsure (1)..(539): unsure at all n locations
  Clone ID: PAT_MRT3847_25241C.1
antccnnnnnaacccaacnnnaatgtaaatactactcatgnnnaactggattaaaaacctgaaactaattcaaactagaaaaacatcataagcatagtaacgctaatttaatttggaggagggaagaaaatggcatcagcattcctctttgaacggaagagttgctcaagtcctgcatctacattgaaagcagcccgcagaacagcgggcgaaagagccttccacgtcccaatacttccagccaggtgagtaaatacaggattgggggtagtgatgatagagaaccactccaatccatcagagtcagcaatctttgagacaacaaaaaaccttggcacaatgaacaaattaccggccttcactgttgtctccaaaaccctgcgaccatcggcaccaacaacctgagcacgaccactccctctcacaatataagtaacctgaaaagcagaatcacaagagaatccaggggaacacatggcctttccatcaagcctcacaaggtctgctcctagaccaacctcaccaaccaaagctggtgc

SEQ ID NO: 60056 - DNA, 438 bp, Glycine max
  unsure (1)..(438): unsure at all n locations
  Clone ID: PAT_MRT3847_25242C.1
gaatncccgggccgaccgacgcgtacggccagatgacaacagacggcgacgggtgatttttctagctatgggcgaattcaagcactgcggcattgttaagttcgcggagggcttctccttcaacgacctcacaaaatgaatctcaaagttggtcactaacattatctctttctaatcctttgaatgaggacaatacattgatagcctacatatcttcagacactgtttgactcatgcattcttgatcacattcaacacaaaagaacactattttgcatttcagagccaccccaatcatatccagttctcgacatacttttcggcaactattgagaatattgcgctactggatacaccatctactctcgtgacagccccatcctgatcctacacatattcatgcaatacagattacccttttaaatttaaataatgcat

SEQ ID NO: 60057 - DNA, 611 bp, Glycine max
  Clone ID: PAT_MRT3847_25243C.1
ggctcgagtgctaatttatggacacataataataataatattccattgggtttcaagaagattaataatgatgaacagttacatgacaggaatcatactcatcagggtctatcattgtcgctctcatcaaattcacaacaacaacaatccaagccttgttttgatgaagggtctgttgtgaaatcaccctcctcgaccatgaagctgaatgcgctttcaaacaacaacaacaacactgtttatcgaaatgttggccctctcggtcctttcactggttacgccacgattttgaagagttcaaggttcttgaggccgtgccaacagctgttagatgaatggtgctgtcaatctggttcaaaatttgcaaagagagggatttgtgatgttccagagtgggtctctcgagatgtcagttctgcttctacttgtgctactgctcttaatgttgatgaaagtgctgcaaaaggtggtggcaattcgggtgcttcatcctctgtgttgtattgttcaatcgaaaacaacaacaacaacaataataataataataataataataataataataatagcgctgatggcggagccgcgagtagcttttgtctttcttctcg

SEQ ID NO: 60058 - DNA, 326 bp, Glycine max
  Clone ID: PAT_MRT3847_25244C.1
gacaaatgaattccctattggaacgaggatggaagaaattattggcggaattggttattttcaacagcgccccagatcttgtttgccaaacaaaaccatataacctaagcttctttgctatgggaggccagaaccggacaatgccgcagcacaaaatcaacctcctcgaaaaaaatggtcagcttttcttctggaactgcattcaagaatctttggtaactcttcaataaaaatactatggcgtgcgaccagcctaacctttattataacccactttgcccaccaaaaaaacatatgcttgagagccctgaatccctttggttttg

SEQ ID NO: 60059 - DNA, 148 bp, Glycine max
  Clone ID: PAT_MRT3847_25245C.1
aggggtatccataaaagtgttggttgatgatggtcatatgctagtggttgatcttgaccaaccatccatttggaaatttctttggaggactgggactatatcaatctatgttttggtacatcaaaacagaacagaccattctgtaagg

SEQ ID NO: 60060 - DNA, 468 bp, Glycine max
  Clone ID: PAT_MRT3847_25246C.1
tattatcattctcatatctctatttttctttattaatatttactttataatctctcttctctttctttttaatttcaaatcattcattttaaaaaacaaacaaacaaacaaataaataaataaataaataaataataatggctactaatattgctatcggtattgatcttggtacaacttattcttgcgttggagtgtggcaaaatgatcgtgttgaaatcattgctaacgatcaaggaaatagaaccactccttcctatgttgctttcactgacactgaacgtttgattggagatgctgccaaaaaccaagttgctatgaatccaacaaacacagtttttgatgctaaacggttaattggacgaaaattctctgaaccagcagtacaaagtgatatgaaacactggcctttcaaagtgattgctaaagaaggagacaaaccttacattgttgtggactacaaaaatg

SEQ ID NO: 60061 - DNA, 375 bp, Glycine max
  Clone ID: PAT_MRT3847_25247C.1
cccacccgtccgcccacccgtccggggaattttcttgttggctggccagaaaacattaaacggtggcccaagccttgcgggggagaaaggcttttttcgcaggctgttttccatggggccaaaccacaccagggggtttaaactggccccaggggttggacccaacctttggaaaagagggaccatttgggtttttggctctaactaggaaggttgtcccatgattttttagaaatctggaccagtgttgggtttgcaatccatggtgtgaaccttaaaggcctgaaaggtcccttaactcttggcggacggagaattttgcttttggtttttgcatcggttttcgggttgtccggatattataaattcattttt

SEQ ID NO: 60062 - DNA, 2041 bp, Glycine max
  Clone ID: PAT_MRT3847_25248C.1
cggaaaaacccctcgacccgatttcgcgtccgctcctgtctttccaagaataagcaccgctcaaacacataccatttttgaaaccccttcttctcagctttctcttctgcttccattctgcatccacctctttccctcttcctctgtattcctctgtctctcttaaaggccctcaccaaatctaaagaaggattttctcaccttcctcgctattaatccttcttttagtatttaggtgcgggcacgagttgtttgggtttggaataaacactcccaaccagaataccatgtcaatataagagtgtggagaagaggggaaaatagaagagaaggaaaacccagaaatggcaaccacggataatcacgtgaaagagtttacgatcgacgacgagtcatcgccgagggcgattctggaaacccctgtttcgggaacagagtccgacaacagtggaagcagcgaaagcttcagttccgtctcgccggagaagtcgccggcggtgaccggaaaagaggttcccaaggaaggttacgtgcaacagttgaagtccatgatcgacgttttcaagttcaagtctgtgagaaagttaacggccgttcctctgttttcggtgggcaatgatatctctcggaaagggttaaccaaaaaacttgctcgtattcgaagtgctgaagatggtattgatattggagctattcccacgaaaccctcttggaggaacttcgattatgaagagttagttgctgctactggtgattttagttatgagaacttgattggaaaaggtggtcacgctgaagtgtacaaaggctacttacccgatggtcaggttatagctgtaaagaggctaatgaagaatgaaaaggatgctgcagacagagctggtgatttcttgacggagcttgggatcatagcacacataaaccacccaaatgcgacgcgccttgttggttttggggttgattgtggcctatactttgtcctacagcttgctccacatggcagtctttcttctttgctttttggttctgaatgcttggactggaagataagattcaaggtagctattggggtggcagagggattgcattatctccataaagagtgcccgagacgaatcattcatagggacatcaaggcctccaatatattactaaacgaaaacttcgaagctgagatatccgattttggactggcaaagtggctcccaagtaagtggacaaaccacgttgtcttcccaatagaaggaacatttggatatttggccccagagtactttatgcatggagttgtggatgagaaaactgatgtatttgcttttggagttttgctgttggagctcataacaggtcaccgtgctgttgattcgaatagtagacaaagtcttgtcatctgggcaaagccactgctggacacaaacaatgtaaaggatttagcagaccccagattaggagaggaatatgatcttactgaaatgaagcgcaccatgttgacggcttccatgtgtgtccaccatgcatcctccaagcggccatacatgaatcaggttgtgcttctactaaagggtgaagagacaattatagaaccaaagaaaaatttagttgcacagaaatctctcatgttagaggcatgtgacctagaagattatacttgctcaagttacttgaaggacctcaatcgccacaggcaattaatcatggagtaaactaaacaaattataactcattagtgggattttattgttttcccctatgtatatttgttgaaaggatggagtgatattttgtagcagtgtgtgtggtctaatccgaagtcacaagccaagttggcttgttatttagccttgaaatttagggagcgttactcaagaagcaaaatcatagtttttggctttggattaatgcctgagaaccactggttttcaagcaacaatgtagtgttagaaatgatgcagtagggtttgtgtaacttttttattctgcagtgccattcaacacatggatgttccacccatatgaaagtagtctgcgatgacttgtttcc

SEQ ID NO: 60063 - DNA, 472 bp, Glycine max
  unsure (1)..(472): unsure at all n locations
  Clone ID: PAT_MRT3847_25249C.1
nntgggagnntgagnagngntgnatagcannnnnanggagagagatgcgccacctctagatatgtgnanannacactctcntaggttnacagangnagagngacanacatgttatgtgganagcagantgtgnntcntggtgttagtcntggangtggtaaggagtacganntgnagactgngcaagnggagnagnggagngnntanggtgnngntnggnagnagngngagntgntcagcngtnantnnngcngngcnagtaaggancnggantgngganaatagnnnnatgtanntanaaacnnaaanagataagaantngtgagaggtcaatcaannngnnggnngnnganatgaggnngattnngangggaannnagtttgnanntggaggaancngtagngtaggcagnagannngnangnnagtgttgtaaggctnannntatannggtnagnagagnagagcnann

SEQ ID NO: 60064 - DNA, 467 bp, Glycine max
  Clone ID: PAT_MRT3847_2524C.1
tgcgagaagacgacagaagggcttattacagtctgttaacatctagtttttcaatatcaaaacatcaccattttatatttcttgccttcaggaaaatgttctgatagccgggaagcgttttgagcaaagaatatcatgagattttagttgtgcacatgcattccatatgatattattcatttaggtaaaatgtttattatattttcatttcagttacccaggccatattttttatttcatttttattttttttcctaatgaaatgcattattaaaaggggaactacaagctaatatatattattggtagatgtgaattgtattagttttccttagccatatttaccagtaatgtattattaacaataaaagtaggagctacaaaaataaatacaaaacagacaactactgtttagtccagcctcagctaaaccattcgtaacttttttttttttaagatcatatgcg

SEQ ID NO: 60065 - DNA, 420 bp, Glycine max
  Clone ID: PAT_MRT3847_25250C.1
ggctcgagcctactagtacgtgtatactctcacttcttcgtcctacatctcttgtggattgcctgaggtctacaaaagttctcttattcttctactcctattgaactttggtcataacacgagacaacccacgtctggaccttccggtgcaatggccattagaggcccctgtgaaatgtccaaatcgagcagctgtatagtgttgaagggagtgaaatatggaccccagatagctacttgactagataggccataggttgaaccctctttctctgcagatttacctgggaaaagatgctgatgcttgaagatatggcattctgaggcgactcggatatgtaatgtgccactcttggggatggagcatatcgctgtgagacagactgaatcctatcctgtatgtgaagatgactacagtga

SEQ ID NO: 60066 - DNA, 844 bp, Glycine max
  Clone ID: PAT_MRT3847_25251C.1
caagataatcgaccaactaccaagagaggattcagttaagatagggtggtgagctcattcattttaggccacacacccttggtattggattgaagttgagtcactcggatcaaatgttattgtcacgggtgcccatttgtggaatattaatgataccagtttcaagtatccccagctatctcaccggaaaatgttcttctatgaggataaaatccaaaggcagcatgaaattcctagtcttttgtacagactacttggttgtgtttatacttgtggaaaacaatttttcttggttttttgttggctcgtggttttctaataatgttgaatgtttgcaacagttttttaaacctttccaaatgtgatattccaagcaccttgaaaaatcaaattattttgagcttgttatttgagtttcaatagttctcagccaattttgctaaagcttggtttttgggccctttttttcccaattaaattgttttcatgtttttttattcattttgcagattccacataagtgcatcagtattttattactggcccggtgattcttctgagttctgaagtttaaggagctgatgcaattggcgtgtttataatgaaatgttacttactacaatgatcagaatattttaattaccaaatggagttctgttttcgcgacctactttttcttattttcttccatttcaaaatattgtagtattttgatttttagtttatcttcaaaaaaattcctgtggaactgtttttgtactgcaaattgaagttttatcagcatttatgaggagtttgggatgctgtacaaattatatttttaaatatttatgtttgtgtggac

SEQ ID NO: 60067 - DNA, 452 bp, Glycine max
  Clone ID: PAT_MRT3847_25252C.1
aaaggcccccaaaaaaaataaaggggatcaaaattaaaaacattaacaaaaccctaaggctttgaaacctaaggcctaaaaaaaaaaagccaaagagcccaaatttccaaaaaaaccccccccggggaaaaataaaaccaaataatcccgtttaagggtcaagggccctggggaattggggggggtaattttggggaaaccccaaggggggggaacccttaacaaaagctgtttggattctccccggtttaagggggctttggaaaacaattttttccccccttaaaaattatcagctcagggaatttccccttaagtttttcccccagggggggtccccacccctccttattgttttccctttttccacccaaaatttcttggaaccaaatcaaaaaccagggttttttggggcgggcttgacttgcccaaaaaaaaatttttaattttta

SEQ ID NO: 60068 - DNA, 204 bp, Glycine max
  unsure (1)..(204): unsure at all n locations
  Clone ID: PAT_MRT3847_25253C.1
acactnttctatttcttactaataaaaaattaaaggtaaacaaaatggtttcgcgggtgagaggctagggcgtaggggtcggcacgtttggggatgtgaaccttgctatttctaaaagagacattttggttttcgcggtgaatatcgtggattttagaagggggccttctatataacatgtggaggcgtttgaaaacttgattg

SEQ ID NO: 60069 - DNA, 467 bp, Glycine max
  Clone ID: PAT_MRT3847_25254C.1
tcaagaagtatcatatgtcgggtaagaaattttacaatggcaggttttccttgttgaggaaggggtggggatgaaagatgaccacgggattccatagtgccatactgccatgcaatagtaccattttagctgctacatttgaattcatatgctaagtatattgctttataatggtcattggagataatgctagttatacatgatgggtttaattctgaagcagatgcctatatttgtacaccatgacatcatgtctttttggtgtctttaatccaatatcttcacctgtgttatagtggtgaaaggtgattctgttatattattaataatggaacggaatcaatatgtggctgcacaattcagtcagccatgctagaagtttgatttgctgcaaagttccttccatatttctctcttcactctgctaactaggtcaaggcactagattcaagtggccctttatgtga

SEQ ID NO: 60070 - DNA, 2024 bp, Glycine max
  Clone ID: PAT_MRT3847_25255C.1
gtttcagatgctttgtctggtgggcgcatggaagatgacaagcttgctgcactaaatcagttaagaaatatatttggactgggtaaacgggaagccgaggcgatttcacttgatgttacgtcgaaggtatatcgcaaacgacttgcacaggctgttgcagatggtgagttagaaatggcagatagcaaagcagccttccttcaaaatctatgtgatgaacttcattttgatccacaaaaggccagtgaacttcatgaagaaatttatcggcaaaagcttcagaaatgtgtagctgatggggagctcaatgaggaagatgttgctgctttgttgaggttgcgtgtaatgctctgcataccgcaacagattgttgaaacagctcattcagatatatgtggcagtttgtttgaaaaggttgtgaaggaggcaatcgcatcaggggttgatggatatgatgctgaaatccagaaatcagtaagaaaagcagcacatggcctgcgacttactagggaggttgctatttctattgcgagcaaggcggtaaggaagatttttattaattacataaaacgtgcacgggcagctggaaatcgtacagagtctgcgaaagaactgaagaagatgatagccttcaacaccttagttgtaactaatttggtggaggacattaaaggggagtcatctgatatttcctctgaagaacctgtgaaagaggacattacacaaactgacgatgaggaatgggaatcactactcacacccactcacgcgtcagacggctgcgagatgacggcagaagggggaaaacctggtcagacagaaattactctgaaagatgatcttcctgaaagggataggactgatctttacaagacatacttactttattgtctaactggtgaagtgacaagggttccatttggtgctcagatcactactaagaaggatgattctgagtatcttcttctaaatcagcttggtgggatcctgggattgagtagtcaagaaatagtggaagtgcacaggggtctagctgagcaggcttttaggcaacaggctgaggtaattttagccgatggacagttgacaaaggccagggtggagcagcttaataacctccagaaacaagtaggcttacctcaagaatatgctcagaaaataatcaagagtataaccactacaaaaatggcagctgccattgaaactgctgtaactcaagggaggctcaatatgaagcagataagggaacttaaggaagctgatgttgatttagacagtatggtatctgagaacttgagagagaccctcttcaaaaaaactgttgatgacattttctcatccggtactggagagtttgacactgaggaagtatatgaaaaaatcccgtcagatctcaacattaacaaagagaaggcacgaggtgttgttcatgagcttgcaaagggtagactatccaactctctgattcaggctgtctctctactaagacagagaaatcagcagggagtggtttcttcactcaatgacttgctggcatgtgacaaagcagtaccctcacagccagtttcatgggaagtgccagaggagctttctgatctatacaccatatacttgaagagtaatccaactcctgagaatttgtctcgtttgcaatatctgttgggtataaatgattccacagctgctgctcttagggagattggagatagattactcaatactactgcggaggaagagaagtttgtattctagtcttgtgataaaatgtttggcattttaggcacactagagaggctgcaagtccccttaattttgccattttttattttccattttgtttaacggtagcagaaaaagaatatcacgatgtataaactttggaatagagatgagtgcagtgctgaaatcttagataatattttgtttgagacagttgaattaatcaattgctattttttatgaatgaaaataagttttcataaaacaagtttttcaccgaaacaaaaaaaaaaaaaagaggataa

SEQ ID NO: 60071 - DNA, 331 bp, Glycine max
  Clone ID: PAT_MRT3847_25256C.1
ggctcgagctcccattctctcgcatctcaatacctttttgatttgtgaaaggaaagcaaacatgctggatcaggtgcaacaccctacaatcatggacaaggttgctggccagctccatctccgttctggtggttctggtattaggagttatgaaggagcctactgccaccccacaatgtaccaaagaccctcttttgggaatcactcgaatgctggattgcaaaatcctgggattgcctcatgcaaagcttctatggattttgctggtggtagcacaactgtcttccccgttttttttgctgctccaacaaaaaaagggcctttttcttat

SEQ ID NO: 60072 - DNA, 649 bp, Glycine max
  unsure (1)..(649): unsure at all n locations
  Clone ID: PAT_MRT3847_25257C.1
agtttcccctaaaaagnatgcttttcaggtgaagtctggcgtctgggctgattcantaagccgtggactgattgatctcaatataactgctcctaaaaaagtatcccttgtggatgttggaattgtgggtggattgagtgatggatccgatgaaagggagaaaggccctccaccttcattttacatggggagagctatgggttcaggatctggtcttggaatgggtaggtctggattcactccttcacagccaatagctggagacgactttttctcaaaccttggaaaccaacaacatcaatttggtgggttccaaaagtaaaattctcagattttatactcttcccatcacattttcacccattctttgtgtgtcggcattaccaagcttgttaagctttttggcatggttttgttcatatatatttctcctaatattgtgattatattattttaaatattaagctactaccgattgcaaacatcctgcggactaaagtgccgaaatgtatggtggcagcgtggcactactttgagttgttcccatgtgcctaacttcaacatataacctctgtcttgctttctttatgctgctgttaatgtcaaattgtttaaactcaaatgtgcaagctgcttaagcagtgctaag

SEQ ID NO: 60073 - DNA, 535 bp, Glycine max
  Clone ID: PAT_MRT3847_25258C.1
agtcatgtgcaactttttgtgtcagttattaataattaaaaataatttttacaacatttacttttttacatatttgcccctttctttgagtaggtgagtaggaggccaaactcagttgctctctaattgtgcatccacacatctctcatttttataacacattctaatttttatataaattttcttactaaatacgacttgttaaatgaaacaaaaaaagaagaagagagaaacaaactaaccaaagcacacctgaaaattttatctgcactcaaaagaattttcgtgggggaaattaattattaattaccagtaaacgagagcttcgagattggcattagtgagattccgataaaattctactgtgtttagccgagttgtggtgtatgccatggttctgttgcatctcaggaattcctctttagttccctctcttacatgaagggccttccgcacattttcatcatttgcccatgtgtcaacaaggatatgataatagcttctacaccaaaatgttggaggatcctcgagcccg

SEQ ID NO: 60074 - DNA, 259 bp, Glycine max
  Clone ID: PAT_MRT3847_25259C.1
caataactatcttcttccaaataaaaaacaaaaaagaaaaaggaatgagatatgaaagggttaattgaatccaaacaaaagaagagatcatcagaatgggcacggtttggacttcgatgatagtattgttgcgttgcctgaacagatcatcggttctgggcgaggacccatacatctactacatatccaacgttacctacggcaccattgccccattgggtgataaccaacagggtatcgtcatcaacggtcattttcc

SEQ ID NO: 60075 - DNA, 207 bp, Glycine max
  Clone ID: PAT_MRT3847_2525C.1
tgagtttttgggagaggccagcattgtcattgcgggatggcatgtaaatcagggggcgcatcaaaatctgagcacgggataggaagctctggtcggccagacttgtttattgatgaccaacactgagtgcttatcgctctgagacatatagtgcgaaatggacaccttcaagggcgagcaattgggcgggttgaatttatgaaaccc

SEQ ID NO: 60076 - DNA, 161 bp, Glycine max
  unsure (1)..(161): unsure at all n locations
  Clone ID: PAT_MRT3847_25260C.1
anaacccacagcntcgggacatggatancttactcagttctgtggatancaacgaaggagctctncttctaccacacnncaatncaaaaagccanagtgatactagtgattaatgaaggagatgcaaacattgaacttgtaggcattaaagaacaacaaca

SEQ ID NO: 60077 - DNA, 2512 bp, Glycine max
  Clone ID: PAT_MRT3847_25261C.1
caaatttactggtaacgtctctgctcgctctgccagcaaaagtcaggagaacaagtcatctagggttgcaaaaaattttaggaaggaaaacaaaaattcgatccgaatgtattagatctcaaatcatttctactgaaaactacagccatcgaattccctgcaattaacataagcataacccctttccaacctttctcctcttcagatcggatcagatcagatccaccgccatggatttcatgaaggtcttcgatcaaaccgttcgagaaataaagagagaggtgaatctgaaggtgctcaagattccggaaatcgaacagaaggtgctggatgctactgataatgaaccttggggtcctcatggtactgtgctggcagagatttcacaggctaccaaaaaatttactgaatgtcaaatagtcatgaatgtcctttggacaagactgggtgaaactggaaaagattggcgctatgtatacaaggcattagctgtcatagaatatttggtagcacatggatctgaacgtgcagttgatgacattatagaacatacttttcagatctctgcactttctagttttgaatatgttgaacctagtgggaaggatgtgggactcaatgtaaggaagaaggctgaaaacattgtgtcacttttgaatgataaagataagatacatgaagtcagaaataaagctgctgcaaaccgtgacaagggcatctgggctgattcctaagcggtggactgattgattttaatataacttctcctaaaaaagtatccagcagcgatgttggaagtggtaaatatggaggcgatggatctagagaaagggagaaaggccctcctccctcttgtgacatggggagagctatgggtgcaggagctggtcttggaatggctcgccctgcctccgctcctgcccagccagtggcctccttcaagaagggttctgctcgctctgccagtaaaagcaggagacaagtcatctggattatcaaagtcatcgactaatgcaaataattatggttcagtttcttctcaaagttcaagtgtacctgcaaacagtactgaggatgacatggatgattttgatccaagaggaacttctaccaaaacttcagctggaaactctaaccaggttgatctctttggacaagatttaatcggtgacctcatggatgctccaacatctgttcctgtagaaaagccagcaactagtaatgtaccagaggttgatctttttgcagatgcagcatttgtatcagcagaacctcatgtggacaaaggagccatttctcaaccacaggctgaggtggatctattttcttcacaaccagccattcctacagttacaccaacagttgatttgttttccattcctgaaccggcagtgcagccagacaccaagtcagagaagtctgttcctatgaataacagcactattgatccctttgctgctgttcctcttaataattttgatggatctgatatttttggtgactttacttctcaatctgattctgtgtcttcccagccctccaataatgttttcagtgatggcaagcatgataatgtgactggtaaatctttagcagactctaaagtttcacctaaaaaggatgctttccaggtgaagtctggcgtctgggctgactcactaagccgtggattgattgatctcaatataactgctcctaaaaaagtatcccttgcggacgttggaattgtgggtggattgagtgatggatccgatgaaagggagaaaggccctccaccttcattttacatggggagagctatgggttcaggatctggtcttggaatgggtaggtctggattcactccttcacagccagcagctggagacgactttttctcaagccttagcaaccaacaatatcaatttggtgggttccaaaagtaaaattctcagattttatactcttcccatcacattttcactcattctttatgtcggcattaccaagcttgtgaagctttttggcatggctttttgttcatatatatttctcccaatattgtgattatattattttaaattttaagctactatcgattgcaacatcctgcggactaaagtgccaaaatgtatggtggcactactttgagttgtaaaatatacgtgtcaacaattaaggttgctgttgacatgtttgtcgtcattagagatcaacctgtcaaacctggcttttatttgccttgtttgttcccataaacaaacctctcttgcatcgacaaaaaaaaaaaaaaaaaaaaaaaaaaaaaaaaaaaaaaaaaaaaaaaaaaaaaaaaaaaaaaaaaaaaaaaatcccatgtgccaaacttcaacatataacctctgtccggccttctttaagctgctgttaatgtcaaattgtttaagctgcttaaagcgggactaagttagtcgatgctgtcatctaaaaatatctacggggttttactcatttaactgaaagtaagcagttgagcttgcattagggctgggtt

SEQ ID NO: 60078 - DNA, 120 bp, Glycine max
  unsure (1)..(120): unsure at all n locations
  Clone ID: PAT_MRT3847_25262C.1
gtgctcgananataagtccgagcttgtcgatgtcattgggattgttaagantgtgtcttcaacnctgnccattcgtaggangagcgacaatgagagnattccaaagcgtgncattacnat

SEQ ID NO: 60079 - DNA, 229 bp, Glycine max
  unsure (1)..(229): unsure at all n locations
  Clone ID: PAT_MRT3847_25263C.1
tatgnacgatacgcatgccacgttcgtaccgtaagcctcggtatattcgnngctcgagcctnncgagcccgctgcgaggcgcgatnntcggctnncgagggccctattcctgtcacgtaanntaaaccagcccacaaagnaacacncnnctctctcacannttctccttncnnctcctctnnttctcgcntnnatctgcaccnnnccattgnngatgctngnnctcaca

SEQ ID NO: 60080 - DNA, 471 bp, Glycine max
  unsure (1)..(471): unsure at all n locations
  Clone ID: PAT_MRT3847_25264C.1
acnaangtnanttnaanagcacccctnaantttacanannnaangggccanaaagnncttacctgtggnatanttttcccgatgtctnccggnaactgacgggggtatanggttncngganggnctacnanantnctctntgncnaatactctncatatncacgcgtnaggannacncanttnncatggnggnatcgcattgctcagtnttatgtcnagcatnatgtnannnntatgcagngactntcttgtcnnacacagnanactaatcgngcnnataanctcncatgtcacnngncncgnaggccagcagngcnatagccatcntgaacataggattcnggntncccntttattatnctnatgagtaatnttaangttncagnagccatgcangttgagcanctatnggtgtnacngatgttggataanngtnttccatgggcattatnnatcaagtgnaccggtnct

SEQ ID NO: 60081 - DNA, 945 bp, Glycine max
  Clone ID: PAT_MRT3847_25265C.1
ggttaaatggggaggcttctaaaaaagttaaggatcgtaactatttattcagaaatctatcaataagtgcatgaggtgcataagtgctagttgaaagttaaacgaggaaacttcttgatttgttttatttttatatcttgtaagtgtttgttaagatataggaacactacgcattcatctattttttggacacttattttttggaggacactctacgcattcttctgttttatcaatctgactcacttttgctccccgcaatgtcaatctacttcaaatatcacaaattttctttctctagatactctatgtaattaaaagacaattttctggtgatggataacttattgtctttataataatagaaaccaaaactttttccctactcctcccatcatgattttatagcttttaagtatctttaatacactgtttaatctcagtttcttgtatcccttccttgactagctttaatcagtgctatcaggcaccgttgttgacaaagtagttgctgaactggagtcatgcgggttccaatgtttcattgccggaattggcgggggaggtgttgaaattaactttggggtgtcatcttgattttcttttactattatttttccaaggactaacatcaataatcgcagcatcagatcctcaaataatcagcataaaaatatatgcttccctttttacagcttgtgcatcaatctgttactttttcttttctacttttgaatcaatttaagcattttcttattcaatcctgaacggaaaatggagaatataaactcatatttggttaataagtaccattcgagtttgatccttgacgaaaaaaaaagacctaaactaaaggcactcttaatcaaaactcgaacgaacactttacgctgtcatagggaactctattgaacaatcaaaaattctattgaattgcattggaca

SEQ ID NO: 60082 - DNA, 418 bp, Glycine max
  Clone ID: PAT_MRT3847_25266C.1
gtgataaattcaactcgtttagtgcatatttacaatcttataataacagcgactcttacattagcatcaaaggtgaatatcctaaactttgagggctgatcttattcctgcaacgaagaacctcaaggcacacataatcaatgccatatcaaattttttatgaaaccagaataacttgcctctataaatctatatagataagaagcctatggttaagctttattcactaggcgataagttggaatagcaagcaagggcttacatcttggtattgagatcccaaatttctccgaaatgtctaagtcattaggggatatgcccattggaagctcccaattgaagcaatgcactaattgagctcaaataagaccaacactacatacacccaattgaatccgaggacattctatacgaccag

SEQ ID NO: 60083 - DNA, 325 bp, Glycine max
  Clone ID: PAT_MRT3847_25267C.1
ggctcgagccctttcccccttcttttcagtttgtatgtgactatgcttagtctacaatgggattacactacttcggattaaagaaggttttatccttatttgggaacatgtaaggtcggtgtttatattctgagatcaggccaggcgtcgcgattattgcaccactttgctgctgagtatccatggcaggtctctgctcgtgatcaaactcatcctggagtgataatggctgaccaaatggcatatgcgctcatgaacgatgattgcaatgctgtgttgatagaactctccgaaggatcatctataagggatgttgattacgatg

SEQ ID NO: 60084 - DNA, 563 bp, Glycine max
  unsure (1)..(563): unsure at all n locations
  Clone ID: PAT_MRT3847_25268C.1
ggctcgaggacacaacaatgaatttggcaaagggtgttggcggaaacattgacaaatcccaagttctgtccgctgttgaaaagtacgagaagtatcatgcttcttatggaggtcaggaggaggagaggaaagctaaatatctctcaccatatcaacataattagcctctcacttcatctagtgaccaacttatgacgctggcgacatcgcgtgccaactgagcggtctgatcacgaggatggtaacggaaaaactgaaagaatagtgacttatgacatatgaagatcattaattgaagtaaataaacaagagagtgaattatatctgtatctctgctagatgcaaacacctgcattgctcacatctcttatgtcataatatatacatatcctcccttgatatatttgagtatacgatactttacttcatatctacacncctattaaaagaattattacctgactaatctttacactaccatacgtgagaaatacaagtgttaagggtaaagccatgtaaagtcctagctttaggcctttgagaaataactgtacttattaata

SEQ ID NO: 60085 - DNA, 284 bp, Glycine max
  Clone ID: PAT_MRT3847_25269C.1
taatgttgtaaaatttatgttatagagtatcctgcgacggcgctgctggcccgcggacttacgcgagtcgcttagttgtctccacttgttgtagcaagtaatactataggtagttctctgctagtcgacgagggcgccagttcttaatcgtgacccgtcgctgactccacttgttgttgcatgtaataactatatggggggcctctgctactttacttctttgaccgggaataatatttgcacgtcccttaattagggaaacgagtttccccaaaggggggggg

SEQ ID NO: 60086 - DNA, 983 bp, Glycine max
  Clone ID: PAT_MRT3847_2526C.1
aagagagcaacaatgaacaaccctagttctccctctccctgcgcggccttcgcggacttctacgagcaatggttcgaggagcttcagtccctgatgcagcaactcaggggtgagggcagaaaagaggaggtgatggagaaggtgatgtggcaccaccagaactactacgtggccaagtcggcggcggcggagaaaggacccactcaacgtgttcctatctccctgggccaccacgctggagcgctccctccactggatcacagggtggcgccccaccaccgcgtttcacctcatctacaccgagtcctcgctcatgtttgagtcccacatcatcgatattctccagggactccgcaccggcgacctcggcgatttgtcaccctcccagttccgccgcgtcagcgacatccaatgcgacactgtgaaggaggagaatgcaataacggaggagctatcagagtggcaggacagtgtgagcgagatgatgggcccaggtgcgaacatcaacgacaagatcggacggctggtatgcatcataaagaaagcagatgatctacggctgagaaccttgcggagtgtggtggggctactgtcgccgcagcaggctattgagttcttgattgcatcggcggagttgctagttgggatacgcggttggggattgaatcatgaccgtccacgtggcagatgaaagtggaattgagtttaggccacaatttctctattttgattgaaattcattgtggccttaaaatgattgtgtattatttattactagttactagaactagaacagtccttgctgaacaaatatttctttttgctgattaaaaacaacagtccttcgctattaggctgcagcctaatccaaaaattttaataaaataaattttaaagtttttttctttgtttggccgccccatgcattattaaaaaccaataataattattgactgtttgagttttttaaaaaaaaaaaaaaa

SEQ ID NO: 60087 - DNA, 258 bp, Glycine max
  Clone ID: PAT_MRT3847_25270C.1
aacacatacatggagtatggaggaaattttctgaaaaatacatttagattagtttagtttgaaggagaggtgggctgatggctgagttgtatgttactaacttggccctgactggttgtgcaaccattgcttcatttctttgcaaaatgtagttaagatatactttattctaatgaaggccttttaaatttgtccactgcattcttggtatttcactacttcaagtcagtcagaacttcgtagaccgacctgaagttt

SEQ ID NO: 60088 - DNA, 575 bp, Glycine max
  unsure (1)..(575): unsure at all n locations
  Clone ID: PAT_MRT3847_25271C.1
ccggtgtaacatattacttacaaacatgggttatagagaagaaaggaccggtgtttctagccatggcaacaccacttgctttgatcatgaccatcttctcctccgcagttctcttgggcgagatcataactttgggaagccttttaggtggcatcgctttggtcattggactgtactgcgtgctgtggggaaagagcagagagcaaatgccaaaagcctcgttagacttggaggaggcatcatcgggttagagtggagctagtgattcacaaatcacaattgtcatgacacgacacctgatatataaaggaacattaactgtatgtagtttggaatagtgccaaaattatgttaataatatatataatatataagcctgtggagatgttcgaaaacccaaaggcagaatctctgaagtccacctcttctcaaattatgtccttccgataatgttaggcttcatattgtaggaactaactagggaggcttttaaattttctctcttttgtactgngttggtttcgaaaacaacttgatattatagggactaaagtatatttaagatcaacttataa

SEQ ID NO: 60089 - DNA, 521 bp, Glycine max
  unsure (1)..(521): unsure at all n locations
  Clone ID: PAT_MRT3847_25272C.1
agctaattatttttatattttttttgtagtaaggattaaaaggtaattaaaatataaattataaggactaaaaatatcactttcaaactatagaaattaaatgaaaattaaaatataaattataaggattaaaaaaataattttaaattacaggaactaaaaattaaaatgtaaattataagaattaaaaaaatcacttttaaattataataactaaaaaaataaaaatcataaaattattgggaccaaaataagtaatttaatcaaattaatttttataagtggttaatgaactaaacgatatttttgatgacaccaaaactattatatcaaagtgcatgccatgtcattaggaaagaaaattatatagatatattaaaattaatatctgtgttggagtgggcgtgcaattgccacccactaattctcgaccatgctttaaggatgtgattggtgtccgctaattattanaattagcagtatagaactttcttccaaaatgaaccagcatggtgcaaagt

SEQ ID NO: 60090 - DNA, 235 bp, Glycine max
  Clone ID: PAT_MRT3847_25273C.1
ctgattgcccccaaatactacaccatggggacaaagtgaaccatgctaccctccacatatcacttatcagtccgtcccatcgctgattgtgtattactccttatatggacatgtaaacaccatggctagagaagtgcaccaaatggctgctgcaaaaacaactctcctagcatcactttgcttcatgagtggtgtgctgtggacttttaaaataaaaatcattcggtgactattc

SEQ ID NO: 60091 - DNA, 308 bp, Glycine max
  Clone ID: PAT_MRT3847_25274C.1
ctgtttttgttttgacatcaagttacactccaactccatagttggaatctgttccgcaactggacagacggttaattgtggcatattaggggaggacgtgctacgttgcccatcacgtaaagcagacccaagagaaacatgtgctggagggaatttcctcctttgatgataaacttcactctagatcggcaaaagtttcgtatacaaaagcacgttttgtgaggggcaaaacaagcacatatgatataatcggagctggatgacattcactagaggatttttctggaaaggaagatcaagaaaaaccc

SEQ ID NO: 60092 - DNA, 416 bp, Glycine max
  unsure (1)..(416): unsure at all n locations
  Clone ID: PAT_MRT3847_25275C.1
gcacgaggattcatctactgtgaatttaagatgatttccctttgtaggtttgaatataatagttcgaggctagattataaggagtagtatatgactttgtttggatgagcttttttcataaatatttaggagtggagaaaaataagaaaataaaatgaattgaattttcttgtaagttaaaatcaacttatgcacttcaacttttagaaaagttagataaaagagcttctataaaagttaagcgcacaaggtgattttaacttatgagagaagttcaattcatttttgttttccaacaagtgtttatagatgcttccgaacaacgcctaggttgtgtatttctagtcaaagttccattgtatataaaatattgctatggcctgttttggattntgaggctagtgattttcaatgta

SEQ ID NO: 60093 - DNA, 558 bp, Glycine max
  Clone ID: PAT_MRT3847_25276C.1
cctaattattcctttgaagtagcccttccaccaaaagattccaactatgataatgacaaggcatagagctgtaactccaaatccaactccaacgattatcttatgccttacatttttttggtctgtacaaggtttagaatcagaaacaatagagaaagctgatatgaggggaccataaactccactaacaggaatccttgtagtccccttgccagcccagtagaattgaatctccagaatattgtctgttacattgacattatataaggacagtatatacggtttttgagcaacatgcgtttcaccttcaatattaaaatccttcctaaataatgctccctgaaacagagcaatcttattaaatcctgatgtggccagcaaaacacaattccaatattttgagcaatacctgaacataaatatcaaataagcgcctcccaagactactgtatgtgttatcgtttgaaaattgtatttctgcaaaagtgagttttacagtatattttccattttccatgcaatagccgaaataagtaagtgaaaattgagcaacacgag

SEQ ID NO: 60094 - DNA, 543 bp, Glycine max
  unsure (1)..(543): unsure at all n locations
  Clone ID: PAT_MRT3847_25277C.1
gaccggnaatcccgggtcgacccacccttccccccctttgccggcaacacaccgcagggggcggtcggccacgcatgcgcccacacactacgctcggatgcgacacacacatagggggaacttgtcgaacagagaaccatataagggcttgatgaacttcatactcactacgtgtctcctatgaactcctgggtagaggatgctgatgcttggggggctagtcaaatggtacccaccatgacatttcgaacttcaggatgatacgtgtgggggacctgaactttgaattcgcgatgcggaaggccacgaacctctgcctcctgttctcatatccaatgcccacttgtactgaatcctatgctggtcataggcaggacgtacactaatgcggtgagcatgatatggtacccgcggcaaagaaggaggctggtttctcatgccgtgctggcctagggacagaaatttccttgttcctattgcccctatgatcggcgaaggcagatgatcggttatatcgcttatggcatcgctcttgttacgagg

SEQ ID NO: 60095 - DNA, 379 bp, Glycine max
  Clone ID: PAT_MRT3847_25278C.1
cttgacacaaaaagatgtacatctacgtacctgcgctaagacaaatctgatgtcctagactaatctaactaggaagactcatttacttgcctaaccctacgtagaaagacatccaaatctttagatgagatacgagactacagtccttcctaaggccacccactaactcaaataggatcgcccatgtgatggggcactaagacaggggcggtacatttatgccgcttacacaacggtatgacaaatgctgtagcggtgcactgtgcacaggtccgaataccatattacatttgcgcactattaggatgctttttctcgactaccccattagcctctacagtcgaggggtctgttatatcctcaatctttactttctcta

SEQ ID NO: 60096 - DNA, 293 bp, Glycine max
  unsure (1)..(293): unsure at all n locations
  Clone ID: PAT_MRT3847_25279C.1
aanaggaaaantatattgtttatntaaattataccagtntattccaaggaaaattctatantataaataccaaaaacaaacccaactatttnacaatggacatantacaactatcaaaggttgaaggttgcttgttggggggcggggcgggtncattaagcgggagctggttgctctttggtgggaggggggttgtgaatggggtggggcgcggagtggggttgggtgattggattgggtatggtgcacggcgcgtgtggggtgcgtgtgggggggggtggcgtgctggggca

SEQ ID NO: 60097 - DNA, 347 bp, Glycine max
  Clone ID: PAT_MRT3847_2527C.1
aattcggcaccagggaatattaacattgttgggataaagcttctcccattttattctataacaactaacaaaatttcatctgcttgaaaaaaaaaacttcatttgaccattgatgtcttgcctgagtacttgactcatgataattacttattagacaacagaagaagagtgtttgacacttgaagagtatttagacgtgtcttggatgtcttaacatgaggcaataattaaatttgtatgtaagtcctatggattctgttgacattataggatttaggttggaaaagaaggaaacgacaaaataaatattggataatgacatatattacactgataagttatattat

SEQ ID NO: 60098 - DNA, 599 bp, Glycine max
  Clone ID: PAT_MRT3847_25280C.1
ctacgcgtttgataaatttttttattttttttaattattatattatttttttttatttgttgggggttatttaaaaggggggtgggggggaaattccgaaccagaaaccgggaggtgaacaagggcccccgggggcgagcgaaaaaaacctggggggactgaggggaaaaccaattctgggagaaggggaccccataaaaaagggggaaaaaaaaggaaaccgggggcataaagggaaaaacggggggggccaaaagagggaccaaacaaacagccatggcttaacactcaaggcccgggggggaaaagggaaaccccccaccccaattaaaataaggacccccccaagcgggcggagaaaggggaaaagcctatgggcccccaaggtggattatatttcacaaacggggggggggagtagttaaatgcccccaccccggggggcccttttataatccacaaaaacgcggccaactcgggttcggcccaacccggccaaaacccagaaaagagggggaaaaacggcgaccaaaaaagggggccccggcatgaggagaaaaagaccccattgcgaccgggggggaaaaaaagggcggggg

SEQ ID NO: 60099 - DNA, 382 bp, Glycine max
  Clone ID: PAT_MRT3847_25281C.1
gtgacgaagccatttcgccattatcactcctctcgcaccaaaagcgatgaaagtctagttgctgcttttctcgttttgatccgtacatttccctctgccgttgcgatctacgaagctgcgagattcttctgcctcgattgcgcacttcatgtttttacatttctggagtagctgaatcagatgaggcggatggtcttttgttaattacttcaacttaggtagacgaatctgccttggtgaatctgtcaagattgaagaatagactgcagattacttgtctggcagaaaggattcaaaatgagttggaacctacacatggagctccattacaataccattagctatccctataatacagcaggaagctctatcgaatattttg

SEQ ID NO: 60100 - DNA, 497 bp, Glycine max
  Clone ID: PAT_MRT3847_25282C.1
aaaatgaagagtgacgaagccattttcgccattatcactcctctcgcaccaaaagcgatgaagctctagttgctgcttttctcgttttgatccgtacattttccctctgccgttgcgatccccgaagctgcgagattcttctgcctcgattgcgttcttcatgtgattctgcttctctctctaaccaagtattctactcattcggtttacattttaggagtagctgaatcatatgaggcagatggtcttttgttaattacctcaacttagactgcagattacttgtctaccagaaaggattcaaaatgagttggaacccacacatggaggtccattacaataccattagttatccctataatacagcaggaagctttattgaatattttgaaggtctcacctatgaacatgtcaacttcattttttctggtgcatcacatgctcaggagagttcttacccttcaaattcaagcttttacaagtttggactatctgaa

SEQ ID NO: 60101 - DNA, 1358 bp, Glycine max
  Clone ID: PAT_MRT3847_25283C.1
gaaggagtgagatgggtgagttatgaagagtgacgaagccattttcgacattatcactcctctcgcaccaaaagcgatgaagctctagttgctgcttttctcgttttgatccgtacattttccctctactcgttgcgatccccgaagctgcgagattcttctgcttcgattgcgtgcttcatgtgattctgcttctctctctatgcaaatttcttttataggagtagctgaatcatatgaggtggatggtcctttgttgatgaccacaacttagactgcagatttctcgtctaccaaaaaggatgcaaaatgagttggaactcacgcatggaggcccattacaataccattagttatccctataatacagcaggaagctttattgaatattttgaaggtctcacctatgaacatgtcaacttcattttttctggtgcatcacatgctcaggagagttcttacccttcaaattcaagcttttacaagtttggccactgtgaaccagagaataattcatactatcgttatagtcatggttatgaggtaaatcatcatgaaccactggtggatgagtacaggagaccttcagagaactcattgacaatcaatgaacagtcaccagcagtaagcacagaatgggttgaaggtggaaacactgacacacaagacaattctattgaatgtcctcgaagacatcatagtaattcaaatgattatcaggttatttggcaagacaatattgatcccgacaacatgacctatgaggaactacttgaattgggtgaagctgttggaactcaaagccgtggtcttacccaagaacagatctcctcgcttccagtgtcaaagtacaaatgtgggttcttcttgaggaagaagtcacgagatgagagatgtgtgatttgccagatggaatatagaagaggggacaagcgtatcaccttaccatgtaaacatgtttatcatgctagttgtgggaacaagtggcttagcatcaataaggcttgccctatatgttacacggaagtgtttgccgacaagtcaaaacacaaataatctcaagcggataagttacctgcatatgtttctgtttctccttgagtgtgggggtctttcatagaaatacatttttatttgacttttcccttttcgtagtgaggtcagccctgggtttagcaaaaatacagagagaatctaaagttttataaaaggatatgggacatgtctcaattatcattgttgtactggagaggttggattacggtttgttttcataatatctaatacagtgtgctatgatttcacgtaattagtatctcgtgctactgatacagtgttctcgagacccgttctccagc

SEQ ID NO: 60102 - DNA, 697 bp, Glycine max
  unsure (1)..(697): unsure at all n locations
  Clone ID: PAT_MRT3847_25284C.1
ctcgagccgaatcggctcgaggtgaaaaggtgcgatgcaggtgatcatgttctatctaacggagtttgcgtgtgggtgaaaccagcaccagcgcagtgcgtaaaggcagagagagagagagagtgaaatgagtgagttacaaaatgaagagtgacgaagccatttcgccattatcactcctctcgcaccaaaagcgatgaaagtctaggtttttacatttctggagtagctgaatcagatgaggcggatggtcttttgttaattacttcaacttaggtagacgaatctgccttggtgaatctgtcaagattgaagaatagactgcagattacttgtctggcagaaaggattcaaaatgagttggaacccacacatggagctccattacaataccattagctatccctataatacagcaggaagctttatcgaatattttgaaggtctcacctatgaacatgtcaacttcattttttctggtgcatcacatgctcaggagagttcatacccttcaaattcaagcttttacaagtttggaatttctgaaccagtgaatacttcatactatcgttacggtcatggttatgaggtaaatcatcacgaaccttctgtggatgagtataggagaccttcagagaactcattgancatcaatgaacagtcagcagctgtaagcacagaatgggttgaaggtgga

SEQ ID NO: 60103 - DNA, 1521 bp, Glycine max
  Clone ID: PAT_MRT3847_25285C.1
cgtaagctcggaattcggctcgaacacacacaaggcagaaccaaatagctcattagtgagtttttgagttcgtgtgtcctttctttgtgtgttgcaaggttacaagatggaggatcaaaatgcatcatctaatggattgggcaaggtgttccacaaggttaagccctaccttgctatgatgtcccttcagtttggctactccggaatgtacatcatcaccatggtttctttcaagcatggcatgagccattgggtactctccgtgtaccgtcatatagttgccactctcatcatggccccttttgcatttgtccttgaaagaaaaatacggccaaagatgactctcccggtgttcctgaggcttgcggctctcggtttccttgagccagtgcttgatcaaaacttgtacaacatgggaatgaagaacacctcaacaacgtttgcatcggccaccgttaatgtcatgccagccattacttttataatggcactgatttgcaggttagagacagtgaacttgagaaaaatacccagcgtagccaaggtagttggaacagcagtaacagtctcaggagctatggttatgactttgtacaaaggcccggctcttcagttcataaagggacaagcagcaacccaccatgaaagtggcaacagcacacaaccctctgaacaaaactgggtgcttggcacagtagagctcattgcaagttgtggtggttgggctagcttctttatcttgcaatctttcactttgaagatgtacccggcagagctctcggtcacagcttggatttgctttttgggcatttttgagggtgcaattgcgacccttatatttgaacgtgacatgagcgtgtggtcaataggcatggactcaaggctccttgcttgtgtttattctggtgtggtatgctctggaatggcatactatgtacaaggagttgtgacaagggaacgtggacccgtgtttgttacatctttcagccctctctgtatgattatcactgctgcattgggatccattgtcttggctgagcaagtttatatgggaagtgtaattggagctattatcattgtgagtggactttacaccgtggtatggggaaaaagcaaagacaaactgaacaacaaaaccaacgaaggaaacagtgagggccacgaattgccaattaaggacggtacaaaatcaggatcagacatttttgacagtattgagatcaatgttccttctggggcaggaaaaaatgtgcttcttccatcagcaagaacatagtccctcaagactagcatatgcataaccgattttcctactaattaaaatgatataaagagagattttgtgcaatctttccacatatctgccatggtggctacgttttgttatgtacctttcttgttttcctttgaccttttatgtttttttttctttttgttactaaggaggcctaggcccaaaaatcctttatatgttgccgaaacttgagtatgagtaaaataacgccattaatgcttgtctct

SEQ ID NO: 60104 - DNA, 368 bp, Glycine max
  Clone ID: PAT_MRT3847_25286C.1
gcggccctttttttttttttttaacaaccgggcccttttcctaaacgatactttgagaaggacatatttccgaaaaacacatgttgtggatatccgtataacaacataaatgttactttttttttgttcccgggaattatctacaccccgcgtgaagagcatcaaaatgggcctcagggctgcgaggttcagcatcccattcaattttcgggtcccgaatttgatccgtttgagcatcagctcagaacagatgatgctcttggctacactaagcagccatcctagtactcgtgaatagcccagactctgacctctccataggtggatgcactatactaagagctttgatccgaactgcagatgaaact

SEQ ID NO: 60105 - DNA, 269 bp, Glycine max
  Clone ID: PAT_MRT3847_25287C.1
acgaggtgccgtcacgccctcaggcagtaacgagctcatgaatttcggttgcgaaatcactcatagacttttcctattgttggaccgattggaccgatcatacccgcggatcatgggagccgcagttctgtatcaccacttcgtactcactttgcgtgttattttcttttgtcacccctccggctgagatggttgcttattggcaacacttggtagcagtagatagaacagtagctcagcgcgtaatcaaaaaaaaaaaaaaaaaaaaa

SEQ ID NO: 60106 - DNA, 851 bp, Glycine max
  Clone ID: PAT_MRT3847_25288C.1
ggtgtttccttgctccagcgcaactgcgtaaaggcagagagagagtgaaatgagtgagtgagttacaaaatgaagagtgacgaagccattttcgccattatcactcctctcgctcgagccgcgatgaagctctaggtttacattttaggagtagctgaatcatatgaggcagatggtcttttgttaattacctcaacttagactgcagattacttgtctaccagaaaggattcaaaatgagttggaacccacacatggaggtccattacaataccattagttatccctataatacagcaggaagctttattgaatattttgaaggtctcacctatgaacatgtcaacttcattttttctggtgcatcacatgctcaggctactagaaagattcataattctaaagagagttcttacccttcaaattcaagcttttacaagtttggactatctgaaccagagaatacttcatactatcgttacagtcatggttatgaggtaaatcatcacgaacctctggtggatgagtataggagaccttcagagaactcattgacaatcaatgaacagtcagcagcagtaagcacagaatgggttgaaggtggaaacactggcacacgagacaattctattgaatgtcctcgaagacatcatagtaattcaaatgattatcaggttatttggcaagacaatattgatcccgacaacatgacctatgaggaactacttgaattgggtgaagctgttggaactcaaagccgtggtctcacccaagaacagatctcctcacttccggtgtcaaagtacaaatgtgggttcttcttgaggaagaagtcacgggatgagaggtga

SEQ ID NO: 60107 - DNA, 797 bp, Glycine max
  unsure (1)..(797): unsure at all n locations
  Clone ID: PAT_MRT3847_25289C.1
cacgcgtccggtcagaaccaaatagctcatcagtgagtttgtgagttcctgagtgtgtgcaagtgtgctttctgtgtgtctcaagcttactagatggaggatcaaaatgcatcatctagtggattgggcaaggtgttccgcaaggttaagccctaccttgctatgatgtcccttcagtttggctactctggaatgtacatcatcaccatggtttctttcaagcatggcatgagccattgggtactctccgtgtaccgtcatgtagttgccactctcatcatggccccttttgcatttgtccttgaaagaaaaatacggccaaagatgactctcccggtgttcctgaggctagcggttctcggtttccttgagccagtgcttgatcaaaacttgtacaacatgggaatgaagaacacctcaacaacttttgcatcggccaccgttaatgtcatgccagccattacttttataatggcactcatttgcaggttagagacagtgaacttgagaaaaatacaccagcgtggccaagggtggttggaacccgcagtaacagtctcaggagcaatggttatgacttntgtacaaaggcccggccccttcagttcataaagggacaagcagcaacccaccattgaaagtggcagcagcacacaaccctctgaacaaaactggggtgcttggcacagtagaactcattgaaggtgtgggtggttgggctagcttctttatcttgcaatctttcactttggaggaagtacccggcagagctctcggtcacagcttgggattgcttt

SEQ ID NO: 60108 - DNA, 285 bp, Glycine max
  Clone ID: PAT_MRT3847_2528C.1
cccacgcgttcggacgacagaaggggatcgtttctctatctaacacgatataggtacacgcccatctgcattatagtagactcaacacacactctaacacccaacgaggctcgtgaaccatataagaaacaaacaaaccagcgaggggcgctctttcattaattattgacgtcgagggaagagagagatacgagatttgcgattccgcaatggctgcttcttccacgacaatgcggttctccgcgggctccaccggcgccgaggcggggcttccttgccggagct

SEQ ID NO: 60109 - DNA, 135 bp, Glycine max
  Clone ID: PAT_MRT3847_25290C.1
ggaattctgctcgagggcaattccctgctgaccataatatgattctatccctcatttgatcagaaaatgactgccctgggggtcccattccacactacacggggtactcagcctcaaacgcccttcatggtggct

SEQ ID NO: 60110 - DNA, 523 bp, Glycine max
  unsure (1)..(523): unsure at all n locations
  Clone ID: PAT_MRT3847_25291C.1
tatggctgttagaagacgacagaagggggagttacaaaatgaagagtgacgaagccattttcgccattatcactcctctcgcaccaaaagcgatgaagctctagttgctgcttttctcgttttgatccgtacattttccctctgccgttgcggtccccgaagccgcgagattcttctgcctcgattgcgttcttcatgtgattctgcttctctctctaaccaagtattctactcattcggtttacattttaggagtagctgaatcatatgaggcagatggtcttttgttaattacctcaacttaggtagacgaatctgccttggtgaatctgtcaagattgaagaatagatttgtatatattaattaataattaatactgcagattacttgtctaccagaaaggattcaaaatgagttggaacccacacatggaggtccattacaataccattagttatccctataatacnagcaggagctttattgaatatnttgaaggtctcacctatgaacatgtcaact

SEQ ID NO: 60111 - DNA, 628 bp, Glycine max
  Clone ID: PAT_MRT3847_25292C.1
caataggcatggactcaaggctcctagttgtgtttattctggggtggtatgctctggaatggcatactatgtacaaggagttgtgaccagggaacgtggacctgtgtttgtgacttctttcagccctctatgtatgattatcactgctgcattgggatccattgttttggctgagcaagtttatttgggaagtgtgattggagctattatcattgtgagtggactttacaccgtggtatggggaaaaagcaaagacaaattgaacaaaaccaaagaaggaaacagtgagggccatgaattgccaattaaggacggtacaaaatcaggatcagacatttttgacagtattgagatcaatgttgcttctggggcaggaaaaaatgtgcttccatcagcaagaacgtaggtccctcaggactagccgtaacagattttcctactgattaaaatgatatcaagagagattttgtgcaatctttcccaatgcctgccttagtggctgcattttgttatcctttgaccctttgtggtttgttttttgttactaaggaggcctaggcccaaaaaccctttatatgttgctgaatcttgagtatgaggaaaataacacattaatgcttttgtctgt

SEQ ID NO: 60112 - DNA, 416 bp, Glycine max
  Clone ID: PAT_MRT3847_25293C.1
tcaaaaaatggagagtaatccgtatcatctttcggggggacgatatactgatgtatactatggctgaagttcgaacaacacgcaattcattttgggccgttttcactttgttagggtcattggctttaatgttcgttgcaatttccacctatctagctatggatctcgctctttatttctgagaaaattaccgattacctcttctattactgactctatttatactacatttattccacaaggggccacgatggctttatatggaatcgccgctctctttagtagtttacatttagcgtcaattattttttgagatatataccgtggttttgatatcttcaattaaaaacggaaaaaggcactttttgatcgatggggattacctgcaaaaaactgttggattattctcgaaatac

SEQ ID NO: 60113 - DNA, 595 bp, Glycine max
  Clone ID: PAT_MRT3847_25294C.1
cccacgcgcaccgcatccacacaacacatcatgagagaagcgatgagagctctgatcggagccccaaacgcatccttaattttttcataaattcctacctggcaaccatactatcatgattatactcacaaccttacatacacattcacctacttattgaccacagctaaggcacagaggttttgcctacggcttgccttccactgtggctagagctgatgccagtgctactgccaagactacgagaagacccatgagagagagatgacgatgatgaggatgacgatgagcttatgcacaaggttatgggcaggatattgggctcggtcgtggtgtctgtgggggtgccaatggccttggggttgctcttgggggagcttaagggagagcatgaggagaatgcagcgttggatgcaccattgtggacaccacttcttgactacagtagcgacctttgtagctatcgctcttggaacagtgtacgcaggactgtacgcaggattggaaggtgattaggttggtgcgttacttgtggaggaacattgtcaaaagatgtggctagagatgcaggaggaggaacactaggatgactact

SEQ ID NO: 60114 - DNA, 543 bp, Glycine max
  Clone ID: PAT_MRT3847_25295C.1
ggatataaaatgtttgttttcatttatcaccaagtaaaatctacatacaacaaataaatcaaaccatatattatagatatgttcattgaagaagcaaagcacacagattttgagtaatttaattacattttgatatacccccattaagataattgatttctacaatattcatcatgcttgcagcaaccaatgccaattgcgtgtacatcttgcaactctaaagggcatactgaatgtaaatggtgtggaggcactggtttcttcattattggtgacaatgtgctttgtgaagttccatccagaaacactagctgtgttgtttgcagaggaaaggtactttttatgatgaaaaagactaaccttaatccacaaatgttgttacccaacctaataacttcactgtttatttgagtaaaccacaattttaaccggtaaaattataatgatcagctaggttggatttctaaaccttataaaatcttcatttttagacctctgatttttggtaaaatgaaataaattacctctaaatccttttttcgg

SEQ ID NO: 60115 - DNA, 118 bp, Glycine max
  Clone ID: PAT_MRT3847_25296C.1
gagtgacgaagatcttgcagctcaatcagccttcgttcatgaagaatttattggaaaacagaatgtatctaaagaatctgttgctgaccaagatattggactgatgagaacagaatgc

SEQ ID NO: 60116 - DNA, 795 bp, Glycine max
  Clone ID: PAT_MRT3847_25297C.1
tcccgggccgacccacgcgtcagaagacgacagaagggctctctttttgctgtgggaagaggaaccctagctagggtttggaagaagctgatccgagaagatggtgcagcgtctcacctaccgcaaacgccacagctatgctaccaaatccaaccagcacagagtcgtcaagactcccggtggcaagcttgtttatcagaccacgaagaagagggccagcggacccaagtgccctgtcactggaaagaggattcaagggattccacatttaaggccagcagagtataatagatcaaggttacacagaaaccgaaggactgtgaaccgtgcatatggtggtgtgttgtctggcagtgctgttagagaaagaatcattcgagctttcttggttgaagagcaaaagattgtgaaaaaggtcttgaagatccaaaagacaaaggaaaaacaagctttgaagggctgagttttgagaaagagtgataaagatctttttggagggattttaggtttgggtgattatagtaaagcatgaaatttgttagagctgtttctgtgttaattttgtgcttatttggctttgttaaactcattctagtgcaactggtaactttgtcgacaactccattatgatacagtttttgtatgtcatgattttctcttgctggattattgattttatttctgcatattagtgctttgctccaaaacctgttgcagctagaattctgctttgtcactgtaattttactgaatatccattggtttttgaaaaaaaaaaaaaaagggcggccgctc

SEQ ID NO: 60117 - DNA, 154 bp, Glycine max
  Clone ID: PAT_MRT3847_25298C.1
taacatgtgatgaaccgcgatcacaggttgccggatcttattacctgttaatgaagcttcggtacttgatttcaagaagtactcgattgcttcctacttcttggggttagatttcttaagggttatagtatcactctctgtactgtccagagac

SEQ ID NO: 60118 - DNA, 597 bp, Glycine max
  Clone ID: PAT_MRT3847_25299C.1
aacaggttgtagaattctaaagctaacctctcgcattttgattcatggtggctgtgagtggtttggcataatggcgaaatggattttcttccccatcatcttctttgttgtatttgttgcaagcaccttcctcctggaaattaacctttccagaataacaagaactacaattttcaagacaattataatattcaataagcaacaacctcaattcccacttaactgcacggatggaaacttagcaaaaacttgttcatcatactatccaacaacattcgatcttgatgatgattcatcaactacatcatgtccaaattacttcaaatggatccatgaagatctaaaaccatggaagagtaaaggaatcacaagagacatggttgaaagaggcaaaaacgtttcccattttaggcttgtaattgtaaatggaaaagcttatgttgaaaagtatgacaaagtgtatcagacaagagatgtgttcacaatatggggaattttacaacttctaaggttatacccgggaaagataccagatttggatctaatgtttcaatgtggagacaagcctgtttgtgttaaaaaaagatttttaaggac

SEQ ID NO: 60119 - DNA, 260 bp, Glycine max
  Clone ID: PAT_MRT3847_2529C.1
tctcgagccgaatcggctcgagcttatcactcttcactcttcattagtcatcaacacttagacccaacaagtgtaaatgaagctagtggtggtgaagttggatttgcacgatgacaaagcaaagcagaaggcgatgaagtcggtttctagcatatcaggcatctattccatctccatggacatgaaggagaagaaactgactgtagagggtgacataaaccctgtcaatgtggtgagcaaattgagaaaaacctggcacc

SEQ ID NO: 60120 - DNA, 289 bp, Glycine max
  Clone ID: PAT_MRT3847_252C.1
ggaaaaaaccaatcctttcatttttttaacggtcaggggtttataggaaaatgggattttaaacttaagcaacaaatttggtcataattgattcaaaccctcgaattcacatccaaaaatgtgaacattacaacccccaacaggacatacgggggcatacaaatcccaaccctcaggaagacaggccacaaacactcaagccctttacttaaaaaattcattattatcgtcaggaaggggctgactagcatttgaaaaaagctcacccttgggctggtggagccgaatt

SEQ ID NO: 60121 - DNA, 902 bp, Glycine max
  unsure (1)..(902): unsure at all n locations
  Clone ID: PAT_MRT3847_25300C.1
cggtccgnaattcccgtcgacccagcgtccgctcttcttaaacgtcttatgctatgtttataacaacttaattcggctcgagcgataacaataacaattactgctacaacaacagttaccgtagctgagcaatggcttctatggccagaggcgccaagagacgccactcgataataagtagaaaaatgctgatcctcttctccgcttccctttcatgcgtcgtcgttttagttatttgttctctcttcagattccactctcccaaacccccaatttcaatttcaatttctcgcgtcgtcttcgatggccctcccaagatcgctttcttgttcctcgttcgccgcaacctccctctcgatttcctctgggacgctttcttccagaacgtcgacgtttcgagattctcgatatacgttcattcggcgcctgggtttgtgttggatgagtcaaccaccaggtcgcaattcctctacggtcgacaaatcagtaatagcattcaggttttatggggagaatcaagtatgattcaggcagaaagattgttactggcagcagctttagaggaccctgcaaatcaaagatttgttcttctctcggacagctgtgttcctctgtacaacttttcctacgtgtacaattatctcatggtttctccaaggagtttcgtggacagttttcttgatgcaaaggagggccgctacaacccaaaaatgtctcctaaaataccaagggaaaaatggcgtaaagggtcacagtggatcactgttgttcgtaagcatgcagaagtgattgtagatgatgatgttatcttttctgtctttaagaaatattgtaagagacgtccaccaattgatacaagcaagggaaagctgaatctgaaacttcagaagcagcacaattgt

SEQ ID NO: 60122 - DNA, 304 bp, Glycine max
  Clone ID: PAT_MRT3847_25301C.1
ggccagtggccctctcatgcgcaggcctggtgacaggcatacagtgctactctcaccagccatgacaggctaagagcatatccccagcattcatcacacatcatctttacatagtctccgctccgcgagcaacgagctctacctcatgagtcagagaagcgctaaaaccgtgagcatactcaagcctcgacgcgctaagacccaggttactccccatgctgaccactactgatcataatctacaccaccgaataatgctcaggcaatcgcatcgccagattgaggagctatccgcgtcaggggc

SEQ ID NO: 60123 - DNA, 188 bp, Glycine max
  unsure (1)..(188): unsure at all n locations
  Clone ID: PAT_MRT3847_25302C.1
aaaagtattnantnaggataattaaatctgggagccgccatttattatcgaaacacacaaacatgcttcttggccctagcatattattatacattaatataactgagggttttattctgcaaaattttattaaagccaacaaagaacaactgcaaagtggccgtttatatatgttgggaacagcccat

SEQ ID NO: 60124 - DNA, 612 bp, Glycine max
  Clone ID: PAT_MRT3847_25303C.1
ggaccacaagcaaaatcttttttttccaaatccaactaagggcccctcgatcatttttccttatttcaatttagagataaaaaaggacggggaactatgccccacccaggcaacaacccatatatttggtaaaccaaaacgatttgccactaagcgattttgcttggcccacattttaaaatcacttccagacccggagccttaaagaggaaaaaggaatcttttccctcttttcatcactggggactatgcccaaaagaaaaagggtctttccaagagggggaagcccatcttcaaaatgggaaaagtcctggattttatccccactttcagggggcgaaactccactgtcaggaggagcccttggaatcggactcttttgggacacccaacctttttgaacaaatataattccagccctatttgggcattgggaggaggccctcagaaatcccccattcaaagacaaaaaagcagggccccattggaacttgtgaagcaacaaattggcagttttttcttccccccatattggcaaagcagcaaaaaaagcctttacacaaaatagctgacagggcccaccataatttactggatttgggggtacaagcc

SEQ ID NO: 60125 - DNA, 1008 bp, Glycine max
  Clone ID: PAT_MRT3847_25304C.1
ctgcacttgtgtctcttgcattgtttggtgcttatgtgagcagagcaggcatcaaaacagtgaatgtgatgaccccaaaagtttttataggtttgattgtgggagcaatgcttccctactggttttcagccatgacaatgaagagtgtcgggagtgcagctctcaaaatggttgaagaagttcgtaggcaattcaataccattcccggtcttttagaaggaagagcaaaacccgattatgcaaattgtgtaaaaatttccactgacgcctcacttaaggagatgatccctcctggtgcattggttttgcttacgccacttattgccggaacattctttggggtagagactcttgctggggttcttgctggttcactcatttccggtgtgcaggtggcaatttcagcttcaaacactggtggtgcatgggataacgccaagaaatacatagaggctggtactaccccacatgctgtatcacttggtccaaaaggctctgatgctcacaaagcagctgtcataggtgacactgttggagaccctcttaaagatacttcgggtccctcacttaacattttgatcaagctcatggcagttgaatcattggtatttgctccattctttgcagctcatggaggcttaatctttaaattactctgatctggagcttttcatgcaatcatctaaatccgattatgcattaccttcaacagcatctaatggagctgtgagattgattgtgcttgcttatgtgattagtagtctagcaaaaaatacatggtttgctttgatttcaccaatgttatgccagttattatctggaataaaattacatgatgtagattatgcaagttgagagtaggatcccatcgttaattatgggaatagtaattttctttgatttcaccaattttattccagtggaataagattacttaatgtagattatgcaagttgggagtagtatctcattgttgattattaatagaatagtaataagtattcatgg

SEQ ID NO: 60126 - DNA, 506 bp, Glycine max
  Clone ID: PAT_MRT3847_25305C.1
ctgcttggggggggggggggggaaagaaatctgcgaaggggcagagaggcagggaaaaccagcgacctaggcaaggcaacgagcagccgataaaaagttaagcatagcggcactgttgccatgtggtgatggccttaacggaaattatcaaataacattgaactatattgtatggccatgctaacggctggtattaaagtgccctaactagttatcttaggcggcggcaatattctatccgttaagctaactcgctaactggtggctttgaactaggtgtctgttatcagggctggctgcctactactaggctactggtttaggctaaacgtgttctaagaattatgccccgggttaaactggctcaatgttatgcttatgagttggggtttacggctatatcttagtcaactgctgctgttaatgcagggtatgataccagccaaaggcttttgttgacatatttagcaaggtatcggtctacccgtttgtgtgttaatgatctg

SEQ ID NO: 60127 - DNA, 462 bp, Glycine max
  Clone ID: PAT_MRT3847_25306C.1
cccctccctcttccccttcacttcacaccaatgttccttttcacttccccacactcccccttttaccgttttacctgcgttaaaccctcttagaatctcaccccacttttcactacatcttataacacaccttcccctgttttcctctgttttgcttcttctagagtaccctcttcctacatttttttccctcacttttcttccgtacccatttcccataattgtattttatcctcgaacatatcaatagttcctcgatcagactcatttgtacacgaaagttctcttttttggggtgtgtgtgatctgcattatagcagggttaatataaatggggattgggaagaacctgtctgagacaaaagggagggagttgtgtgaattgcgtgaagagaccaataccaacaccaccaacagcaataacaacaaatcgaggaggaaccggagacatcgtcagaggaa

SEQ ID NO: 60128 - DNA, 445 bp, Glycine max
  Clone ID: PAT_MRT3847_25307C.1
aaacccatgatcattgaatctccacgttataattgtaaataatggatttaattcatacaaaaccttaacggcaataatagtaaaatgcaatcgacaaggattaaacactaatagcagggcaaaaagattcattcaagactgaatggtgtagaaagtggtggctgaagaatgatagagggcgaaccaccgtattatacacaaaatcatgctgtaggctgctggtcagcggcatgagcatctatatggggtgcttatgcgaggccattataggtgggatccttaggatgtacatcaggtgcaccttctgatgcgtatgcagttgctcccgatgctgcgatcatatccacattcggattatctttggccgattaagcacgagccgccgaggcaagaatcatgctaagagaggagctatgctggagatccaacagcatttggcgaatcc

SEQ ID NO: 60129 - DNA, 318 bp, Glycine max
  unsure (1)..(318): unsure at all n locations
  Clone ID: PAT_MRT3847_25308C.1
gaanncccgggncggcccacacataaaaccacgcttccttccacgctttctctagtttttcctcnatttctctgcacttctaaaagggatgttttttattaacaaactagaccaccccaaacctctattaattattatatacattttttcttttacaaatttatttcaaattcttccaaccaacatttactaaatttttctacttccataaacaatactaaaaccataaaaacaacatatatattccctcatttatttaaatacacaatttaacttaaccttccaaatcttcttcactattattgttttttctttcat

SEQ ID NO: 60130 - DNA, 276 bp, Glycine max
  Clone ID: PAT_MRT3847_25309C.1
ggttgctactggatgatgcctaatttacacagtttttcgttttgcgcagagttgatcgaaatcctttttcttcggttatgttgaatttcaacagagttttgatttaggactcgagaaaattcttcggttattttcctttttttttctcctttttcctttttgttaaattgttttccttgtgctgaaatgttagggttggaatatcaatatagattggaatacgacggtagaagttaatagcgaggtttttcatctttattgtccaaatcttcgtag

SEQ ID NO: 60131 - DNA, 552 bp, Glycine max
  unsure (1)..(552): unsure at all n locations
  Clone ID: PAT_MRT3847_2530C.1
ggctcttgtaagcatttcctctgttttcaactgcaaaattataactgaatcttttaactgtgtgcgtgtgtgtgtttgtgtatacgggatgcaatgctagcaacaccctgatctgaaaggtgcaataaggttatgaatgaaaccagtgacaaaagctgtagatgattgtgttaagctatgagatctgagggcttcaaattccttttctccttccggatttcatccttgtgtctctttacttttgttgtctttaaattatatgtacatcaatgtttcttttattcttttttattttatttgtttattgttggctgtgttaattatttttcatatttagtggttggccttagcagttttaactgtactattgattgacctgcaaatctgcaatcatgcccaatgatgtatagagacttttgaatgaatggcttcatggttttgtaattttgttcataacctgatttgcatatttttctctcctttttcttgtccctcaccatcgtcctttcctcctctacttttacttctctctctgctctgngtttgtgttta

SEQ ID NO: 60132 - DNA, 369 bp, Glycine max
  Clone ID: PAT_MRT3847_25310C.1
gcaaaatttcattcctcaaatccttggctggggactctctttgcaacatcttgcaagaaaaagtcagtcatcattattatctacaaaagcaactaattacaccaaatctacttaattaggcaccagtagcatatccacttaaaggaagagaggtacagaaggtgcaaaatatattctatacattattcatttaagaaaaagatggataatatgtacaagatgctgacacagattataatatgtatgggtgccaactcatatcagcaacatcacgtgggacctcctgcactgttgagtgaatgaatgctactagcctgctactagcttcacattaaatcgggttcacataaatgagtcctcatatttttg

SEQ ID NO: 60133 - DNA, 177 bp, Glycine max
  Clone ID: PAT_MRT3847_25311C.1
gactctactcaactaatctaattttttgggcggggtttttatgaaataccgtcatgtattatatcacttccatttgatttccatatgcctcattatgagtgttagttttctacatctttcttgaatggaaacgcaagcaaattgcttttgtttttttaccaccacgcttttttaacg

SEQ ID NO: 60134 - DNA, 385 bp, Glycine max
  Clone ID: PAT_MRT3847_25312C.1
ggttgttatgataaacagcctttgtggcggtgatgaaatattgatgtgtgaaaggacacacctgctgttgccttgttgtcaaaggatggcaatttgtaaaaaagatgcttggagggttgaatgtagaatacttaatgagattccgcttacagcaatgagcaatagaatttttagcggggtgctcattggatatagatagattacatgcctgggattggataaggcgtccatgactgtgtgtacaagaacgaccgaacattagaagctttgagagtgcatgcataagataactaatgtagtgcttgtacgagcataatgggttgttctaggaacgaaccatggacagagaggctttcaagggattcattgaggtcagaaacaaact

SEQ ID NO: 60135 - DNA, 1407 bp, Glycine max
  Clone ID: PAT_MRT3847_25313C.1
ccacgcgtccgacggctgcgagaagacgacagaaggggaagcagtgagaagtcgcaaggaggtgcagaatggctgatgcaggtgcagaaggagcatcttcttccacggtaggccaaattgacgttttctggcacgaagggatgctgaagcatgacacgggcaatggcgtgtttgacacggggatggatccaggcttcttagaggtgttggagaagcaccctgaaaactcagacagagtgaaaaacctagtgtctattctcaaaaggggtcctatctccccttacatttcttggcaccttggtacacctgcaaaaatccctgagcttttttcttttcacactcctgaatacataaatgaactggtagaagttgataaagaaggggggaagcagctttgtggtgggacatttttgaaccctggatcatgggatgctgcacttcttgctgctgggactacactatctgcgatgaagcatttactgaatggggatggaaaagtttcctatgcattggttaggccccctggtcaccatgctcagccttctcaggccgatggctactgtttccttaacaatgcaggtctagctgtgcaattggctttagattccggctgcaagaaggttgcggtcatagatattgatgtgcattatggaaatggaacggcagaggggttttatcgatctaataaggttcttaccatctctcttcatatgaaccatggatcatggggtccatctcatccgcaaagtggctctgttgatgagctaggtgaaggagaaggttatggctttaacttgaacatacctctaccaaatggaactggggacaagggatatgtacatgccttcaatgagttggttgttccatccatccaaaagtttgggcctgatatgatagttttggttcttggacaagactctaatgcatttgatcccaatggaaggcaatgcttaacaatggagggttatagagaaatagggcgaattgtccatcttcttgcgaaaaggcacagtgcaggacgccttctaattgtccaggaaggtggatatcatgtcacatattctgcatattgtttacatgcaacacttgagggggttctcaacctaccaatgcctctactagcggatcctattgctttttacctagacgacgagacattttctgtccaagttatagaagccattaagaattatcaaaaagataaagtgcgctagtggagaaactcactagacacttcctctctgtgcgtgtgaaataaatgttgatacttttcaagaagggttaatatttatcgtgtaactattgagggattttcaaggttattttaaataaatttaatcttgtccagttgatcttttgattaaaaaaaaaaaaaagcggccgaaatagagaaaagaaaaagggcgt

SEQ ID NO: 60136 - DNA, 392 bp, Glycine max
  Clone ID: PAT_MRT3847_25314C.1
tttttgaggaataaacattagtatgataagatttgcaatagtaatatagttaatctagaaagcaatatgtctgcaaaaaccattccagtactgctaaaaagttgtagaaaatacagtggaaaccttctataagctctattctctttactgtcaatctagaagacttaagtctccaccctcttcaccccaacctttggctttggcatgaatgatggatacattgaatatgaattgcctagaggctgttatttgatacaacatcctcaaagcgaacaaaccattgatccatttgtggggtgtgaaggctgtttttgtttaccttttgaatcacaaattgtgcataatcaatggtgtttgaagaaggtacaaatatatttttactgggaggtgct

SEQ ID NO: 60137 - DNA, 1182 bp, Glycine max
  Clone ID: PAT_MRT3847_25315C.1
tttaaaaaaaaaaaaaatcattttttttcagaaaataaaaattctagaacacttccgagaagagaagagaacaaacacacgttggtcactcatttcccaatcaaccatgaccactaattaactagtaaactcgggaaaagcaaaaaaaaacatagcgtcgatggccactcttcaaatatttcttagttgcatttttttttttgaaaaaaacaatgtgagaatatatattgtgcggcggcacaggagatataaaagaaactgtacagtgccaaagagagtacgttaagaaacaaaaacacaccttcaccttccggatggatttttttttaaagacatgagactaaccttgacgagttgaaatcatcgaagaaaattttgtctcatccaacaaagttttttttttttttttcatatatacagtcaagaaatatttaagaaactgggtcatgcatctaccaactttgcgctagagcttgttggtcagcatggattttgggaagaagagaaaagcgaagggtcgagtttggctctgcagagagggcagagagggtgcttggagagccaggtgtcggcgcattccaaatggaaggcgtggttgcaaccgggaaccacccgaaccggttgctctgttccgatctcgtccaggcagacggcgcattcgtttcccatgagaaggtcctttccggtgattctggggagcttgtcgagctgggaaggggagattccggtgtcggagacaggcttggccggtagcgcggggtcggagtggtggttggtggcgtaccagagaaggcacatgtagacgatgaaaacggcgctcatgccgaggcacggcaagaaaagcgccagaagcacagaatcgagcatgtccagtttaagggtggagagggagcaaatgatgaagatttttaaaacatcagaggtaaggtgatataattccaaatgactgttaaaaaatgttggtgatgagagtgagtgatgagtagcaacatattgcagaataatggtgaagaatgacaatgaaaaagaagaggggagagtgtggggaatggtttgtgtttggttgtttgcattccccttctgtcgtcttctcgcagccgtacggacgcgtgggttatgcttcactcatgaagccgtctttaaagggaagccaccggagccgctgtacccgacccatcgtcg

SEQ ID NO: 60138 - DNA, 1814 bp, Glycine max
  Clone ID: PAT_MRT3847_25316C.1
gggcgtcgtagcgtagaggaagtcgacgagggtgtgtgtgtgcgtaagcgtaacaaactaaactagggttacaaacaaccagatcttcacgcaaacttctgatttgagttttactcctttagatctgcaaatcaatttctgattttcatttaaacgcttggccgaattgtggagctgccaaagcaaaacacttattattatgtgagagcaataatgggctctggaaatatactaccttcttctggcagctctgacatgtctatctccgagctccgcgagaagcaccattgggagctagaaaatctgactctgaccacacaacctctcaaaacgttgaaattcttcacattagctgttattcaatacatcaagaaaacagcaatatatctattggcaaaaggtggatgggttatgcttttcagtgttgcagttgggactcttggcatagtgctgatgacccttggttgcctccatgagaagcatcttgaggagcttcttgaatattttcgctttggactgtggtgggttgcccttggggttgcttcttcaattggtctaggatctggtttgcacacatttgtcctatatttgggtccccacatagcactgtttacaatagtagcagtgcaatgtggccgagttgatttgtgggctacccttattgatgccagtatattattcacaggttccgcttagcagcattttgcctcaagttcagctggaggctattctatggggtattggaacagctataggggagcttcctccttacttcatgctggaggctactctatggggtattggaacagcagatgccatggaagaactggatagcgaagaagggcagcacgcttgtccggtgggagagttggtgccatggaagaactagacagcgaagataaaagagtcttgagtggaatcaagtgctggtttctatcacactcgcaacatttgaatttctttactattctagtgcttgcttcggttccaaatcctctatttgaccttgcaggcatcatgtgtggacaatttggcattccattttggaaattttttcttgcaaccttgattggaaaggcaattattaaaactcacatacagacgatattcataatctcagtttgcaacaatcaactccgtgattggattgagaatgaatttatttgggttctcagccacatacctggttttgcatctgtcttgcctagagtgactgctagtctccatgcaatgaaagataagtatctgaaagcaccccatccactttccccaaataaacaggggaaaaaatgggatttttcttttgcttcagtctggaacactgttgtgtggctcatgcttatgaacttctttgtcaagatagtgaatgcaacttcccagaggtatctgaagaaacagcaggagacacagcttgctgcattaacggaaaagtctaccccaacagactcagacgcacaatgaattgtttatgttctgcttgtattgcccttttttatgcggtttcttctgcaagcagaaagttgaaattcaaattacagcaattccttatgtccccatagtagttaccccaaaaatctgcgttagaggtcctactaggaacttctataggaatggatatacacagtaggcaagttaaagttgcaacttttattttaattgtgtaactttggggcaaccattgtttggattttagatttaaccccatattaattgctgctctaatggaattatgggagttctattcttttgcaatggcaagacaaatgattagttccttcatctctcactagtaaagaacaaattgttctgtctcc

SEQ ID NO: 60139 - DNA, 262 bp, Glycine max
  Clone ID: PAT_MRT3847_25317C.1
ttcagcactgaggacaaattagtttcatttctagatagaatacattgtcctttttatttatgttgtttttttaatttaagtcatctcaacctttttggacgcgggggagggagaatcatgcggattacatgtcaaattagaataggttgcaacttttgtataagtggcgaatcgcatacatagactgcctcaggctgtgaccctctttagtaaattacctgcctaatatctcctaatcacaactccaacatcaacataaatt

SEQ ID NO: 60140 - DNA, 511 bp, Glycine max
  Clone ID: PAT_MRT3847_25318C.1
aattcggctcgagaaacaacccgatcttcacgcaaacctctgatcaatccacgattgattttcattttcaatgttattctcctttgaaacacttgccccgtagctgcaaaagctaaaacacttagtgaatgagagcaataatgggctctggaaatatacgaccttcttcttccggctgctctcacttgtctatctccgagctccgcgagaagcaccattgggagctagaaaatctgacactaacctcacaacctttcaaaacattgaaattcttcacattagctgttattcaatacatcaagaaaacatcattatatctattggcaaaaggtggatgggttatgcttttcagtgttgcggttgggactctcggcatagtgctgatgacccttggttgcctccatgagaagcatcttgaggagcttcttgaatattttcgctctgggctgtggtgggttccccttggggttgcttcttcaattggtcttggatctggttagcacacatttgt

SEQ ID NO: 60141 - DNA, 852 bp, Glycine max
  unsure (1)..(852): unsure at all n locations
  Clone ID: PAT_MRT3847_25319C.1
tggccttcaaaatatttatatctgaacaggttgatgctgccattatagaagttggtcttggaggtaaagaagactcaactaatgtgattaaagaacctacagtttgcggcattacttctctgggcatggatcatactgagatattaggagatactattggacagatagcttcacacaaggcagggatttttaagcctaaggtacctgnctttcactgtaccccaacctcctgaagcaatggatgttatccttgagagggccaaagaactcatggttccactggaagtgactgaaccttttgatcgtgaacaaatgaagggattagagcttggcttatcgggtgatcaccaattctataatgctgctcttgccgtctctctttctagatgctggcttcagagaacagggaactggggaaaaaaatatcaaaaggattctaatttgccagatgagtttattagaggactttcaactgcccatttttctggaagggctcagattgtttatgactcttctccaaattctgactgctcagaaatcttgtctaaaaattgtggtggagagttgatattttatttggatggagctcatagtccagagagcatggagacttgcgcaaagtggttctctaatgccgtaaaaagatatgaaatttcatcacattcatcttttgaagtagaaaatgcagaggaatctttagaaaatggtcacttcctacatgaaagcaagacattggagcagctggagaaatcttttaggcggattcttctattcaattgcttagatgtgagaaatccccatattttgcttccacggctggtaaatacatgcgcttcttcaggtatttatttc

SEQ ID NO: 60142 - DNA, 649 bp, Glycine max
  unsure (1)..(649): unsure at all n locations
  Clone ID: PAT_MRT3847_2531C.1
tagggtgaacaccatctgagaaagagcgactgaccgtncgcactggcaccgccgtaccgtaagccttggactgctctagagcggccgccctccccccccccccccccccccccccccttgagacaaggttttcacgttttttacgtgaattttggctcccaaaacggaacaaacacaccactaaatcaagctgttaaatgttggggttgtgttattttttcaaaataagattaagaggctagagaatattttcattcattactcattgatgtatacatgccaatatttaacaatagagacgttctaaccaactccaagaaagacaaaaattgctacagccaatctcaccctcgctacacttctcaccatctaacaacctcgccctgtaatgaaaaagatccatatgatctgcagaaatcacgtaggaaatgacgctaaggaacatatggtttttcaggccattgatactcaggcaacccagctttcttgcgagcttctcttttctctttgtctttcttctccaacagtttatcagttcttgcaataaaatcatccctgatcttctccataattttatcaaaaccagcaattgaattctccatatgttcgtacacatcattgttaagatcatcgaatatcttatacaatc

SEQ ID NO: 60143 - DNA, 497 bp, Glycine max
  Clone ID: PAT_MRT3847_25320C.1
caacaaccttgtcctcaaggttgaaatttgggaattggctttggatgaaaatatcatttttccaagtcacattctcaactagactttccttccacttgatcaagccttgtcaggctgtagcacccattttgtgacacttctttggcctaaaacggcctctggttcaatgtcagtattagttggaattaccttaacttagcctttcttaattgtaagacgtgaaaaattggatggattgaagactatgatggaagttggaatttgtaagcaacttccccacttaagtattttgtcagtcataatgctttccttgctcaattcttttctgcattttgatcaatgaagtagagttaaactgatttatggtgggttgcattttctgagtggtgttggttatctatggtgacagtaattcagtggataaattttatagaagtaactcaagtaagcatatgtatgtaatcactgcatgtaactctactccaataattcaaaac

SEQ ID NO: 60144 - DNA, 318 bp, Glycine max
  Clone ID: PAT_MRT3847_25321C.1
aaccattaaataaaatgccttggagaaatgacttaatacaccaatggtctgaccagagccattcttattaagaggtattagggacccacacaaaccttttccttcttaaaaagaattcctggatttagcattcctttttttcaagatggccggttattaaccggggctaaaagaacgaacttggccagggaaggtcatggggcttaattaacattcatttcttcccaagttggacccccaacacaattgcttttggtccttccaccacccatggtcttaggtcccaagccaattttggaagggcccctgggaccttta

SEQ ID NO: 60145 - DNA, 386 bp, Glycine max
  Clone ID: PAT_MRT3847_25322C.1
gactgagcttgatagcccaacgaacacaaaaaggatacacaacatggaggatccgggaccaacatctcatctgggaacaaaacacggcccctaatgacaaactagttattccgacgaaccatgaaccacaaaaacaaaaacatagcttaaaagaacagataagcaaacgcccagatatgtgacaagtaccatggcacaaaatagaagcctcccgggttttcgcgctgcgccaaacagtgaaacatttcgaccccgcgatcaggaggttcaccgtttcgcacaaaagaattgcaatcgggccagacctgaaacccaaacgggcttaaaaaaaacggttgcggataagagacggaaaaagaattttccggacaaaaatgcggggagaa

SEQ ID NO: 60146 - DNA, 358 bp, Glycine max
  Clone ID: PAT_MRT3847_25323C.1
agggaaacttttatttgcaaccctttttattgggaggaattccccccttacaattttataggccacgggtgcaattttgcctcccaggggatgccaaaaaaaccgggaatttgattcagggggaaaaaaatgaacctcaagggaaaacaattttacaacataaggacaaattttttcgggaaaaacatttaaccccccatttactggttaacagtaaaaaaaaaccttaaaattccccgaattatgtctacaggctactattatgggccaaccaaattttcccacagcagaattaattcaaaactggaaatgccccataagcaaaaaaaccctaaaaaaaactttaaaattccccatt

SEQ ID NO: 60147 - DNA, 1166 bp, Glycine max
  Clone ID: PAT_MRT3847_25324C.1
gtgagaaacatggcttccttaagctccttagtgctgctccttgcagctctaattctatcccctcaagttcttgcaaactatgagaatcccccagtgtacaagcccccagttgaaaaaccaccagtgtacaagcccccagttgagaagcccccagtttacaagcccccagttgagaagccaccagtttacatgctccctgttgagaagccaccagtatacaagccaccagttgagaagcctccagtgtacaagccaccagtagagaagcctccagtttacaagccaccagtagagaaacctccagtttacaagcccccagtggagaaacctcctatttacaagccacctgttgagaagcctccggtctacaagccaccatatggaaagccaccatacccaaagtaccctccaactgatgacacccatttctgaaggatgtcaagaggtgtattgagtatatgctaaataagaggtgctcaaaatgtatttatagattacaaattattgcaagggttgctcttagcttcttcatttcaagcttttgtttacactttgcagtgctatggcaaagataagagtatcatggatggaaaaagggggggggaaaaatgtttgctttgtacctcggccgcgaccacgctaatcactagtgcggccgcctgcaggtcgaccatatggggagagctcccaacgcgttggatgcatagcttgagttattctatagttgtcacctaaatagcttggcgttaatcatggtcatacctgtttcctgttttgaaattgttatccgctcacaattccacacaacatacgaacccgaaagcataaattgtaaagcctggggttgcctaatgatttgacctaactccacattaattgcttttgcgctcactgccccgttccattcgggaaacctgtccttgcccacctgcattaataatccgccagccccgggaaaagccggtttgcttgttggggccctgcccttcctcctcatgaatccttccccggtctttcggtgcgggaacgtttcgctcccccaaggggtatcggtttcccccaagccgggaaacccggaaaaagttttaacaaaggccccgaggccgaacctgaaagcctttctggtttttccaaggcccccccccgaaaacggcgaatggaccgtt

SEQ ID NO: 60148 - DNA, 224 bp, Glycine max
  Clone ID: PAT_MRT3847_25325C.1
ctttgaaccacgctagagaatcgttcttcttatatattcgcccgaagtcgttatccttacataggaactttgatcaaccgtaacatgtagctaatgctccgttattcatatctaagcgtattataaaaagtctcacactctttgtcttatcatgcataggaaaatcctgccaggacatgaacttagactccatgctagggctgtgacgaagtgctaaacccagc

SEQ ID NO: 60149 - DNA, 609 bp, Glycine max
  Clone ID: PAT_MRT3847_25326C.1
cttttctgtcttgtgcatccttagtcatttctcatattactacagtcaaggtatattacattcatagatgatgattaataaagctttaataaacaagagaagatgagtacttaggcttccttaagctccttagtgctgctccttgcagctctaattctatcccctcaagttcttgcaaactatgagaatcctccagtgtacaagccaccagtagagaagcctccagtttacaagccaccagtagagaaacctccagtttacaagcccccagtggagaaacctcctatttacaagccacctgttgagaagcctccggtctacaagccaccatatggaaagccaccatacccaaagtaccctccaactgatgacacccatttctgaaggatgtcaagaggtgtattgagtatatgctaaataagaggtgctcaaaatgtagttatagattacaaattattgcaagggttgctcttagcttcttcatttcaagcttttgtttacactttgcagtgctatggcaaagataagagtatcatggatggaaaaagggggggaaaaatgttgctttgtactccaaattatgaataatagaactttatattatttatc

SEQ ID NO: 60150 - DNA, 1119 bp, Glycine max
  Clone ID: PAT_MRT3847_25327C.1
cttttctgtcttgtgcatccttagtcatttctcatattactcaagtcaaggtacattacattcatagatgatgattaataaagctttaataaacaagagaagatgagtacttaggcttccttaagctccttagtgctgctccttgcagctctaattctatcccctcaagttcttgcaaactatgagaatcccccagtgtacaagcctcccactgagaaaccaccagtttataagcccccagttgagaagcctcctgtttacaaacctccagttgaaaaccccccaatttataagcctccagtagagaagccaccagtgtacaagcccccagttgagaaacccccagtttataagcccccagttgagaaaccaccagtgtacaagcccccagttgaaaaaccaccagtgtacaagcccccagttgaaaaacccccagtgtacaagcccccagttgaaaaaccaccagtgtacaagcccccagttgagaagcccccagtttacaagcccccagttgagaagccaccagtttacaagcccccagttgagaagccaccagtatacaagcccccagttgagaagcctccagtgtacaagccaccagtagagaagcctccagtttacaagccaccagtagagcaacctccagtttacaagcccccagtggagaaacctcttatttacaagccacctgttgagaagcctccggtctacaagccaccatatggaaagccaccatacccaaagtaccctccaactgatgacacccatttctgaaggatgtcaagaggtgtattgagtatatgctaaataagaggtgctcaaaatgtagttatagattacaaattattgcaagggttgctcttagcttcttcatttcaagcttttgtttacactttgcagtgctatggcaaagataagagtatcatggatggaaaaagggggggggaaaatgttgctttgtactccaaattatgaataatataaagttctattatttatcagattattaatcctaaattactttagagtgatgtttattatgaaagtaaaaccacacgaattgtacgaaatataaaatggacgattaacgttataattttttaaaatacatattgatta

SEQ ID NO: 60151 - DNA, 1642 bp, Glycine max
  Clone ID: PAT_MRT3847_25328C.1
ggctcgagatgaaatgatcggctacttagaaggtgaagggagtaagtgagaacttctgagaaacgccgccaatggcgcattgctcacttttcctctctctcagacgaaatagcggtttggcttgtctcctgaaccgaacaagattcgtgtcttcgggtgctgtgagcagtgatttggtggaagagagtgtggaaggtgttgatgatgacctaaggagcagaatcttcaggcttaggctccccaagcgaagcgccaccaacgttcttcagaaatgggtcctccaagggaatcctgttacgctctctcagcttcgggatatatccaaagagcttcgaagatctcaacgttacaaacacgctttggagatatctgagtggatggttagccatgaggaatacgagttatcagactctgattatgcagcccgcatagatttgactaccaaagtttttggcattgatgctgcagagcgctactttgagggtctacctcttgctacaaagactgctgaaacatacacagcactcctccattcttacgcaggagcaaaattgactgaaaaggctgaggaactttatcaaaggataaaggattcaaacctttcctttgatgcccttacttacaacgaaatgatgactctttacatgtcagtggggcagtttgaaaaggtcccatcggttgttgaagaactgaaacaacaaaaggtttcccctgatatctttacttacaatctatggataagttactgtgccgccattcttaatattgatgaagttaggaggattcttgatgaaatgagtcatggtgctggttctaatgaaagttggataagatatttgaacctggccaatatatatattagtgtaggtcatcttgataacgcaagttccaacacacttgttgagactgagaaaaggatcacccaaaggcaatggataacttatgacttcttaatcattctatacggtgggttgggaagtaaggataaacttgatcagatatggaattccttaagaatgaccaaacagaaaatgattagcaggaattacatctgcatcatttcttcctatctgatgcttggtcataccaaagaagtgggtgaagttattgatcaatggaagcaatcaacgaccacggattttgatatgcttgcctgtaaaaagattatggttgcttttagggacatgggcttggctgaaatagccaacaacttgaatatgattctcattgagaagaacctcagtcttggaagtgattaactaggagttctccgagcatgaatgtaatatagaatatatatagatttgagatcaattttgcaaccttcggaagggaaaatatattttactcgcaatttgctaattcacctggaatgaataaatatgctgagcgaatggatgtcatgcaatgcttttgtggatgtacaagatttcatcattgcttctagctttttcatttttatggtgcccttggctagcagcatctttgatgttgtgagaacctttaatttcgcctttttctgattttgtagttatattgctgctggtatttttatatttcttcctaaaaatttggatgtgttttgcattttcattcttctagaactagttgttaaattgaatattttccaacttttactgtt

SEQ ID NO: 60152 - DNA, 957 bp, Glycine max
  Clone ID: PAT_MRT3847_25329C.1
tccacgcgtccgaacatggcttccttaagctccttagtgctgctccttgcagctctaattctatcccctcaagttcttgcaaactatgagaatcccccagtgtacaagcctcccactgagaaaccaccagtttataagcccccagttgagaagcctcctgtttacaaacctccagttgaaaaccccccaatttataagcctccagtagagaagccaccagtgtacaagcccccagttgagaaacccccagtgtacaagcccccagttgaaaaaccaccagtgtacaagcccccagttgagaaaccaccagtgtacaagcccccagttgagaagcccccagtttacaagcccccagttgaaaaacccccagtgtacaagcccccagttgaaaaaccaccagtgtacaagcccccagttgagaagcccccagtttacaagcccccagttgagaagccaccagtttacaagcccccagttgagaagccaccagtatacaagcccccagttgagaagcctccagtgtacaagccaccagtagagaagcctccagtttacaagccaccagtagagaaacctccagtttacaagcccccagtggagaaacctcctatttacaagccacctgttgagaagcctccggtctacaagccaccatatggaaagccaccatacccaaagtaccctccaactgatgacacccatttctgaaggatgtcaagaggtgtattgagtatatgctaaataagaggtgctcaaaatgtagttatagattacaaattattgcaagggttgctcttagcttcttcatttcaagcttttgtttacactttgcagtgctatggcaaagataagagtatcatggatggaaaaagggggggaaaaatgttgctttgtactccaaattatgaataatagaactttatattatttatcagattattaatcctaaattacttt

SEQ ID NO: 60153 - DNA, 150 bp, Glycine max
  Clone ID: PAT_MRT3847_2532C.1
atttcatgcaaaagacatacggtggagtcgatgactaccgacgccgcagcacattattagagcccatagcataatggtgcaatgaagaatcaatatgatattgtctctaataatgtgcttgcagcttcagtagtcatcaactcgaccgta

SEQ ID NO: 60154 - DNA, 690 bp, Glycine max
  unsure (1)..(690): unsure at all n locations
  Clone ID: PAT_MRT3847_25330C.1
ccacgcgtccgccttgatgtgcatggatgaatcgtgtgattggttacttccaccttctctgttctctattctttaaaatgttctgataaattcagagcctgcaagatacagttgctcaattcactattatgaattatacgacagaagagctatcagggtcagaagatggtagccacatttttgaggcaattggtttattgattggaacagaagatgtcctgcctgaaaagcaatctgattatctatcttctttgctcagtcctctttgtcaacaggttaatttttacttgaaaatgcaagatactttctaatccaaaaaaataataaacaaaaaactgcaagatacttaaaaaacattcttgtccccatttcctgtttccagaagcatttcttcttttgagattattacggttggtatttggtgcatgtaatttcctattctcgtttgatacaggttgaggcactgctcataaatgccaagttattgaatgctgaggagactaatgccaaaattgctgtaatccagcaaattattatggcaattaattctctcagtaagggctttagcgagcgtcttgtaaccgctagtcgccctgcaattggtatcatngttaagcagacattggatgtacttctttcaagttctttgttatatttcccaaagttgaacctctgcgaaacaaggtcaca

SEQ ID NO: 60155 - DNA, 121 bp, Glycine max
  Clone ID: PAT_MRT3847_25331C.1
gccccaactaccttgcgaccccacagcgaccctctttcagtgctatcaggcctcgatgcccgtcagacccacacgtactatcatttttaaatgggctcttgattaatcaacccatattttc

SEQ ID NO: 60156 - DNA, 354 bp, Glycine max
  Clone ID: PAT_MRT3847_25332C.1
ccggactgaattaatggctggaccagctaactaactggtgggcggccttccttttttttttttttttaaaaaatgctccctatggatcgtatactcattaataaacgagaggtaccttaatgacaaaaactattatttctcacgcaacaaaatggtgccatgagaagtgtacccatcaaacgggtctaaaaagaaagaaggggccctacgggagtgcttattgatgataaggctccaaggttaattccttaaacaggattacagactggacgggggggaatcatactccgctaataagaccaaactggaagatgagtcctaaaggaacagaatacagcctctgaagagcttcat

SEQ ID NO: 60157 - DNA, 441 bp, Glycine max
  unsure (1)..(441): unsure at all n locations
  Clone ID: PAT_MRT3847_25333C.1
cggtagagaatgccttttatagacttcattgaagaatttgttacgagataagcgttgattccttgaaaagaccgttgtctcacagtggaagataaggctacatggcaagctctaatttgggagagattgcatgatagtacaaacaacgagtttttgcgtagggaatattctacgagtaccttctattttattttatttgggcttttccttaaattcaaaatgttagcacttcaaaataaagagagacaaantgaatttgtgtaggataaaacacgtgcacttccctttttcagttatcatagactttttgctcaatgcagatcatttcaaaaggtgtgtgagtttcttactagttggatgcacagaataaccaaaacacattgtataacactgattatcttaaaaagtggacaccttttgatttttaatgcatacatgcta

SEQ ID NO: 60158 - DNA, 408 bp, Glycine max
  unsure (1)..(408): unsure at all n locations
  Clone ID: PAT_MRT3847_25334C.1
accccccccacacacnaacaccncacccaccacccanccnnncaaacatncanacnncaacncaccnagcacannacaccnccacacacnancancccccnaacacnatncacnncacactcacgacnncaaaccaccnccccaacnccccngcacanccgcnancncncacaccannaccnancacnncacnancngncnccnnccnccagnnacgnccnaccnnccanngccacggcacacnnncgcaccncncancnnngccaacacanctacnnangnccnccncnggcacnganncnncaccaacagtccnnccncanagcaccaacangccacancnccncnnaccgcnccncagncaacnnncncccanacnccnccaacacccnacaaccncccacnncc

SEQ ID NO: 60159 - DNA, 123 bp, Glycine max
  Clone ID: PAT_MRT3847_25335C.1
cagagtttggaacgcacgcgtacttgataatcagttgccattgattttcggcgaagtgatggcacagactaacaggacttggcccacggctcctacacggcctgaagccttatttggtggatt

SEQ ID NO: 60160 - DNA, 315 bp, Glycine max
  unsure (1)..(315): unsure at all n locations
  Clone ID: PAT_MRT3847_25336C.1
tttcnttttttctttttttttttttttttcccataggacgagtcctttgtcaccatgtttggcgggttttgcgtccattcttttgatattttgcaactttttgcctttgttttacatgttcccacccattttgaaaatttttcatctgatatccattttgatttttcatctgctccctttgtaatttctgcttaggccgttttccttttcctgatggggtcttttattttaccgctggcgtgttgtttctcttttttttggggcccttccccgttgtggttgggtgcttccttttttctcttgcgcttttttcgt

SEQ ID NO: 60161 - DNA, 1320 bp, Glycine max
  Clone ID: PAT_MRT3847_25337C.1
acggctgcgagaagacgacagaagggggattttagattagagattgagagggaggagtacgtggaaggcattttgacctatcgctcgcgcgaaaccaaatctctttgtttctcttaattcctttatagtagcaagtgaagttgaagttgcaggtgtgtgtctcatggcgtctgttattcctcgatgccttcctcccccaattccaattgcacaccgacgaaaggcgcaggtggtgaaatcgtgtcaccaaaacgagagctctgcttcggctcacacagaccactcctcaaatccaaaggaactccgagtaacagtttccaggcgtaattgtctctcatgtttgtgttctactatagttttgattagtgattgcgccatgcctatttttttaccaaaggcatccgctgctgatggaaatggaatcatggaaaaacctgtgtgcagaaattgcttgggaagcggtgctgtgctttgtgatatgtgtggtggcacaggaaaatggaaagctcttaaccggaagcgagctaaagatgtttatgaatttactgagtgtccaaattgttatggtcgaggaaagcttgtctgccctgtttgtttgggaactggtttacctaataataaaggtctcctaaggaggcctgaagcacggaaactgcttgataagatgtataatggacggctacttccaaactcttagaagccgtaaatctgagcaaagggcttgctaatgctctgctttttggaaatgattgggatgttcttcagttaacaaagccatactgcattggttatcaacttctagcacagatcatgtggaggactttgcttatatttttggtctggatgcattccagaactctaaccatcggcttggtcatcaaccttatgtttttcatggttctgtatgaaaaaaaggtccattattcgatgctacaatcctcataatcatgcagatccaattgacttacaaaatcccatgtataatgtaaacattgagcaaatacttccagcaagagtagcttattcaggctcttatttagttaccaagtaaatatgtaaaacctacatgttcatgcgcctcgtgtacacctaagaggtattgtgtcgttaacgatgtgtaataactaatatgtagcgcttttacgaaatttattacagtagttttaaaaaaggaaaaaaaaaatatcggccggctcgatgcattcctccactctaaccagcggcttgtgcatgaacctgtcgtttttcatggttctgtatgaaaaaaaggtccattattcgatgctacaatcctcataatcatgcagatccaattgactt

SEQ ID NO: 60162 - DNA, 485 bp, Glycine max
  Clone ID: PAT_MRT3847_25338C.1
tcggcggccgcccggttttttttttttttaaaccaaaatttttcaaattttgacaacccacaaaacccaaagggaaacggggtaacacaagaaacacaaaagacccggcaaacagaaaaagggatactcactaaagcacactcaagcaagaacaaccaccactgagaaggcaactaccgaagggacacaagaccaaaagcagcaccactgacagaacacacgcccgtatgacgcaccagaagacacagcagtggcacatttggaacagcacgctagagcaactcaaaacaacagcaacgctaaggacagggcaaaccattgagaccaccctacaagatggatatgacaccgcgaaccgacagaaccaataaccaacccatcgaagcagaaagagaatctgggtatggaccgacaccaccatgcatcatcgcaggaaaggacaagaaagaggccaaagactactaattaagcgcctagaaccgcac

SEQ ID NO: 60163 - DNA, 288 bp, Glycine max
  Clone ID: PAT_MRT3847_25339C.1
gagtgacttaagggacttatctcaagtggcgcttgatccttgctttcagagggtaattattcctatttggtggattactttcagcattcccaagcctagttgtgacgctatcacattgtcgagaaacgctataacctgacctctcctttgcgttcaaactttatttgattaaaacatggaacttttgacacccttgatcctatattgtgacacgtcatcatgacagaattgacgtaaaacaagccgtcctccacttgccatgctacttaccttatcaccggatgatca

SEQ ID NO: 60164 - DNA, 226 bp, Glycine max
  Clone ID: PAT_MRT3847_2533C.1
gtatgaatgaaccactcgaatggaaccctgtataataagatttgtaccacccacaaaccatgttgtgattctggcacctactacaggcaccagataggaaactttaaatgtgagctacacctcggtgtctggaccaaaccacacagggccactaaattatatttgggctgcgactcataatggaagaaggctgctattacaacatttgagtgggacatcgggggcg

SEQ ID NO: 60165 - DNA, 433 bp, Glycine max
  Clone ID: PAT_MRT3847_25340C.1
tacggctgcgagaagacgacagaaggggaatatactatcctcttgaactagggttcaacatcaaagaacaaagttccaacgaggagacgacctataaacacacaaaaaatggcaaggaacgtgggtttaaatatgataggatactccaccattgcaatggttttcataattggtgtaactaaagcaacagaatatatggttggtgacaacttcggatggaacgttgcctcctatgagagcttctatatggactgggctcgaaccaagagattccatgttggtgacaaactcattttcagctggagcggagagcattcgttgggaattaggaaagacgatatttattacgagaattgcaacaccagcttagaaggtggtctcacgtacatatttaatggtgcaacgataaattatactattggttctacacctg

SEQ ID NO: 60166 - DNA, 841 bp, Glycine max
  Clone ID: PAT_MRT3847_25341C.1
cttgcatagcctgcagatcacaacaattatacataagcatatgggcaattaccatcagatcgtaacatgaaattagtttcaaaagtttggatatgaacaaacttagccatacaatcaagtgaagaaatccatagaagagaagggagagaaggttgatgactaatgggatgcacttggtgaaccccaaatgtgtatttacagtaataatttaggcttataacaggttcagtaacaccacaagtgtcacacatgtagagtgagaacccttttttttttaatgagtatcactgtacacctcaggtctcatttatacatgaaaatatactatgtagtttagggcacattttttaagctttttaggggaaaaaagtgatttaatgttcaaaaatgtgaatgtttttagaaattttttcaaaacctatcattatagattcctaaatcctaaaatatatattttttatattctgatttccttaaatgcttacccaaacaagttagcatatttcaaatgtgatctttttaaggaaaaaatcttgaacaagcacactcttaatagtacatattgaacaagacctcttgctccctaggttctaaaggttttgatgaagaaaaagcaaacgacaagaaaattagacaagagtcagagacttgggcattttatgttacactttatagttctagctgagcctgacttgagagatcaaactgactgaataaatttaaaatcaggttttctaaaggtaaaaatttaataagtaaacactgattttgatgtttaaaatatgagcacaaggtttttcaaaaagaaatttcgaaaaaactaaatgagggaaaaggaatc

SEQ ID NO: 60167 - DNA, 1146 bp, Glycine max
  Clone ID: PAT_MRT3847_25342C.1
ctcgagccgaatcggctcgagagagaatgtaataatgtatgaaatgaagaaggggaagaagggaaaggtccattcaacattattgccacgcgtccgcggacgcgtgggttcagagaagagaagaggttttgcatcgcatcgcacagagatgaattcaattacaagaagcggatcgcttagtatcatcctcgttgttttcttctctttgcacttcattcttggtttttccgacgactcatcacctgcttcaaaagatgctacaaagacagaacctcatgccggaagaagcactagtgctatagttatcattgtattaattgtgcttgtgttcttttctttgttctcctttgtactttttaagctgtggcggaagaagaaaagggaggagcaatatgctcgtcttttgaaattatttgaagaggatgatgagttagagcttgagcttggcctaagggactgagactcacctttggaattcaacatcttcaaggtttctgcgagttttattattttgaaatgggttatgctaacaagtgcaaggacacttgttaaaattaaaaaatcgaaaatatatgataaaatgcacacaatattacagtactttcaattttagatccttaataagtgtccttgtagcccttgttagcatttgccttttaaaatttttgctgcttgcccaagacggatacgacgttggactgaggttaagacttttttggagacaagaatcaatttattgtttgtaatgctattcatttatttgtcttttcatggatatttgtttatctaaaaagtaggaaaagagaaggctaatttgcacattgattggatggtgtcatcaagagtatgatacacctgaaatttgttgatatgtatgatactgtagtcttgacatgttataggtaaatatatgatgtccatgaatgaatggcttgttataaaaaaaaaaaaaaaaaaaaaaaaaaaaaaaaaaaaaatctacctaacatccacaactcaaaacttctccacacacaccaaataaactaaaaaaaccctacacaaaaaaactaaacaaaaaaaaaaaaaaaaaaaaaaaaaaaaaaaaaaaagggcccccccccaccttcacccccccccccccccaaatataattccccccccacc

SEQ ID NO: 60168 - DNA, 1870 bp, Glycine max
  Clone ID: PAT_MRT3847_25343C.1
ctggtttagacgctgaagatattgctctattatttgaagcaataaagccagcattgcaggatgctgaaggtgtcatgcagaagaaggcatacaaagtactttcgatcattctgaggagctcctccaatgattttgtttcatcaaagtttgaggagttgcgtcaaactatggttgaagttcttccgtgtcatttttctgccaaacgccatagacttgattgcctttacttcttaatagttcatgtctcaaagtccaaggatgatatggagcactggcgagacattttccttactgaaattatacttgctcttaaagaggctaataaaaaaaccaggaacagggcttatgatattctcgtcgaaattgcccgtgcatttgcggatgaagagagtggtgggaacagagaaagcttgaataatttttttcagatggttgctggacactttactggggaaactccacatatgataagtgcagcagccaaagggttagcccgtttggcttatgagttctctgatcttgttttaacttccttcaaattgctccctggcacacttactctcctgaggagtgataacaaagagataatcaaggccaatcttggtttttttgaaggtattagtagccaaatcacaagcagaagggttgcaaatgcacttgaaaagcatggtggagggtttgttgaagtggcaagacaactcaagaaatcattttaaggctaaggttaaacttcttttgggaatgcttgtcacgaagtgtgggctcgaggctgttaaagccgtcatgcctgaagaacacatgaaacttctttccaacatacgcaagatcaaggagcgaaaagagaggaatcgaagtgctaaatcggaagaaactagatctcatttttcaaaagcaaccacatccagacaaagcttgtggaatcatacaaagattttttcggattttgatggggatagtggcaatagcaatgcagaatacatgatttctagagggagcaaggctttcttacatccaaaatcagcagcatcttcatttaggtccaatatcagactgaagaagaatttgcctgagcacttgtctgaccaatcagatgatgagccacttgatttgcttgatcggaagaaaacaaggtcagctcttaaaacgtctgagcatcttaaaagaaagtcaaggttagatgatgaggtggaggtagattcagaaggacgtctgattatccatgaggaaggggaatggaagaaggaaaaacatgcagatgatgattttgattctaggagtgaacgtgatagtcacatatctgcaaagtctggaactaaagcccagaagcggagaaaaacatcagattcaggttgggcttacacagggaaggaatatgctagcaaaaaggcaggtggagatgtgaagaggaaggacaaacttgaaccgtatgcatattggccacttgatcggaaaatgatgagtcggcgaccacaacagcgggctgctgcaagaaaaggtatggctagtgttgtaaagatgaccaaaaaacttgaaggaaaaagtgcctctggtgtgttgtccataaacagcttgaaactaaaaagggctcacaagaaaggcagcaaggaaaataaaaaaacagctcgagcgtaggttgattttccctgatttgcaagtatatttgataatcataatgcattcgcattatgccaattttgaaactaccctgtgctgtatatcgaagataaattaaattgaatcaaatgcttgtctttttttttttttctattgtttatttgatgagaattttggtttgcagttttctttgtgaaatcaatttagagttctgatattaacattagctaaagatggacggtagaaattctgttac

SEQ ID NO: 60169 - DNA, 206 bp, Glycine max
  unsure (1)..(206): unsure at all n locations
  Clone ID: PAT_MRT3847_25344C.1
tcatcttacactactatatgtaaacacaaaatgtatatatgaaaacaccttctttacttcactttctatggtctcttacttcactcaaccaccccacacatcacttctcaggcgaacagacatcatcaaatcctcaaaaatctcttttattcaccacccttancgtctcctcacacacacaagctcacccaatcaacccccacttt

SEQ ID NO: 60170 - DNA, 701 bp, Glycine max
  Clone ID: PAT_MRT3847_25345C.1
caagaaatcattttaaggctaaggttgttttgcttgtctcatgatctttttttctggatacattttcattgatttgtagtgggtgacagctgtttcagcattgaagctactactcctattgtaaacagtgagattcaatttttttcaggttaaacttcttttgggaatgcttgtcacgaagtgtgggctcgaggctgttaaagccgtcatgcctgaagaacacatgaaacttctttccaacatacgcaagatcaaggagcggaaagagaggaatcgaagtgctaaatcggaagaagctagatctcatttttcaaaagcaactacatccaggcaaagcatgtggaatcatacaaagattttttcggattttgatggggatagtggcaatagcgatgcagaatacatgatttctagagggagtaaggcttccttgcatcccaaatcagcagcatcttcatttagggtccaatatcagactgaagaagaatttgcctgagcacttgtcggaccaatcagatgatgagccacttgatttgcttgatcgacagaaaacaaagtcagcgcttaaaatgtctgagcatctcaaaagaagtcaaggttagatgatgagggggagctagattcacaaggacccctgattatccatgaggaaaccggaaatggaggaaggaaaaacatgccagatgaagatttttgattct

SEQ ID NO: 60171 - DNA, 521 bp, Glycine max
  Clone ID: PAT_MRT3847_25346C.1
atttattttatgaaatgatgataaactgataatttatgatattcatgtgattagtataaatttgtgatagtactgtgatatgtttgtttcgggtgcgtaattagtttaccacgatgtagtttttttcaaacatttactgcgatcacaattgggtgcaaatttaaccattatagatcctttccatttatttgcgtgtcctgtaattttaattaaattgattgaaccattatgttgccaaagtaacctttattgcgtaaattaatttaattaaattgcatggatgttagtatgaaattatttatgtgaattgtgatcggcccaaaggaagacacaatttggtcaaataataacatacctgcgatgataaatatgtgacaattataaagttttttttgtgaataatagttggtaccaagaaaggttattatttgacagaactaattgtcaatatttgatcattgcattgagagtaccaattacaaattagtttctctgtccaaagactagaattaatgttgtgt

SEQ ID NO: 60172 - DNA, 249 bp, Glycine max
  Clone ID: PAT_MRT3847_25347C.1
gacccaaacgtcagcccagccgtcaggattagggagaatccactagatcgtatcacggttcattgtcagcaagagttaagacagcttgctcacaatcattacgctgccataaataccctgtctgagcagatatgataattggacaattcatctagcaatacgttaaaatgatcacatttatctcacgacctccagccatcatcttagcaggcaacatccatcttcacgtactgagcatcaggctcagtc

SEQ ID NO: 60173 - DNA, 522 bp, Glycine max
  Clone ID: PAT_MRT3847_25348C.1
cccgcatgccagccagtcaacagcccaacaatcattagaagaagaaaaaaaaaaacaaagattatttgcgtactctttaggccttcaatggcagtaacattacgggattatgattactgccttttgtacttttgggctcgttgccagggaaataattctcttcgattttgttttttctaaaggaagttatattaaaatatattttagaatttcctaaaaatagagtaaattttaaagtaaactaatttatatataaggtattctaaacatatagttgtaaagaaggaacgatgtaaggttctagtgaaatattttatactctaaagaaatagctatatataagagtttgaatttaattagaatataaatgagattcaacatgattgatagataactgagcttttaaaatatgttgtagaagtatggttcctgttgtcggttaggggagtatcctcggagaaaaaaaaatatgaatttaattgtatgattattgattttttaaaatattttttttctaaacca

SEQ ID NO: 60174 - DNA, 1634 bp, Glycine max
  Clone ID: PAT_MRT3847_25349C.1
acatgcctctcggcaacggatatctcggctcttgcatcgatgaagaacgtagcgaaatgcgatacttggtgtgaattgcagaatcccgtgaaccatcgagtctttgaacgcaagttgcgcccgaagccattaggccgagggcacgcctgcctgggtgtcacacgttgagtagctttgccccttgttttcgttctgctatggcacccgatgccgccgccgccgccgccgccaacggcaaaaagagaagacgctatcttcctcacaataaggcagtgaagaagaagggttcgtaccctctgcggcctggcgtgcaaggctttttcatcacttgcgatggcggcagagaacaccaagcctctcgtgaagctctcaatattctcgattccttttatgaagagctagttgatggggaaaaggagttacccagcaaacctttaaataaaaaaatcacgtttgctgattctgactcttctagtagtgatggtgaggaagaggaggaggaggaggaggaggaggaggaggaggaggaagcccttgcatgatggggatgaggaaaagggggataaaaagccaaaattggatacttctagtgacgacaatgccagtcatgacgatggagcaggtgaaaaatcagatcctcataacgttgatgaaccgcacactcaggaagaaaataaaacttgtgataataaaggggataatggcaatcttaagactacaaaagggacagcagatgatctaccagctgtgaaacagtgctgcaaaacaaacgtgcctgcatgtaattttagtgacaaagtggaacacaagtctattgataagttaattgaagaagaattcaaagaattgggagacaagaataagaggcgctttgtcaagcttgattctggttgtaatggtgtagtatttgttcaaatgcggaagaaagatggagaccgaagccccaaggatatagttcaccggatagtgacatcagcagcatcaacagggaaacatatgtcaaggtttattttgagaattttgccaattgaagtctcatgttatgcttcaaaggaggaaatttcaagaacaatcaagcctcttgtggaacagtactttcctgtggaaactcaaaatccactcaagtttgctgtactgtatgaggcacgggcaaatactggtgttgacaggatggaaatcatcgatgctgtggcaaagtcagttcctggaccccataaagttgatctcaaaaatcctgataaaactatagtagttgaaattgccaggactgtgtgcttgatcggggtcattgagaaatataaggagctttccaagtacaatctgaggcagttaacatcacgtaaagactaagccttcttgcagcattatagtacctttcccttttgcttcatgttgatactctggtctgtgactgttgttgtcatttggttaagtgttagattagatgactcttgcagctagtctcctttgactgagtgtagttagtaagttctcacaaatcaaacgagaaacccttacatggaagtagagttatatacgctcaatccatttaaatatcatagttggatttacaatatttttaaattgaatttcagccgttgagattcacaaaaatattttaaaaaaaaaaaaaa

SEQ ID NO: 60175 - DNA, 408 bp, Glycine max
  Clone ID: PAT_MRT3847_2534C.1
gccacgcgtacgaacaaaaaccctaaaaatgccgtcgatggggaggaagcgaatggtatcaggcaaatattgtatatccactcgagccacactttgaagcatcaacaaccgaaaaccgaatatgccgctcaagaatacgaagaaatctacgaggaagttgaggaagaagaggaagaggacgacgtctaagaggaagaagacgaagaataggaagaccaggaaaacgaggaaggggaagaagaataacaagcagaatacgacatactcaaacaacagcagccgcaacagctagacgaatacgacatgaccatatcgaaacttctggagacgcattgcaaggaccagcttatgaaacttctttgcgacacagtggataatcaccgcgacgtggatgagaggatccgacac

SEQ ID NO: 60176 - DNA, 1595 bp, Glycine max
  Clone ID: PAT_MRT3847_25350C.1
cccacgcgtccgtacggctgcgagaagacgacagaaggggaattcttaatataataatagagattgtagaaattagcagtaactggtgttgagtagctttggtcccttgtttttgttgtgctatggcgcctgatgctgccgccgccaacggcaaaaagagaagacgctatcttcctcataacaaggcagtgaagaagaagggttcgtaccctctgcggccaggcgtgcaaggttttttcatcacttgcgatggcggcagagaacaccaagcctctcgtgaagctctcaatattctcgattccttttatgaagagctagttgatggggaacattcaagtgtaaaggagttacccagcaaacctttaaataaaaaaatcacgtttgcagattctgactcttctagtagcgatgatgatgatgatgatgatgaggaggaggaggtgcaggagggggatgaggaaaagggggacaaaaagccaaaattggatacttctaatgacgacaacaccagtcacgatgatggagtacctgaaaaatcagatcctcataaagttgatgaaccacacactcaggaagtagatgaaacttgtgataataaaggtgcgaatgacaatcttaagactactaaagggacagctgatggtctaccagctgtgaaacagtgctgcaaaacaaacgtgcctgcatgtaattttagtgacaaagtggaacagaagtctattgataagttaattgaagaagaattcaaagaattgggagacaagaataagaggtgctttgtcaagcttgattctggttgtaatggtgtagtatttgttcaaatgcggaagaaagatggagaccgaagccccaaggatatagttcatcggatagtgacatcagcagcatcaacagggaaacatatgtcaaggtttattttgagaattttgccaattgaaatcgcatgttatgcttcaaaggaggaaatttcaagagcaatcaagcctcttgtggaacagtactttcctgtggaaactcaaaatccacacaagtttgctgtactgtatgaggcacgggcaaatactggtgttgacaggatggaaatcatcgatgctgtggcaaagtcagttcctggaccccataaagttgatctaaaaaatcctgataaaactatagtagttgaaattgccaggactgtgtgcttgatcggggtcatcgagaaatacaaggaactttccaagtataatctgaggcagttaacatctcgtaaagactgagccttccaggcaacccgtatagatgtcgttcttgcagcattataatggcttaacgtatttaggcttccccttaacttcatgttgatactctggtctgtgactgttgttgtcattttggaaagtgttgaagattagatgatgactcttgcagctagtcctttgactaagtgtagttagcaagttctcacaaatcaaacgagaaaagaaacccttacgcggcagtatagatccattaaaatatcatcatttgaatttacaatggttttttaataaactttaaattgaatttcagccgttgcgatttaaaaaaaaaaaaaaatatacaaaaaaaaataaaaa

SEQ ID NO: 60177 - DNA, 1041 bp, Glycine max
  Clone ID: PAT_MRT3847_25351C.1
ggctcgagagatcattagcacctgacaacactgaatcaccaccatcctcagatccaaatagccctccacccctgaagctgcatagtgaccttgacctagacacccccccttgatgatccaccacccacgcctcattgtttctctcatcaaacccaacaacacttctgtccccttctccccgccggacaacccttctcttttttcttcctaaaaagcttcccaatcttccaaaacccaccaccaccaccatgatgatgcctcttgatctcaacacagctgctgctactcctcctcagccccagaacctcatcctcctcctcctccttattggccttattgtgattcaaatgctgaagaaccactggggtactctcattgttattctcattctcaatgaggaatgagaccctcccaacaccccccacctcaacagtgcatgagttgcggtgggaagagaccatctcatcagagcaagaacatgaagaaagcctttgctccccacaatcagaacacacaagcttgaccaaacggtccttgagacagtaagcacatattccaacagaagaagaagaagaggggtgtttcttacatggtgtgaattcagaggtggagtagtagtagcaatccatgtcattggtgtaagcctgatcttccacacctttgtttctctccctcatggctttcttcaagacggaggtgcctcaagtgtaaagtgaaaaatatggcaaggggtttggtttggtttagtttagcttagcgctgagagaaagagaaagaaaaaaagggacaccaaataatacttggcttgtagaagcagcttcctctacgaagctatgagtaaaaagtagagaattctgaatgtgagtgaatgaatgaatgaataaagagagagagagagaggaagcacaaggcgtttcctttacgttttctttgcaggaaaaaacagtgataggaaggaagagaaagaaaaaaaaaggagtgatgcaagaaatgaaaagaaaaagaaataataaagcactagctcctgcaggcattattatg

SEQ ID NO: 60178 - DNA, 622 bp, Glycine max
  unsure (1)..(622): unsure at all n locations
  Clone ID: PAT_MRT3847_25352C.1
aagaataagatactcacatatccactgatgacatgatacgagtaatatattgacgtaaatggagattgaaaatgaacaggtggaagatacagggtgaaattatggaaggaaactagaaaaagttgcatgacaagggaattggtcgtatagagtgagtgaccttaattacacaggcacaggcacaggcacagcgcggctgtggacaacatggggcctggttcttggatagagatacaatagattagccttggagttggaatgatcatcttcctcaaaataacaatgtttatcctcctcaattgttcccatctttctcacctcaggttctgtgtaataactcattttccttctattatatttatatttatacacagaagccctcgttaacgtttcatttcttatcattggcactaatgatgntttggttcctcacgggcattgttcccgaaagctcctccctcctctggacaccccaacgcccaccactccctttgacgtgtaactcctttgctttcttcagtaccctgataggacttgaaatgtagtgcttaaacttgctttgcttcttctttctcatactgaaatgacgatgaaaggtgcatttggggtaactgctaaatat

SEQ ID NO: 60179 - DNA, 303 bp, Glycine max
  Clone ID: PAT_MRT3847_25353C.1
cggccggcctttttttttttttttgacacaactgtgttttgttaagcacgaattctacatccgcatagaacacacactagaatcctgtaaaaaccccatttccttgagcctacagaccatgatgatctggccccatttttgggtttttttttaaccgttgacgatgacattgatgtcatctgtcccacagatctagaggattcccagggctgacctgcaccatctactaacttcgctgttgataactctctccgaaaggctgtatccgccattttcatggtcagctgtgaacccaaaaccatt

SEQ ID NO: 60180 - DNA, 182 bp, Glycine max
  Clone ID: PAT_MRT3847_25354C.1
ctcgagccgtgagcataggtggaactactactttactctcaatagctgtaccaggaggcaatgtcacagttttttcatgcaatttctgcatgaagaagttcttgaatgcgatgcattaggaggcgattacgaacgttataagattgatacgggtgtatttagaagatagcaatctcaaaggt

SEQ ID NO: 60181 - DNA, 1018 bp, Glycine max
  Clone ID: PAT_MRT3847_25355C.1
gtacggctcacctttcttccctatcttctacatttaagccgattcatcaaccttttcaacttgagatgccccttttctccactcactttgtttcacattgctgctaaagcaaaattcttttttttttggttcacctcagcatacatacaatagcatatgatgaagaagaacaacctcagttgctgtgtgttgttgcacttcctttgctgttgtctccttttgccagctcttgttctctcccaccacatccatggaaaccctgcaagtaacatttttgacattataaacaagaatctaacagatcagaagcttcctcgcttgaatgacagccctggtctagggtgcatggccttacaatacgtcgaattatgcaaagggaactgcactgacaacaatgttgtaaactgcaaacctcctgaagatgacttcaccgaagtgtttgctcccaactgcggtgtagagctaccgacttttggcaccataaccggacacatagtgggctgtcaaagaaagtatctcgagccatcactagcattttctgaagttctcatcaaagatgagaaatctttgtctcttctgaaaaacaaatcacatactgaggtgggagttggcctggttggactccacaaaggacctttcttttggtgcgttttgtttagcaatggaaagacaaactctacatttgtgcttgaaaatcatggtgcgggaatccagcaaaaaaaagggtgttatagtgggagtactactccgtgcagtagggggcagaaaagtagggttgcattttttaacatctttttcatgtgttatgtctccattttgctgtttaaactttggtgatcaacttaaaataatgcaacatcttcacgcaacaattattgaattagttttctttgttttgttcatacttatgaattgtttactgtgtatgctggctgtgtttcacttgggatttttatgcttaaggaagcttttcacgcaagctttgtgaagataaattaatagaggcttggcgcctagc

SEQ ID NO: 60182 - DNA, 449 bp, Glycine max
  Clone ID: PAT_MRT3847_25356C.1
ggtgtgtataccttttttattttttttttttttttttttttttttttttttttttttttttttttttggaacaagggcccctaattttttaaagcccccaaagaaaaaaccaccttgggaagccccttacctgacttggtgaccccccgctcgtacttccggggggggagccagggccccttttttaaccccttaaaattccttttaatgggggggggccggggtaattttttaaaggggaaagaaccccctgatgttctcccggggattaggaaacttaaagggccttctttcccctttggggccccccaagaaaacccccctttgggccccaatagtcccaacaatggtgagtccccgccttaacaggttctctttccctggtggttttgaagaaaccccctttgggggggaaagatctttgggacccttgaaaaataatttttccc

SEQ ID NO: 60183 - DNA, 719 bp, Glycine max
  Clone ID: PAT_MRT3847_25357C.1
ccacgcgtccgctctcgcaggaaaccctgccaatgacatagttgacattataaacaagaatcgaacggatgaaaagcttcctcgcttgaatgacagccctggtctagggtgcatggccttacaatacgtcgaattatgcaaagggaactgcactgaaaacaatgttgtaaactgcagacctcctgaagatgacttcactgaagtatttgctcccaactgcggtgtagagctaccgacttttggcaccataaccggacacattgtgggctgtcaaagaaagtatatcgacaactgcggtgtagagctaccgacttttggcaccataaccggacacattgtgggctgtcaaagaaagtatatcgagccattgctagtgttttctgaagttctcattaaagataagaaatcgttgtctcttctgagaaacaaatcacatactgaggtgggagttggcctggttggactccacaaagggcctttcttttggtgtgttttgtttagcaatggacagacaaacactacatttgtgcttgaaaatcgcggtgcaggaatccagcaaaaaaaggggtgttatagtgggagcactactccatgcagtggggggcagaaaagtagtgttgcattttttaacatctttttcatgtgttatgtgtccattttgctgtttaaacttttgtgatcaacttacaataatgccagatttgcacgcgacaattttt

SEQ ID NO: 60184 - DNA, 758 bp, Glycine max
  Clone ID: PAT_MRT3847_25358C.1
gttaaacatcttcgcagcattgagtctattgttatagccaagatggacggaacaacaaatgagcatcccagggccaaatctgatggattccccactcttctcttcttcccagcaggaaacaagagttctgaccctattcctgttgatgtggaccgtacagtgaaagacttttataagttcctcaggaaacatgcatcaatcccattccagctccagaaactagcctcaactactaaaaccgccagtgagagttctgatgtcaaggagagccaaagcagcaccaccgaagtgaaggatgaattatgagagataaaggatatttctatttataaagatatatgattcagacagatgataaccgagtgaaaaggtgcttagcaaagaaagtgacacaacgattgggagagaaagccgtctatttttcctcacccttccaaaagacaactagccaagtagagggtagtgaaaaaatgaggtaacctgtgtattagtttcttcaacttttacatgtttgagtattagaattttggttgagactttaattttaaaaatggctcgaaattttattgtatctgcagtcaattttattttcggtgtcagattatttggttatttttgcccttagtaggttaagctagttgataaaaaaattgaactttcattaaagaatgggtttgacatgcaaggcaaattgcatggattgtgttgttatttgcttgtacaaaagttattttaaatatttcacaaactaccgacaa

SEQ ID NO: 60185 - DNA, 408 bp, Glycine max
  Clone ID: PAT_MRT3847_25359C.1
tttttacactccaatccgatttaactattattatttttttgggtgtgggggagaaaccctatgtactggcaagcccacaatttagcgttgtagctagtgacatataattgtgtaactttgttttagtatcgattatatatcttcactcagactatatgaatggctaggctgtggtatttgcattatacattgacatggttataattttctatgaaagtgaaagtttcgtgttgatttcttgggtttctctgcaatgatcagtcttgccatcattgttgccgtctctctgacttaaactcagtcgcaaatcaggcgcccattgcttctctttctgcaatttttcttgattcgacttaatccgaaaaagaggctccaattctagctttaaactgttggaatagttacgat

SEQ ID NO: 60186 - DNA, 314 bp, Glycine max
  Clone ID: PAT_MRT3847_2535C.1
attagtttctctttttcattgggtttgtgagcttagcacaacatgagacctcaactatggtacctcgaagtcgctcctttctctggttggccggcctctggatcctcgccttggctcaggctgaatctcatttcaaatgctttgattccgtgatatgatatgcgagctctaagactcttccatcggatccagtctcgctacgatcaccaggctcactcagactctatctcttgatataatcgaatgcacacacaagtctcggggatcagatcacgagaaagcgtatttgctcaggaacttcgatttcagggact

SEQ ID NO: 60187 - DNA, 301 bp, Glycine max
  Clone ID: PAT_MRT3847_25360C.1
tttgactctgttctgcggctagggttttgtctttcactcactctcttctctttcttttcttctcatttcccttctctttcgatctgaacaataataattaaccatggaaccgtcgctgaggtaacctttttcttctgcgcggagctgttctcttttgttgattgggtacttttttttctttctgagaagggctagttgttgctgtgtcacgaaataatggcgactactaatccctttgatttgatgggcgacgacgccgaggacccctaacagttgaacgcggtggaccaactgaaggccc

SEQ ID NO: 60188 - DNA, 335 bp, Glycine max
  unsure (1)..(335): unsure at all n locations
  Clone ID: PAT_MRT3847_25361C.1
annanaagttgcnacacgcgtacgtaatctcggaattcgncncgagattttctcgcattcccctnncnngttaccgttgtnctctnctnaccgctgtnncggtcncttgnnnccggngctgnnanntcanncannctcccgnnatncgtcgtctgcggcgcctccgcanngccgntgaatcagtngtngcantctcagtnccngtcctcctaccggtggcnanganggtggagcatgctatggatatgtanggcgacgttataatngacaactancactggncnncgcagnacgattctcgcaccnatcacgaagtgctctcntagntncgncan

SEQ ID NO: 60189 - DNA, 624 bp, Glycine max
  Clone ID: PAT_MRT3847_25362C.1
ccacgcgtccgatatgcagcacctgatcatgtcacatttgtatacacttacctagagaatgactagctatcatgcagcattgtgctccaggaacagttactgccagcaattgtacactgcttactatggatggagcaaggtctatacctgccactagagccttattctacaacgcttaattgtgatacaaaaatgaacagtccctgcggaaggacattatgcatcaaatctaaaatcaccactgaggcttcagcacaaggatgaaaaagagctcactaaacaagattaatgggtggatgggaacaagttcatacccataaccccttactatggtagatgcctgctcatcacaaagatcactgattgatgatgctatcaggtagaaacttagtacacatgcgcacttcagcactctagggcagtagattatcttacagtagaaggacaattcagattgtggcaattgactgagtggagtgtgacatagaatggcaatagctcataaactgagcattgtcttctattgcatagcacagccattggcgattttggagattgcaagactgtttctctatgcgtgaaacggctagtgtacacaaatgaaaatggagaatatgccaaggg

SEQ ID NO: 60190 - DNA, 168 bp, Glycine max
  Clone ID: PAT_MRT3847_25363C.1
gagggtcgacgcacgcgtacccctacgcgtgcggacaaaatgcattctgcaaaacgatttagaatccaaaatctcgagttgggaacataaaatggtacctttggatccaaatactttatattaatcattattgatgaatctcaactaggcctaccgtccttgtgtaag

SEQ ID NO: 60191 - DNA, 485 bp, Glycine max
  unsure (1)..(485): unsure at all n locations
  Clone ID: PAT_MRT3847_25364C.1
tctcaactcttatccccccaatnatatataaaaccaaaaacccacctaccttgatgcatgcttgcgttgcttgttcctatattacaattacaattttcaaagacaaacatgtccgagaatattgactccaactctccttcgctttccctctttctctgaaaggtatggagtgctttgacttctggaagagataatggtgcagtgcctagacggattaaagcatttgtgtgctgctctgataaattgttgtgatgctgattcgtcaaagcaacctacaggtttagaaaatcctgaagttcttgcaagagagaccgtgtgaagaatttcagttggcattgttcaagacgaacaagaaagagagcttatttgcagatagggtgtttgactcgtttgatacaaagcacaatgggatacttgattctgaagagttngcacgtgctctctctgtctttcatcccaatgcaccaattgatgataagattgag

SEQ ID NO: 60192 - DNA, 665 bp, Glycine max
  Clone ID: PAT_MRT3847_25365C.1
gtttcattctaatattctttccataaatataataattaattcagtcagttttgttattttgggttacaagattgttcaattttgcacctcacctgcttttaaatcaaatccccccaattatatataaaaccaaaaacccacccaccttgatgcatgcttgcgttgcttgttcctatattacaattacaattttcaaagacaaacatgtccgagaatattgactccaactctccttcgctttccctctttctctgaaaggtatggagtgctttgacttctggaagagataatggtgcagtgcctagacggattaaagcatttgtgtgctgctctgataaattgttgtgatgctgattcgtcaaagcaacctacaggtttagaaaatcctgaagttcttgcaagagagaccgtgtttagtgtaagtgagattgaagcactgtatgaattgttcaagaagatcagcagtgcagtgattgatgacggactaattaataaggaagaatttcagttggcattgttcaagacgaacaagaaagagagcttatttgcagatagggtgtttgacttgtttgatacaaagcacaatgggatacttgattttgaagagtttgcacgtgctctctctgtctttcatcccaatgcaccaattgatgataagattgagt

SEQ ID NO: 60193 - DNA, 270 bp, Glycine max
  Clone ID: PAT_MRT3847_25366C.1
tcgttaaaaaaaaaaaaaaaaacaaaaaaaggagaggaaaaataaaaacaaaccacgacaaatcacaaaaaaacagatacaatgtgggttgccgcctgtggcgggccaccgctaacctcccgccccccatcctatgggggggtcccttcgtgggggccaccgaaatcgaccccggggccccgcgtttaacagcgtgcttgagggggaaacccctggcgttcccgggctcgtcctcccggcggctatcccgggtacgcccggttggtgtcc

SEQ ID NO: 60194 - DNA, 1594 bp, Glycine max
  Clone ID: PAT_MRT3847_25367C.1
gaacaatcacaggattgttcatttttgcagccatttcagcgtataaaaaccaaaaacccacccaccttgcatgtttgcttgttcctaaattacaattttcaaagccagacagacaaacatgtccgagaatattgagtccaattctccttcgctttccctctttatctgaaaggtatggagtgttttgacttctggaagagataatggtgcagtgcctagacggattaaagcatttgtgtgctgctctggtaaattgttgtgatgccgattcgtcaaagcaacctacaggtttagaaaatccagaagttcttgcaagagaaacagtgtttagtgtaagtgagattgaagcgctgtatgaattgttcaagaagatcagcagtggagtaattgataacggattaattaataaggatgaatttcagttggcattgttcaagacgaacaagaaagagagcttatttgcagatagggtgtttgacttgtttgatacaaagcacaatgggatacttgattttgaagagtttgcacttgctctctctgtctttcatcccaacgcatcaattgatgataagattgagttttcattccaattgtatgatctcaaacaacaaggttttattgaaagacaggaggtaaaacaaatggtagtggccactctagccgaatctggcatgaatctttcagatgatgtgatcgaaagtattattgacaagacatttgaggaagctgataccaaacatgatgggaagattgacaaggaagaatggcgaaaccttgtcttgcagcatccatcccttctgaaaaatatgactcttcaatatctcaaagatatcaccactacatttcccagttttgtttttcactcacaagttgatgatacttgaggcaaactacagcatccatgtcagtttcagtgttcttgactgggaatggtcttcgattgacttgtgaatgatgaccgggttctatgtgaaggattcggtacggggtggatatggagtttatttatattttcattacaagtagaactttgtcttcccgtttttggatggatgaggtttgtagattgaacaaatgggtttgattatttatttatttgcttcatttgagaataaaagggggaacaaaatagaatattcaggcatttcagcattagcactttggaattaattttggtgagaaatatgtttaccataagtcttgtgcaattgcttcagcaatctgtgaagagttctttgagcacatgccctgggttgagaattgctgctccaaaaaacttaagtgcatgtcagttgttgtgcttaaagccaactctagctttcctccttgacagaaagataatgcccctctctatccaatttatttcactcttatattggccattaccaactttggctttcctcctggacaaaaatataatgccactttctgtccaatttctatcactcttatatttgccattatttttgtctaggccattggcgattaaaaattaatttgcagcctatgttttcttgtaattacattttttttttgcaagtgtatgtatttgagaaattaattgaaaaacattattttatgagtgcctaaaaaa

SEQ ID NO: 60195 - DNA, 491 bp, Glycine max
  Clone ID: PAT_MRT3847_25368C.1
ctagctatctcgatcgaactgtccaaggtcctgtcacggacacggcgcagtaatgatcggatggtgtgtggccggggtggcagtgttattggtattacggccaagcctaaccgactgatggtaactaacaatagcagtggcacaacacaacactgcacctgctgaccaggacccacaaagatttgcataccaggttccgaaggcaccacaacctgcaaacaacgcatagtttaacgaggcataacaacaacgattggcgtttgctgcatggcatgcgacatacgggcgtgagggcagttctaaaccgaggaaaggaacgctacaaaacgtaagtgggagagggcgccataatcgttggttgctgataccagtaaggagtgtgcttagagagcagcacaacacacatcgacagcccgggtgtgagcggatagatacgcctcacaatattgggccccagtgcagggttaggtacgacgttggagaaagggata

SEQ ID NO: 60196 - DNA, 253 bp, Glycine max
  Clone ID: PAT_MRT3847_25369C.1
cttggttgctccagtcactgcaaaagctgtaagtatggacaactatgttggtgatttgtttcaatgtccatttacataaataacttcgggtgttatcaactcttttcaacatccttttggtgagtttactaggagttatttttatcttttttttaaacaaggtcacataagaacctaatgtatattgttattgtatgtaaagtgtaaactcaatcaatacatataatggtctagtaaatcttggttattgcga

SEQ ID NO: 60197 - DNA, 467 bp, Glycine max
  Clone ID: PAT_MRT3847_2536C.1
aaaacaaaaaaacccaaaccttataatgggttttaaaaaaaacaagcatatgtttttaatgggcacaaaaacaattttttatccaaaaacaaaaccccgccggggttaaaacatatataaacaaattttggggggagcaaaaatccgggaaaaattcaacaaagggtaagggctctccttaaaaggaaaataccccgggaaaaaaacccatttgggtctttaaaaaagggggaccccacggggagaatccacaagggcactaatttcaccaactttaaaaacaaaagggggtttttaaaaagggttttggattgggccacaaccaaaaggaccgaaaacacccccgggcttgggggagctgcaatcggaaaaacgaaaggggaggcccccaaaggaggccttgcccaaaaaaatgtccccggggagggccttgaactaaaaaacccggttttctcggggggggccct

SEQ ID NO: 60198 - DNA, 326 bp, Glycine max
  Clone ID: PAT_MRT3847_25370C.1
cgggcgcccagcgccagacgctggagaagtcgacagaaggggaccgccagcaccgtccatgagagagaaccggggagataaaacgaggaaaaaagctcataggcaagcaaggcgtagggaatcatcaaccatcacagcgaaagaaaagccacgcaacccgcagagggggtaacacgataatcgatctaacgcacgccgggcaaaagcagagataaagccacgagccgagaagccggcgacggaaacaaaggtaaaaagcggacgagttacgcgctccaagaacggacccggaaaggatagccaaaccgtcctacgcagaccgagcg

SEQ ID NO: 60199 - DNA, 422 bp, Glycine max
  Clone ID: PAT_MRT3847_25371C.1
aaattgaaaaaagaaaagagccaattattggaccgaaccttccttgaaccggaattgaaggggttattccttaattgaacgggaccacttgggttggggaaaattcgaaattgaaatgtaaaccaaaaaaacccgaaagaataaatggattttttatttaaaaaaattaactaaaaaaattccccaatttgaaaaaaactgggtataatataacatcataagggttaataatggacaatccccggaacaattaaaattcgcccatatagaaattccgttggtccttacagccaaaacaataaccactttggccatcactggatctttggtctttaatatccaatgcttgtccctgaaaacatttgcagcaggaaaaataaatgaggtgaaaacaatggttgtggatcccaaaaactgaaaaa

SEQ ID NO: 60200 - DNA, 452 bp, Glycine max
  Clone ID: PAT_MRT3847_25372C.1
ttgggggggggggggggggggggggggggggatcgtaaaagagggcgacggacggataggagaaaggcagcgagaaaaaaacgacctagataaggcaaaaactggggagcagagagaactaaaagagaacataagttaatgtgagaagctatggggttgtgagagagaaaagcgcgggtaaggaggtgtctagcgatatgaggctgctgaagatagcgatgccaatatagaatgctagcaggcctgtgtaaaaactagcggaggaaggattggaccaagtggcaaacaagtgatgcggaattttacgttgcaatacagctaatgcaccgctatgacaaatacggagtgtacgcggccttctgataaaaacaatagctttggtacgcaggccagatttggggccgcaggtgcgacgtagtaggttggttttaatgcgcattaaaagcagccaa

SEQ ID NO: 60201 - DNA, 370 bp, Glycine max
  Clone ID: PAT_MRT3847_25373C.1
cataactttatttatatctagtttcaaattacttggttagcacttaataatcttgagcccttcaaccaacatatttcattttatttagtttataggttagactgaaatgttatctttgtgtattcaaatacgtgaagctgacatctttcgacttttttttgcagatgatctttgtttaaaaatttattggaagtttgcctcttgattaacattttatttgtttaaaataatatcatctttaattattaatgttgctcttcttatccttttaatattgctttgtaaaacaatttttttggggataaatatgatatattaacttttttttgcttgattcacaaaattctgcccatacctaaatttgcaacta

SEQ ID NO: 60202 - DNA, 269 bp, Glycine max
  Clone ID: PAT_MRT3847_25374C.1
ttctgccatgggttgggacgaccttggatctttatattgagctcactagtacttacaccagtggctgaacgtgtgagcttcatcacaaaacaagatgcctcttacactgatgccacagtaggcggacttatgaatgctacatgtgggaatgtgactgagctcataataccaatagctgcccttagaagaaacaaaattgctgtggttgagtattctctgatgagttctattctatcaaaccttcttctggtacttgggacctctctata

SEQ ID NO: 60203 - DNA, 280 bp, Glycine max
  Clone ID: PAT_MRT3847_25375C.1
atatattatcacaacctttactcacaggaagactggaaccatggctcttgaccttatagaatgcatcaaaataatgacttcgatagatagccaaaatgcttcatggaggggggggaccactgcataagcaattatggctgctgggcaagcctaacatcctttgcattcatgagcttccaattcagggtacacctttgcagaacattctgaaccaaccactgtgttaacaagacacgccggatgactaccataacactgttggacataagaccatggcctg

SEQ ID NO: 60204 - DNA, 406 bp, Glycine max
  Clone ID: PAT_MRT3847_25376C.1
gaagctcggtttttctagagcggcctctttttttgcactaaattcctcatacggagaggacgcgcggcctactggggtcaatgttttatgaaatattggcgaaattctccccttgcatgtgaatccacaacagtgagtctttagccatgaaaccgtcataaaaaaaaattgaaccaatccagaggtcatgaataccagtcaactaatcaacctacaataggtgaaaatcaaatcgatgttaaattagaccttctaatgctaaatcggaatctcatctaaaagacctttaaaaagcaagaaaacgcatgccccaaatactcctctcgaggataaaacattttttgtcacctattctctaacttcttgttgtgacacatcttattctcgccacttattctgggattct

SEQ ID NO: 60205 - DNA, 274 bp, Glycine max
  unsure (1)..(274): unsure at all n locations
  Clone ID: PAT_MRT3847_25377C.1
caaccaatggcttcttctctcagtntctccactcnccctctctgtcaccctagggtatgtaaacatttcaaattgtatnaatgggttgcataagttctcattcaatggacatgggtnggattttgccgttgtccgacacaacttctaaagttncccaatgctgctggtagaattagagctacattgacctctggaggaggaggagacctaggatctatctgaagagctctggttttgtgaccaatcatttcagaactggggcacagcttgatgt

SEQ ID NO: 60206 - DNA, 692 bp, Glycine max
  Clone ID: PAT_MRT3847_25378C.1
tttgaataccgagacctagagttcggagttctagtctagggttacgccgtcgtcgctgtttgtgtgtgtatcaggtgcagctaccaacgatggtgaagggtcgtcaaggagagcgcgtcagactctacgtgaggggtacaatccttggatacaaaaggtccaagtccaaccagtacccaaacacatccctgatccaaattgagggagtgaacaccaaagaagaagtaggatggtatgctggcaagaaaatggcctatatctacaaggctaaggtgaaaaaggatggaagccattaccgctgcatatggggcaaggttacgaggcctcacggcaacagtggtgttgtccgtgcaaaattcaagtcaaaccttccacccagatcgatgggagctcgagtaagagtattcatgtatccaagtaatatatgagattcaggtgataagacgctcagaattcgcagcttaatagtaggcacaaggatttttgtttcagctttgataattttgttgtctgtcaactttttgagaattttccttacggtttagacgttcatttgaacgaatgtttttctccgttattatagctattgtctatgaagattatatattcattactatgaagcgtgtggatttggttcccctttgaatgttccccattttctaattccccatctttcatttgaacaaaaaata

SEQ ID NO: 60207 - DNA, 992 bp, Glycine max
  Clone ID: PAT_MRT3847_25379C.1
cgggaccgtcgctgttttcctcggtcgctccgaattcagcacggcgccgtcgtcgctgtttgtgtgagggttacacgccgtcgtcgctgtttttgtgtgtcgcttcttcgtaggtgcagctgcaatggtgaagggacgccaaggagaacgtgtcagactctacgtgaggggtacaatccttggatacaaaaggtccaagtcaaaccagtatccaaatacatccctgatccaaattgagggtgtgaatgccaaagaagaagtagcatggtatgctggcaagaaaatggcctatatctacaaggctaaggtgaagaagaatggaagccattaccgctgcatatggggcaaggttacaaggcctcatggtaacagtggtattgtccgtgcaaaattcaagtcgaaccttccacccaaatcaatgggagcccgagtaagagtattcatgtatccaagcaacatatgagattcaggtgataaaacgctcagtagaagtcccagctgatttgtaggcacaaggatttttgtttcattttctataattttgttgtcgtctgtcaacttttgagaatttttcttactgtttagacgttcatgggacagaatggttttctcagttatcctggttattgtctatgaagattatatattcgttactattaagtgtggatttggttagctcgtatgtttgcatttttttaaccgattattacatttgacaaaatacccacccgatttgacatgttagacgctcagaattcgcagcttaatagtaggcacaaggatttttgtttcagctttgataattttgttgtctgtcaactttttgagaattttccttacggtttagacgttcatttgaacgaatgtttttctccgttattatagctattgtctatgaagattatatattcattactatgaagcgtgtggatttggttttaaaaaaaaataaaactaaaaataaaaaaaggaaacacaaatcttaaaagatg

SEQ ID NO: 60208 - DNA, 552 bp, Glycine max
  Clone ID: PAT_MRT3847_2537C.1
tcgaaatcacaaaacactctttatttcctctctctcaatttttagattctttcactttctcttcgatggattcaaagcaattcgatcgcgcgagtcgcaaggttcgggtcgtcgccaggattcgcgggttttcggtgggtcccgaggctaattccgaaccttccgcttcgagagcggtggagtgggtttcggtgaaccgcgaaaatttggatgatgtcaccatttccttcggagatcaatcttccagtcggtatttggtggactattgctataaggaagatgaagataatgaattgatatattcaagggaggtgaagcctcttgtgtctgcagcttttgatggtcataactgcactgttattgcacatggtgctaggggtagtggaaagacgcacataattcagggctctgctgagagaccaggtttggcagtgcttgctatcactgagtttctttcagtgactgagcaaaatgggaaatccatagctggtctttctttgaggttgatcatcaggagcgacccatgggtttataaattccagagaagccccc

SEQ ID NO: 60209 - DNA, 433 bp, Glycine max
  Clone ID: PAT_MRT3847_25380C.1
aaaccacaacttcccctattaaaaatttatgggggaaaccaaggtttacttttaaaaaccttacaaaacattaaagggggcaacttaaaaacaacagtaaaaagttgaatccttggcccatgaaaggcacccctcgttgatttaacccaagggaccaaataaccttcccaaaaaaaaattccggaccattacaatttcaaaggggccaaaaaaaattaaaaagggggaccattcccagcccccaccatgagcgaatgggaacaacaaaggactttttttcttccttttttcagggggcccaaaaacaacgtggctattaaggctttaaccccacttattattgggggggggggaacccaaacgctaaaattttccctaaaaaagttaggcattgttctcctattgaaaacaacaccccaggcctttaagggga

SEQ ID NO: 60210 - DNA, 554 bp, Glycine max
  Clone ID: PAT_MRT3847_25381C.1
gagttattataaatctcatgacaatgttttcgattcccacatatcaaaaatagatgaacaccgttacccaattattgtatctgcaagaactataaattattcatatgccctacctgataggaaatgtaggctaaaatacacccaaatccttctaaaaaaaattcgattctgggatggagttaaattaacctttacagacattacactattctttatattgtagagaattttggtatcaaagagctgattgtgcactcgataatgccactatgtatgagctatgtaacaccatatctatgcacctcattgaaccttaaccccttaataaccactcattccagagaaatgcttcttcatggctcggtccttctggtaatgattgtttcttcctcctccccttcccctccctcttcctctccctctccccctttgattattgctatccacctcggaatcatcggattgtttctcctgttgctgatgagatgaaacttgttttccaccttccttccttcccctaccaaacgaattgcccgaaatccctctcccttcca

SEQ ID NO: 60211 - DNA, 1140 bp, Glycine max
  Clone ID: PAT_MRT3847_25382C.1
tctagagctaacttgcctgatcgcagtattctggataaaaaggatgaaaaagatacatcaaaaactgctgctatgattttacaatatgaatatgaagatgagtatgacgactcttttgatgacttgggtctaagtgtagcagactctggagtagaagaaaatgagacattgagcgaccaaataacgcaaagtcagggaattcgtgggcaacagggggtaactctgtcaaaaatgcccctgattcaaaatggggctccaggaaaagaccgcagtactttgtaaaggatggtaagaattacagctacaaagtggctggtgcagtagcagtggcaaattctgatgaagcttcgctagtaacgcaagcagcaataaggattgatacattggccttggatgtggaggcaaccctccttttggcgcggtaaagaaagtgatggattcctacaagaaggatgataaccaatcccaggcttctgaaatggaagggagagggatttcgggcaattcgtttggtaggggaaagaaggaacgtggaaaacaagttgcatctcatcagcaacaggagaaacaatctgatgattccgaggtggatagcaataatcaaagggggagagggagaggaagggggaggggaaggggaggaggaagaaacaatcattaccagaaggaccgagccatgaagaagcatttctctggaatgagtggttattaagggcacaagagaatcattccatatttcttacttgctaagataccatacttcagaatcttctcggtaactatttggcttttgcctaaaaccttatattttgcagggttaaggttcaatgaggtgcatagatatggtgttacatagctcatacatagtggcattatcgagtgcacaatcagctctttgataccaaaatcctctaaaatagcaagaatagtataatgtctgtaaaggttgatttaaactccatcccaggatcgaattttttttagaaggatttgggtgtattttagcctacatttcctatcaggtagggcatatgaataatttatacaggtacatatagcttgcaaatacaataaatgggtaatggtgttcatctggcagtacacaaaaaaaaaaaaaaaaaacgaaactagtctctctcc

SEQ ID NO: 60212 - DNA, 1761 bp, Glycine max
  Clone ID: PAT_MRT3847_25383C.1
caaatatatcagaggacaggtctttggaattgaagaggcttacctcatctgtagctcatttgtctcttgtagacagtactgtaacacaagcttcaacttcagacagggtgaaatcatttcagactgatgaagatccttccttggtggagcttctatttcagtatggtcgttatttgcttatttcttcttcacgtcctggaactcaggtggcaaacctacagggaatttggaacaaagatcttgagccagtttgggagtacgtttacattctattttatttcaaatggatatgcttttaaacaaggcttgctatctgttattagatgtcaagattaatcagtggagctccccacttgaacatcaatcttgaaatgaactattggcctgctcttccttgcaatcttagcgagtgtcaagaacccttgtttgattacatttctcttctgtctgtgaacggcagtaaaactgcacatgtgaattaccaagcaaatggttgggtggcacatagtaaatcagatatatgggcgagaacatcagcaggtcaaggtgatgttgtgtgggccttgtggccaatgggtggagcatggctttgtactcatctatgggagcactatgcttacacaatggatgaggatttcctcaaatataaagcatatcccttaatggaaggatgcgtgtcatttctgttgagctggctgatcgaagacagtgaaggatatcttgaaactaatccatcaacttcccctgaacattattttatcgctcccaatggcgagcctgcttgtgtaagccagtcatccacaatggatgtagcaatcataaacgaagtcttctccacatttctttctgctgctgaggttatagggagaacaaaggataacattgttggagaagttcgtaaagctcaaccacggttacgtccaatcaacatagcccaggatggttccattatggaatgggtgaaagatttcaaggatccagaggtgcatcaccggcacctttcacatctatttggtctatttccagggcatacgattacttttaaggaaactccagccctgatcgaagctgccgaaaaaagcctttataaacgaggagaggaaggtcctggatggtcaaccacatggaaaactgcttgttgggcacggctacaaaacagttctaatgcatataagatgatcaagcacttgatcaacttggtggatccagatcatgagagaccatttcaaggtggactttacagcaacctttttgctgcacacccaccatttcagatcgatgccaacttcgggtttgcagcggcagttgcagaaatgcttgttcagagtacattgagcgatcttttcttacttcctgcccttccttgggagaaatggccaaatggctccctgaaaggcttaaaggctcgtggaggaacaacagttaacatatactggagagaaggggatcttcaggaggttggtatatggtccgaagaccaaacgagaacaactctaagaaaaagaatacactatagaggaaccatggtcactgcagacttagtgtctggccttttttacaagttcaacggacagttgaagtgcttgaacacatgctctctttcagaaatgccttgttcttgaatttcagtttttttttccttcttctataatacaactttggtcttcctatttagtttaatgtgtaattttggttttttattttaaaatatacacatttagtcctttaactttaaaaaattcataattttggtccaaaaaa

SEQ ID NO: 60213 - DNA, 396 bp, Glycine max
  Clone ID: PAT_MRT3847_25384C.1
ttcgaattgttaaaggaaagcctatttctatggggggaggagcgggtgcaaagaaggctatcctcatgaatgtgccaaatgctggtctttcaatgtggagatattccgttggagaaatgggttttcaagaccctaagatgactgcaccctccattaaatgtacagtctatttcttgataggatatacaaatttgcctgatgacaccttcaattaggaggcctttacccacaagctgtatcaggggggaaagattgacgaaaaaggctttttgaattattatcacgaagaatttttttcagatggggcaacttatgggcggactacaacaactttgtgggctgaagagggcccatatctgcatgcatatggccatgattttttagatgtctacaaga

SEQ ID NO: 60214 - DNA, 226 bp, Glycine max
  Clone ID: PAT_MRT3847_25385C.1
gcgtgcgtacgggtgctaaaagacaacaaaacgttacattatatatattaatcatctattttatactatgggtacattggtgataatattctttccaattcataaccatttctacccatgtaaagctttttgttttacattcatctcaagtccaacgctcacaattactttctaacccttatgaatactacttaaatattccctaactcctttccacatgattaca

SEQ ID NO: 60215 - DNA, 752 bp, Glycine max
  unsure (1)..(752): unsure at all n locations
  Clone ID: PAT_MRT3847_25386C.1
ggggggtttggtttttttttttttttgctctgaagggcagactcaggattcctgcagctttattgacactcatgccagagctaccaagaggtttccagcagccacagcacaaaggccctgcagagtccccatccaataggcctcttctgtggagaccttgtcctcaccctgacccttgacttccatcatcacttgctcctgtgacctgggttccggtcgcccgtcatccgatggtctcaacaggacttcaaagcatgtctaccagtttgaaggttccctccggtttggcaggaaccacgtggacaaaagtcttgtagagcacagcacccttgggcagactagtgaccagattcacagcctccgagtttttgggattgggcacgtagacttctttcgtgtagcgaactatcccctcctccagggcatacaggcacttgttcttccccagtcccacatgggcgcctgggtgccatctgaactgccgctgagtgccaaggatgttgccggcatgaacgtagtgaccttccattttcttgatgccatagtgtttgcctcgtgatttgccaccaaggttcttagaactgccacctgtcttcttggatgcggatctgacagcaagtgctgtaggtgctgtgggactcagcagggctgctgcccgcgtcctcagcgtaagggccgccgccgccgacgccatgtttgcttcacattcacnctcgagccgaattccgagcttacgtacgcgtgcatgcgac

SEQ ID NO: 60216 - DNA, 465 bp, Glycine max
  unsure (1)..(465): unsure at all n locations
  Clone ID: PAT_MRT3847_25387C.1
ttggggggggggggggggggggggacggggaacagataatgggggtagtggggaggtgccctattacaatagaggatatgtaagtaaaggcacaggaaccaggcaaatgactattaacgaaggaaacgaaaatcataaaccagagtgacttggataaaggataacctagacgggttggcataagtaacccaaccaccaccctatatataaataattgtgtagttgaaatttagtgagaaaaataggtatactatagctaatatcctagaaggagtgaataaaccagggacagggttaaaaatataagttggtggaggtggtgactaagggctgacgacgggctggaagtaaactggcagcactcatgttattccttgtgtaacgacgttgttaatcacatcggngctgtaatctgctatagccacactcacgtcgttgatatagcaactaagctaaccggcacag

SEQ ID NO: 60217 - DNA, 162 bp, Glycine max
  Clone ID: PAT_MRT3847_25388C.1
ctaaatcctaacgatattaattgatgggccgccttgtccacctttggcgctgtatgaaccataatctgctctggcttctacgctatccatttttatgtgtgcctcctaagatttcatactgctgctatttaaggttggcccctggccgacaactaatcccaa

SEQ ID NO: 60218 - DNA, 278 bp, Glycine max
  Clone ID: PAT_MRT3847_25389C.1
aattcccggatcgacccacgcctccatccggtcgtaagaacacgcgtcaggggtacaacagtatgacaacgggggattcactcatctctcactccctcagcatttctatctatctcatgtttcaactttcccaacgggcactcatttatctctttgagttacaatcacgcccgcaacaagtcgacagaatcgcaatccacagccacgacttcagcctccattacatcacaccactcgtatactcgcatcaccattgtgatatttgacgccaatgcgag

SEQ ID NO: 60219 - DNA, 429 bp, Glycine max
  Clone ID: PAT_MRT3847_2538C.1
cggttgctgatagcataaccatgtaatgacggagaacaccgcttagagacaaacgctgatgctggggcatgaaagacattaccccgggctggtggatccatccacaaaaatggatacattcgacatcaactacatgccatgcacggttgctttgaattggtcgcttcagctacttagacatatgtgaaatattgacatctgtatgtatttggtagatggaacgagtttacactgaatttaattgaatgttctgggggttctaagtggattatacaattgatgttaatactcagaccctaatgattgattattgatgaaattgagatacatgagaaagctgactctactatgaggaataccacttcgagagcgattaaatcacatgatatttaaaaatagttatgataaggatattcggagatatgttgc

SEQ ID NO: 60220 - DNA, 431 bp, Glycine max
  Clone ID: PAT_MRT3847_25390C.1
gctcgcacgcctgcacgcgcccggccggactggccggaccgacccacgcggctttattatcgtacgagcacgctttcctaaaggacggtgggttcgggggacaacgctagaatatggtctcaacggtgtctggtcacatgtcttaaacgagtattgtgagaaggaagttcagtaaatacccaaaaagattgacgccagatggatacacacagtccatactaagttcaacgagggtcaaggtcagatgtatacaaaattgaatggatggacaatggaggagggcctaccatctaacggatcgatgagggaccttcaaagcactcaatgtatgaattgcaccttgcaaaaacgacagtatgaggacccatgtctgcgcagtgatctattgtgaaacatggagcaggtggcgcttttacgagccgtgttgattt

SEQ ID NO: 60221 - DNA, 256 bp, Glycine max
  unsure (1)..(256): unsure at all n locations
  Clone ID: PAT_MRT3847_25391C.1
cgnttgatgataaggtgtaatttctttttatgcatgttctttaacttcgataaagtgtaaatttgatttcaccaatgctgctgtaatnnnnnnnnnnnnnnnnnnnnnngtacttgtttagctgtctccaactcactaattaattgtcattgtngtctctgtttagagacattgcaagantgcatttacactttcttgaaattgtaatgaactggtactcaatttttgtattgacagcacgtgcataacgttatga

SEQ ID NO: 60222 - DNA, 1290 bp, Glycine max
  Clone ID: PAT_MRT3847_25392C.1
cccacgcgtccggccatgtgtcgcacatgggaagttctagcccgtaagaaaaatgaccttggagaactgccacttccaatggctatttatgttgtttctggagatgaagatggggagcgtggtggagcaccagttgtctgcattgaagatgcctccaaacgctgttttgagttttcaagtggcttagctgcttggacacctctacttttattggttcctttggttcttggacttgataaagtcaatccaaggtatattccattattgcgctcaacttttaaaatttccccaaagccttggcatcatgggtggcaaaccaggtgcttcaacatacattattggtgctcagaatgaaaaagcattctaccttgatccccatgatgttcagcaggttgttaatatcagtggggatactcaagagcctactagtacttcgtcataccattgcaatattatgaggcacatacccctagattcaattgatccatccttagctattggattttactgccgagacaaagatgattttgatgatttctgctcccaagcttcgaagctcgcagaagaatcaaatggtgcaccattgtttactgtaactcagtctcggagtttctcaaagcaagtcaccagtaatgatgtgtcaggtgacaacactggattccaagaggaagatttccctggcatggaccgtggcaatgatacaggaaccaatgaggatgattggcaactcttataaatgtgattgctggactatgacatggattcaaagtacagggtcaaaaatttgttgcttgattctcatgggcctaattgccactgcaagtttggttgatccctggcatggggctccccactcttcaaacattgtttaatagtcttgtagaaagtaatttaaattcattatgattctttggcttaaaatcatttgctcatttgttcatattagctaaccaggtatttgttgtacattacaacggctagtttgatcatatttgttgcctgtacccttttatttgctacacaaatgtagtggatagtattgtgggactatcaaataaatggtagaaagtagttcatattgagagaatgttttctttaaatagaacatagcataaaccaatcacttgagtcccttaatataaaatatgggtaaagctctttagtagttgcactgcagtgatgtcgcattagctagtcacgtgaatgatctgtgagtgtgttttgtctagacattttagcatttgttccacacgttccaagaaatcaaatgtgattggagaaattgatagg

SEQ ID NO: 60223 - DNA, 421 bp, Glycine max
  Clone ID: PAT_MRT3847_25393C.1
acgacataaagaccatttactgttatgcagggataaaaataatacataatagaaaaaccaggggaatcatacaaactccttctgataatgagggagtgaaacattagaagccaaaaaaagaccagaaactgtgctgatacctacctctgacacaaaaagagtttcatctgttctcgataagctcctggcaaccggactaccgttttcccaaagaaggtttggtttaaaggcataaaacatgaggagggctgccaagtattgcataaaaaacttcgggtccattgacgagataaacatactttgactatggctaaagcataataagaacattgcgttagcaaataaaccgcattatacaggaagcgcacgtggcgaggatctgagggctactgtgttaccattgcgcacaatcgcagtacca

SEQ ID NO: 60224 - DNA, 647 bp, Glycine max
  Clone ID: PAT_MRT3847_25394C.1
gaaacggaagtactttcatttgttattatacaatactagtatatcagaaacactctcaattggcctttccattagcaaatcacgaagcagaaactacaaacgttaaatccttgtttttttgtttgtaacggtttgagttaaatacagcaaccacaccaaggaaagggcatgtaataaactaaatgtagggggaattttagatagaaagattaaaattgacataggcataatacagcaacaccacaccttaattttgtacaacttaattcctagcagaattatgtcaataaggacgaactattaacgtaggtgtgaaattaagaaccatagatgaaattgagagggatggcggaatatatgtgacagctagccttgttcgaagtgcacatgacacgaggctccaattaattagcttgctcggcctttttctttctttctttctttcttaatttactcctcaaatatatactgctattattaatactctttcaccttataattgtgcaatgacctttccaacccttcaattacaagaagccttcgcggtggcgccgggtggtgatgcacgggggtgctccttgttagaccccgccttccacttctcttttctctggacctgcttaatttgtttctccctacacttcaaa

SEQ ID NO: 60225 - DNA, 310 bp, Glycine max
  Clone ID: PAT_MRT3847_25395C.1
ccacgcgtccgcccacgcgtccgaattcgagcggccgctttttttttttttttttttttttttttttcccggcatcctaatttcactttgtttgagggttccttttttccttggtcactttttaccatgatgtttaacatgggggttgctttcaattctcatagttgatccaaaaggttacttgaaagtgtgtctcttttttttttttttaaactttctatttttgagctgaggatgatggagtgtgggagaaagaaggagaatcaaaatcccaactccactttccctgatgaggtgttggagcgaattt

SEQ ID NO: 60226 - DNA, 613 bp, Glycine max
  Clone ID: PAT_MRT3847_25396C.1
gaagacaatgcagtttttaaaggaaattatcctttgcttgcccaattgccaattgatatgagaccagtattggcaccttgtcgccacaataaaattcctatatcagtgaggcaggcccagctttaccgcctgacagagcgcttattgaggaacacaaatctggctgtgattcgcagaactgcagatacagaattagctgttgcagatgcagttaatattgaaaaagaagttgctgacagatcaaacagcaaacttgtgtatttgaaccttagttcacaagaactcttgcatcgcacaaataacacaaaaaccaatgtagccacagatacaagtccatcagcctcatcagcaatgcttactgatcaacaatcggaacttaatactgatgatctttcaactgaggcggaagttgaaacagccttgaaaaatgctggtctgttgtctgattccccacctagcagtccacatgagagcagagaaacatgtaatagtgatatgtcagggcctgataatatacttgaactagattctcatcctgatctggatatttatggtgattttgagtatgatttggaagatgaagattatattggtgctagtgttacaaaggtct

SEQ ID NO: 60227 - DNA, 255 bp, Glycine max
  unsure (1)..(255): unsure at all n locations
  Clone ID: PAT_MRT3847_25397C.1
ggttaagcggtgaccccagagaatctgtgacatggcggattcttgctcgggaggagatcgtttacatggcgcccacgnggagaggncgtgcgttacgaggacatcgtggagtttctggagaaggttgcaaagatcgccgaggttgacgagttgacggtggaggagaggaatctcctctctgtcgctttcaagaacgtgattggtgcgagtcgggcttcgtggaggatcatatcctccattgagcagaaggaggag

SEQ ID NO: 60228 - DNA, 300 bp, Glycine max
  Clone ID: PAT_MRT3847_25398C.1
ctattatttgcgttttttgataagcgaataataaaagatgccaaatcctttggaagggagcccacaatatcattggataggcaccataacagacccccttcgatgtatgtacaaaccacctggactcccaattccacaaaagaaatgcaaggctctaaggggaggggttggaaacgatgtccatcacaccgcccctcccctaaaacgcggggaagagaaaaaaaagggcccaaactccccctgagaaagcaggcattttaaggccccgaaccacacataaaagcctttggtctaccgcgc

SEQ ID NO: 60229 - DNA, 221 bp, Glycine max
  Clone ID: PAT_MRT3847_25399C.1
tacggctgtgagaagacgacagaagggcctgcctgttgattgaagaaatctctatatggtcttaaacaagcacctcgcgcctgacttatattcataaggagacaggctttcgctgtcagtctttgatggagattaacaattacgagaaatatggaagctccccttgacgtcacaaagtgaaaacacatgccctagtaaatagatcaaatcggaatgtggat

SEQ ID NO: 60230 - DNA, 172 bp, Glycine max
  Clone ID: PAT_MRT3847_2539C.1
ctcttaggcaacatccaggaggcccttttgacaggtttcgtagccgtacccttccgtcgacttcaatacccttaccaacatatggtgggctttctctgtctactcattcacaccgatggcatactaatgaaaaaagttaactcaaaaagatagaaaacagcggccgtttaat

SEQ ID NO: 60231 - DNA, 672 bp, Glycine max
  Clone ID: PAT_MRT3847_253C.1
ccacgcgtccgcacacgcgtccgcacacactctctctccctcttcttccgtacgcgatctctttcactatcttccaattcccaatttttcaccacacactactgcaaatccttctccattttctcgcattttgggtttctaggtttttttccctttggggggttctgagtgattcagaaaaaaaaatatttttccccctttttttttgcgtactcagatttgagctgaatatcacagtgtggggttgaactcagattcacggtgtggaacaattcgaaggttttagcagccattttcagtctgtaatttctgtctctgactctgaagtactgcttttggaattattggattcttcaatttggtgaggattttggaaggatcatagtgcttataaactccacctactaatgtgaaatgatagacatttcgaactattaacgggatttgtttaagcaacttgtttgccacattgcaatatataaaatacaaatatgccttcatggtgggggaaatcatcgtcaaccaagaagaaagcaaataaggaaagttttatcaatgcatttcaccgaaaatttaaaatcccatctgaaggtaaaccaaacagtagatccggaggatctcgtagacatagcaatgactcaatttcggagaaaggggctcagtctcctcctg

SEQ ID NO: 60232 - DNA, 352 bp, Glycine max
  Clone ID: PAT_MRT3847_25400C.1
acgaggacattcctattcaagaacccctgtgaaggtctaccagaatttcaaacactccaaaacatttcactgatttccactgctacaatgtaaccaacacagacaaagtcacctaccctatacaacatcacttagattactcaactttttgattcacataaacactacatctgccaaatttcagaaaaccatgaaccgcaaacttacagccaagccatccaacataaaccatggcaagagaccatatctgccgaattgatggccatgaagctcaataacacttggaccattgtcccattgcctcaagggaagaaacctatcagttgcaaatgggattttaagttgaaactga

SEQ ID NO: 60233 - DNA, 647 bp, Glycine max
  Clone ID: PAT_MRT3847_25401C.1
tttttttttttttttttttttttttttttttttttttttttttttttttttttttttattttttttttttaaaccacaccacaaaaaactaaaaaatttggggaaaaaccccccaaataacaacccaaaaccgaggatccaccccgtatggaaaaagggggaattggattccacgatgttattctttaccctaaaagcccaaataaagcaataaacagggtaaaaaaagaataatttttatttaaaaaaaaaaaccaaaggcccgcaaaggaaaggggcccaaaaaagtcaaagggccctggcgttggcccccatgaggagccaaactggcaaagcagggacccccttcgggggtttcccccccttccccaaagcattttggcccttatccttggcaaaccccaattaaaaaaaaaccccaccattttctttcttggtaaacaggggctgcagggaaccaaatccctggaggcccacctttcttgcttaaatttttggagccggcagggccttcctttttttttccaacaccttttaaaactcttccaggggaatctccttggcccaaggcccctttttttaattttcataaacaggacgggccttgtttccttcggcggaatcttcctctccaacaagcttttaat

SEQ ID NO: 60234 - DNA, 364 bp, Glycine max
  Clone ID: PAT_MRT3847_25402C.1
caggagccgcgagagtcgctctatacgcacgagacttcgatctgtaccgcgggagccgtatctgtgcctgtgctctagcggcaccatgcgctaagagcatatgtgcgattcagtggaagctaaatggaaccatcgacagagatgcttgatgccacagcgactttatccaggacgatattgatgtctcgcgttggtgtggtggcgggacagagcggtcctctgtgctagtgcaggaatcttgttctaggagagattcatccacgatgctgctgtatttggcaagagacctgcgactcccagaaatagggagtggagaatgtctatttttatcattccggcctgggaatgccgttgatactggggg

SEQ ID NO: 60235 - DNA, 1317 bp, Glycine max
  Clone ID: PAT_MRT3847_25403C.1
ggctcgagctcgagccgaattcggctcgagcggctctaactcactgccatctgtatctgcatagcataaataccgcacgcacgcgattcctatgatttgttttttcactctgggcgattttccctattctttttgagtgccgagcaaaaccctaatcgagttcgattgcaacacacctccgttgctgtattccaccttctccgacgaatggcaaccaaacctcttacaaccgaagctattgcgcttacagaaaagaagatggacatgacattagatgacataatcaaaatgtctaaaaatacgaagaataagaagccaagaagggttctgaacaaaagtcaaaagttttcaaataattttactcaagataagtctgcaaaggtccaacgttatatggaatcaagatcttctcttagacagggggctcttgcaaaaagaaggtctaatttccagggaaaccaatttcctgctgcagttgaagttgcacgaaaagctgttactgctcctctgcacaatagagtccctaatcgtaatagggtggctaactggaataaaacaaggtaaaacactcgagaacttaacatgccttccatatctaagattttttttgctctgcaaaaaggagcgagtttgacatcatgaatgcgggccagccatgtttttggaaatctgaatttgaatgctggcattatgatctcataaaactgttgtccaaactcatggtttgagtggattatgttgaatgttactaaggatattcatgtagataattggagttacattggttgagctggctggtgatgcaaatgggttactagttaaatggagtctggttcagtggaaatacattggtagaaaagatagcttaacattatttttaagtatctcatcctagtgtgaaggagggtactgcggtaccgtcacatatgcacaaaagtcaggaccataaattgtcaatatttagtggctgcctcatgacaaacaactctgcattatattcagttgtttagaagcaagtgtagtgattgtggcactaactaactaagcatgcttttttttgagaattaactatttgaaggcattacctcttcttagcattacatttatggtcactctccgttagagacttgttccttcattatgagcattggtactttttcattggctgtcagtatcccttgtgcttgggttttgattcttgctgatctatccatttgctataaaacttccccagtttgatattatcttggctctgtagccttatgatttctcctgattgggctcctcttcctggaggaacgttcttcccccggagtt

SEQ ID NO: 60236 - DNA, 576 bp, Glycine max
  Clone ID: PAT_MRT3847_25404C.1
gcagttttcttagtccaaagtctatcattcttatcccccaagtagaaaaagatgagttttgaagattcctcgaagaaacatcagtcagttggaccatggggaggcaatggagggtcccgttgggatgatgggatatactcaggagtaaggcaattggtgatagttcatggaacaggcattgactccatccaaattgaatatgataagaaaggaagctctatttggtcagagaagcacggtggaagcggaggccgtaaaaccgacaaggtgaagcttgattgtccaaatgagttcctaactaaaattcatggatactatggcagctctaatcaaagagggccaaacttggttcggtcactgagttttgagagtaacaagaaaacttatggaccatttggtgttgaactagggacatatttttcagtcccattgactggtgcaaaaattgttgggttccatggcaggtgtgggtggtatgtagatgccattggagtctatctgaagttcttgaaacaacccaatccatccaaactttggctcattccagagcttcattactaccattctgagaatttg

SEQ ID NO: 60237 - DNA, 301 bp, Glycine max
  unsure (1)..(301): unsure at all n locations
  Clone ID: PAT_MRT3847_25405C.1
tttcaaaactttaaaattaagcataaattcataaagaaagggggagaaagggataagtgaacggtagcacaaaattgtatgcattctcttgatttcaggattgtcatcatcaaaaagggggagattgtggaagcaatgtcttccaaggttattttcatgatgccaaagaatcaagagttaagcaaattcccaagattcaagaatcatgnttcaagaatcaagattcaagattcatgaatcaagtttcaagaatccggattcaaaaataatcatgatcaagattcatgaatctagagaagac

SEQ ID NO: 60238 - DNA, 568 bp, Glycine max
  Clone ID: PAT_MRT3847_25406C.1
gaggcaccctttgctccattgggaggagaagcaacgaatgtcacttgttaaatgggcagagcattgctatgagaagggaattctgagtgagattgtggattcagaactcaagggtcagataaaacctcaatgtttgcacaaatttagtgaggtggcactgagctgtttgcttgaggacgggactcaaaggccctccatgaaggacatcgttgggatgctggacttggttttgcagcttcaggatattgctgttaattatgaagatagcagtagccatagtactgtacggctttcagattgtagtgagaacactggattgagcacgacaattgatggagatggtagctatggcaggatggaatcttttgtgttgataccggatgatgttttctctgagactaagaatccaaagggacgatgaggttgaagcagtagtattcaagttagcatgagtatcaatcgttgcaggatggaatcttttgtgttggagtttgttttctctttcagtattatttttttaaccctctagttaaatagtaaaaaagattttaattaattcgcacataaa

SEQ ID NO: 60239 - DNA, 353 bp, Glycine max
  Clone ID: PAT_MRT3847_25407C.1
actttggcctctgaggccccggtgcctacctctgccgaccagagtgacgatgcgagatacaacaacgattcaaaacagcttgttgaacaaacttgaatttgagtacttaccgaagaaggctgagttggttgaaggtatggatgatgaggtgggaaaaatctttgagaagtttactttcactgatgccagtgcttcggaggatactgatactaaggatgggctagaagacaatgcaccaacataaaagaaggttaattctgatcctgaagaggaagaaaccgataatgagcaaaaagagaaaggcctcctagacaggaagaaaaagcttgaccggaagataaaaaattgctgaa

SEQ ID NO: 60240 - DNA, 254 bp, Glycine max
  Clone ID: PAT_MRT3847_25408C.1
tacggctgcgagaagacgacagaaggggaagtaatctcttcacataataaaaaagagaataagatgggtttgaagaacaacatggtggtgctaaaggtgtgtttgagtgctacttttccttgtggagggactactatttttcttgaggctgagtaagcttggcctgctcatgaaaagggatcatcatcaacactcaagtgatcattgctcttgataaccatgctgtgatcaatgcccatgcacaatggcaaacc

SEQ ID NO: 60241 - DNA, 1682 bp, Glycine max
  Clone ID: PAT_MRT3847_25409C.1
tcgggaattcggcttaattcggctcgaggggatgaagtatgaggggagtgctgctgggtctggtaaggtgtatgtgtatgatggggtgtataggattgttgattgctggtttgatgtggggaggtcgggttttggggtttataagtttaagctttggaggattgaggggcaggctaagatgggtagtgctattttgaaggaagctaggaatgttaggaggagtgagctggatttgaatcccacatctgcttgatgtttcaaataggaaggagaatgtggcggttcggcttttcaatgacattgatgctaactatgaccctctgcagtatgagtatcttgtgaagacaaattttccgcagtttgtgttccatcagagcgggagggggacaggttgtgagtgtgcggacgggtgtgttgaggggtgcttttgtgccatgaagaatggaggggattttccttataatcagagtgggattctcttgagagggaagcctttggtttttgagtgtggcccattttgtcgttgtcctcctcattgtcggaaccgtgtcacgcagaaggggttgaaaaataggttggaagtgttcagatctagggaaactggttggggagttaggtccatggaccttattcaagctggtgcttttatatgcgagtacacaggggttgttctgactagggagcaagcacggcttttgactatgaatggtgattccttgatatatccaaatcggtttactgatagctgggcagaatggggggacgtctctttgatagactccaattttgtgcgtccatcatatccgtcaatacctcctttggattttgctatggatgtgtcaagaatgaggaatgttgcttgctatatgagtcatagttcaactcccaatgtgttggttcagtttgttctgtatgatcacaataatttgatgttccctcgccttatgctatttgcgatggagagcatccctccgatgagagagctcagccttgattatggggtagctgatgagtggacaggaaagctctctatatgcaatgaatgattttgaaagtttcatacactttataatatactgaagctgactttcgggcattgtttgcagagatagtcaagttgatgcagcacaagttttcaacactgccaatttacaaagagcagtagtagaattgcttgctatacgacggtgtcaggaaatcaaaattcaaatataaagaaatgtctattacgttattctggtttttatctaactgtcaatggctagtacacggtgctcctctggtgaggaaggtcaagaattgaagttcccatttctgcttaatcttgaagacttcagtagttttctcacttgttgatgccatttgtttgttctgtaattgttgatgtcttcctcagctcggcgaagcattttcaaatcacatttttgtaagcaataatagtgcaagctgtattaactctttcttcttttggagaacttgtttgtatatagtataatttcaaagcttgtaaaggttttataatagtgactggtatcggatgcaacattttaattaatttagaagcgggtaaattgggcatctggatattaagattactaggatatagccattgttgctaatgatcttgtatgaggaaaatcaaattatgatgaaatggacaatttggttgttaatttcaaaaa

SEQ ID NO: 60242 - DNA, 338 bp, Glycine max
  Clone ID: PAT_MRT3847_2540C.1
gctaacacccgcgggaccgcgctaaaccgcgatgggagtttttcacaccttagggcgtggaacaaaagccctcgttacttgatttccagactacctgagttactacctactcttttgagcacgatttcttatgggaaagaaaaacactctatgagctggccacagactccgcgaatcattttgtttaacactcttgggttatatgctgaacactctggtatttgatataagacttggcgtcagactgaaacttcttctgactctttctcagacactctgttcaatttcaagatcaagccggtgaaatctaggattagagctcgcacatatcctatctg

SEQ ID NO: 60243 - DNA, 223 bp, Glycine max
  Clone ID: PAT_MRT3847_25410C.1
accgccccggtaaaccctggactttccacccccccgatatttcccccggcaaggggagaaaccagcggaccaaattataaaccagatcaactagacatcaagacggcttgctgaaaatagtgaggctgccagcaaaagcccactgaggaaaaaggcatatgtgccacaatcagcgagcagttggttgaaacagacccatcttgtgcaggagctccagcgagca

SEQ ID NO: 60244 - DNA, 395 bp, Glycine max
  Clone ID: PAT_MRT3847_25411C.1
aggggggggggggttcaccaggaaattcctagcgggtccttggggggaagccaattttttttttaggggaccttataaaagtttggggaaaccgggggcaaaactttttactggggaaaaatttatttttttcaaatttaacaataatatataaccgcgaattttaaagtttaaagccgggggggccaaaggggggacttaattaatttttattgcattgcgctaatttcacgtttttagggaagaaaacctttgggggcactttatttaaaaaatgggcaaaggcccggggaaaggggctttttttatttggccccaggggagtttttttttttttcggtggaaggggtaaaaatttatggccttttcccggttttcccggaaaaatttaaaaa

SEQ ID NO: 60245 - DNA, 394 bp, Glycine max
  Clone ID: PAT_MRT3847_25412C.1
tcaagattggtgtgtggagaataggcaacatggggtggagaggattccaacaccaatgataccaattagcccaaatgaggttgctgagcttctgatgcaagtgaaggcctcagcaaggggtttggaccaatatggttgccttaaattggtgcagaaattgaagaggtggggtggtgagagtgagaggaacaagaggtgcatagtggacaatggagcacctgtggcattggcttcatcatttgatgcatttgccaatgattctgttgagagaaatgtggtggttcttgaggagattttgtcagcactcaattggatgtttccacttcaattggaggcacacaagtctttggggtctttggcttctctaagatgcatgagttggttcttgaagcac

SEQ ID NO: 60246 - DNA, 860 bp, Glycine max
  Clone ID: PAT_MRT3847_25413C.1
tttccttatcagcagccaccgtcgcatccatccatgaatccgcctcaactacaatcttcacttggtcaccatgttgaggaaccaccttatcctcctcagaattatcctcccaatgtccgccagccaccatctcagtcacccaccggtcctcctcctccccaacagttctatgggacaccacctcatgcatatgaaccaccatcaagcagatctggttcaggctattcttctggatatggtacactatctggccctgccgagcaatatcgttatggtggaccacctcagtatgctggcactcctgcactaaaaccacaacaactgccaactgcttcagtggctccgagtggtggtagcggtcaccctcagctcccaactgccagggtactcccgcaagcaataccaactgcatctgcagtgagtggtggctcaggttctgctggaactggaggcagggtttctgtcgatgatgtggtcgacaaagtttctactatgggattccctagagaccatgtgagggccacggttcggaagctgacagagaatggtcagtctgttgacctaaatgcagtgctggataagctcatgaatgatggcgaagtccaaccccctcgaggttggttcggtcggtagcatggcttgattaattgatgtatagaagaatctattgctccctgatgaaaggtttatgaggagactttgtggttagttggattgtgccaaagtggatattttgacttctttttttattattattgtttcttggaaagttgaaactggtttgctttcttgtctggctccgatttatgactatcttcatcttgctttgtatacccgcaataaatagatgtggatttcgg

SEQ ID NO: 60247 - DNA, 288 bp, Glycine max
  Clone ID: PAT_MRT3847_25414C.1
cgtgctaagggcgtcggtgtccactctgtctacatatggtagtaagatcccataacagattgaccggcataaggacggtatggtgaggcggaagagcaggtgggccgggggactcatcgattctcatttccagtctacggcagtgtagattagagaagaggtggacggccttgatactgcagcaaggggttgttatcccattgaagactctacaaaagcgtttggacttgcaagaacaggtttgatgcttatgataacctggacagattggcccttgtttctcagata

SEQ ID NO: 60248 - DNA, 329 bp, Glycine max
  Clone ID: PAT_MRT3847_25415C.1
ttcgttttttttttttttttttgtttttttttgttattttttttggattaatcatttttgaaaaagtccacaaacttgcgcctatcatacaccggcaacaaaacacgctaaaagcccttaaaaataccagaaaagaataaagcaacgggaatgaatgcaaaacacaacgcaagagggtttgcagactctgctcccataaaaacatgaccttagttaatgggctactaatctacatcactgaatatataagccagacattgctttgggctcttctttgccataagtcaccaaacattctaatgccagaacccttcctcttgacaccttca

SEQ ID NO: 60249 - DNA, 2589 bp, Glycine max
  Clone ID: PAT_MRT3847_25416C.1
acggctcgagatttcccttgaaaaggaagcgtgaagcgttttccctctgcattaatttgtatctgcagtctgcaacaacttcttcttcagttcttcacaccaatcatgtaccgctttgcaacctccctcgcctccaaagctagaattgctaggagcagcactcaacagattggaagtagggtcagttggaacaggaattatgctgccaaagacattaagtttggtgtggaggcccgggctttgatgcttaagggtgttgaagagctcgccgatgccgtcaaagtaaccatgggccctaaggggcgtaatgtggttattgagcaaagttttggagcacccaaagtgacaaaagatggagtaaccgttgctaagagcattgaattcaaggataaagttaagaatgttggtgccagtcttgtaaagcaggttgctaatgctactaatgatgtggctggtgatgaatattgagggagggagcatttcaattgtcttgcaggaaccacatgtgctacagtccttacacgagcaatattttactgaaggctgcaaatcagtcgcggctggaatgaatgcaaatggacctgaggcggggtataagtatggctgtcgatgctgtggtcacaaatttgaaaagcagagctaggatgattagcacatctgaagaaatagcgcaggttgggatgatatctgctaatggagagagagaaattggtgagttgattgcaaaagttatggagaaagttggcaaagagggagtaatcacaatttcagatggcaaaacattatataatgagttggaagttgttgaaggaatgaagctcgacaggggctacatatctccttatttcattacaaacgataagaaccagaaatgtgaacttgaagatccccttattctaattcatgagaagaaaatctctagtataaatgctatagttaaagtcttaagagttggctttgaagagacaaagacctttattgattattgccgaggatgtggaaagtgatgcacttgcaactcttattctaaataagcttcgggccggaattaagggtgtgtgctatcaaagcacgtggttttggtgaaaagaggaattcttgtcaacaggatcttgcagatcttacaggaggaggacttattactgaagagcgttggctgaatcttgaaaaatgggatttaagatggttgaacgaatgaaaatcaacaggagattctttaaataatactgcaaaacaagatagaggaacttgaaaattagctctgaagataatctaatgataaattaggtcaggaatataaaaccgatcgttagaatatgaaaagtatcagtgatagaaatgatgagccaaacttcttggtggtgtggctgtggagaagaatggagttgccacttatgctcaagtatgtgaaaagagctgcagtctgaattcttgatataaagcatctaaggtttgggtataagcgaaaatcttgcattgcggctgcttgctgttcctaataggagagcaagtcatcaataaactgcagagcttgtatcttgagtaaaaagatctggagctggatggttctagcttcttgaaagaaatttgtaattactatagaatcaaatgtgatagttgagggtgcaggtgttgatggcaaactattggagagggggaatcatgatctaggatatgatgcagccaaaggtgaatatgttgatatggttaaagctggaatcatagaccccttgaaggtgattaggacagccttggttgatgcagccagtgtatggtctttgatgacaacaactgaagctgttggatctgaacttccaaacgataaaaaagatactccagctatggctggtggcatgggtggcatgggttattgaccagcttctaatgattgtgttgctcttgaaaacaaggattggtgcttagacctaaaagcccccccttttttgttaaataatttggtttgtagaggcatctttgtcacaattgtgagagaacgagatggtggtgtatggtattgtgactgctaaaattccgattataaatgattttgatcaattttatgatgctaacaaaggtgattttgttgagattataacaggtgataattgttctcatttgaggttattaggaaccccttggttgatgcagccagtgtgtcatctttgatgacaaccaactgaagctgttgtgtctgaactcccaaaggacgataaagatgttcctgccatgggtggtggcatgggtggcatggattattaaggggctattttccctgatcaaccttgcttcctttaattggacgtagattggggtggtgtttcaccactattttgccttttttttctttcttatttattgacagaaggcatcaatgtaatcatagtgagagataagagatctagggagggaaatttgtggttgttgttgcaatgacattaaggaacgtctgaaacaaaaacaattttcagattccaaattattaaacattgttccattctgaagttgtcaattgaaagacggccccttaataatttcaaaaaaaaaaaagtaaatttcaaaaaaaaaaaaaaaaaaaaaaaaaaaaaaatg

SEQ ID NO: 60250 - DNA, 534 bp, Glycine max
  Clone ID: PAT_MRT3847_25417C.1
cttgcctgtatacatatacaaagagccactccagttagcagttactattgtcattccactattcaaatgaaggttccatatttatataatcatttaaactaatttgtactttccctgacatctgcaatatgcgaccaatacgtgtgtggattatcacattataaaactccacctgccatgatgaaaactggccttatagaacatgtgcatgatagactaatgcccgcctgagaggtactactgctaatagatagatctactattatgcgtttataatctttgactgtttgaagccttagccttacataggtgacatgctcacaagatcttactcttatttgacttcatagactggagtatgatcgaaccagacattatagcaaatgcatgtcttcttactctggaaagctatacctaccctaatccgttaaaacaactgtaaatttccaaagactatataatctaacattattacaacgaaaattcactctttctctctgccaaaccttataattaaattattgggcggcatga

SEQ ID NO: 60251 - DNA, 1260 bp, Glycine max
  unsure (1)..(1260): unsure at all n locations
  Clone ID: PAT_MRT3847_25418C.1
caaacacgcgtcccctagaagctgcttgttctagagccttcccttcacttcccttgcccttgaaaaggaagcgtgaagcgtttcccctccgcattagcctgtctttgcagtctgcaacaacttcttcttgagtgttttctcagttcctcacatcatgtaccgctttgcaacctccctcgcctccaaagctagaattgccaggagcagcactcaacagattggaagtagggtcacttggaacaggaattatgcggccaaagacattaagtttggtgtggaggctcgggctctgatgcttaagggtgtcgaagagctcgctgatgccgttaaagtaacaatgggccctaaggggcgtaatgtggttattgagcaaagttttggagcacctaaagtgacgaaagatggagtaaccgttgctaagagcattgaattcaaggacaaagtcaagaatatcggtgccagtcttgtaaagcaggttgctaatgctactaatgacgtggctggtgatggaaccacttgtgctacaattcttactaaagcaatatttacggaaggatgtaaatcagttgcagctggaatgaatgcgatggacctgagacgaggtataaatatggctgttgatgctgtggtgacaaatctgaaaagcagagcacgtatgattagcacttctgaagaaatagcgcaggttgggatgatatctgctaatggggagagagaaattggtgagttgattgcaaaagctatggagaaagttggcaaagagggagtaatcacaatttcagatggcaaaacattatataatgagttggaagttgttgaaggaatgaagctcgacaggggctacatatctccttatttcattacaaacgataagaaccagaaatgtgaacttgaagatccccttattctaattcatgagaagaaaatctctagtataaatgctatagttaaagtcttagagttggctttgaagagacaaagacctttattgattattgccgaggatgtggaaagtgatgcacttgcaactcttattctaaataagcttcgggccggaattaaggtgtgtgctattaaagcccctggttttggtgaaaataggaaggctggtcttcaagatcttgcagttctcacaggaggagcagtgagtttactgttttgaggttactgctgcattaagtcttattttgtgaacttatactgattcctttncatatcctaatagcttattactgaagagcttggcttgaagcttgaaaa

SEQ ID NO: 60252 - DNA, 242 bp, Glycine max
  Clone ID: PAT_MRT3847_25419C.1
ttagtatattgtgtccatgatacaacaatatagacctcatttatagtacacatcagccaaagctgaggctgactcttttatttactatggaaaaggaccgtcatagagagggccaacaacactgaagaccacgactgtataagccaatgtttattgttggctaacctctgcttggctgaccgtgcatcttgtggtcgaaatctgcaacctaagtgatacgccctggtgcttggcaagctcct

SEQ ID NO: 60253 - DNA, 262 bp, Glycine max
  Clone ID: PAT_MRT3847_2541C.1
agcgcaagcaggacctttaagcttactaataccatgggctacattgagtaataccttaacctctctgaacaatctagactacagtatgctactatctatatgaaacaacggatgctcatatacactaattaaataggaaacattagctatgttagataatgtcactgtacgttatataggatccatcatctaatacacttgaattacatacgatagctgtctcttaccggctccaataaataatttacccttggtccatatt

SEQ ID NO: 60254 - DNA, 2093 bp, Glycine max
  Clone ID: PAT_MRT3847_25420C.1
ccacgcgtccggaagcgtgaagcgttttccctctgcattaatttgtatctgcagtctgcaacaacttcttcttcagttcttcacaccaatcatgtaccgctttgcaacctccctcgcctccaaagctagaattgctaggagcagcactcaacagattggaagtagggtcagttggaacaggaattatgctgccaaagacattaagtttggtgtggaggcccgggctttgatgcttaagggtgttgaagagctcgccgatgccgtcaaagtaaccatgggccctaaggggcgtaatgtggttattgagcaaagttttggagcacccaaagtgacaaaagatggagtaaccgttgctaagagcattgaattcaaggataaagtcaagaacatcggtgccagtctcgtaaagcaggttgccaatgctaccaatgatgtggctggtgacggaaccacttgtgctacaattctcactaaagcaatatttacggaagggtgtaaatcagttgcagctggaatgaatgcgatggacctgagacgaggtataaatatggctgttgatactgtggtgacaaatctgaaaagcagagcacggatgattagcacttctgaagaaattgcccaggttggaacaatatctgccaatggggagagggaaattggtgagttaattgcaaaagctatggagaaagttggcaaagagggtgtcatcacgatctcagatggtaagacattgtacaatgagttggaagttgtggaaggaatgaagctcgacaggggatacatttctccatatttcataacaaaccagaagaaccagaaatgtgaacttgaggatcctctcattataatccatgaaaagaaaatctcaagcataaatgctattgttaaagtattagagttggctttgaagagactcgggcctttactgattgtcgctgaggatgtggaaagtgatgcccttgcaactcttattctaaataaacttcgtgctggaatcaaggtatgtgccatcaaagctcctggttttggtgaaaaccgtaaatatggtcttcaggatcttgctgttcattacaggaggtcaacttatcactgaagagcttggcttgaatcttgaaaaagtagatctggaggtgtttggctcttgcaagaagataacattttcttaggatgacactgtcatccttgatgtggggacgcgtgggcggacgcgtggggaaagaagtgagcagattagatcagcaattgaaaatagcacttcagattatgacaaggaaaagttacaggaaagattagccaagctttctgggggtgttgcagtactgaagattggaggagccagtgaggctgaagttggtgagaagaaggatagagtgacagatgccttaaatgcaaccaaggcagctgtagaggagggcatagtaccaggtggtggtgttgctcttctctatgcatcaagtgagttggataagcttcaaactgctaactttgatcaaaagataggggtccagatcatccaaaatgctttgaagactcctgtgcacacaattgcttcaaatgccggagttgagggtgctgttgttgttggtaaactattggaacagaatgatcctgatcttggatatgatgcagccaaaggtgaatatgttgatatggttaaagctggaatcattgatccattgaaggttattaggaccgccttggttgatgcagccagtgtgtcatctttgatgacaacaactgaagctattgtgtctgaactcccaaaggacgataaagatgttcctgccatgggtggcatgggtggtatgggtggcatggattattaaggggctatttcccctgatgaatcttgctccctttaaatggacgtagattggggtggtgtttcaccactattttgccttttttttcttcttatttattgacagaaggcatcaatgtaatcatagtgagagataagagatcttgggaggaaaatttgctattgttgttgcaatgacattaaggaacgtctgaaacaattttcagattccaaattattaacactgttccattctaaagttgtcaattgaaagacggctccttaatatttc

SEQ ID NO: 60255 - DNA, 359 bp, Glycine max
  Clone ID: PAT_MRT3847_25421C.1
accactcgtacgcccacgcggccgatgctcctgattcaaatgataaccttgatctactggtgagcattgatctgatgcttttacatggagcaagtaaagcttttgcaaacaagattgctgttaatgataagcttgcgttggctaacacacaagaattctttgctggaaattttccagaggattcttggttaccaatgtgtgggaattgtctatatcctgtgagtgagttaccttcacaagctgacgctgctgatgttgacatgtggactatacatgggtggtcatacccaccactgctaggactagctgtagcataaacagtgcctcgttatacgtcgacacttagaataccacacctc

SEQ ID NO: 60256 - DNA, 1367 bp, Glycine max
  Clone ID: PAT_MRT3847_25422C.1
tgtaacataaaaatcaaccttggcattgaaagcaacttaatgtatctttaaactcgagatgcatgattctgaatgcattattctttgcaagagtgttccaacagacattattcaaaacactcatttcattcaagtaaataaattatgtacgggcaaatcggacaaaaatacgcctctggatggggctcctgcaagaaggacagtcttgcataccttgtttctcgtggagatcattgcatgttgtgcaaacaacctgatgagcacatgggaggaatacaacagacatctcctcagaaaggcacatgacacattctctttcccgctttacaccccctatcaaagagtagtcatttaaatttgaaaccatttctgagataaaagtggcccgcgattctttcagagccatgcttttcacgtccataaagctgctgacatagtttccatcaattccccttctcagtgcagcaattttagaagagtcggtcttctgtctcagttgtgcaatttctttttcaagtttctggatgtcatctctgtacctgtgtagattttcctctgctttcagtttgatcatatcctcctttgattttgctgactcctcaatttgttccctttcttttcttatagaactggcctgcaggaggagttcttcttttgcctttgctgcttgctgccacctagcctcgacttgctgctgttgcactttagcttgctctaattcttgctgcaactgagctaatttgtgtttttcattcattagctcttcctgaaacaaggatttctgcttctcccatgattgaaacttcatttgggtcttcttttccctccttgagacctcttgacagcttgtggctgactcagccgcttgtaacttagcaacctccatctctttcctcagtgcagcattttccacctcaagtttccggacatcagcattggttctttctacctgtgcactcgctttagacaaggcattttccatctcagaaatcttcttcatagtgttttcctctagagattgtttttcttttttcccacgttcaacttcatctttctcttgtctcagtgtcttaagctcggccctatccttactcagccgacgagcagcctgcataaccttctgatttgcccactctgtccattcttgaagctgattttgcagctcccgaacccttggaactagcttcaaaatcatctcatcctttctatcttggggtatccacttccccagggacctgtcatgaggtatccccatacaactactattaggtgcctcattattgcagcggacagttgttgtaggagacttactatttgaagacaaagaaagagaaagatcagtatctgtagctgataatacatttggg

SEQ ID NO: 60257 - DNA, 337 bp, Glycine max
  Clone ID: PAT_MRT3847_25423C.1
aatcgaaccacatgaccttctttggatctagcaaaggtactcctacaaatgttcacagccagaaaaatggcgaaagccatttttgctaatagtggataacaagccaacgacactcaggtgaaactagtatggtgttataacaaagcaccaggaagaccatataatgaagaaacccatagctcgtgctaaatcgtatcatggatcaacattgatagcaagcagtctatctggccttccggctctgcatcaaatatatgatatgccagctcctttcgtattacacactgactggccacattaccggctgcatcatcttccaggtgagacagatgaagaa

SEQ ID NO: 60258 - DNA, 826 bp, Glycine max
  unsure (1)..(826): unsure at all n locations
  Clone ID: PAT_MRT3847_25424C.1
tgcatgcctgcagatagacatgttgcagaggctcttgatcgagcacggacacaccatgtacttcgtgccactgacgctgaatttgaagttatatctcatgaagggacaaatactgttgatattaggacccgttgctgtcaatgtcgtgggtggcagctgtatggcttgccttgtgcacatgctgtggctgcacttctgtctattaggcagaatgtgcatagattcacagaaagctgttttactgttgcaacctataggaagacatactcacagaccatacatccaattcctgataagtctctgtggaaggagttgtctgaggctgagggggacgtcaatgcttccaatgctaatcaacttcaacttcaaattgctattaatcctcctaaatcactcaggccaccgggtcgacctagaaagaagcgggttcgtgcagaagaccgtggccgtgtaaaacgggttgtgcattgtagtcgttgcaatcaaacaggtcactttagaaccacctgtgcagctcccatctaagtctcatgtcacagcttagcttttcattatttcattatttaggcttgctagcatagaccctccaccaaatgatcttttttatttcctatacattaatgtgaattaatttgtttcagctgctccatgtttgcaaattaactcgcattgtttaatagcgcatataatagctcaatacatacttatttcaagctaaaattttgaatttgactcataaatagttcctggaaaccgaagtattggagcctnccaatttgcttacttcgctggaagttcgtagtccctaaagctngngttatgctct

SEQ ID NO: 60259 - DNA, 153 bp, Glycine max
  Clone ID: PAT_MRT3847_25425C.1
gttgcaggcaatcaaatgccaaaaattagtttgaaaatttagtgaactagaactgaggtggagtaagcaaataatgatgatatgatgaatatattgttcttcaaacttcaattttggcctgaagagcggttaagataaaagaaaaaaaaacag

SEQ ID NO: 60260 - DNA, 488 bp, Glycine max
  Clone ID: PAT_MRT3847_25426C.1
ctcgtatttgttatcagtggatggctattggttgcaaccacattcattctttgtggagtgttcacaatccttaataatgcaatttgtgacacatgcatggccatgggagaatgggtggagaatccgcatgctgaatctgctcttagcaatatacttccatgtgttgatcagagaaccacaaacaagacactttttcagagtaaacaagttgttaccaacattgttagtattgtcaaccgtttcatctatgacactgcagatgcaagtccagcacaaggaagtatgaattattacaatcaatctggacctgcaatgccacctttgtgctatccctttgactctcagtttcgagaacgccagtgtacgcctcaagaagtttcctcggccaatgcttcattggtatactttttctatgttcacttttgaaatttgagagggaaatgacttgtgtgtagatcaatcacttttttttaatgaaaattgaacta

SEQ ID NO: 60261 - DNA, 635 bp, Glycine max
  Clone ID: PAT_MRT3847_25427C.1
agcactttttattagtttttccgaaaccgtgtctgtctgctttcaactttcttcttacatgtaacaagtaacatattcttttctctcgtttttgttattggaatcccgttcaggatcctttacccttttgattgcttctcatctcacttctgagtttcactttggtgtctttagcaaagcttccacgaaacacgtaactaactggcttcagtttaattaagctttttttttctagtgtgtgaaatggcgagtacacgcttcatggctttccaagaacatgtttttgtttccttttttgtgtcaaccttctttgctgtctgtcagtgttttgatctgtcatcctatgtttcttcaaagtgtgatttgtgtatgaatgtggctgcttagctggatatatcttcttcatttttttctttctttttttggatttttttttttaaattttgtgtatccttttttggttctaagaaaaaagcattgtgcgatgaatgaaaagaagagggaaaaaaaatggttctttgcatttggttacaccatgtgactcccatgcttaaataaatgtgttgagatttcatttgtgtgttggactatgtgcatcattctgatcttgctctcgcttttcctgttttctgggt

SEQ ID NO: 60262 - DNA, 345 bp, Glycine max
  Clone ID: PAT_MRT3847_25428C.1
tccacgcgttcgacggctgcgagaagacaccagaagggagtggaaaagataaaaaagccggagcgggtttgaagtttgccttctgccacctttttggcatccttcttcatttcttcttcttcatttccttaattgggctacgcgcaaacccactcaatcacatgtaaacaccgtttcccatttccttttgtaaagggaggaaaaaggttctaacttatatatttatatcccaaaaggtctttacacgagaccctgtgtacacaaatccagaccctatttcccaatttgcagatgccccgactctaaaatattaaagcgcccttttcaaaaagcttttaaagaaag

SEQ ID NO: 60263 - DNA, 230 bp, Glycine max
  Clone ID: PAT_MRT3847_25429C.1
ggaattcggcacgaggaccaatatccccccattaaacgtttgcttggctacagcagcatccccccaccacccatcttctttgtcgttagcaaaattcttctgtctcacagtttcattaatggtatatcacttaaggttactagtttctcaatcacctactttcccccacagtggatccttgacctcctccagtctcccttagccatactgggatcatgcaaatgcaatct

SEQ ID NO: 60264 - DNA, 444 bp, Glycine max
  Clone ID: PAT_MRT3847_2542C.1
cccccacgcgtccgggtaaattgagggtttaaagtcttctttgtgccattttacagaggaaattgctgatacaggggatggaaggtctgaagttcttgtttatttttaccaatttatgtttctttcctttccatcacgtaggatcctaatcctggtaacctgtaaggatatttgcctgtgctccactttcaatcatattagcttgcaggctcctttgtataatttattgaatcaattttgtagcttgttttgtgcaaatgcatgtatatggataactcaattgttttgaataagttttgttgcatgtagtttctctcttcctaggaaattgttttctttaaatctattgaaggctactactggcagattaagtcattcatattgtactaataactggtacatcttttcctggtcaaaaaaaaaaaaaaaaaaaaccaagcccgc

SEQ ID NO: 60265 - DNA, 363 bp, Glycine max
  Clone ID: PAT_MRT3847_25430C.1
acccaccccagggggtggttccccttgacaaaacctaaaaagatccattttatttttttttggaattttgaaaaaaaaaaagaaataaaactttttggggcaatttaaaattttctaaagccctttggccacattaattttcatggaaacaaaatggttcccccccctttgttgaatggaaaaatttccggaaaaaacaggtaaaagggggaacaaatttttttgtgcataaaaacaaaaaattgggggggatttttttttttcgataaaggggggttttttttttcccccttaacatggggggaaataaacttaaaaaaaaaatttaaagaaaagtctccctcttttataaaaaattttttt

SEQ ID NO: 60266 - DNA, 190 bp, Glycine max
  Clone ID: PAT_MRT3847_25431C.1
gaagatgggtaggctcgcctgctggcggaaccttattgtggttactgtcctctccggtttgggaatcgcgcccaaggggaccgtagatgtgtatgagatgctcttcatgaccgctgactatttgaccacagggggcgactctggcattttctcgccgttgcgcatgtttctatgcataaagccccatgac

SEQ ID NO: 60267 - DNA, 355 bp, Glycine max
  unsure (1)..(355): unsure at all n locations
  Clone ID: PAT_MRT3847_25432C.1
tgnaaangtcgcatgcacgcgtacgtnagctcgggaattcggctcgagctctccanctcgntcgttcagttatggctnttnncnngacaactactcgccncatcagnatngtgcaagntcatanctgaaganctncgnngtantnaggacnatangcatnnnatccgnaataantctgtcangtaangttgntcanggnanatgaaccctcacngcgtntcatgtggctgtcngcacgtatggnnctccantangattgccggttatgtnngtatcgantgatacccgtnggagatgagagttgntgctgtatagccatcaaagnctnnnggtattncaggctgaatgnnnaatg

SEQ ID NO: 60268 - DNA, 358 bp, Glycine max
  Clone ID: PAT_MRT3847_25433C.1
ctaaattcatgttatttcaattaagtttgaagtatcaatatcaaattatagagcttttgatcacgtttggttgaaaatatataaactaaaaacatatttttcacttaaattaattatcgattcatatcataataataaacaataacttctcattcagaggggttagactagaactttttaacatgcatcatcattgccatctcttttataaacttatgccttgctagtatttttggactttttttaccaatacaaatggtggggttaccttatggttaaaattttcaaggtgtttccaaaaaaaatggtgcctttccccttttgtggcaaattttggtttttatttcggggggggggt

SEQ ID NO: 60269 - DNA, 249 bp, Glycine max
  Clone ID: PAT_MRT3847_25434C.1
ttaacacaacccaagctttttatcataagatgcatgccaaaacctccgagcgtgaactatttaactatagcgtcttttgatccattcaaacaacttattaccaaacatgttttagggattcctatcataatccagttacaaaccactataatttctgatacaatacttaatttcaatttaatttgtaattgaccaaattaaaataagatatctaaacatcctattttttatagaacaaaataaaatcct

SEQ ID NO: 60270 - DNA, 422 bp, Glycine max
  Clone ID: PAT_MRT3847_25435C.1
cgtctactatcgaccactccagggggccatggttccagcgccgatgctcctcagatgaggaggcgaaatccgccgccgccgccgccgtcatgctggagcccggtccgccctacctgaagcgcgccggcttgcttgctgggactagcgaggacttcagagacggcggcgcctttcctgcgatccacgccgcacaggatcctctcgacctgggaggagcaaagtaccgctccaaacctggatccaaaatgctacctgccaccgctgacgctaacgggaacgatgcctacgatgccatcgcgaggcaacacgagaacgcaagatacattgtctacacgcagcacaaggatcttatccctaagtttctcaagaacgacgaagatgacgacgatcgtgtttccgactgcgaagcacataaacagatc

SEQ ID NO: 60271 - DNA, 663 bp, Glycine max
  Clone ID: PAT_MRT3847_25436C.1
agccattaacatagtgttggggatgcaagctgcgggggcaggcagtgattgaaagataggctacggattcgtttttggtattatgggtgttgtagctattggtcttgaagtattggcttatttgaaaaaatcagagatgcgttctctacctcctaacttccaattggaccctgttggaggagctacatttccaaggggaatgtgattgctgctagttttgcacttccacaagcgttgtcatttgttccattaaacctgcccatgttaaatcacatactggttcaagtctgtgtgtgggcatatcatttgaattctttttggaattgttccttgatgacatttctgggtgtgctttcctggtgtacatataggtgcaaaatgcgtatatagccagctagaagtttgccaagttggacaatccatgcttggccttctcactcaacttcacgagattgaattcttttggcttgctttttcttcatcggatttctgttgcttggtcaagaatgtaaattactattcatatgagcttccatttaccgctacattttttgtgattcgtagctcttttttcttttttctggagatgtatgtattggaatttaagaatcatacttttctctttgttgagtgacaagattacattcattcaccaccttcttc

SEQ ID NO: 60272 - DNA, 268 bp, Glycine max
  Clone ID: PAT_MRT3847_25437C.1
attcgcttcagtcactcacgagagagaaagatgaacaagaacaaagctggtgcatcgttggattccttgatgtcttccttcaacgctcgcataacgcagcttcaggagctcgtcattgcgcgaaacatgtaccctgcgagcggcgtcgaggatctgtcagcggtggacgcggcggtgagcgcgatggagcttcaggtgaaggctatcaaggaccgcctgcgcgaagaggcactagccattcccaaaaccaagaaactgattgatgcat

SEQ ID NO: 60273 - DNA, 266 bp, Glycine max
  Clone ID: PAT_MRT3847_25438C.1
cctcgagccgaatcggctcgctgtccgatgattatcgtaaacttactagttatcgacatgacgacagttaacatcgaagtgatagcagctgccatggagattataggagacgcctatgagatctagggtttcttagcctttgtgaaccatgggatatccattgagttgatggacactgtggagaagctcactatagagcactagttgaagactatggtgcccaggttcagagatatggtagcccgctcagggttcgagtccgttca

SEQ ID NO: 60274 - DNA, 417 bp, Glycine max
  Clone ID: PAT_MRT3847_25439C.1
gtattttgattggagtggagaggatgtgagacatattggtgagactgatttcagtatgctgtggatatatgtttaccagcctgattatgttcaaggggttgatggtgaattaatacaacatttattccaaagaataaaaatattgattgtttaagtttttgtgtaatttcagaaagatgtattcatcattgtccaacgcaatgaattcaggaacaactgaacaagaataataatggcttctaaaatgttgtaaaaatgcatttttatttttatagtatataattgttgatttaagtattgggataacagataattgacggtgcatcagcaacaaggggattacgtaatggcgcaatgccattggacgatgcaagtgggttgggtcctggcatccatcaaggctgggaatgtggactg

SEQ ID NO: 60275 - DNA, 355 bp, Glycine max
  Clone ID: PAT_MRT3847_2543C.1
gcatgcacgcgcccttactcttcggatgccgccctagaacctttttcttttgtttcttttttactcataattctcttgcttagggacaatatgtggctttcaatgttcaattcatagtctatgactactgaggagctatcttgtcttaactcggtggataggaacaatcacatagcctactgtcctagaagccatggcggatgacactatttactccgttgccaaatctctactttgccttcccattcttactgaatctatgatgcctgccttcgatgacatcaccgacccccatttgatcccaatggatagtgagcatggctatcgaagatctcctgcattgcatgacatactt

SEQ ID NO: 60276 - DNA, 1580 bp, Glycine max
  Clone ID: PAT_MRT3847_25440C.1
gctcccctcgcgccccagccgcccgtccttgccttcacacacagatctgagttaggttaggtttattttgacaagaacgagtgcgaagaggcagagaaagaagaaacaacgtttctgttcatcttcttcttcttcttcttcctcactctcaatctccaatctctcctcaaaatccccggcaagcgcaaccgccccatctttcacacacagatctgagttaggttaggtttattttgaaaacaaaaaaaaatccccaatgtcgcagcaattagggttcgcgatcgagctatacctagaccctgcgttggagaatcaggttctgaaagcatggaacgttcttgcgagaagacaaatcagcacgcacctgatagaaatggagtctcggccacacataaccctattctcggcgccatttctagaaccttcgaagctcgaatctctcctgaaaggcttcgcatcgaagcacgatcctctccctctcaccttctcttccctcgccactttccccaacgaccccgacaacctcctcttcctcgccccaaccccttccctctcactcctccaccttcagtcacagctctgtgacgctatcagaaaagaaggcctcgaaatcggtgacgattacgctttcaattcctggatcccttattgctccgttgcacaccatgtccccaaaaacagaatgcctgaggctttctccctcttgagggaactcaagcttccggtttccggttacgccatggatatcgctctcgttcagttctctccggttcgggaaatcttctcgtttgtgctcggcaacaacagttgagataccagtctcaggagtgcttgccggtgtgctggacctcttcaagttcatgtgacccatcatatgttcagaatttctaactgaatggctggagtagactgaaatagttcagcatccaatgctgattctgaatggttctattttgtttttgaatagtaagctgtttgatttgtgtccataactcttcttcctgtcggattttcccatggcagttgtctctggttctctgtgtcgtcctgtatgttgggctatatgaagtctagtagtggcacgaatatatgtgtgctacttataggaatcgctagtaatgctacttacaccaccgcataactgctaatgtgactgcatatgagttatgatttctaccaaaggctctcaccctttttttttcttgcttaaactctgacgcagacacattagcagttgtgctgggattgattgtgtaaatagcttttctcataaatacccatcatttctgggaaaagtaaagaaatgctgtttgttttagcattttatatttcatcaattttagtctatactttttattcttaggtttataagaacagttaatactttggtggatggtaaattggtaatccatttgagttcttatccatggtcgtagtctggcagtccccaagctatttgctgtggtccataagtaactccattttaggctgtatggtacattccttttttagtatgtgttgtaatctgacgattttaaaataattatatttaatttcaaaccactttgtaaaaaaaaaaa

SEQ ID NO: 60277 - DNA, 648 bp, Glycine max
  Clone ID: PAT_MRT3847_25441C.1
ttcgggatcccatttcatagacactcaccctcattaccttcgcttaaagcatatgcattaccttttttcgattgctctgattttcctaatggctccggcaaaggttgagaatacgccggcggtagaacaatcctgtggcggagaaggcaccggcggcccacgaagcgccaaggcgcgatacaaaagatctctgaatgaccgcagggatcgagaaaaacaatatccgcactatcaataccgtggacacctacgagatctacatcttcccggttctcccgaaagttcaccccgacattggtatttccatgaacgtcatgttcatcatgaacagcttcatcaacgacgtcttcaacaagctcgcccagcatgcgtcacgtctgcctctctacaactggaagcccaccatcacctccagggacattcagacctccgtgcgtctcgtgctccctgatgaattgtgcaaactcgccgcttctgaatgtaccaaggagtctaccaagattaccagctcttgaattaaggtttgttacgcgtatgtgttgcacgatctagggccttctgtggatttcttttcttacaaattaggttgtagatgtagtgctctgaacagatgttaatgcactgtttcgtttgaaaaactccaacgac

SEQ ID NO: 60278 - DNA, 201 bp, Glycine max
  unsure (1)..(201): unsure at all n locations
  Clone ID: PAT_MRT3847_25442C.1
gcanacatcancgngcnagacctcttgcagataccangaggagcccgcaccatgganggnctcagattgancacnagggtgggantncagnacgtgncggngtngctcaccggaancggatcggngcctctatacancctcatggaggatgctnncactgctgagatcagcagggtgcagnattngcagtggctcaagtat

SEQ ID NO: 60279 - DNA, 594 bp, Glycine max
  Clone ID: PAT_MRT3847_25443C.1
ccttttgactgcttttaacttcttctccaaccttcctttaaaacatgtaactcttgtcagatgaacttgaagatattatatactttaagcacaaagacttcccaagcattgtatattccttcaggtaaacctttgctataactgatgagttgacagtcctcaaagctcaacggtgtaaggtagccactactctggctttcaaaatttcagcggcagagaattttatggatgaagctcaacagaaggaagcaattttgaatgaacatgttatcaggttgaagaaagaaataaaagattgtgagtctgacttgccatctcttcaagatgataagaagaaatgcattgcagaaactatagggtacaaaaaaatgtgaggaaagacaaatctcaaatggtggaagatgatagataagttcggcaagaatttcagcacaaccgcatcgttgctagaaattcctcaacttgtttattttttcttcaaacagccaaatttattatgtttcggaggctactgtatgataagtttactcaaatattacgtagattaacacttaaaatggaagacttgaaactactatactgttgagtctttta

SEQ ID NO: 60280 - DNA, 326 bp, Glycine max
  Clone ID: PAT_MRT3847_25444C.1
agagtggcagggaggacaaaaatgagccatctccaactcaaatgaagctcgaggataatacgagagaagggcaaattttgaaaagtggcgggaaggcaaggagaaatgaaccacctacaactcaaaggaaactatcagctttttcatggatgtggtataccatgtggaagattatggccaaagaatggaaagagattgataaactttggaggaaaaaggaaatgcataatttagcaaaggaacttgtaaacttgctagcacaaaaagactattcatggcgaaatactgctattgcaagggatagaacagtttccatggggagatca

SEQ ID NO: 60281 - DNA, 2156 bp, Glycine max
  Clone ID: PAT_MRT3847_25445C.1
tggagctctagtaactcagaggtggttgcttcaaacaaaaccacgttagaagaggttttggacattgagaacaacatggctcatcagtgggtgctcaatgctccagagccaccttccatgctgcgtcaggtggtggacaacgtcaaggaaaccctcttaccgcatccaaatccaaacacattctcttatctcaggaaccaacccttttccaaacgtgcctttgccttgttgcaaaatttgtttcccattcttgcttcactccaaaactacaatgcccaaaagctcaagtgcgatttaatggccggtctaacccttgcaatcttcgctattccccagtgtatgggaaatgcgactttggcgcggctaagtcctgaatatggcctatatacaggaattgtcccacctcttatttatgccatgctggcgagttcaagggagatagtgatcggacctggatccgtggattcactgctactttcctcaatgattcaaacattgaaagttcctattcatgattctagtacttacatccaacttgttttcactgtgactttttttgcgggcatttttcaagttgctttcgggctctttaggtttggttttctggtggaacatctttcacaagccacgatcgtggggttcttggcagcagctgccgtgggcattggactacaacaactgaaaggattatttgggatcgataattttaacaataaaactgatttgttttccgtggtgaaatctctttggacatcgttcaaaaaccaatcagcatggcatccctacaatttaattattggattctcatttctctgtttcatcctatttaccagattcttggggaaaaggaacaagaaactgatgtggttgtcacacgttgctcctctcctttctgttattggatcatctgctattgcatacaaaataaactttaatgagcttcaagtgaaggactacaaagttgcagtcttgggaccaattaaaggaggcagcttgaatccaagttcactccatcagttaacatttgatagccaagttgtgggtcatttgatcagaatagggttgacgattgctattatttcactcacgggatccattgctgttggccgatcatttgcatctctaaaaggacacagtattgatcccaatagagaagtggtatcattgggcataatgaacattgttggatccttaacttcttgctatattgcatcagggtctttgtcacgtactgctgtgaactataatgctggatctgaaaccatggtctccatcatagtgatggcacttacggtgctcatgtcacttaaatttttgacggggcttttatatttcactccgaaagcaatccttgcagcaataattctctcggccgtaccgggactgattgaccttaacaaagcacgtgaaatttggaaggttgataaaatggatttccttgcttgcactggagcctttttgggagtcttgtttgcatctgtggaaataggccttgcccaattgcaaggcctatttccacagatgcaaagataattataacctctattcaacctgctatagcggttattggaaggcttccaggaacggctgcattcggcgatgttgaacaatatccaatggctgtcaacattcctggggttttgatagtctctttaaaatcttcttggctttgttttgcaaatgcaaatcttgtagaggaaaggattgagagatgggtgaacaatgcaaaagctaaggatggcaaaggaggagaaaacaccttcatacacgtcattattgatgcctcaagtcttacaaatattgacactgtgggaattgcttctctggtggagctcaacaaaaatttgatttccagtggagtaaagttagctatcgctaaccctaggtggcatgtaattcacaagctaagattagctaacttcgtgagcaaaattggaggaagggttttcctttctgtaggagaagcagtagatgcatgtgttggcactaaaatggttgctgtataacaaacaacaattgcctttctatggattaattgttttttttttgtatttggagcaaattgtcaaacatttgttagttattaattttatcacaagtatttaaaaatttaataatattaactgacaaatattggctattcatttttaataaaa

SEQ ID NO: 60282 - DNA, 401 bp, Glycine max
  Clone ID: PAT_MRT3847_25446C.1
acccacccctacgctttcgatttttcatttccggctgttaacatctcagatcactctttgcttgttcatggtcgcaaaccataaaccctacttgaaagtatccttttaacaaagcccaacctttccggttgccccacctattttatacccccccgttttttcccctaaaatgagccgcccaacaaattcccttttttttttcttgtcctcaaaaacaaatcctaatccctataccaccttaatcccgggcacggaaactcaaaagagaaacggacaccccctattagaccaccggttttctctttatatgaaccgaaacccaaaccgcacgctcttctattaaaccgggtggaaccgttactcttttaaaaacttctcccgtcactataaaaaacctacct

SEQ ID NO: 60283 - DNA, 290 bp, Glycine max
  unsure (1)..(290): unsure at all n locations
  Clone ID: PAT_MRT3847_25447C.1
gccagcaagaaagaattccaaggccangaggaagntggaggggaatganccngatgtntcgntcggagcgaacaagttccccgagagaacagccgattgggacngcggcgcagagccaanaacnacgggcaaggagtancangagccggcgcccggcgacgctngttgacccgacggatttacgtcatggtcgtttacagnnccanggatagcagantttntggncattttctgtntctctaatncacgtcttaaccgttatggnattcncnggctaatnaantntaata

SEQ ID NO: 60284 - DNA, 1276 bp, Glycine max
  Clone ID: PAT_MRT3847_25448C.1
ccacgcgtccgcggacgcgtgggttttaagctaagcacatgaaagtgtggtgtgattgtgcacgttacatggaagggaggcctcgagtgtacgaatttggcatacaaggcaaacacaaaaacagaacaagagagggacaataaatcccactcttctttaaaccccctggaactgcatctcatgtgactcactcaattcttctttctctataactaaaaatcaaaacccttttcattgcaacaataacaaatcatcaaacccctctctctctctctctcgttttaaaccattttcctctgcccatggcggctgtcccagcactcgcggaccgatccaccaccggcaatggtgcagcccccgctgctcgtctctgaccccttcgccaaggacgccattctcgcctggttccacggcgagttcgccgccgccaacgccatcatcgacgccctctgcggccacctcgcgcatctcgccgcatcctcagactacgacgccgctttcgccgccatccaccgccgccggctcaactggatccccgtcatccagatgcagaagtatcattccatcgccgacgtcactctcgagctccgcagagtcgccgagaagaaacagcgagcacgaagcagcgaaaaaaagcgagagcagcttcatagaggaagggaaattgctcgcgaggccgcccagtcgccgggacgccaagcgagctcccagccgcgaagaatggcgagggcggcctccacagataaagctgcgggagaaggaaacggcggaaaacggcggaaacgacggtgatgacgatgccgcgccggagtatgattcgccggacagtgaaattaccgattcaggatctcaggaaatgcaacccagtgtgatgaacaccaacatatgttctaatcatgaagaatgcgaaggacgttcttcacagataaagctgacaaaaggtttcacagcaaaggagtccgtgaaggggcatatggtgaatgttgtgaaaggattaaagttgtatgaggatgttttctctgaatcagaaatctgcaagctgactgattttgtgaatgagattcatgctgctggccagaacggggagctctcaggtgaaacttttatactattcaacaaacagatgaagggaaacaagagagagctgattcagttgggtgttccgatatttggacagataaaggacgataccaaaaacaacatagagccgattccagcacttcttcatgatgtcattgatcaccttattcaatggaaattaattccagagtacaaa

SEQ ID NO: 60285 - DNA, 332 bp, Glycine max
  Clone ID: PAT_MRT3847_25449C.1
cttattcaaaaagacacacggttcgggaaattatactctatagattaccccccaaccaaatcgacacatatatatataacatatccgtcaacccccaatatttatcctataaatgacaataatctaaaaaatcaggggagggggaaaaaaaaaaaatttaatttttctgaccgaacattttactagtccctcaatcctagataactcacctccacaggtgctgacatagctttcccatacaaatgatgcctaccgaggttcccaaactctcgaggaaactgcacagaagcaaaatcctggcgcttgctctttatccatgctaaaacagaggg

SEQ ID NO: 60286 - DNA, 261 bp, Glycine max
  Clone ID: PAT_MRT3847_2544C.1
atcctggttcccgacacatttcccccattccacatcttgaaaaaaaccatttgattctcattctatcatcttgacggcacgcctgccccgcgttttcgacaccctacggcgacgcgactcgaacgtaatcgcgtcagactcgtcatcgcaacttcgctgcaaagaacagcttctgcaatagcttccgcatcaaccatctaactaccggtaaatctcggtcaacatgtctcacgaggaagatctcattgattactccgatga

SEQ ID NO: 60287 - DNA, 1004 bp, Glycine max
  Clone ID: PAT_MRT3847_25450C.1
caagtttaatcagaggaatgttgcaaaatgtgcttctaggatgggacaatgcttctcgtctacttatgcaacagttgaagttgctgcaaatgaagttaactccatgctacctgatgttgagaggaacaattacattttctctgatggtattggtgttatcactcatgatcttgcaagggaagttgcagaaaagttgaagttggacaatgtaccctctgcttaccagatcagatatgctggttttaaaggggttgtggcctcttggccggccaaaggggatggggtcagactttctttgaggcctagtatgaacaagtttcaatctactcataatatcttggagatctgtgcttggaccaggtttcagcctggttttcttaaccggcagattataacattgctttcagcactgggtgtgcctgatgaagtattttggcaaatgcaggaggcaatgcttttgaagttaaatcaaatgcttgtggatgcagatattgctttcgatgttcttaccaaatcatgtgctgagcatgggaatgctgcagcaataatgttaagttgtggcttcagtcccctaacagaacctcatcttagaggaatgctaacttctacacgtgctgcgcagctttggggacttagagaaaagtccaggatttttgtatcgtctgggagatggttgatgggtgtcttagatgagtcgggcgtgcttgaacaagggcagtgctttgttcaagtgtctactccttctcttgaaaattgtttctcaaagcatggttcaagattttcagagacaaagaacctgcatgtagttaaaggttttgtgattatagcaaaaaatccttgccttcatccaggagatgtaagagttttggaggcagttgatgcccccgatttacatcatttaaatgattgtcttgttttccctcaaaagggtgacagaccccatacaaatgaagcttctggaagtgaccttgacggggatttatattttgtcacatgggatgaaa

SEQ ID NO: 60288 - DNA, 126 bp, Glycine max
  Clone ID: PAT_MRT3847_25451C.1
cttttctgtcttaaggctgaaaccggggcatttctgctatacaagcaagagctactttacggggagttgcttatacaagtggccaaatctctaatactggttcactcaccatttgctcaaataccc

SEQ ID NO: 60289 - DNA, 287 bp, Glycine max
  Clone ID: PAT_MRT3847_25452C.1
cgtcataaaacgccaagggaatacattcattaggcaagcccattttgctataataattctataaaggtactggaataagagactattctgccccttggcgcatttggactcatattgtatctacccctaataatgatcctactctatccataccagatcacactgccacatcttaaaagttcaaggaaaaaatcgtaacaacagaagtctagctgaatgacatatcttattactatcaagcaccattatgacaaagaattaggtgtatcatggtgagtcttgcaacg

SEQ ID NO: 60290 - DNA, 513 bp, Glycine max
  unsure (1)..(513): unsure at all n locations
  Clone ID: PAT_MRT3847_25453C.1
agaaattttctatccatttcgacatcgttgtcgtgctcctttaccctaaggaaggtgcacagattggtacgttttgtttggaaactgctaatatttttctgagattggacacttcatgattcttctttttgttctgccttctcgttcctttgatgcctaattgtttgttcatcaccttgcatcatttgagtagaaatttttcatatttacatgattttctttgcccctcgtttggctttgtgtaaaatagaagagcttgtgctcaccaacatgccgtttgaactcgggttcctttcgccgccttcgttaatctcttttttattgtttttgacttgcctgtctgccaatgctgttaattatcttatcattgtccctttaataaaagtctatcacattgctgccgtataagccttgtctgtctcattgcacggcttccactgagattcattcgctgcaaccccttgtttggcctntctttttgtttcctcctttcgatatgtgtatacttcttcc

SEQ ID NO: 60291 - DNA, 544 bp, Glycine max
  unsure (1)..(544): unsure at all n locations
  Clone ID: PAT_MRT3847_25454C.1
tgatagttataggtttgatatttacagaaaagggtatagcatacaaaggcctggtgcaatttaaaacttttcaatttcatcacattctaacttattctcttaggacttttaaaatacttttattatactaacatcctaggcacaacttacaagaaagaagtaacatgtaaacaactccaaaatttgatacttattagtaacacaatgtgattaggaatccttgggccttacagacaaaatagaacacaaatttttcaatatcttgaaattatatatataactcttcttgtagctaatttatcaacggagaggcaatttctatgtaaattggtcctgacttttccctgcaatctgattttcatgaatatactgtgttcttaatcatatttctgactgtttaagttttcttattaaaaagtaatgttatagaaatttactgaactatctgtgttctatcctgttagagtgctgagagatggaggagtctggacatgcatgctggcattcnacaacttgagttgcatgcttttcgggctgcttttca

SEQ ID NO: 60292 - DNA, 499 bp, Glycine max
  Clone ID: PAT_MRT3847_25455C.1
tcgtcgcgtccgaagacattcaaaatcacccatttggaaaaccaagctcgaactacttctgcaccacttacaagaaagataccaagtgatcatgtagagactaaggaaccgtcgagagctggccacattgattgccgagtacatgatgaggcttaagctgaaaagaagacaaatgagtcttataatggggttgttcctgctgctgcacccaaggtttcaggggtaggttcaaataagaatttgagttctttggtgaatggagggggcacagagaaggatggggtgcatagtaatcacacggttccgagagtgaacgatgagatgatggagtctttgatcaagtgtgatttttttgatggggaatgggttaaggatgattcctatcccctatatgaacgcgggtcttgctatatagtcgagaacagtttcattgaatacaaaatggaagacctgataaagacttccagacatataagtggaagccaaagggatgcaacct

SEQ ID NO: 60293 - DNA, 787 bp, Glycine max
  Clone ID: PAT_MRT3847_25456C.1
aatccggctggtactgtacagcctggcattatgttgaaccagtcatattcttctcagccacttaattatggtgccatgggaaatcacttggctcagcagcaacttctagcaacaatggctaatttccagcaccttaataatgtcaacaagaatgatggtggtactgctcaaaatgctggatccaatggaaaaacacctcttccggacatattccaatcaaaattttcaactcaagctcctagctcaatgatcaacagttcaaagaaggaagtaacttgagaatttaagtttatagcggaccatcttgctactgcgtgcgattcaaggagagtaatttgaaatttcaatgttttgctattgtggagaaagacttatggtgctgtatgatgccgtagtggatttcacacgaatagatcaaactggtttataatttccaatgaaaaaagttgattgatttcctttaccatgatggagcattgtcaatgttatttgattcgtccatgtcgtcaacgaaatatgagcaaaatttttgcacttggaagaagaagaaatggttactaccggttctcttattttgaatggaaatgagcattagaatgttgatattttttttcctttaattctttttgtacgtagttgagattttttatctgtattccaggcactatcagcattatcatatgagtgaattcggcgtaatgtcttgctttttcttgcacgtagtcgtatgtttcgatctgtattcttgctactatcaactataccatatgattgaattcggcataat

SEQ ID NO: 60294 - DNA, 367 bp, Glycine max
  Clone ID: PAT_MRT3847_25457C.1
cccacgcgtccgcccacgcgtccgagaggttctagttgtcctcattgattgtagttaatttgcaccttttgtttctctctagaaattagaagttcatgcttaaactttaccttgatacttctttctcgcatgaattttcgaacattgaacaggaaattaaccatggctcaacctgcaagcctcacaagaataggccttgctggcctggctgtgatgggccaaaaccttgctcttaacattgctgaaaaaggcttttccatttttgtctacaaccggaccgcgtccaaggttgatgagacagctcgatagagcaaatctacgtaagaaacctttcctgtgtatgggttaccatcgacccttaatttct

SEQ ID NO: 60295 - DNA, 371 bp, Glycine max
  Clone ID: PAT_MRT3847_25458C.1
gaatcatcattcatggcaccaagaaatcccttcatttcgagatgccactcttattgtagaataagacacttaacctcatgacctgctgagaactctgtcttgcataataagcgcaccacccggcctagtagccttatgcgtacatggcctaatagcaaaaacgcataaagtatgacgcatccgactgggtaaccgtgagtgacccacatcatatggaacagaaaccacagggccaaggctaagtctatagcaccatcatcattaccttccaccccatcttcgaaggcgccattgttcctaaacgaagacagggttacgcagttacacgatccttatttgactcctgagacgcttcatcataacctggttac

SEQ ID NO: 60296 - DNA, 512 bp, Glycine max
  Clone ID: PAT_MRT3847_25459C.1
ctttttttttttttttttttttttttttttttttttttttttttttttttttttttttttttttttttttttttttaaaaaaaaaaatttaaaccacccaaatatttaggaagcccaacataaaaaagggctacattatggaaattaaaaaaacaccctgaaataaccctttgccacccttgtacccctaaattaaggaagactgggaaaatccccaaaccaaagggtggggggggggcccaaggtaaaaatttttaaatttttggggggggggtaaacaaccttccaagaaaagggacccaacccatgggagaatcaaccaccggctacataaccaaggggaaccccccaaaaaatttctttaaggtttttttttgacagtttcactggaaaggcccctatgtttgaacccaggttctaaattttagtgggcccagggaaaggaacaacaccccccccttggggaaaaccccatgctaaggccaacggggcaagaggggcctgatgctttt

SEQ ID NO: 60297 - DNA, 172 bp, Glycine max
  Clone ID: PAT_MRT3847_2545C.1
cgcgcgaccagtcagacttctgggaagagcacgtttggtcgacggcggaacaccgtgactgagatgtgaatgccggtccccggcgagtgggaggcatgcgcgccgccgcgacggtcgaacaacagggacaactgcaacgtgatgggtgtgtcgctggcggtcgaggatgggg

SEQ ID NO: 60298 - DNA, 374 bp, Glycine max
  Clone ID: PAT_MRT3847_25460C.1
tcgaattttcgtgcgaaaaaccggaggagggggaagccggattgagacaaaggatctatcctcaatgcaaagaggatgacgctcactatggaacaaggatgctgaaaaaggatatggatgatgatgaaactgctaaaggctccatgtttgaatgttaaaatatctcagtgtaagatctgcactttcgaaaaacacaagatggaggaaccactactgcgaagggacagattggtaaattataggacagagggaatttgttgagcacgcgatgaattgcaaggcactcatcgacttgaaggaatgattaagaatggaggtcacagaaagtattcttgagaatacaagaataggaatggcctgcactatgaatagct

SEQ ID NO: 60299 - DNA, 363 bp, Glycine max
  Clone ID: PAT_MRT3847_25461C.1
cccacgcgtccgaacatgcaacacgaaagtttctgaagctgctgcatctggctattggtgggagggatgccggattaattatgaagagtgtagggtaagacacataatggtctcaaagatctctgatacaagaggtgaagcctgggtttcagcctttaatgaacaagcagagaaaattgttgcatgctcagctgatgaacttgataaactcaagtcggagcaaggggatattgatggataccaaaaaaagttgaaggaagcaacttgcgttcctcatcttttcaaagtcagtgttactcataatgagtataacaatgagaagcggcaaaggataacagtaaggacctgttgctccaatcaact

SEQ ID NO: 60300 - DNA, 523 bp, Glycine max
  Clone ID: PAT_MRT3847_25462C.1
tacggctgcgagaagacgacagaaggggactgcccttcactcagttgacctaattaatataggatagagagattggaaagttaaaatggcatttggagctaagaatggcgtgtgttttcccttcttttttttcataactttcttggttatatgttctgccactgctcggagccctattttcttctcaaatgatgaagcttcgagcatggtggggaggtcattaaaggtaataaaccttcaagactatggtgaaccaactgcaaatcatgggcacgatccatggaagggggctagttggggaggtaatggagggcgaaaaggctgagccatgagagattattggaaatgcaatactttatagtttacattatttcagttaacgcagttaatgcaatatttagcctttcattttataaacatatgtatcttttagaggaagaacgagcaaagttgctaagatgaatgagaagacaaagagagctttatgtatatatgttgatcattaaaaaataaaagtcacgtg

SEQ ID NO: 60301 - DNA, 453 bp, Glycine max
  Clone ID: PAT_MRT3847_25463C.1
tctgacttgggtataggggctaaagactaatcgaaccgtctagtatctgtttccttccgaggcttccctcacgataggtggagcccgtaggcgagttctatcgggtacagccaatgattataggcatcgcgtggcgcaacgcccatcacctattcgcaaactttaagtaagcaggacggcgtgcatgctatgatgagccgagccacgaaatcgagagctccaagtggaccatctttggtcagcggaactgccgatgctggatgcaccgaaagtcgggctacagagcctaactgtgcgctatcctagatcccacacagggtgttgtgcgattagagacagcacgacactggtcatggaagtcgaactccggtaagcagagggtaacagctaacctgccgaatcacctagccacgaaactggatggccctgatgcgcgctacctatacccggcct

SEQ ID NO: 60302 - DNA, 448 bp, Glycine max
  Clone ID: PAT_MRT3847_25464C.1
aagaaaatgaacattcaacgaaagaggaattgtcttgaacattatatttaacaattagttgattaaacaaacactaaatgggcaagaaagtaactagaagaaaaagctgcgtacacttatcccttcattttttacatgtctatctctttgcaaggccacgacatatttccctaagagcactaaaggtgcgcgatagatgatgcacttgacgactgaacgacctcgcaaaactataacaagattaggtgacacttcagacaaggctctcaccgataaaaaccattcaaaatctgagtggttgacaccccggatgacagacacatgtcgagtagttagacacgatcaactttgtacatacaattgttttgaccccttaaatactaaaacaactagtctcctggattgacatatttggacagagtcttgtcaccctttatagtaacagcct

SEQ ID NO: 60303 - DNA, 1340 bp, Glycine max
  Clone ID: PAT_MRT3847_25465C.1
cgaccacgcgtccgcaacttgttggtatcatcaaagcttttggaaacaagttaaagcagggcatgcagagggaacaaaccaaatatttcaaactccttaaactttttattatcactgttgcatttatttcagatatttagtatttgggtacaagtttgttctttagtttaaacaccgacgtctctccgtggcggctatacccaatttgaactttaattttcttccctttgtgtgaaaaggttttgtgttggagttggctttttgaagggcgtgcatggtgaagttatttgtgtatatgaatgatgaagaacgatagagaaaagggtaacgaggttgaccagagttacatacagcagcaccactcgttgtcaatgccaatgatgttttcgggttttaacagagagaaggagatgtcagccatgatcactgctttgacacgtgtggtttgtggagattattctcttgttcatcacaatattgataatactaatagtgcaattgttggtggtggtggtggtgatgatgtttcaaatatggcttctggttctatgccaccttcgtctacttctttatctcatggtggcaactctgttctcaagagaagaagggaagatgataatacaagtgatttcttacgtggaggttcattccctgctattttaacaactgcggaaggttcaagcacgataagaagaagaagagcgaatacggtatacgattacgaatacagaagagagaaggtgaaagttggagaaggaagaagaagcgagcaggaaatacagaggagtgagacagaggccgtgggggaaatgggctgcggaaataagagaccctttgaaagccagaagggtgtggttaggaacatttgaaaccgctgaggacgcagccagagcgtacgatcaagcttccttgcgtttcagaggcaacaaagccaaactcaacttccctgaaaacgttaggctcagacacactgagactcttcagggttcacgtgcttcaagcaatttttatgacaactcttattcgcatgttcatgatttacccgtgagcctctacgatcagactaccatggcttcttcatcaactatatctatgacttctccccaggcaccaccttcgatttatcctacgcatctactaccggcatggtcttctggttatgcttataatagctcctcttcttctgcctgatgtaaattgctttttatttcgagtcgacataggctatacttttatctcacacaacttagtttgtcattatatctacctatgtttgacactaaactgagttttacttggaagcaacatatgaattgcttctaaaaattcatttttcgttg

SEQ ID NO: 60304 - DNA, 318 bp, Glycine max
  Clone ID: PAT_MRT3847_25466C.1
atactgttgaaatttaaaaggtgaaatcatacaccgacatggctacctcattatcataaagaggcagaagatagcagcagtcataactcgtaatactacaagactcaagattcgcgacccgaaatacagaaggcgaaatatagaaagagagcatcgttaaatgatatgctttcggcaaattgttaagtatacgcaataaatataaatattagtagtggtagtagtatcaatcattgtattcttcgtggatcaatactctttgtgagtcacacttttactccacgattattcaatgaacaaataaccagacctatcttt

SEQ ID NO: 60305 - DNA, 128 bp, Glycine max
  unsure (1)..(128): unsure at all n locations
  Clone ID: PAT_MRT3847_25467C.1
agttgangcnnccgtacgtnagctncggaattggggtcgagnaagtgtgntntgatggtttattgntcagnanagagnnttgaagaatcttgaggtnagngaataagnnagnagtgccctntcgaacc

SEQ ID NO: 60306 - DNA, 686 bp, Glycine max
  unsure (1)..(686): unsure at all n locations
  Clone ID: PAT_MRT3847_25468C.1
aatcataattacacaagaaaatgatattagattgaaaagttatccaatataatcaataattaaatagaaataaattaccaaaaaggataagcacgctacatccaaaaaaaattcattgtagtagccgtaggtccagtagagacacgagcaaaataaaatccagcatggcttagaacctacctaaaagactataattttcccctccaaaatcactatattacgcagtatatatggtacgttgtccaactacagccaaaaagatgcagctaacgactttacaagtctaatcccatccagtggcaacaatagatgcataaccgcgtggcccatcttcttcaaccctaccaccacctccattcaactcacaagaatcagtgtgattataactgccggaagaagctatatgtaaacattcaaaagagcaatctatattggagttttggatgtcataggaggtatcaacgtaagaggcatcatcagcagtgtaagactctacaaactgaactgcattgccattggtattgtagcagttgtaattctgcacctcaggttcagtgacattccggaaatcatgaccaccataactgccactgcggtaacgctgagcttcatagccacgaccacccccaccagatgatgaaccctcagtagcatattgnnngagcnnngatgnnacttctngnnnt

SEQ ID NO: 60307 - DNA, 661 bp, Glycine max
  Clone ID: PAT_MRT3847_25469C.1
ccacgcgtccggaaacacactctgtcccctccgcgacacaacacaaatccaaaaccagaagctaacaaaaaccgcactctaattcaaaccaccacatccacgtgacttcactgccttcgttttacgctataccaaacccttctacactacaaagcccccgtttcgctcccgggcgtaaattcaaaactatacactcactccctcccatggcggatactggcgacgacaatggcgttacctatcttcacggcgacctcgatttgaaaatcatcgaggcgcgccacttgcccaatatggacatcttctccgagcgcctccgccgctgcgtcaccgcctgcgacactatcaaattccactccgacgctcccgccgccgccgacggcgacggcggcagccagcgtacacggacgcaccatcatcggaggatcatcacgagcgacccgtacgtcaccgtttcggtgccgcaagccacggtggcgcgcacgcgcgtgctgaagaacgcgcagaatcctgtctggaaggaacagttccacatcccgctcgcgcatcccgtggtggatttggagtttcgcgtcaaggacgacgacgttttcggcgcgcagagcatgggaacggtcaaagtcccggcgcggcggattgccaccggagcgaagatttccga

SEQ ID NO: 60308 - DNA, 410 bp, Glycine max
  unsure (1)..(410): unsure at all n locations
  Clone ID: PAT_MRT3847_2546C.1
ggctcgaggtgggtgtctccatgttggatctctctcgtttcttcttcttcttcttcttcttcaccttagtgttctccttcaacactcttaagtcacttttgtcttctccttcaatatggtgttattagcttgaactcactcccaacgtttcttttctcattgttttgactgcaatattgtaacgctcacactccttttattgctgcctttgacttgtcttccttcctttgcaagagtttttttttttttaccttctcttctctctctttccttctttgatctttggatgttatatatataggcgtttgttgcctcacgggggcgtttcttttcttaatatctgaataaataggcacaaactcatgcctcanaatcctcacttttcttcactttcccttctaaatcaatct

SEQ ID NO: 60309 - DNA, 393 bp, Glycine max
  Clone ID: PAT_MRT3847_25470C.1
aattcggctcgagggcagaatcacgcttcttggccactatctatcactgcttacaaactttacacttcgggacaacactctccatctgaaagagacactcaacacacaaaacaaaaatttggaagagaaaaagagagagaagaatggagaaaaaggttctgatattgtgctgtgttgtggccttcttggggctgttgtcggctgcaactagcttcggtgctgaagcgacaaggattaaggtttctcaggttcattttgttgcaccaaaccagtgcacatatcctcgaagtccggctctgcctcttggtttaaccgcagcactggctcttatgctatctcagataatcataaatgttggaactgggtgtgtttgctgcagaaaaaattcgcaaa

SEQ ID NO: 60310 - DNA, 161 bp, Glycine max
  Clone ID: PAT_MRT3847_25471C.1
cgccttctcgtttttctagacatttattgcagccaaggggaaaagtgcgacccggaagacacacccgtgccccaatcggagcaagactcctcttcgccaccgactgcccaagaccaacccgtctccgatgacgccaagctcggccccgccgtccctcttct

SEQ ID NO: 60311 - DNA, 492 bp, Glycine max
  Clone ID: PAT_MRT3847_25472C.1
cttacggttcccaacatatgaacaacaacgccgccatgtagaacacaaccgcttcctttttcttcttcagaaactcttctctttctcattttcctcttctttgaattcaaagaaattcattacaaatatggagagagagagagaggaggtaaggttttaacggacctatctcaacatcacagatgataaaggaaacacataaagataaataacaatagaaagataaggataaatccaaacctaccctgagactatctcattacaaaacttatctcaacctctttgtcaatgcatagataaaagctcatgactatctcattgcatttagtttttttttccggggaatgaaatgctgaatctctttttcattatgttctaatgctattcttatttagcattctttctattttggtagcgatcatgaggacatctacttctcatcttgacctttctttttccttggttctggtttgggttcaattaattcccata

SEQ ID NO: 60312 - DNA, 617 bp, Glycine max
  Clone ID: PAT_MRT3847_25473C.1
tccggaatttccgggtcgacccacgcgtccgggcctgcctctcgtcgtcgtcgtcgtcgtggtggtgcttgcggcagctccggagtccaggcagcacgctagtcggggggcgcgggggaggagatatggatcggtcgtatctccccgtggcggcggcggccgtcgccctggtcctcgtgtgctgctccggcctctgccgcggcgagcggctcggggcgagggagtgcgaggacctggggttcaccggcctcgccctctgctccgactgcaacgcgctctccgagttcgtcaaggaccaagagctggtggaggattgccgtaaatgttgcaccgaggattcagatgattctatcagcaagctcacattttctggtgcaattattgaggtgtgcatgaggaaactggtattttatccagaagttgttggcttcctcgaagaagataaagacgacttcccatatgtggaaacccgttattcctatggttcgccaccaaagctcataatgcttgacacaagggtgaacagaaggagaccataaggattgataactggaagcgagagcacattcggcagtttctcaggagaaagtgaagccagtgaaattagacagctgagt

SEQ ID NO: 60313 - DNA, 502 bp, Glycine max
  Clone ID: PAT_MRT3847_25474C.1
aaaatgtgaatgagaaaactgattcattgaaaatctgaatgaatgagtcagtaatggtacaaaccaacttgttttatatacaaagagctaactaataacagatacaaagagcctaggcaacaagctttgctaaagatatctgctagttgctcagcagaaggaagaggaagtactaaagtagctgtaacaaaatcacatgctaaatttaaatgaattcatatcacactattaacaatttttcaaaacatagatatatgagaaatttgtaagtgtttttacaagtgggagaacaggattctgtggaaatcaagattcttggtgttaagtgtgttgaattgagtgacaccataatgtaatataacattactggttaatgtatagctcttgtttgacaatggtgtagcatccaataaggctagttggttcgcatccaataaggcttgttggttccacaatgaactgttcatgaaatgtacccattcttttgctaggaatgggaatt

SEQ ID NO: 60314 - DNA, 481 bp, Glycine max
  Clone ID: PAT_MRT3847_25475C.1
ccggggtagatgagcggactgacgaggcgactggcctgtggtcgtcctttttgtctgcttcttttttatttatttgaaaaaagggctctcagccggggttgacagaaacacgctatatacgtgagaagccaatgagagctcatgcaaggtaacaggtacactaacaaacttagaagggggctacaacggatggtcgggagcatgagcgacaacaatgactgctgtggaaggcatgcttattcacgaggaattgtggcttacacaacggctgggacggctcaattaagagcaagggctcctgaacgctttaagtattcccatttcttgagaatggcaccgccgcccgccgatctgttgttgaggcactggaaccttcctctatgtcgacagcagcaactgtgtcccgagctccgattattgtgggcaaaacgttttcactgaacggatccaccattacccggggggtcggtgtgacaatggc

SEQ ID NO: 60315 - DNA, 980 bp, Glycine max
  Clone ID: PAT_MRT3847_25476C.1
cactacgtcgctcgtcacggttccgtcagtgcttttccgccgccgtcgcggttcaaacttgaaaagtttactccttaaaagggttagagataaataaaattagcgagttgccatctgcagttcaaaaggtgtgaaagcaaataagatgcagcatagaaatttgacttctggaaggccttctggaactgatggctccgattactcctaccgtatggtagtcgattcaaggtatcaactggttgcaaaggggaagaaacgcctgtctctctactttatcactgaggctgtgttgctgttaataggagtgacacttacatatttaccaggaatagaagcagacgctccaaatacagttgcctattcatctgttattgttagtgttgtttcactaataattgggaatataggtcgaagacgaagccggtctggtttgttgagattttatgctgctgtatcatctatagcaatgcttctcttgattgcttctcttgcccaacagcatttgctgctgaaggctatccaggattctaaactttggaaaacagggaagtatgacgtcaatgaattatctcattttcaaattggtttgctgttatacatggtaaccttatcggtgctcaagctttgtaccgtcaatgcagttgcttcccttctctttaacatggcgccccccaagaaaacctcttagctcctcatcggttttttggtccaaatccaaatttcttttctcattcatctatttacaacagattgatctatatccatgactatcttctatgaaggagatattttgagggaaactcagattttacctacaaaacattttgaagacatttgttaattataggcttttgttgttgttttgttattgtttttgtgtttcttttgagttctagtctagggaggatctattgaaccgtctccatataaacaaaacgtagtgttgaggagataatatttcaccctattccggtagtaaa

SEQ ID NO: 60316 - DNA, 2828 bp, Glycine max
  Clone ID: PAT_MRT3847_25477C.1
ccaaacttgatggggatttttggggagctacgtgtagatgtagctttgtaattataatcatccattacaagagaacactgctgataattatatgattgcatggtaatttttattgcgccagcgggcagagtcactgctggcacatcttcttcacccttacaacgcaacaacataacgttgctaattgcttgcacttcctcttatggttgcttcctttgtttctcattagctgttttggtttttgtcttagttctacacctttcctcattctccagcagtagcaacctgcgaaccaatctatctgactaaaaacgaactggcgtggaacgggagtgctagcaacgtcaacgtgaacgggcccactatgaagggactggcgaagattcagattgacaacatgcatacctgggtcaaggtccatcgtcaatgaccaattcttgagttgcaaaccattgaagagattcactcgccgcaattgaagatgtcagagcctaccattcattgttcatgcacaaagatgtggttccgcccccactcctgaagagctaggtgaattttggtactcccggactacactatatacaatgctggacatgttcccaggtaatggttatactcactacatgacatcctccactagcatagatgttaatcttgctaggagtgacaatgatcatcctcacggcacacaatacgccggggaaatgaagaagggtcttttcagtgtcatgcattatctcatgcctaagcgccaaatccctctccctacactccggatgcaatatgggcaaagatggggatgtggcactcttctttggactctcaggtaccggaaagaccactctttcgaccgatcacaataggtatctaatcggagatgatgaacactgttggggtgacaatggtgtctccaacattgaaggtggttgctatgccaaatgcattgacctctcacgggagaaagagccagatatttggaatgcaatcaggtttggcacagtgttggaaaatgtggtgtttgatgagcatgatcgagaagttgattactctgacaagtcagttacagaaaatactcgtgcagcttatcctatagagtacattccaaatgcaaagttaccttgtgttggccctcacccaaagaatgtcatacttttggcatgtgacgcatttggtgtactcccacccgttagcaagctaaacctggcacagaccatgtaccatttcatcagtggatatactgctttggtggctggcacagaagaaggtattaaggagcctcaggcaactttttcagcttgttttggtgcagcattcattatgctacaccctacaaagtatgcagcaatgcttgctgaaaagatgcagaagcatggtgctactggatggcttgttaacactggttggtctgctggaagctatggtaatggaagccgtattaaactacaatacacaaggaaaatcattgatgctattcactccggaagtctcctgaatgcagagtacaagaagactgaaatttttgggcttgagattcccaccgaagtggagggtgtcccttcagaaattctggatcctatgaacacttggtcaaacaaaaaggcctacaaggagacactattgaagttggctggattgttcaagaacaattttgaaaccttcaccaactacaagattggcaagggaaacaacaacctgacagaagagattctcgcagctggtccaatcttttcgagacaatgttatgcaacatgttgtaatactccactgcttgttaattatcaactatgttgtatgcttacacatggatgttttgtgttatggctacttgtgtctccatttttctacaatcctaatggatccctttgttctcttttttactattgtttgttttaggtactgggaagaccactctttccaccgatcacaataggtatttaatcggagatgatgaacactgttggggtgacaatggtgtctccaacattgaaggtggttgctatgccaaatgcattgacctctcacgggagaaagagccagatatttggaatgcaatcaggtttggcacagtgttggaaaatgtggtgtttgatgagcatgatcgagaagttgattactctgacaagtcagttacagaaaatactcgtgcagcttatcctatagagtacattccaaatgcaaagttaccttgtgttggccctcacccaaagaatgtcatacttttggcatgtgacgcatttggtgtactcccacccgttagcaagctaaacctggcacagaccatgtaccatttcatcagtggatatactgctttggtggctggcacagaagaaggtattaaggagcctcaggcaactttttcagcttggtttggtgcagcattcattatgctacaccctacaaagtatgcagcaatgcttgctgaaaagatgcagaagcatggtgctactggatggcttgttaacactggttggtctgctggaagctatggtaatggaagccgcataaaacggccgggcccctgggaaatcttgccttagaataaaatattgaaccattggtttggttgggctcataatgtcatttctattcttcctccaaaaaaatgaagtttattttctaggctttacatttacatttttcttcactttggcgcctccttaacattttctagcatttgttgcaaaccacacaagtgttcccttctgcatcacaccaccatttgttgtttgccattgctctcttctcgttgccactagaattataatgcataccggggaagagggggtgaacaccggtttccaattcaagctcgaagttcaatgcaaaaa

SEQ ID NO: 60317 - DNA, 397 bp, Glycine max
  Clone ID: PAT_MRT3847_25478C.1
attcaatctagccgatttttatcttcttttagtgctcctgacatgccgggagataattttgatgcggtgcaagattttcatgtccaccaacacctttttagtgacctgagctgcttctcgcatccccgtcctggcagccatttcatcgagtcgaactggtcgctctaacacactaaccccatcaaatctggatcaactattctctgccaagatttcttcatctgcccggcattctgacccacaatggtcttctgtatttcccctaatacacaagtcaactattatgaatctgtttcaacagcttgagaggtggctatcacccatgaacacaagtgtctactctcctaggaattgtgagcattctctattacaggctccatttgctgtctcttctcct

SEQ ID NO: 60318 - DNA, 1560 bp, Glycine max
  Clone ID: PAT_MRT3847_25479C.1
gaaagccaatgttcaccccctcttctcttgttaatcgtcaattagatactaagattccatagttgaatcattgataacaatcacatcagaatcgttcgaagttgacaaggcccggtaacggtatgcattataattctagtggcaacggcagacaacgaatggtgatgtgatgcaaaagggaataattgtatggcttgcaacaaatgctataaaatgttaaaaacccttaaggaggtgccaaagtgaagaaaaatgtaaagactagaaaataaacttcatttttggaggaagaatagaaatgacattttgagcccaaccaaaccaatggtacaatattttattctaaggcaagattttatctaccaccctaaaacattcccaaccacacaacatgttacataacattgtctcaaaagattggaccagctgcgagaatctcttctgtcaggttgttgttgcccttgccaatcttgtagttggtgaaggtttcaaaattgttcttgaacaatccagccaacttcaatagtgtctccttgtagccctttttgtttgaccaagtgttcacagggtctagaatttctgaagggacaccctccacttcggtggggatctcaagcccaaaaatttcagtcttcttgtactctgcattcagcagacttcctgagtgaatagcatcaatgattttccttgtgtattgtagtttaatgcgacttccattaccatagcttccagcagaccaaccagtgttaacaagccatccagtagcaccatgcttctgcatcttttcagcaagcattgctgcatactttgtagggtgtagcataatgaatgctgcaccaaaacaagctgaaaaagttgcctgaggctccttaatactggttggtctgctggaagctatggtaatggaagccgtattaaactacaatacacaaggaaaatcattgatgctattcactccggaagtctcctgaatgcagagtacaagaagactgaaatttttgggcttgagattcccaccgaagtggagggtgtcccttcagaaattctggatcctatgaacacttggtcaaacaaaaaggcctacaaggagacactattgaagttggctggattgttcaagaacaattttgaaaccttcaccaactacaagattggcaagggaaacaacaacctgacagaagagattctcgcagctggtccaatcttttgagacaatgttatgcaacatgttgtgtggttgggaatgtttagggtggtagataaaatctttccttagaataaaatattgtaccattggtttggttgggctcaaaatgtcatttctagtcttcctccaaaaatgaagtttattttctagtctttacatttacatttttcttcactttggcgcctccttaacattttctagcatttgttgcaaaccacacaagtgttcccttctgcatcacaccaccatttgttgtttgccattgctctcttctcgttgccactagaattataatgcataccggggaagagggggtgaacattggtttccaattcaagctcgaagttcaatgc

SEQ ID NO: 60319 - DNA, 1560 bp, Glycine max
  Clone ID: PAT_MRT3847_2547C.1
ggctcgagtttggattatttatatagagaacatggcattatccactcagacctaaaaccagaaaatgttcttctggtttctaccattgatcctgccaaagaccctgttagatctggactcaccccaatattagagaggcctgtgggaaacataaatggtggtggagttactagtcttattgagaaaaagttgaaaagaagagctaggagggcagttgcaaaaatatctgggagaagttctccaataggaggaattgaagctccaaagtctgacagaaatcttgatgggattgatgtgagatgcaaggtggtagattttggaaatgcttgttgggctgataagcagtttgcagaagaaattcaaacaagacagtacagagctcctgaagtaatactgcaggccggttattcctttgctgttgacatgtggtcttttgcttgcattgcgcgggatcgccactcctggcgctccagcccacctgttctttgactggcagcgggctctaaaaaggattcgaaggctaaaattttgtccacttgtccttttgatcttgccactggagatatgttgtttacacccaagggcggacaaggttttagtgaggatgaggatcaccttgccctagtgatggaactccttggaagggcgccccggacggttgctactggtgctgctcaatccaaggatttctttgacaggcatggggatctaaaaaggattcgaagggtaaaattttgtccacttgacaaattgctgactgatagaatataaattttcagtgaatgatgctcaagagttttcagaatttcttttaccactctttgattttgcaccagagaagcgaccgaccgcacgacagtgcttgcaacacccatggctgaactacatggaatctcctccaaatgaaatgagaaatgaatctgctgtggaaaaggtagatgttgggatgagcaaccttaaaatcagggtggaaaagtgaaggggtaaattgtgttttgacagtcaaaatctaaggcacatctttaagcccctccttccacatgaaccactattgattgtgatttattttttttgttgaactttaataagattttttctattggattattaactacaaagatgtaaatcagtaaagaattttgttcctccagagatatctgacagcagaatctgcgtgtatattgttcacatgttgtaacttgtaagtcatggcatgacattcattcttgtgttttcctttttccccattgaggtcaagactcatagtataaaacacaggataggagaatttgttgattctaatgtgaggactttctatccttttaattttatagttttggcatcttgtcaacggtcaaggcccttccttcgccatgaatgactattgattgtaatttgtttttggtttgatcaaatttaataagatttattttttttattggattaaatattacagggatgtaaattagtaaagaattttgtttatccagagatatctgacacaatttgtgtgtatatttaccacatgatgatttaaagggatgatggcattcatccaaa

SEQ ID NO: 60320 - DNA, 492 bp, Glycine max
  Clone ID: PAT_MRT3847_25480C.1
actgagcatcgtctagctatctcgatcgaactgtccaaggtcctgtcacactgttagccttctaaattggggattttgggtaagggtagcgtgttgtgaaaatttataggtgtgcgtggtttgttttgtttaaattttgtgggtgtgcttttatgtggctgttggattggttatgttccatgtatagcgactcttacgggtcgtttacagtgtctcgtccatatgccgtcccccttgcgtctggcttaaccccactccctccagtaggacatctcaattgatctctggccgataacattacggggttgagcacaagacgtttgctcaactcttagatcaactgctgaacttctgattacacccgctgaggctttgaatcagctataggcagtctcaatccacaagaacaaccgagttaaaagttcgggcacaggtgatcttcggcacaaatgggaggagtccaaatcacaatcaaaggagagactagacaca

SEQ ID NO: 60321 - DNA, 283 bp, Glycine max
  Clone ID: PAT_MRT3847_25481C.1
cgcatttcccactatgacctagctgcagcacccacccatcgacttcttctacagatctaataatttttacatcgaatccgttgatatagaggcagagcttgagaaagactcaagtgcagtgcatttgattctccccccttcatcacccccacgccatcgcttcgaatatgactattatgctgactctcacgataagcctgatattttgggatcatgcagaggcctcaacttttatactacccgagaaacatgatcacatatatggaatccgtcattagggtcc

SEQ ID NO: 60322 - DNA, 286 bp, Glycine max
  Clone ID: PAT_MRT3847_25482C.1
ctgaaaaaaccttgcataatacacgataaaaaagcgcgctgatgcacaagggggagaatggcaccatgaatcctgcttaccttgcggaaagaataccctacttgagaagcgcctcaatgaaatcttgaatatacttacctcgatgaaggtgggggcagaaaaccttgcccatctccttgacaatctctcttaaagcactctcttccccatccaacaataggtaaactcaaggggctggggcacactccaccctacctaaagacccatttttgtcgctccttgggac

SEQ ID NO: 60323 - DNA, 493 bp, Glycine max
  Clone ID: PAT_MRT3847_25483C.1
tttcccctcactggtaaaatcttgcatggttcttggaacgttttgtgtcaaaatcaaattcctccatctcttaaaatgcctcactttcaatatttcaatagtttcacaaactcaaccaagaccacctttctctattcaatccaaatcaaatcaacaccaagtttcattgtcgagtgccacaatcatcaatgacaaagaccaaacatcagaagttgctggctctgctatcaaaattcaccaagatgtgtgatggcttgctaaaccttgggtatggttacatttctaattgaagtcaagtagctctagtggttgaaggttagatgatgcaaagactggtttgacagtagaacaagtcttgtgatttgacttggggttctgaaaatggtgagtgtccaatgagttttcttgtattaaagaatgatggttctaattttatgggtgggatggtgctaaggttctcaattctatttctaacttgatgagcttctgatga

SEQ ID NO: 60324 - DNA, 667 bp, Glycine max
  Clone ID: PAT_MRT3847_25484C.1
caaaaaactattaactttttattaaaaaaccttgcaatttataataagtcagtacccttttttcgaaaagctaaaacgggcttgtaaatttttccaactgggttatatacccagcaaagaggtttgtcttgtcttgggggacataaaaaatccccccattaggtttaaaaaaaatatcccccccactacactggttttcatcatcggcataaacaccctaggaccttcaccccggggccaatgatgttgatgttgttgttgttgccccaaacttttttttgtaaccctctaggtttgaggtccccccggcagacagactataaatctggggagatcgaaactcatcacagtctggggagccatttttggggaaaaaggccctcttggttttcatcatcctactcacaggtgactcgaattctttttgggcgttagccggaaaagttttgccacacttgggggcttgattttggtagaaccgacccgaccggagccccctttgggtttgattcacctgcccccagtatttcaaaggctcgggtccggaaaatgtcccccacaccgttcttcaagggcttgggggggtttaccccgaacttaacaccattggcttttaggggaaaaaaaaaagccctttcgggggccccctttaaaattttctttgccc

SEQ ID NO: 60325 - DNA, 288 bp, Glycine max
  Clone ID: PAT_MRT3847_25485C.1
ccaacccttccgccaacccttccgccaacccttccgccaacccttccgccaacccttcggtccggttggaaaaagccaccaaaagggattacctaaaaaaaaaaggaagggttacctaaaaaccattctttaatgggcacccttggtggtcataaacaaacctttttttgtcaaaatggcgagggtcttcaacaaggtttcaaaaggtggggggcttgtgaccagggccttatttcgatactgggtcacaaaaatgttcatttgaggcgagaaatcagaaaagctttt

SEQ ID NO: 60326 - DNA, 345 bp, Glycine max
  Clone ID: PAT_MRT3847_25486C.1
atggtgatttattcctttctaaaatcttttgtccctgcacaagttgtttatattaaacattgtttaccttacttttgctcacaagatgaaagaaggaagaagatagttgagatgggtggagctcaagaactcttaaatatgttaagcactgctaaagacgaccgtacacggaaagaagcattgcatgctcttgatgcactgtcacaatcagatgaagctcttgcatccttgcatcatgctggggccatttcagtaattaggtctgcaccaaattcacttgaggatgcagaagttgagggattcaagttgagcttgatgaaaagatttcaagatctcaagatatga

SEQ ID NO: 60327 - DNA, 528 bp, Glycine max
  Clone ID: PAT_MRT3847_25487C.1
gtggacgcaatgacatccgccttttatcgctacgccatcctctttatttttatggccgttttttgactttgcgacatgaaccgtcctcctctattaacaacattgaataagacctccttggatcctgacttaacgtttcatttacacccactctggaaccaactgaccttctgggtcgaattgcatataaagcttaggtactgccaccagagggactctctgttattgctttttgtcctatccaatttgttccacccattatattatgatacccccctggtgccaacaattctccttgcaggggaaacaaaattgttgaccattccccattagagcggaggtaaatttcaccatattcctgacacccaaacccccttgctcccctggtaaaccaaaagatccctaatttagccatgccctcctttttatgggccagttgtcctcctcaacattcattctatagtagctttgctgcgataacatggcagtgattgctcatctggtgtatttccctagcatggtgggtct

SEQ ID NO: 60328 - DNA, 740 bp, Glycine max
  Clone ID: PAT_MRT3847_25488C.1
attctctagacgctgtgaacaacaccctcgataatttcaaggaaaatttcaacacagcgtttttttcttcacgttgttgtgtgtctctctgataatttttcaagagcgaaaatgatgcacatgaccctttactggggcaagaaggtgacgatcttgatcgattcatggaagaccgattcctggacgagttacgtcctgagtctactcgcctgcctcgtcgttgccgcgttctatcagtacctcgagaatcgccggattcgcctgaagctcctcgccggcgaccggaggcccttgccggcgccggagatccgcacccctcttctccggtggggcgtcgccggcggcgacaatgccaggttgggcgtcaagttcgcggaagcggttctgttcggggtgaactctgcgatcgggtacttgttgatgttggcgatcatgtccttcaatggaggggtgtttttagcaattgtggtgggtctcaccattggttattttttcttcaggaatgagggggaggatgatgcgcttgttgttgataataattcttgcgcatgtgcttagttttatttttatattgacagatttgataattaatatgttttgttactgggagattctaaccttggccttcttatagctccaaccaccaaaacaacttatgactcccttccgtgtgcttagtgtattgtaatgtgtttcatgtaattgtctatttgtgaaattggattggtctctaattctcc

SEQ ID NO: 60329 - DNA, 349 bp, Glycine max
  Clone ID: PAT_MRT3847_25489C.1
ggtatcaggcttctggtatctccttctattctctagcaagcggtacattgacaaacattgagggccctgtcctatattagctcaacgacctgtgcacccgctctagagaacgcttcattaagttcagattcctgactcgtgaaacctcgactcgcttttggacatgtccaccgatgaacttgaaaacatgtgcagaactcacactcgtagaatgctataacacgcctcaaccagtaagccccaagactttatcagaaaactgcccactgcaaagaactagacccctcctgactagaagcgcccaccttgtcacacccacctttggatcatgagtactgtccctgagatg

SEQ ID NO: 60330 - DNA, 480 bp, Glycine max
  Clone ID: PAT_MRT3847_2548C.1
gggggacataaagttttatttccaaatggcaaaaattgcatcaacggcccccttttttgaacaggggggcaaaacaaattacctaattaaaatgggacaagggcaaaaattgcaacattgggggggccccttgaaaactttggacaaactagggactttcgtttttacccaaaaaacccgggcggggccaaacaaaccgttaaaaaaacccccgggggatattttaatttataaaaaaaccctcacgaaactaaaaacccttattttcaaagggaaaaaaaaaaattttttttgaccccccttcttaaaaaaaactaataatacccgccccggggggcctaaagggaataaaaaacaaagggccccccttttttggaaaaaggggttttaactttcaaaagggacaaggccccttggtgacggaaactgaaatatcacttggccaaaaaggtcatcaaccccagaaagggcaaaccattc

SEQ ID NO: 60331 - DNA, 284 bp, Glycine max
  Clone ID: PAT_MRT3847_25490C.1
tcgctgacgcgtgggatcttattggctatccgtgaccatatttctcacaagacacaatcctgtaccaagagcaatccacacttttttcaacgacttcaccaatctcaacctacgtttccactatcctgtcatactgtgctagatcttcattttcttcacctgcttcacaatctcccactcatttccctttaccctttttgggcttttcctttgctgctccactctttgctatgccgtctctggtcaccggttgtggttatgcccttgtgctgcctgcaagatcc

SEQ ID NO: 60332 - DNA, 346 bp, Glycine max
  Clone ID: PAT_MRT3847_25491C.1
gccgatgcggcagagaggcggcgggcaagcacctaatctgccagcctgcaggtgacaacagtctttgaggttattacacagctacgactgcaggagaacacatgaaagaaagaacctcaagaggcttagatatgtgtgaaacagtatgtatatacagctgctctaatgacagacttacttgcaccggagtactactgtcagaatgcacagatatttgaggacaaacacctgagtaatactgtacgtagtcagagtgacaatagagaaacgcttgagcacagctacagacagagccttggccaccctgagccatgatctaatggacgaccacacggtaactcccagt

SEQ ID NO: 60333 - DNA, 754 bp, Glycine max
  Clone ID: PAT_MRT3847_25492C.1
gaagttttgcaaagtgtagaccgtagtgtaaccccttggttagtagctgcatggcattctccttggtataacagctatgcttcacactatcaagaatttgagtgtatgagattggaaatggaagaacttctctttcgatacagggttgacattgtttttaatggccatgttcatgcttatgagagaatgaatagagtttttattttcacgttggatccttgtggacctgtttacataactgttggagatggtggaaatattgagaaagtagatgttgatcatgcagatgatcctggaaagtgtccttctgctggtgataacataccagaatttggaggtgtttgcaaatcaaatttttccactggtcctgccaaaggaaacttttgttggaacaaacaacctgagtggagtgcatttagagaaagcagttttggacatgggatacttgaggtaaaatcttcagattctgaaccttttcatttttatttctattgctaaccagcctgcaggttcagttaactcaatcactaattgatttgctcttgttggtggtgtagcttctccatttgaatatgaataataatgttactacactcagtcagctaaagagtaaagcaactaaagctcagattctagcttcatcaacaaaaaaatgcttcttttgttaatttttataaaacaaaaagacctcacatgttgaccaaaaagatctactatataactaactcatttaaaataaaatatttctctaaaa

SEQ ID NO: 60334 - DNA, 349 bp, Glycine max
  unsure (1)..(349): unsure at all n locations
  Clone ID: PAT_MRT3847_25493C.1
cacaagaaggatcttgtgtgagaaggaaacacatggaagctttgggttgagaaaggttacgttcattgagaccatggaagaagctgtggaaagagaatgccctgcagttggtggatgtgctgatatgcttgttctctctgccagagatggcattgattcgctaggaggtccccatttccctcttaagactggaataaaggatggtggaaggagcaaagctgatgtggttgagctgtttctcccagaccacaatgagtgcgtttctgcggtgattgacaatgttggtgccgtgggaattgacacccgatgagcgttttttnggggcttattggggactaggcccttcgga

SEQ ID NO: 60335 - DNA, 394 bp, Glycine max
  Clone ID: PAT_MRT3847_25494C.1
acatggggaacaagggcaaaagatacatgggtgtacagactcacattcaaatactcctaattttgaacatatgaggtctattgttcctgacagttttgaatatagtcaatgtgatgattataaaaccaatcaggaaatcttatcttcagatattgttgaagctggtagatctagtttcaataaagaaatgtgttctcaacagcttcttggtcatgacttgacaaatggaacaatcacttgccatgcttcggggttggactttaaagacatgcctcagaattgtgatgtatgcattcctgaatctgttctagatgacatgtctcctaaggatctgattatttatgaaagaagtgatgatgcttgcttacatgtgaaagaaaatcctgcgcatgtt

SEQ ID NO: 60336 - DNA, 340 bp, Glycine max
  unsure (1)..(340): unsure at all n locations
  Clone ID: PAT_MRT3847_25495C.1
ccacgnaagctcggaattcggctcgaggtcgtgctgggctatagcgactcttccaccccactgcgaacctgcgcatctgtctctctatcgcgcgcgccgctattctctcaggcagtcgggcagaactctgcataaattagctattccactccgaccacaatggttgaagctcaaaagggaccaaagttttctgttatgattaagattctaactacgaagcaatcaaaaactacaaagaccaggttttgtacccagacaataagaattttatgaagtgaatgttacccagaaatcgtgcaactcattccttagcgcttcacttttaatacaacactgcact

SEQ ID NO: 60337 - DNA, 372 bp, Glycine max
  Clone ID: PAT_MRT3847_25496C.1
cgcgaagaacgccagatttcgacatcaacaccacagcggtggggaaaaaaaaaaaaaaaaaaaacaggaaacacaagaaaacgaactcacagcaacgctggctctcaaacgcgccatgacacacttcaagatcgacatcatctccgacaccgtctgcccctggtgctacgtcggccacaagcgcctcacccgcgccatcacccagcaccaacgaacccaccccaacgacacctttaccacgacctggcaccccttctaccttgaccccaccgtgcccacccctggcgaagacaagcaggcgcgctacgagcggcgcttcggcgcctcgcgcatggccatgatgaaccagcggctcgcgcagctcgggcgcca

SEQ ID NO: 60338 - DNA, 518 bp, Glycine max
  Clone ID: PAT_MRT3847_25497C.1
tcgatctatcgtaccatgtaccaagtaccgtcactatacctctatcggatataatgagtagccttatcctaatactactgcttattgtcgttgggagccccatctcgtgttgccacctgtatgttccactcccctcacgctatctttcaggtcctggtcctaacaaaaacctgtttcttttaaacaaacttgttaccccagtcccttcacatattcatacattttgggccgagttccctcttaaactctttcaagattgtcagcccacgtggcgtccacatgatcccggtcagttcgggccctgaaccaactttctccacgattgctacggtcactgccatgtctgccattacaattggctcaacaatcgcctgccccatagtaggccaattaccattcactgtctccatcgcaacgttatcttcgggtacattgatactcaacgcgggccctgttacaacggttcgcacgctcaatgtagttagccaaacgcccttagctgtcttatgtgtccactg

SEQ ID NO: 60339 - DNA, 113 bp, Glycine max
  Clone ID: PAT_MRT3847_25498C.1
agacatgataatgcacagccacacaaaatagaatagaaagagcgatggatgtggcgaagaacggttagcggtgtgggacttgttgacatggcttcttctacactcgctctgac

SEQ ID NO: 60340 - DNA, 220 bp, Glycine max
  Clone ID: PAT_MRT3847_25499C.1
gtgatgattcctataatatacaacatcatctataaagtagatgttgaatgaaataagtgagatacttaggattatgatgtatgctgtcaggatcaaaattgagatcaaagcgaatcatgattctaatgttgcatggcaaatgtgaactaatcgtggtccagatcatatcatggactgtaatgactggaatctttacattgatagaaatgtatgacatcaa

SEQ ID NO: 60341 - DNA, 346 bp, Glycine max
  unsure (1)..(346): unsure at all n locations
  Clone ID: PAT_MRT3847_2549C.1
nggggaanannnnnnnnntccccatctcaattccagagctattagcaccgcatcctcacctacggaattctgctcgtgtaggcaggcatacatgatattgaagagaccacgtgatgctcttgtttcatgcaagggagctttttatgacattaacacacaatggggagaggattggacttactactgaaacaaatataaccggcgtgcagattctagactgctaggcgaccctaacaaccacactattactgaaccagctggtgcgtccatgctccccactactcccgcatttacagcatgtcaagagcatgttctcagcatcagctttaaatatgcacaggctctg

SEQ ID NO: 60342 - DNA, 283 bp, Glycine max
  Clone ID: PAT_MRT3847_254C.1
cctcgggaaaaaaaaaaaaaaaaaaaattttaaaaaaaaaaaaaaaaaaaaaaaaccgcaatttttaaacaccaccaaccccccctactaaacccaaaaatttattctcaacccatatcctgcccccccccccccttattgaccttctccccccgaaaattaattcccgcccggtccctcaaacctacccatttttcctatatacaatcccattaaaaccttcccctaacatacgacatacttttttctcttgtaaaatttttatcccctcacaattccccac

SEQ ID NO: 60343 - DNA, 408 bp, Glycine max
  Clone ID: PAT_MRT3847_25500C.1
tgcgatctgttgagtactatcttctttgctctctttctagggtgtgccttcaccatctcatacctgccttcagccaccgctcagttcgagctcgacactgatgatgatcctattcaaaacggtggctcatactatctgttgccagttctgagaggaaagggcggaggaatagaagtcgattcaactgggaacgaaatgtgccctatcactgctgagcaatcacccactgagctcgatcaggggattggactaggctctacatgtacattacatgccctttttatcgtcgtaggctatactctgagcattaagtccgagtcattagcagctataacgctgagtgcccgcatgcgctactgagtgtgctattgtggacagagagggtctacaagctgataaacttgctgg

SEQ ID NO: 60344 - DNA, 1938 bp, Glycine max
  Clone ID: PAT_MRT3847_25501C.1
cccacgcgtccgatttcttgattaagatatcaagagagagggagagaaagagttgtttgtttcattgcgatccctcccaagaacggctctgatagctctttggtgcagcaagcggcgtaggaatatcaaagacaaagccattcgtgcctcatacctcatttcatcacacccattcatctccatcacaacacaacatacatacgaaccagttttgtgattgaagctgcgatggaggaggagacctccgatgcaatgaaccttgatttgaatctgggcccaggcccagagcccgaaactgggcccatgagcaatgaagctgtgaacttggacgattggataggggagcctcttcagagaattagcgaagctgtgaggagggcacggcaaaggtggagatggcgccaccttccgctaccgcatcctgaatttcatgctcactttccaactgaagctacccggcattttcaaataccacctgaggctcgtaatatctccgtggaattgaaccactttttggtcaattctggcaatggaagcgccttgcaggccggcgaagggagcgtggcggccgaggagagaatggaggaggtgccaaaggcgtgtgacaatgtcaatggtgtggcagaggatgaggacttcacagaagaaggaggatgtagaaaagggtagtggcaatgatggggacttttttgattgtaacatctgtttggacctggctagggatcctgttgtaacttgttgtggtcatttgttttgttggtcatgtttgtataggtggctgcatctgcattcggatgcgaaggaatgtccagtttgtaagggagaggtgacacttaaaagtgttaccccaatatatggccgtgcgaacaatgtccgtggtcctgaggaggattctgcacttaagatccctcccaggccccaagcgaagagagttgagagtctgagacaaaccattcagagaaatgcatttgcactccctgtggaagagatgattcggcgtcttggaagcagaattgagcttacacgcgatttggttcagccacctgaaccggatgctgcccgtgaaacagctgagagaactacttccttgctaaggttcttgactgcgcaagggatacgtagagagcatcagaatctagtggcacccccagaggatgtaatgggtttggcacaaaacaatgttaatacttctgaggcaggggatccccggactagggtgcagtcccatttgcttcgaagaacacaatcacacagagcaacactttctactctttcatcagcactaacttccgctgaaaggttagttgaggcatatttccgtagcaatccattaggtaggaaccaagaacaacctcctcctccagttgatgacagagattccttttcaagcattggtgctgttataaattcagagagtcaactggacactgctgtagagattgattccatggtatccttgtcaacatcctcttctaggaggaggaacgatgcttcaagagtgtctgatgtggatagtggagattctcgtgctccaaggcggagacgtttgaactgataaaagtctgttagatgctcaagttttactattctatcatgtatcacatatgataataatcttccaacacctatgtaagtgcttcatgctttcttgttaccttatattatgaagttttcaccatttacgagttttggtagattaacaccggtttcagaagtgcttcggttcttgtttattaatctcctttgacgattgagccatttatagagtcttgtcatccaggaactgatttttgctatagaataaccaagctactttagcatttaggggcatttggaagagattacaagtagcatattagacttcatggaattggcttatgattttttaacgtttttttaaacttatttcaataaaattcataatgaaatttattcatc

SEQ ID NO: 60345 - DNA, 641 bp, Glycine max
  unsure (1)..(641): unsure at all n locations
  Clone ID: PAT_MRT3847_25502C.1
atttccatttttcctctataaacctctcctccctctctctctgactcttcctctctctctccctagatcgcaccgcaccgcaccgatggaaacacaatgatccaaccctaacccaagcgcctcttacctccaagttttgtgattgaagctgcgatggaggaagagacctccgatgcaatgaaccttgatttgaatctgggcccaggcccagaacccgaaactgggcccataagcaatgaagctgtgaacttggacgattggataggggagcctcttcagagaatcagcgaagctgtgaggtatagggcacggcaacggtggagatggcgccaacttccgctaccgcctcctgaatttcatgctcactttccaactgaagctacgcggcattttcaaataccgcctgaggctcacaatatctccgtggaattgaaccactttttggtcaattctggcaatggaagcgccttgcaggccggggaaggcagtgtggcggccgaggagagaatggatgaggtgccgaaggcttgtgagaatataatggtgtggcagaggatgaggcttcgcagaagaagggtgatatagaaaagggtagtggcaatgatgggggactttttttgattgtaacatcntgtttggac

SEQ ID NO: 60346 - DNA, 564 bp, Glycine max
  Clone ID: PAT_MRT3847_25503C.1
ccacgcgtccgcggctctgatagctctttggtgcagcaagcggcgtaggaatatgaaagacaaagccattcgtgcctcatacctcatttcatcacacccattcatctccatcacaacacaacatacatacgaaccagatccaaccgcaccgatggaaacacaatgatccaaccctaatccaagcgcctcttacctccaagttttgtgattgaagctgcgatggaggaggagacctccgatgcaatgaaccttgatttgaatctgggcccaggcccagagcccgaaactgggcccatgagcaatgaagctgtgaacttggacgattggataggggagcctcttcagagaattagcgaagctgtgaggagggcacggcaaaggtggagatggcgccaccttccgctaccgcatcctgaatttcatgctcactttccaactgaagctacccggcattttcaaataccacccgaggctcgtaatatcctccgtggaattgaacccactttttggtcaatttttggcaatggaaacgccttgcaggccggcgaaggaagcgtggcggcc

SEQ ID NO: 60347 - DNA, 137 bp, Glycine max
  Clone ID: PAT_MRT3847_25504C.1
cacacaatttcttcaccacacgtttctccaacgcatgctccaactaactatcaacgatcgtgccttcttcttgattgatttacgcagtgagcatcggcactgcatcactgacaacgaccgacagcactaccgcgtac

SEQ ID NO: 60348 - DNA, 193 bp, Glycine max
  Clone ID: PAT_MRT3847_25505C.1
atctcagacactcacatttgacttgggtgaatcactggctggtgccaccgtcgtcgctgtcctctctggttgtttcatctttgtggatccgacactagcattaaatgctggagggccatacgatcacgaagtgacgaggggactagatctcgctggcacagactttattggcaggactctgatcatactagac

SEQ ID NO: 60349 - DNA, 369 bp, Glycine max
  unsure (1)..(369): unsure at all n locations
  Clone ID: PAT_MRT3847_25506C.1
aaaagcaagnaacaggaggggggannggganacacaagaaaanncacaaaancngaagnacanngcaanaacananacnncaccaaacacaaancnaaaaacncncaaaagnccacaagncanccnnnncnnncangcgcaggcggangggaagnngnnggcgnaggcccaggcanngnngnngacngggnccgcaaggngaacagcaaggnncnccaagggacccnaaccggngacaagggccngaacaaagaacccaaacanagagaaccaggggccaaaaccccccanccggggaaggcccggaacccaaaaagcaaaaaaaaaaccccgaggggggaaaaaaaaaagggccccaaagggggaaaa

SEQ ID NO: 60350 - DNA, 249 bp, Glycine max
  Clone ID: PAT_MRT3847_25507C.1
caatttcaagtctcaggtgaggagtagttttgacatgtaccaacagcaggagtacgggcacacctggctgctccgaatgccattgccctctcgccagttcgagtattttgacactgtgtatgcaatgatggaggattgttgagttcggttcgtgccttgcagttgctgctgttgaatgagaacttcaaaatggcgtcaattgaaaacccgaatgcgagggaagttgggggcatgattcgagatgtgggg

SEQ ID NO: 60351 - DNA, 1133 bp, Glycine max
  Clone ID: PAT_MRT3847_25508C.1
cgtccaccggctacaaaaagacgcccggctcggacaccataaatcacacttaactaccaactacctaagaaactaacaaaaatcttagtggttgtgataacatggctcttacacttcaacgtgcattatctgaactactcaccctaatagctattctctcaatattcctagtgatcccttccttttgtttcaaccccaaaaagctttataatgcttcatattattctccatctagttcagattggtcacctgcagtggccacttggtatggacctgccaatggagatggaagtgaaggtggagcttgtggatatggtaacgctgttgggcaacctccattttcttctttaatatccgcgggaagccctcttatatatgactctggcaaaggatgtggttcttgttatgaggtgaaatgcacagggaattctgcatgctcaggcaaccccgtgaaagtagtcatcactgatgagtgtgctgggtgtggctcagatgctcaatatcattttgatctgagtggcaatgcttttggagcaatggcaatttcgggccaagatgagaatctacgcaatgcaggaaaaataaacattcagcacagaagaattgaatgcaactatcccggtaggtcaatagctttccacgtggattctggctcaaaccaagaatattttgctaccttggttgaatatgaggatggggatggtgaccttgccaaggttgaactcaaggaagcacttgattcagggtcatgggattccatgcaacaatcatggggtgcagtttggaaatttgacaagggctcaccactgagagcaccattctctatcaagctaaccacacttgagtctggccagaccattgtggccaacaatgtgatccctgcagggtggactcctggtcagacttacagatcgattgtgaattttgcaacctaaggatgtgtccatcattttgcatcaccagcttgtagctataccctaattataatattatatatgtagctgaagatgtataatcaaatgtcatcctattagtggacttttgattgtcttctgtaatcaattatgaatgcattgtgctagttactatgttaattattatgtttatgggttaatatctgatttttttttatg

SEQ ID NO: 60352 - DNA, 277 bp, Glycine max
  Clone ID: PAT_MRT3847_25509C.1
cttgatatttgagtcaaagaccttgttcgccccaaccatctcacattgcccaagatgcctctttcactgatagcaccggttagcgttgagcacagagagagagagacatctacccgctgacactagtgaatcgcacatcagaacatctatgccagagaagctgcactcggcttcggcgagccagccccggcgcacaccaagtacaaggattccgttgacgttccgcggggacccccttcgaataacgaggcgcctctaccgtttgctcaatacggcg

SEQ ID NO: 60353 - DNA, 320 bp, Glycine max
  Clone ID: PAT_MRT3847_2550C.1
gcataaaaagaatgttagaagactaacattcacacttaaaaggacatcatccagaatctgtacacaggaattaccattccgtaagtcataccaggatggggcattactgacattccagaattgccagccaggactatgaacaacttgcttgttcgaaaggtgaatcaaactatttggccgaccccgtgatcaccacatactttggaaccatacaatggctattgcatacccatagtgaatcccaatatagcaagacagatttccaaaatgtagactacagaggcccaagcccaacctctgatggcttcaatgcacgcctt

SEQ ID NO: 60354 - DNA, 236 bp, Glycine max
  Clone ID: PAT_MRT3847_25510C.1
ttcttgtttctctgatgaagggtgttccttctctctctcatcttcacaaggatggtgcgacatcagagcgtgtgcgggatgttcggcgacgtcggcgactctcacaaactttaccgcagcatcacaggtcggtaacgtttcctacactcttattgaagtcactattactgagaagttacagagatcaatcttagcgattggtgctaaagctaggggagaaattactcgaggcatat

SEQ ID NO: 60355 - DNA, 325 bp, Glycine max
  Clone ID: PAT_MRT3847_25511C.1
ttaatatatcaaaaataaggcccagaggcatttccatcctgaacataatatatcctttttactcttaacataacaaaagaaaaaggaaatcccttctcacccattataaaatatgtctatgtacaataaccgagtttaaaaaactgacaaactcaacatatattttttgattaattataatgcaaaaaaaatcaatctaaactataaacaaccttctgctctgttacacaaaatatggtacaaaacaagaaaaaccaatgcttatggaagcattttaaatttgccaaacaataaaaaacctccctattaaataactagttattaa

SEQ ID NO: 60356 - DNA, 301 bp, Glycine max
  Clone ID: PAT_MRT3847_25512C.1
atggaaaaaacactactcgtgaaggggtacctgcaaaacattatcacttcaatatgtcaatgcaacaacaatttacaaatttggagaatgtggtccacccttatagaataggggcagccctttatgattatcaacattggcagccacattataaatgggaaggtctctcttgttaataaaccgagcctttctgtattgaaggattatgattaggtgacaaaccctttgctataggattcctatccaaaatatttagatgttccataagcctcacgaaagagggggtctgaggattaagggg

SEQ ID NO: 60357 - DNA, 246 bp, Glycine max
  Clone ID: PAT_MRT3847_25513C.1
tcgccttcgcgtgcggtacacaccacaacccttcaatgacgtccatgaccactatatttgccaaacctacttacgctaccactctctctacaaaacctgctataccaatttcacgcctgcccctaaaggcaacggatttgggaacttcaaggcaaggaggcacgaaggggtgggagacccgaacgcgctgagcaaaccagatggagggaagctcgtggtgcttgtggggacggatttggagaggga

SEQ ID NO: 60358 - DNA, 366 bp, Glycine max
  unsure (1)..(366): unsure at all n locations
  Clone ID: PAT_MRT3847_25514C.1
aattcggctcgagaaaaataatatgatcattgatcatcacatcgtgccacacgaatacctacggttagctcagccagatggctcatcactttctcctcgtcctcctcctagctcctgctcacaacaacattaatgaaaggtgaactagggttagacaccaacacagccactccatggatggctccatccacctggagatgctgctctctgccgcctccgccgacgatgacgtctccggtggcatcgacaccaaaaaggctatgtctgctgacaagcttgctgagcttgccttanttgatcccaagcgggctaagaggatatgggcgaatatacagcctgctgcaagatcaaaagaaaggaagatgc

SEQ ID NO: 60359 - DNA, 265 bp, Glycine max
  Clone ID: PAT_MRT3847_25515C.1
cccactccttcggtcggtacctgatatttcttgagttgcaaaaattaaaacaatggtttcggctgagaccatgaacatcccgtacggcttgtgcttcaaggtttatgccaaggtcatcgaagttgagggcccctgtggaaaatctgttcgagacttcaagcacttgaatctcaattttgagcttatcactgacgaaaacggttaattgaagctgaatgtggacgcctgcttcagttctcgaaaaacatccagcgccattcacacc

SEQ ID NO: 60360 - DNA, 293 bp, Glycine max
  Clone ID: PAT_MRT3847_25516C.1
aacagactctgggccctcaggctgtcctggactccaggactggagtcttgagagctccatgggctgcctgctgtcctctaaccagagtgctgctggctggggctccttgggacaacatgcactcttgttcctctatagtgagcctctaagaggagtgccattaaagcagttctagctggtgagaaggtgggccctgttcttgcctcgagaggatgtcgggtgttaccgcgtagggacagccaccctctggggaaagttgggaaaaacacagccgcagtgggtgcctctcagcc

SEQ ID NO: 60361 - DNA, 480 bp, Glycine max
  Clone ID: PAT_MRT3847_25517C.1
ctcgagccgattcggctcgagatttccacatgggtgtgttctaccatgaagagccaccaaaccatcccaagagatgcaaataccttgtggcaactcttaaggaagtattttcccgttgccaaacgtttgcagcacggctttcaacttcaagttttgaggatgagtgcccagtgagcgattttgacgagaaacaagaagtaagtatctctattttttttaaaaaaattatgaaattttgacttttgactgtatcaaagaatgtcttgtggttcatgtaatgtaatgaatctcacctaaggagataaaattttattgttgtcattattttaattatagttgatttttagagtaaagtgatttatatttaaaagtttttattcatattagtattaaattttggattcaaaggaaaagttatattaaattattttaattcaaaacaattctcaatatgagataaaacatacgaacatttatcta

SEQ ID NO: 60362 - DNA, 140 bp, Glycine max
  Clone ID: PAT_MRT3847_25518C.1
ttacattttttaacaaccatggaggataaatttttaattgaactgacacagggcacgctgaaaaaactaggcgaccgatgcattgattacaaggaattatgatgatggcatggaaaacttctatgatgtaaatatttgcc

SEQ ID NO: 60363 - DNA, 217 bp, Glycine max
  Clone ID: PAT_MRT3847_25519C.1
actaaggaggtgtacaatgttttctactagtaaacttttaatgaagacggggatccattatcatcagtgcactttacctcacaatgtgaagtaaaatttatatctatactttatgtttttgccttttctccctattttaaagcctacattttcgatcctgtgaccaaacctatgtgactttatgagaccgtgtgctcattacatgacaaacaccaat

SEQ ID NO: 60364 - DNA, 480 bp, Glycine max
  Clone ID: PAT_MRT3847_2551C.1
gcacgagggatcaatgggttaatcagaatgacaagcattaattgatcaatattttatttattcctcttcaattaaggcagcacctaatcaaattttcattacaagactttttagttaagtgtttctctctttaaaaaaaggttaagtgtttctttctttccttaatatgtctagaaactttgcattgcatttcatgttagtctactattgtccctttttcacatgtttatttttatttttttcttggtaagctaagaattttattgatataaatagttgatcttagcacagtcacaaaaaagtaagttaatcttagcacaagttgtgctgatactagaggtatacaaaacaccaaccaattttttttttcttttcaaaattaactatagtgtacaatacttagtggtttacattttttttttttttggttcataattaccaattgcaggccaagccatacttgcaggctggtgcatttga

SEQ ID NO: 60365 - DNA, 169 bp, Glycine max
  unsure (1)..(169): unsure at all n locations
  Clone ID: PAT_MRT3847_25520C.1
atagctgatgaaaccatttgcaaggaattgaaaccacttgagtctgaatttgacgaggaggaaaaaatatgtgatgccatttcagaagaacatgaacatcattttggaaggccaaaatcaagggangaagctttacatttcttgaatgaacttggctggctgttccaaa

SEQ ID NO: 60366 - DNA, 257 bp, Glycine max
  Clone ID: PAT_MRT3847_25521C.1
aaacaataccttttatttgtaaacgttgcctgtctttggctgctaaaaaagaacgagagccatctggctgtaatggatcccctctatatacaaagatccaagtggtttggattatcctctaaaccggaaaaagaggctttttggctccgaaagtgatggaatttaggccagacaattattttccgagttgacaatcctaaaataatcactgaagagggaagattcttttccctccaaacctcccggccgcccctggc

SEQ ID NO: 60367 - DNA, 552 bp, Glycine max
  Clone ID: PAT_MRT3847_25522C.1
ctctatctttttttttttttttttttttttttttggaattcgcattttttattcattcataagagaaaaaacaatcgtaacgaatgtaaagtaaggaaacaaaggtcaaaaagggcgaccattcggcgcttttttggtaattaattaatggagcaataattgcctgatgaaataagaaaaagcaaatgatcactcagaacgattttggacggggtggagaaggggcggtgccatcggcggaagaccaagcgggcggagagggggcgaacactccgtccaacccgaaacggccccactcgtgggagggcactccgccgctgccctcagtcccttccgtcggcgctttgctgccgtcctggagacatttatttggttaatttatttccaccaaacaaaaggtttgttgctcgccgcagatgcccaaaatgggggtgggaccttttcccttgagggagggaggggaatcttagattttcatagaaaaaaaaattaagttcttatgaggaaatttgaacaaattcctaaagaacatcaattttaaactttaaaaat

SEQ ID NO: 60368 - DNA, 240 bp, Glycine max
  Clone ID: PAT_MRT3847_25523C.1
ggctcgagcttaacaatcaatgggtgatgatatttttgatggtgaggatatggagtgtatggaggaggcttatgagatggtggtcgtgtacacttattttagcacggctcttttcgttgatactgacaacgacgatgtgtttacttttcatacccacgttgttgaatttaactacaatgaatcactttttttctccctgatcactttaccttacccttatacaatccacctcaaacactt

SEQ ID NO: 60369 - DNA, 265 bp, Glycine max
  Clone ID: PAT_MRT3847_25524C.1
cgactcgaactaccaacggcgaccattacacttcacagtgtcatcgcgcccgcatacctggccatcacaggctgcctcagcctcacgctagtacccgccgtggcacgccccatggcgtgcgccccacgcgccccaacgtccctcctcgctcgtggccgtggcgcgtcgtcgtcaccttcgctcctggtcacgcgcgccatcgacgtgaacgagttcctgggggacttcggggcgcgggaccccttccccgcggagcttgagagtt

SEQ ID NO: 60370 - DNA, 1041 bp, Glycine max
  Clone ID: PAT_MRT3847_25525C.1
atgaagtcccttcaagtagggcaagcacaacaagactccgatggaagtgataaggtttcagacaaaagcattgtagttcccaacaaattcatcgcaatagctgatagcttcaaaggagaacattcatggttcattgctcctcaaatcccaacagatttttcaattcaagtccaggaaaccacttataatgttcacaagtaccccttgatatcaaagtgcggttacataggacgattggaaattcagcctttgatatcaaattctggcaatgtgctcaaccttgaaaacttcccaggtggatctgaaacatttgaaacaattctaaagttctgttatggcctccctatagacttcagcccagataacatagctgcactaagatgtgcatcagagttcctagagatgactgaagaactagaagatggaaacctcatttctaagagtgaagctttcctcacctttgttgtgctttcttcatggaaagacactatcactgttctgaaatcatctgaaaacctatctccatgggctgaaaacctccaaattgtaagaagatgctgtgattccattgcatggaaagcttctaaagatgagctcacaagcgaggatgcagcacctaatcaagaaagctggtggttcaacgatgtggccgccttccgcattgatcattttatgcggatcatttctgcaataagggcaaagggaaccaaaccagagaccattggtaaatgtatcatgcaatatgccaagagatggctgccgggaatggaggtggagttagaagggctaagaggatatgggcatgaaaagtgtaacctacagttcagtatttttagtgggaagaagaaagaaagcagtggaaacagcaaggagcaaagaacaattattgaaagcctaataagcattattcctcctcagcaagatgcagtctcgtgtaagttcatgttgcagttgttaaagatggccatgatgtattctgtatcaccagctctcacaacagaccttgaaaagagagtgagtttggtgttggaagatgctgag

SEQ ID NO: 60371 - DNA, 376 bp, Glycine max
  unsure (1)..(376): unsure at all n locations
  Clone ID: PAT_MRT3847_25526C.1
gggacccccgggctgaggaancggacggggcaanaaaaaaaaccaaccatggcacnatttctactgataaccaanaggacctctcctaggaacctcctaggagcaccctaggaaccacctagagaccaacagcagcataaaaccctcctcagccaaaccggaattataactgctgcnctatcggcatacactcttactccggctgggtgccctcacaggcactgtcataggtttgacattgcaacccctcttcttgttatcttcaccccatcctgtcctgcggcgttgggctgtcctggttgcttctggcttttgttccgggggctggggtggctgccattgtggctatcttggattacaactacgttcgggaacc

SEQ ID NO: 60372 - DNA, 707 bp, Glycine max
  unsure (1)..(707): unsure at all n locations
  Clone ID: PAT_MRT3847_25527C.1
attcaattcctttgaatcttgttctctctaatctctctcactacaatggagactccatcatccacagcaagaagaatcacaagatcccaaatcgcctccaacaacaacatccccgtttcaagaaaaaagaacgaggactgcccagaaaagagcgtttcaaaaacgcggcagagaagcagcgtgcaacagcaggaacggtgtgcgctggtcgacatatcgaacgattcaccgatcgcggggctggcgaacgggaaggacatcattgagacgccgttgtcgtcgatggcgaagaagaagagggtgaagaagacgatgaagactccggggtcgggagagtggaggaagaggctgtgatttcgaagctatcgatggaaattgttgcaccctttctgaaacttgcgaattcttctccaatgtcgcttcttgcgcccactcccgcaaacacaccacaagtccccaatctttctgaagtggctttggtgtctccaccttctagtgtggttgaagaacaattgatctctcgggtggtgaatgaaatatttgaagggaagaagaacgagaatgctgaatgtgagaagagtgtgataaccaggtccttgctgttggacttctcggacaaatcccgagtttcagaatgctcttctgaggtgacatatcangaagtgacacaaggaagtgttggtagccgtgggtccaccgaagatgat

SEQ ID NO: 60373 - DNA, 350 bp, Glycine max
  Clone ID: PAT_MRT3847_25528C.1
ctcccaaaccctcttccctctctccctaaccaaaagactccaagaccattcacattcacattcaatccaaaaccttcaacttcctttcctcccaattctcaaaataccaaattccaataaaaaatggcaccttcctttcggaaatccctccccctccttaaaaccccccctctcctcgtcctcctcctctccgtctccgcccacagcgggcaccgcgacgacgacgacgacgacgacgcggacgccggaggcgacgccaccccaaactccgtgctcggtctttgattctcgcaaacgtgtggtgtttgatcgttattttttttgctactttgtatcgggcgtttccccct

SEQ ID NO: 60374 - DNA, 1335 bp, Glycine max
  Clone ID: PAT_MRT3847_25529C.1
attcatttctctcttttgaatcttgttctctctaatctctctcactacaatggagactccatcatccacagcaagaagaatcacaagatcccaaatcgcctccaacaacaacatccccgtttcaagaaaaaagaacgaggactgctcagaaaagagcgtttcaaaaacgcggcagagaagcagcgtgcaacagcaggaacggtgtgcgctggtcgacatatcgaacgattcaccgatcgcggggctggcgaacgggaaggacatcattgagacgccgttgtcgtcgatggcgaagaagaagagggtgaagaagacgatgaagactccggggtcgggagaggctctgctgaggggccaggtgaagaccctcttgcagagggtggaggaagaggctgtgatttcgaagctatcgatggaaattgttgcaccctttctgaaacttgcgaattcttctccaatgtcgcttcttgcgcccactcccgcaaacacaccacaagtccccaatctttctgaagtggctttggtgtctccaccttctagtgtggttgaagaacaattgatctctcgggtggtgaatgaaatatttgaagggaagaagaacgagaatgctgaatgtgagaagagtgtgataaccaggtccttgctgttggacttctcggacaaatccgaggtttcagaatgctcttctgaggtgacatatcaggaagtgacacaaggaagtgttggtagccgtgggtccaccgaggatgatggtgcttccatttggtccattcaggtgaatgcgagcacgcatgacgaagatgaggacgatgaggaaatgggtgaagaggaagaagaagaagaagaagattattgcgaggatgctgaagagtgttatgattatgttggagggttgtcacttgaagagctatgtgctgggatgaataacattagtgtgaatgagaacaagggttgtgggaagcacacgaggtttgtgtacgatagtgaggatgagattgtggagaaagtggtagaatgttgtgctgagtctgatgtgatgcgtttgaagggtttgccaacacccaaaggaaagcaccttcgctttcctcaggaggaagaaaattcctctgacttgtgatttttgataattggtgctgctgcggtttggtttggtattgtctttcttgacaccactgttttggttaatggtgtgattggggaagctaaattgctgctccaataaacacaaccattgttatttttctttatcaataataaataaaccattgcttgtttaaacatactaaattgctgaaaaaaaaaaaacggccattgaaaagtttctttatcaccggg

SEQ ID NO: 60375 - DNA, 156 bp, Glycine max
  unsure (1)..(156): unsure at all n locations
  Clone ID: PAT_MRT3847_2552C.1
cttcnaattccaaattggtgnnngagncactgagaaactccaagaaaaaaaaaatacagcgttnccgngnattnatgnnccnctgtgcactcanaaaacttttcncttttgtggntcatgcagtcnnaggtactagactctacacacaanagagat

SEQ ID NO: 60376 - DNA, 252 bp, Glycine max
  Clone ID: PAT_MRT3847_25530C.1
ggtaaaaagaaatttccattagcgagactgatggcctatgaagctcatgaccctgccatattttggttctctacaaacatcaaaacattttgcttttgaaaataatgtacgcaaaagatatttctacacttaacaccaaggaacatgactggattcttccactttgatacaaattacaataatgcttagataggcttatttcttccagaaatcaattccagccttctttgcaactgaataaaacccattctt

SEQ ID NO: 60377 - DNA, 266 bp, Glycine max
  Clone ID: PAT_MRT3847_25531C.1
ttgtacaccaccagcgacacaacgggtcacgggggggtttaaataaggaaaaggggggctacaaactagtattgccgccacagcggtggctcaactagcagtgagggaaaaggcaatcggccccccggggcaatacgagccgacgatgtgccctgacagaaaaaggaacgcaaatgatgaaagtttacatcatggatggaccaaaacgaccatgcggcgcgctatcgggtcggaccgccgttaagacccctagctcgctagctaga

SEQ ID NO: 60378 - DNA, 239 bp, Glycine max
  Clone ID: PAT_MRT3847_25532C.1
agacaactgagggctctcttaaccttatgcctgccccgtgagttgcaattaatgctaacctaccagaggcctaagcgtactcgattaacgccagtagctcccgcacatcaaaacacaacatgctgggtactcacgaccacattactctttctccggcggtgccgggagcccgacccccaccgacggtgcgggtggtataatctgcgtggccggtgaccttttctacgagagcgcctact

SEQ ID NO: 60379 - DNA, 431 bp, Glycine max
  Clone ID: PAT_MRT3847_25533C.1
acagatatacaacatggctatatctacattagaaagaatggccttagtctcgaaaaggattaccctgaccgtggcgacaagggtaaacgggactcacataagaaaaatgctatcgttactattgatggccacagatgggttcctacccaacttgaggaagcctttaaacagggcattgcaaatcatccagtggccgttcctatttcagcatactactatgaatttcaatattatacatcacgtgtattcaaagggatatgctgttcaaaattaaatcatgctctcctgcttgaggcgtatggttcaaaaaaagatttagattatttgatagccaagaatttatatcatgacaaatggggtgagaatgtgtatatcagaatacaaagaaaactgatcactttgtaaattggaaactggggttactatcccat

SEQ ID NO: 60380 - DNA, 291 bp, Glycine max
  unsure (1)..(291): unsure at all n locations
  Clone ID: PAT_MRT3847_25534C.1
caaccagtgcggttagtgatgtttttctccctagtgataattatccttattggttggcccatatggaagatggacattcagtgtatttcactgttcccgacgattttcacatgaagggaatgactttgtgtgttgnttatttatcaacccctgnagacactgncattgaatgtcttaatantgtatcaatggttaattacacaaagggcaccatccaaatattcaagcgagacacagtaatttcctttaacgatgaagactggcagggcataatatcacatttgggacctg

SEQ ID NO: 60381 - DNA, 451 bp, Glycine max
  Clone ID: PAT_MRT3847_25535C.1
gaatcattgtacggactgaggtcgaaatcgcgattttcgtgtttcgcgccgccgaggccgaagccagtgatgacgtcagcgagcaatgaggagggtctaagaaagtcaaaatcgagggcgttaaagatttacaacaatctgaagaaggtgaagcaacccatctcaccggggggtaagttaagtaattttcttaactctctgttggcgacaggggggagcgtaaagaaaaccaaaacctacgacgacacgaaagctcccaagtcgggacaagactccacgtgttcctccgcttcctccttctcgcggtcttgtttgagcaaggctacaccttcctcctctaaagacaagttgcgagatggagttaagcgaacggtgcgtttttaccccgtgagtgtgatcctgaacgaggattctcgaccgtgtgggcataagtgtttgtatgaagaggaca

SEQ ID NO: 60382 - DNA, 564 bp, Glycine max
  Clone ID: PAT_MRT3847_25536C.1
aaaaatgtaaaatagactctttaaatcaaattgcaaagtaatcatgctacacctgcggcctgccaaactagtactttggccaatcagtgtaatgtgccctaacccacaaaagaatcactataacactaccaaaagaaaaattaggtgaaggctaagggggaaaaatcaggtccttccactcctggattttctattttttttttttttaaaaaaagatggccattaggcagccaaaacttttttaaaaagaatgaataaatggaagttttttctggcataaaaataatgcccctattcaaagagaaataaaatatgatgtttgattttttatggcccttctacattggcttacttcctccaatctacccactggggtagcgggtaatgattccataacctgacaaacggggtcaaaactgggttcataaattttctatacattaatcaagagcagctttatttttccgaccagttattggcttgggaaagccatcaaagattggttttccaatggctgcagttgagagggcttgtaagtctggtttcaaattccacattttgggt

SEQ ID NO: 60383 - DNA, 572 bp, Glycine max
  Clone ID: PAT_MRT3847_25537C.1
ccgctttagtatagtttgggaagtcgagaactttgaaccgcttctccgggagacaaaaaagggaatttttgcagaaaacgctaaccaattacccagacacacccattctaaccaaagcaaaaaaagtcttctcaaaacgccagagtcagagagcagagttcaaacctcacgcctttgaactaactctaagcatttactccaatagctatagctagccccaacccaactcagagtacatcatttcaataacgcttccttttcactcttttctggaactccctcttctgtcttatatatttgctcagtgcaaaatcaaaaacccactcactattttgggttcaagctggatttgatcttagcaagcaagaaagaagctgtcttgatggcgaatcgttggtgggccgggagcgcgacggtgaagcccagtgaacaagacaacggtgacaacaacggtactcccaccaacagtgggaacagtaacaccaacgttaacgcggttctcgaggacgacgcaaacaccaacgagcgcgacggcgaagagcagaccctcagcggcgggcggcggccgcgtg

SEQ ID NO: 60384 - DNA, 193 bp, Glycine max
  Clone ID: PAT_MRT3847_25538C.1
aagcgcggtggtttgcaaatcttcgtcaaaacccttactggcaagaccatcacactcgaagtcgaatcatcagacaccatcgacaacgtgaagtcgaagatccaagacaaggagggtattcccccagaccagcagcgtctcatctttgctggtaagcaactcgaggacagcaggactttgtcggactacaaca

SEQ ID NO: 60385 - DNA, 233 bp, Glycine max
  unsure (1)..(233): unsure at all n locations
  Clone ID: PAT_MRT3847_25539C.1
gccnggcggcgcgnanacagaacagngcttgcagaancgagttctcntttctcattctgaacaacacacttcancaanntcnaaaacctgcaantacatcatcctcggaggagnatnggccgctgtgtattcggctaggtatgtngcnaaanaggtngttaacccagggtgagttggcgatcagngccnnntaatntgtntcacctgattngcngctgggctgggnaaggctg

SEQ ID NO: 60386 - DNA, 481 bp, Glycine max
  Clone ID: PAT_MRT3847_2553C.1
gtccctcattgctgggtgatctataatctcattgaaggtggttttccttggccttagaatggggagagccttaatcaccctaaacttttaccaatcaaaaaggttaaccattctttttttgctttccctctttggcatagagacaaagtctcccttttgtgcttatgcacagtcgttgcttgatcacgtgtgttgcccatatgtcagtacttccttgggacaaagaaagaatattaccactgaaattgtgttcaagctccaaatcccatagtgagattgattttgaactccgaatttgtatatccactcatttctggcctctttcaggaagagcttttatggctattatttgagcttatcttatcacactcaagtatttaagctgaaaatcaaattgaaggtttttgattaagcttataaaagtggaaccaagatttgtgggttttccaagttgtgccatttgatgtattttcaatgttct

SEQ ID NO: 60387 - DNA, 540 bp, Glycine max
  Clone ID: PAT_MRT3847_25540C.1
ggaatttggcccgaggatctttttttccctcttattccaattttcacatttacaatctcctattttttctacttctaattgcttacaattggatttgcatcaagttaaatacaaccaaatttcatgtgaatttaatatttgaactttcaagtcttttactacttaaaacaacttaatatatttgtcaacgagttaagaactagtcaaattttttttatattgttattgttttcgttctagctgaattatatatttgttttttgtgtttattttatactatgttacatggtatgatattcagattttcttaagggatgatgtgcatgttacaatcgatgataatcccgctgaaggaagatgaagtgctttttcttcctccatgagaaaccaagaattttctttttggcattgactagttttattttgtagatttattgagcgtatttttgctcgtgtggagttgctttggaatgtttttttatattcagcctagttttgttcatgtgtgaagttttgtttaagaataacattgcactatta

SEQ ID NO: 60388 - DNA, 177 bp, Glycine max
  Clone ID: PAT_MRT3847_25541C.1
aaaaaaaaaataagaactgggctcccctggccctgggaagtggggagagaagatttaaaaatcccctgccaatggatcgattgaaaggctaccttcccccacttaacaaggcaattaagtgaagttaaataccaagaaacccagcacctaacatctgaaaataaataaaaaagggaa

SEQ ID NO: 60389 - DNA, 470 bp, Glycine max
  Clone ID: PAT_MRT3847_25542C.1
tcggcggccgctctttttttttttttttctttctgtgccttttacgtttaatgcaacctaacataacgacatgggacgggtgcagttgtattatcggcaataactcttggctgcacttgcatcatctctacaacagcaacttcttggcctggctctattctttctggatgaacattctgctctagagcagctgctgaatggactggttctatctttcctggatgaactttacgctctaaagcagcagccgctgcctgactccgtagggattcattctctgattgcagattagctatctgatccttgaggatttcgaactcttcaaagagaacctcattttttgattcttccaaagccttctggcatagaacctggttctcggactcaaggcttgacaaactcaaatctaatcgttcattagactcctgaagttgtgtcgctttaagctgtgctgcttctgcctctttcag

SEQ ID NO: 60390 - DNA, 309 bp, Glycine max
  unsure (1)..(309): unsure at all n locations
  Clone ID: PAT_MRT3847_25543C.1
aggaggcgcgcggacggaagcncggaacgagggacgagaagagggttggggtgagaaggaaacaaacaagngcaaggaggggctacaagaagaggagggcccgaaccgacccaccgaaggggnggaaaaagnaaaagggaaaaaagaacncaacaaaaacacaanngggggaagcanggngagagcngancnancagcaaaaaagcagacggagggaacaaagacaagaaggagagaaaagcagcgcacacaggaagaacgaggaaggaagaacaaaggagggcagacaacgaccacacagagaagaca

SEQ ID NO: 60391 - DNA, 292 bp, Glycine max
  Clone ID: PAT_MRT3847_25544C.1
ccgggtcgacccacccgtcccattttttattctgccggttggctttcacgcagtaactgcattttccccaactccacctgctacaaagatacccataatttgcacgctcgcatgcacgcactccctctgactaagagcttgtgctttactctagaaacccagaaaagacaaacacgcacggggcaaagtgtaaattccacatacccgaactgcgactaagcctccaaggtaggactgagagtgatcacaaaaagtaaacaggggtgaccggcttttagtggcccgagctgct

SEQ ID NO: 60392 - DNA, 909 bp, Glycine max
  Clone ID: PAT_MRT3847_25545C.1
agttcctcattcgtcatggaacagattcactctctctctctttagagatttgattgacaaacacaactaattccaaagctaacaactttatagagagagagagagagagagagagagatggagggtgaaggaagaagaagagaaggaggagagagagaaacagcaacagcagcagcaacgaggaaggtggtggagggtgctgatcagagaagatacaaaggaataaggatgaggaagtggggcaagtgggtcgctgaaattagagaacccaataagcgttcaaggatttggctcggttcctattctacccctgtcgcagccgcacgtgcctacgacaccgccgtcttttaccttcgaggaccctccgcgcgtcttaacttcccggagcttctcatcggagaaggcgccgccgccctcaccggcggctgtgacatgtcagcagcttctattaggaagaaggcctccgaggtcggtgctagagtcgatgctcttcaggcaacccttcaccaccatcaccaccatgttgtgccaccacggcagcttctctctgccagctgtggcggtgggtccggtgattttgcagtgcgggttgttgacctgaataagatgcccgaacccgagagctccgactgtgagtggaacgtgaattgaaggaaaaagaaaaaaggtgcatgttttcatattcaggtgatggtggttgttaacgtgcgccggctgaggcaaaatgatgttgttgatgaggcctgtggtggtggtggtggtggtgcggagtactgtactgtatctttttttccttcaaccttctctcttgggtagttttttttaaaatttttagatattacaaaagaatttttggcttgtaaaaatatgttaaatgtaaattaactagtccggtagcagtttcttttt

SEQ ID NO: 60393 - DNA, 505 bp, Glycine max
  Clone ID: PAT_MRT3847_25546C.1
agacgacagaaggggtacaaacaggtctgtgaagaactggttcaagctcaaaaccaggcccttttactttcttgtgaatctcttgaagaaactaaaatagttaatgcttccttaaaaagagaggagattttgagaaagtttgctgctgaagagaaaacaaagtacttaaaaggcatgaaggagcttgaggaggcgaaaaataagttttccaaagagtcatatgaaagacagatggctgaacttgatgtccttagaggatcaatagaaagacggagaattgtggatacattgctctcaaatgacaggagatacagaaagtacaccatggatgaaatcaagctagcaacgaacttttttgctgaggacttgataatcggtgaaggaggatatgggaaagtttacaagtgtaatcttgatcacacaccagtagctgtaaaggttctgcaccaggacgcagtcaacaggaaagaggagtttctaaaagaggatgagattcttagtcaac

SEQ ID NO: 60394 - DNA, 243 bp, Glycine max
  unsure (1)..(243): unsure at all n locations
  Clone ID: PAT_MRT3847_25547C.1
ctcaattgcatttgcagaagaaaagaaaatacctgagctattgaagacatttccaagtgcgacaaantatctggaggcaatggtaagcttcngaaaggttaccccttaacaaaagcaagaagttcaaaattctgggttggaaatatattcatgggatgacatttcacaagtgggtcgaaatcagagtttgacacttactatcataagaaagagctacatctgcccaatatcatgctcttaaca

SEQ ID NO: 60395 - DNA, 473 bp, Glycine max
  unsure (1)..(473): unsure at all n locations
  Clone ID: PAT_MRT3847_25548C.1
ggtntttaataaagaggactcaacatttatattgcgcaaattctccccaacctgtttccaattcattaacaaaaaaccaccgactctcaccctaatacttagctaatgaaatagaccatttactaacacccctcaaaaaacaccacacctttaatatatctcaaccctaagctctctctcccctatatcctacaatctagctgaatctccttaaacataaaggaaaccctcttatccttaattgctcctaattcacaattctcaaatagcccctcatgttatatttcaacacccttctataaaacctatacaaacttctttataaacctagatcactctttaatttctcatccaccaaccttaccagcctcttgaaatgaatcttccttttcatcatcttcttgcatttctgaaactcacaaatttacctcatacccactaaaccccgtcttaaaccgtctttctttttcaca

SEQ ID NO: 60396 - DNA, 266 bp, Glycine max
  Clone ID: PAT_MRT3847_25549C.1
aattaccacataattgcaaatgccgtaaagggggagatcattaccggctttgtctcgattaccaattaccaaaccctctcttatctcccttcttctccttcacttaactaacgttttaaatttttcctatacccttaattctttctagactctaccatgatcaaagaccaggacccattttaacactcctaactcacttttgcttttcaccaggacaatacagcaaaccttgccaatgctcttaacaacaatatacacacatttgg

SEQ ID NO: 60397 - DNA, 675 bp, Glycine max
  Clone ID: PAT_MRT3847_2554C.1
ccacgcgtccgaagggattaaaatcaatcctttgatttagacgtgattaattaattaagccatagcagttagaaagaacgagttaattaaatatcataatatatagtatcatctgaaagaagttaattttcatcttatatatatatatatatgattaaccgtttaccaactggatgagattggtagggttctggcttctgggttgcacgtgtataatgtatgtatacggctattcaaacaaattatgcaaataaaagttctttaatttgcgatcagaaatgacacgaaataatcattgttgtattttgagcaaaaaagttgcagaaataatcattgttgtattttacattctgagttctgaccattagtgctctatcaattactttaatcagtagaccttgtcatcttttgacaaataataattctcagggaggactgagatatatatgattaattgatcatcatcagtgaaagaattaacgtgtatagtagaacattagttaatgatttgaaattaaagagcagtgtcagactatatattaattattagatctagttaattaagaattattttcatgcatgcattatattattaatattagaaaaaaaagtccaaataaaaatgttgatttcagtgaataataactatagatgaaagctggatacctgagttgc

SEQ ID NO: 60398 - DNA, 347 bp, Glycine max
  Clone ID: PAT_MRT3847_25550C.1
gtgaaaaaaaggcccggcccataaaattgttttttttggcaaaaatttttaaacaagtctccttcggggggaaactgggataaacttttcaaaaccaaaaaaaaagagttccccttccccttcccgggggttagcaaccaaaaatatgggcccattttttaggccatataaaattaggggaaaaaaaccgggtttgatcccacccaggcccttcccttttaaataatgaaccaatttaacccacttccttgattttggggcccgcccccccggttccagatgggggaacatttttatccctgcctcccgccatggggggggcccctgcccccttggacattttggca

SEQ ID NO: 60399 - DNA, 365 bp, Glycine max
  Clone ID: PAT_MRT3847_25551C.1
gggaaaggaagaacccccgcggaccggaccggaacggccggccgacccacgcgaccggtgaatagacgccagaaacgcacacacccgaggaacggttgaagacaaacaccccgccaggccacaaggagaacgcacacggtaagaacagagcccaacgccacgggcgacgcgcgacgccacaacccaggagacagcaaacgaggggcccgcggcacagcgcacaaacacacacagagagcggggagacacaagcgagggaaacacgaggacactcaacgaaaaggagaagaaaaacaaaaacgcgaacccgcgccgacaaacgcccgaggagaccaacaaggacgagcatcgagaccccagcaaga

SEQ ID NO: 60400 - DNA, 461 bp, Glycine max
  Clone ID: PAT_MRT3847_25552C.1
tacggctgcgagaagacgacagaagggcttgtagccaatcaccgcttgaattttcagatacgccaacaaagttcacatttcttgaggggatttcagcaacttattcagaaggattggattgacatgtttaatgaacatgaacttcagcttggatattgatgatctgcggctgcataccaactatgcaggaggctatcatggtgagcattatgttatggagatgttttgggaagttctcaaaggcttttcactggaaaacaggaagaaatttctgaagtttgtgacaggttgctctcgtgggccattgcttggtttccgatatcttgaacctatgttttgcatacaaagggcttccggtaatgccgctgaggaatcacttgaccgattaccaacatcggctacttgtatgaatctactaaagcttccgccttatacaagcaaggagcaattggaaaccaaat

SEQ ID NO: 60401 - DNA, 464 bp, Glycine max
  Clone ID: PAT_MRT3847_25553C.1
ggaatattcaaagatttcatggagaacatcacacgtgctgcctttgatgtgcaatatggattatttaagcggatcacctgctttatcctaatcctggatctggaatgatacatgaacaacatttccaatttttccacttccttggtactcttctcgcaaaggctatgtttgaagggattctggttgatataccatttgctacatttttcttgagcaaattgaaacaaaagtaagactcaaggagtctcttgctctactttaggcacaactatttgaatgacttgccttccttggacccagaattatatcgtcatctcatttttcttaagcattataagggtgacatttcggagttggaactatactttgttatagtaaataatgaatatggagaacaaacagaggaggaacctgcttcccggaggaaggaacctacgtgtcactaatgagaatgtcattacttt

SEQ ID NO: 60402 - DNA, 2824 bp, Glycine max
  Clone ID: PAT_MRT3847_25554C.1
gccatggagctgtaagatagttgaatatctcattctttagaatgcaatttgccaactgaatgagataaatcttacaggaaaggataattcaaaaaattatttttccattggcaagggattatcattggtgcgtgtgcttattgctgtaatatgtcatgttggtcacaagctatgtatctgttcacaaatgaatccataatatagatttgaatcacagttcatcaatattcctttcttttggcctctcttagccaatttataacaggtttttgccacatacaacctgaaccactgttacattcatcaaatggcaatgaaagggcaaattttgataaagtttctcagcaacaaaatcagaagtatattttcgagccattcgtttatgatggaatatatgttagaaactgcgggaatggatttatcttatcttaactttacttttgacatggccgaagacattgaggaggttattatacttttcctcatggcactgcgatcttctaagaagttctccaatacttttagttactatgcaagcaaacattgttaaaatttgcgacaatgaagtcatggaaatagctttagataggaaattggagcagcaaatttataatgccataaatcctcgcttccttctgcaactgacaaatatactatttaaagagatttcatctgtcaatggttcagattatggacccaacgatagagatgttacagctgttgatggggtttgtgggtttttgaatgttaccttcaacaaactgccacttgaacggattatgacagtgctagcttacagaactgaactttttccaacactttggaattttatgaagcggtgtcatgatatcttgaaattatgattacactacaaagggcttccggtaatgccgctgaggaatcacttgaccgattaccaacatcggctactcatgcttatgattgtcgataatgacagaattttatgagcaggataaaccgctatcactgaagaacattagaagcctcatcattatattgagacaggttctgtggcagctactgtgggtgaatcatatcacatctgctaattcggtaaaatctgtcccagttagttcagctagtaaggggcagtctgttcagaccattcaacagagggtttgcattgtagtctctgagcttctctcccagctgcaagattggaacaataggcggcagtttacatcccccagtaacttccatgctgatggggtgaatgacttatttagctctcaggctgtaatagaaaacacacgagcaaatgaaattttgaaacaggcccctttcttgataccatttacaagcagggttaaaatattctcttctcaactagctgctgttaggcaaaggcatggacctcaagctgtattttctagaaatcgattcaggatacaacgagatcatattttggaagatgcttacaatcaaatgagtcagttgacagaagatagtcttcgaggatcgattcgtgtgacttttgtcaatgaatttggagttgaagaggctggaattgatggtggtggaatattcaaagatttcatggagaacatcacacgtgctgcctttgatgtgcaatatggattatttaaggaaacagcggatcacctgctttatcctaatcctggatctggaatgatacatgaacaacatttccaatttttccacttccttggtactcttctcgcaaaggctatgtttgaagggattctggttgatataccatttgctacatttttcttgagcaaattgaaacaaaagcacaactatttgaatgacttgccttccttggacccagaattatatcgtcatctcatttttcttaagcattataagggtgacatttcggagttggaactatactttgttatagtaaataatgaatatggagaacaaacagaggaggaactgcttcccggaggaaggaacctacgtgtcactaatgagaatgtcattacttttatccaccttgtagccaatcaccgcttgaattttcagatacgccaacaaagttcacatttcttgaggggatttcagcaacttatgcagaaggattggattgacatgtttaatgaacatgaacttcagcttctgatatcaggttcacttgacagcttggatattgatgatctgcggctgcataccaactatgcaggaggctatcataatgagcattttgttatggagatgttttgggaagttctcaaaggcttttcattggaaaacaggaagaaatttttgaagtttgtgacaggttgctctcgtgggcctttgcttggtttccgatatcttgaacctatgttttgcatacaaagggcttccggtaatgccgttgaggaatcacttgaccgattaccaacatcggctacttgtatgaatctactaaagcttccgccttatacaagcaaggagcaattggaaaccaaattactgtatgccataaatgccgatgctggctttgatttaagttaaaaggaggcagtggagtttacgatatctttaggtttgaagccggtagaaaatgactcacagatgaccattgaattggaaacgacaaataatatggtggatagaattgaataaatttatcctgtgtgcgagtttatgtatatatattcttatttttattcaatcttcattgtcaatttgtctcttttctaaatgtacatatctaaattatgaattattttgtaaagttcactctttggcagggtttttcctgattattttggatgattattataacaaaactcaacagggaggttgtaatttgcattcagggtgagtttggaaattgggttttgaaggg

SEQ ID NO: 60403 - DNA, 322 bp, Glycine max
  Clone ID: PAT_MRT3847_25555C.1
ggtgcttatttcaatttcctagccggggaacgtaaaaacattataatggaggtagttaaaaaaaaaccaaagggggaaatctctggccgtaccaaacggaaaagccgtggggcacacccttctaatcgccgatggacaaaacccctcttacacctccccctttcgcccctaagagagaatgcccaaacggccttcccaaacggactcccccctaaatggcaaatgaaaaacgccctgtgtaggggcatcaaacacggcgactgtggcggttgcccgcaccctaacccccaaaattgacagttccataccccccggccctgta

SEQ ID NO: 60404 - DNA, 335 bp, Glycine max
  Clone ID: PAT_MRT3847_25556C.1
cgctttttgcacccccaacacaaacagcaaagagcgggggcacgcgaaacgaggggaggatacggaacagcatcggcgccgaagaccgacgcgactgatccagaacagaagaagagcgctagagaagacatcaaggagcccctcaactccaagagctgccaacctatacacattcgaacgggacggcatgaggctgggacatataataagagaaccgaggactggccactgagaggcggagcaaacgggagctaaagatctgaagcggagctgaaacatggagccaaagcgggacccacaaacgcagccgaacatactcagcgcaacaaagacaa

SEQ ID NO: 60405 - DNA, 332 bp, Glycine max
  Clone ID: PAT_MRT3847_25557C.1
cggaagttgatccatgtagccgaccccacctagtgggataaggcgttattgttgttgttgtatattgtcttatgtttctgttagaggtgatgactcttatgtttctgttagaggtgatgacgtgacggaataagatttttgttgttcttgtgtttgtgtcagtgattgtgtttacttttgcgagagatataattttttcctcgtgaagctgtattatggttttgaaaagttaaatgagaattggatgcgcatagtcagataatctttatgtatgtacttgggagtcatattttttctctgaacattatcaccataatgtgcagatattttga

SEQ ID NO: 60406 - DNA, 514 bp, Glycine max
  unsure (1)..(514): unsure at all n locations
  Clone ID: PAT_MRT3847_25558C.1
tcgacggacgccaagcaatttgctatttcactttattgaactatgaaacctaatantgtagaccaagtgttntgttgtggtgggtagaattgtatctnttcttataaaacgaacttggtcaaaatgattnccccaanncttaacctnggttggaaaaattcttcgttttgtagcgtttattcttcaagaacacatgtgattcgaatatttatattcgtctatttgtttaaaattcttatcttttgttacctgtnnaatccaggtggacccaatatcagtaaagcttctacccacaaatgtgggtaccacaatgccgtggtttttgagactatngtaccaatggtcataccagggagacgtctaagtgcaatgattttccttggccctacatattaccaaagactgaagcatatggttgacgacaagatccattctcgtggaaggggtcctgtgcagatcctcactaagcaacctgctgagggacgctcacgagatggaggtctccgatttggag

SEQ ID NO: 60407 - DNA, 518 bp, Glycine max
  Clone ID: PAT_MRT3847_25559C.1
gtgtatacaatgatagattgctcacaggactacgatatgtcgcacggcctcaacattctttaagactgacactgcttctcataccctgactgccgacctacaccacatagcgatacagcggcgacttgtcacccatggcaagcagttcctcctcgctgtactgctccctcacttccgcctcggtcatttgatctctcttcttgttgagcgacccgtaagccaacctcaggaaaagcgtcgcaacgatgcccgccaacaagatacccagacaaaagccatacccgagccagtacttcggcgcctgcgcttccagaaagatgttggacccgatcgcgccgcctagattgccgatggagatgagcagagccatgccgacggagcgcttccatgttggtgcaagattgttgccgacccagctcaagatgccgataatgggaggatacacgcctgctggaatggcaaagaggaaagcatacgtgagaccagggtatcgtgggtgagggatcgcaagaagagca

SEQ ID NO: 60408 - DNA, 1295 bp, Glycine max
  Clone ID: PAT_MRT3847_2555C.1
ttatgggtaattggtggttaggaagaacaacaagggttggttacagttaccgtagtgagtttctgatccgatggatgacgagcagcaagagggtccaagacaggagcaagaagaagagggttcacgacctcgaagtcacaaccgagaaatggaaaatagcctccaaaatcatctacttaatggagcttctcaagcaagagcccgaaatggtcattgccgttcgctccctggagcaccaccgcagacaaatcaacctccccaagccccaccgtgtctccgatttcctccgcaaaacgcccaacctcttcgaactctacaaggaccaaaagggggtgctatggtgcggcatgacctcaaaagccgagaacttgatggaacaacaacaaagggtcatcgaagaacatgccgacaaagtcgccgaacacgtcacgaggtttctcatgatgtcgctggataaaaggcttcccttggagaagattgctcatttcagaagagattttgggttgccgttggattttagagtccattgggtgcatatgtatcctcagcattttagggtggtgaaagcacttgatggggttgagtttttggagcttgtgtcttggaaccctgattgggcaatcactgagttagagaaaaaggtggtgacagagaaaactgcaactaccaataccccagggatgctttcaattccatttcctttgaagttccctgcgaattataagagggtgtatcgttactatggtgaaaagattcagcattttcaggagatgtcttatttgtctccctatgctgatgctcgtggacttaaggctggatcattggagtttgataaaagggctgttgctgttatgcatgaactgcttagtttcaccattgagaagaggttggtgactgatcacctcacacactttcgttgggagctggtgatgccccagaagctgatgaggcttctgctcaagcattgtgggatcttctatgtgtcagagagggggaagaggtttagtgtgttcttgactgaggcttatgagggttctgagctgattgagaaatgccccttggtgctgtggaaggagaaggttttggggcttgtggggtatagagggaggaagaagaagtttgaggtatgcagtgatgatggatctgatgtggaggatcatgatggtttggtttgtgatcagagggattctgaagtgggggacttgcatgtgcagattgagcctcggggtaccttggattatgaggatcctttacttggggatgattctgagatggatgttggagagattacatga

SEQ ID NO: 60409 - DNA, 344 bp, Glycine max
  Clone ID: PAT_MRT3847_25560C.1
ctcagccgataatttaagagctactgtgatgctgatgatgatattgactcactatacaaacaacactgagcgaaacatcgagatactatggacggtactataaaaaaggaccctctagagcgttgctcaattggctggatcatagaccctcacaagaccaagagctttttgcatgttgggaggccaaatatatgagaatactcagagaccggcctgacacagattggggtgcactcaagtgggatagagatcactctccagacctacaatttggccatggactatgcggaggaccaataaatagtttacctgttaatgggcaaggaatcaacgctgccattaaa

SEQ ID NO: 60410 - DNA, 916 bp, Glycine max
  Clone ID: PAT_MRT3847_25561C.1
atggacatttcacagagaaagagaactttgctaaagatcattgttcttggtgatagtggaaaattcagccagcagtataaagctacaattggggctgattttgttacgaaggaaatacaagttgatgataaactcgtaacattgcagatttgggatacagcagggcaagaaaggttccatagtcttggggctgcattttatagaggggcagattgctgtgttctggtatatgatgtaaacatacacaaaacatttgatacactaaacaattggcatgatgagtttcttaagcagggagatatgaacgaccctgaagcatttccctttgtattacttgggaacaaggttgacgtagacggtggaaacagtagaaggatgacactacgctatgagtccattctaattaaattttacatccaaatatttgaaccttttcatgcaaggtcactgagaaaaaagctagagactggtgtgcttcccggggaaacataccatactttgagacctctgcgaaagagggctacaatgttgaagaggcttttttatgcgttgctaaaattgcactagaaaatgaacatgatcaagacatttattttcgaggaatctctgaagcagtttcagaagcagaacaacgaagtggttgtgcatgctgaagtaggatgtaagaagattaatgtgttttactgaacatatttggttttgagctctggtacagtatcatttaattcattaaggtgtagtgtctatttttaaatcccgaaattggtacacatcgtacgggtttctaaatctcagtatgtgtggaaaaccttctttgtactctcttcagatgaaattttaattctcatgctcgaatcaaaatttatgtaaatcttgttttgtatattttatttacagtacttactttctgaacgat

SEQ ID NO: 60411 - DNA, 249 bp, Glycine max
  Clone ID: PAT_MRT3847_25562C.1
caagcccacacagaacagaaatggtgatattaatgagagtcccagcacaaacccagacacagttacaggtgaagaaacacatgatagatggtttcggagctatatacttcattttagaattgttttagcaaaggtgatcttgaaaaactcttcattgattgtctcagcaatttaaagcttatccacatgcactgtttatctgtgacaacattgtttttgtatattaacctttattggctattttatctt

SEQ ID NO: 60412 - DNA, 347 bp, Glycine max
  Clone ID: PAT_MRT3847_25563C.1
accgcgaaatgggtaccggggaaaataaccaaattttggctcaaacgaacggaaaatttcagaccaacttgggcagagtggggaatacaaggtgggttgattgaacaagctgtatgagcagaccgccatgaataattaaacaggaagacctgatggctatggacaacgacgaagaagggagtaacgctttcaaaaagaaggcccgggaagcatacaagggcagatctggcggtgcacaatagtacaaagccagtgaaaaggactggtcactaattatggtaagaaggctctacaggggagcctctctggacaaggggcaatgatcccatcaattgtggaagaaagag

SEQ ID NO: 60413 - DNA, 477 bp, Glycine max
  Clone ID: PAT_MRT3847_25564C.1
ggggggggaacaattgggaagacaggaaaaaaatcaacagaatcttccaaaagattaatttgagggtccccccccaactaaaagagaaaccccaaaggaataaaaaaatttccccaaccccctggggaaaagcatacaacagttatgaaaaactagtatttactataccaatccggggggtggataaaatttacaacaaaacaaaccaaaaaatgcaataaatcgaagggaaccttatttggccaaaaaatcctaaccccccacttccaaaatttccaaccttccctagctcccaaaaagggaaaaaaaaaattccttcagcatagtaaaaactcaaggaacatggcatctctaggcccccccttgggccgggaggaaaaaacattggcaaaaagttgctggtggttcacgtaaaaatgcattggattcccaaaccctgaaaatccaaaacttcctggactttggagcatctttagg

SEQ ID NO: 60414 - DNA, 479 bp, Glycine max
  Clone ID: PAT_MRT3847_25565C.1
agaatcagctaattgacacggaggttttttttcccttgatttcattttgctgagtctataacatcgggggggggagaaaaacacaccaattttgatctcagtacttaatttgagattactggggcgctattgtcccattgagactcctcggccgcagtcactaaaaatcgagcaacgctcctgcgactcgggcttgccattataggcacccctttgccattttggggccactccttgactgattcaacattcgtttccaccaggcgggacggacgaaccatcacatatgtgacaccccttttacggaccttttggtccgtcatgttgggatcatcataggggtagctcatgttagttttgctcatcaagcctcggagcaaacaggccatgttcggccacgaggcgcccactccaaaagcttgcatgatgaccacttttttgatgccgaattccttcattgccgagaccacattggcatt

SEQ ID NO: 60415 - DNA, 1910 bp, Glycine max
  Clone ID: PAT_MRT3847_25566C.1
aaagaaggctgtactccagagaaacttatgatgtaaaggatatatgtactctgtatatttactatttttatattttttttttcgtattagaagaattccgagcagaattgtttgttctttttcattcttggccattcattagctgattgaggatagaagcttgagggtgccagagagagtttcttggatcagattccaagtcataagtcagtttcgcaaatgacccgtttgaagccagaattccaagcaacacgcaagccatgcaggatcgccaataattctgctgtcatattggtagtgataccgccacaactactaaaacccgtaagccatttaccattagagtcccgtagaatcccaccaatgccagacattctcggatttccctaggagctaccatcaacattaaccttaacaaaatctgctacaggtggtgtccaagcaaccagacggtgagaaggagtattgttgacctttgttgaaccttgaagaagtgctagagtataccaagcagaccacacctgatcttcaaacacttcaacgttccctgctttccaaatgaaccaacaaacacaagcaaaatgaacaccgtgtcacttgagctgagttacgaaccatgtatctccattcattgcaaagaaatcagtatcagcatacatatttatgtgactccaaatttctctcgcctcactgcaatctctaagcaaatgaataatactctcgtcttctagcccacacctgcaacaaaagggatcaaaagagatatgacgcttagtacggaaaaagttagtagggaggctgttttgcagaatcagccaagtgaagtgtttaatattttcaggtgtttgaagcttccagacccagttccagtcccctggaaaattactatgattggcaggctcatgaatccactactcataggcagatttggcagtgaaaattcctgattttaattgcccccatatgattatatcatagctattatcatccataaccaagctcgtcattttattcttgacttcgtcaggaataatagaataaaacttcccccaactccattggccgttaaccaaaacatctcggatgagaagctgcgtatcactaatatgcacgtagtccatgcaatcacaaattggaccatcacccagccaattatcgtagaacacagaaatttcgtcattgcctacacgatacttaaagggacgatctaggaaactagcagccttcacaatcgacgaccatgtgggtgaacaaccaatcttcaaaaaatgaaaaaaaaaaatgaccacatatggaacaatctcagaagaggcttcatcaaattcaaactcagttttcgtttcacaggccaaagagcgcattgaagacggtctaggcacaacaagaccatggagtgaaatgctccaaacttgtcatctcaaacttccatcttccttcttcggtgcaatccaaagaatcaacacaaatgccaaacattttcgagcaaactacgtgattatcatactgcttgtgcttttccttagcttactaggacaccccatttctttgatcatattagttgttatgatgattgcatggctgtacttatatttcctacgagatacccctttggtgattttgaggtttgagatggatgagcgattggtggttatctctttgttgttgatcaccattggtttgcttgtacttacaaatgtaacctacaatgtgatagttggtatgtgtgttgccttagtggttgtgttggtccatgctatcatgagggaaacggaggatctgtttaccatggatgaagatgtaggggttgtaaaaggttttagagatgttgtcaaagtccctcttagacaacctggttcctcttcttttactttgccttagaagcaaatttaattagaacaattaagatgttt

SEQ ID NO: 60416 - DNA, 271 bp, Glycine max
  unsure (1)..(271): unsure at all n locations
  Clone ID: PAT_MRT3847_25567C.1
tgtaattaatgngcagctgcaantagcatcancnncanctcctctgcttcactctgtantcnaanaacaacccaatgncctcctcaaacacaattacaaggaccatgancangtncatgtnccatcatcancatcancatactggcacaanacatgctgctctcaagatatccaagancaacaanaanaangtttggnatcaccacaagcaatcaccagggttnatatgttccttcctcgtaggtttagttgttcagcatcgtcaaccttc

SEQ ID NO: 60417 - DNA, 1262 bp, Glycine max
  Clone ID: PAT_MRT3847_25568C.1
ccagctcgcgggcgtggcaaataactgggacaagggacgaggtaaagggggaggcagacacaagagacagcagagcagagatctagcgtattctctcgctctttctttcactgtcacagagccacatccatgggcttcccagccaacggcgcctctgcggcccagcccctaaacttcctcatctacggccgcacgggctggattggcggcctcctcggctccctctgccgggcccagggcatctccttccattacggctcgggccgcctcgagaaccgggcctccctcgaaaccgacatagccctcctcaagccctcccacgtcttcaacgccgccggcgtcacgggccgccccaacgtcgactggtgcgagtcccacaaagtcgagaccatccgaaccaacgtcgtcggaaccctcactctcgccgacgtctgccgcgaccacggcctcattctcatcaactacgccaccggttgcattttcgagtacgactccgatcaccccctcggatccggtatcggcttcaaagaaaccgactctcccaatttcaccggttctttttactccaagaccaaggcaatggtagaggatctgctgaagaactatgataatgtgtgcacattgcgagtgaggatgcctatctcatccgatttattgaacccgcgcaattttatcactaagatcactcgatatgagaaggttgtggatattccgaattcgatgactatattggatgaactgcttccaatttcaattgagatggggaagaggaatctgactgggatctggaactttactaacccaggagtggttagtcacaatgaaatcttggagatgtacagagattatgttgacccgaacttcacctggaacaacttcactctcgaggaacaggccaaggtgattgttgctccgaggagcaacaatgagcttgacgctgccaaattgaagaaggaatttccagaactgttgtctattaaggattctcttattaagtatgtcttcgagccaaaccagaaggttaaagctcaagtctaaaggttcaagcttttctcatttttatcatcatcattattattattattattattgtcctcgtttgatttaagtttgtgtggattttgtgtagatgtcactctcccttatttttatttgtatgttgtatttttaccgctcgtgattgaataaatttcttgtcgtttttaagtgcaaaaaaaaaacctggggggaggaaaggacgcatcaataaaatagaacccccc

SEQ ID NO: 60418 - DNA, 241 bp, Glycine max
  Clone ID: PAT_MRT3847_25569C.1
tatccagagaagcggttgacacaaacacctttagatgatcttattcggggggtgtgaaagttccattccatttttagatgaaatatttatcactcaatttgcgcacattcctttgacacggggatcatttgtatggtcgttgttacaaccaaggtctacggctatcattgatcataaatgacacagaacaagttactttggggctgttaataaagcatgttgactaatgttttggcactga

SEQ ID NO: 60419 - DNA, 421 bp, Glycine max
  Clone ID: PAT_MRT3847_2556C.1
gccatagttaggatttccatgttgaagctctagggaattttgttgaagaatctagtgtccctgttgtgactgtttaacaatgatctgagaaatcacccttttattgcctaattcttcagcagtcccaattcaaaggctttgaaggccttcttccttgaccattccacaaaaaaattcccatgttttctccgcatcatatcctgtgttcaagaaacctaaattaaagtattgattttgtttggtaatattgtttatcaacttcactgctgaaggtgctgaatctttcaaatcaaaataccgagaaactgctgagcaatatagacaacagggtttaagctttctggttagagatgttaagtctactaaaggttctttccagtattttggagtgaaggaagaccaagtacctctaattacggta

SEQ ID NO: 60420 - DNA, 887 bp, Glycine max
  Clone ID: PAT_MRT3847_25570C.1
gccacgtgtccaactcggagaagacgacagaaggggacacaacacaatcttaagaccaacctctctctctctctctatatccagactccaccctctcagtactcttcctcatcatcttcttctctcgtgtcgcgttctctctatgagaattgagatactagaggaagaattcgaagaagaaggcatgagaaacagcatccggtgttgcatctcctgcattctcccatgcggggccctggacgtaatccgcatagtgcactccaacggccgcgtcgaggaaatcagcggcaccatcaaggccagcgaaatcatgaaggcccaccccaagcacgtgctcaagaagccttcctccccctccacccaagacggcgttgttcccaagatcgtcgtcgtccctcccgacgccgacctccaacgcggcaagatttacttcctcatgcccctcccctcgccgccgtccgaaaagaacagcagccaccgccagaggtcctcctccgggaagaagaaaagaaaggaaccccacaacgacaacagaaacaacaacaacaacaataataataacaacgccacttctgtcgccaccttgctcgcctctaatgagcgctacttgactgaagtactttccgacaaagtttctacgcagagagacagaacacgaggacgtgtcgccgtctggaggcctcatttggagagcatttttgagtcaccgtcactacctgataatatgtaactactgtaaacgtttcttctttatttcttcaatatcttaaacctctccttatattatactattatagcactctcaacatatatattttcatgttccaaactccaaacccatttttttttattataatttcagctaaataatctcatttcctttttcc

SEQ ID NO: 60421 - DNA, 674 bp, Glycine max
  unsure (1)..(674): unsure at all n locations
  Clone ID: PAT_MRT3847_25571C.1
gttaatgataaataactatataatttgtattaaaaagaaaattgacgttattatgtcgtccagatttcaagatgaactgaatcgaaaataatttggaaaactataatttcctctttgatgcttaagccatttttttttaattttaaaataaggatgataattgtacctataatttcctctttggcagtattaatttgtgttaaactaaagtatgagtcccgcagtgtacgttactccagttgaaggcaaccatagattcccctcaataaactgagccactgtgaagttactagcctggttggaatcattgaatggatggtaccctggccacttgacacggttagcaagtccagcacctgccccggtgttcatgtactcaccatagtacaatgtgttcaatgcaaagatcccattccactccaaccacccttctccccttatcacctcactcatgtacgattgcatgaaaactgttcgtgagtaactcttccagggtctccccaggtaactttgagtgctgctaacccaaggtacaaggtcagaatctgcggttatgttgcagaattggaacgagaaaccggttggttcatttgggtcttttctaccgtgtgctgngattgtgttcttttggtttggcaaccctttcttgaccccgaggaagcaatttttggaac

SEQ ID NO: 60422 - DNA, 138 bp, Glycine max
  Clone ID: PAT_MRT3847_25572C.1
gttttgtcgtcattctgtgactctgggcttagttaacgttaacagtgacttaatatgtcggattctgcatatgtcacccacgatgttgtgtccctcctctcatctcctcaaagggactttcttcttccacacaacata

SEQ ID NO: 60423 - DNA, 491 bp, Glycine max
  Clone ID: PAT_MRT3847_25573C.1
ggctcgagaaaaaattcaagatccaaatgttcttcttaaacttttaatttttatttaatcggcaaataatatatatatatatatatatatatatatatatatatatatattatagaaggagtaccagaattatttgaaggaaaagtttaaagctcaaataaaaagttactgaattcttaaacatatagttagagattctttgttgttattgaataatagttagttagaggtttaatcttcatgattgtatgtatgaaaaaagatatgtagtgagactttcggttctatgaataaatttttatactttgaaggattagtcttttagtcttactcaaaagatatcttaaattgaaaaaaaaagtgattatttatcatgcacacactataattacattaaataaaatattattcaattcttggacaagatagttcttatttgacttgttctgattaattggattggcttgatccacatttgaagttttggatca

SEQ ID NO: 60424 - DNA, 180 bp, Glycine max
  Clone ID: PAT_MRT3847_25574C.1
gtctagaaccactaaccccgcattgctgttgatcgtcacgctcgcatctatagataacggctctccagacctgagctttccgcgtcagcaagtaggaatcgtttttgctgcagagaataaaaggaccacgtgcaatacttaaaaaaaagaaaaaaaaaaaaaaaaaaagggggggccccc

SEQ ID NO: 60425 - DNA, 379 bp, Glycine max
  Clone ID: PAT_MRT3847_25575C.1
gttttgttgtagtgctctaattcacaatgtcatttatgctttatgacttaatgatgatgagtagatggtatgcgatgtttaattttattatgaacgatgattagatagtatgtttataattgtgaaaagttaatgagtatattcattaatcaaattaaattctgaaagaacttaaaatggatctttatgttgttgtatatgttagtgtcatgtagcagcttctggatcattacagttatgagtataaatgatgagtatggcatattatagaaacagtctcaagagggttgaacctcattataagttttataaaattaaatgattttagtacccagaatggcttagtttaaagttttcaaaaaatcatttgtgggaatgt

SEQ ID NO: 60426 - DNA, 669 bp, Glycine max
  Clone ID: PAT_MRT3847_25576C.1
ttctctcttcttctcttctcttcttctctctttctttctttcttttctttctttcttttcttttcttttcttttctttttttttttttctttttttttttttaaggggaaaatttgggccttttttcccctaaaaaaaaactggaatttttttcccgcccccaaaaaaggccaaaaaagggggggatgggtccccccccccacaggaaaaaaaattttttaaaggggggggacaataaaaccccccctttggaatttctaattaaaaacagggccaagcttttaaagggaacaaaaggtggggaaattctaaaaaattttcaaaaaaaccccccccctcagggggggccctaacaaaaaaaggttcccacggaaggggagggggtttaaacccttgggcccaaaccaaaaacctttttaaaaaaaggttaaaaacctccccccccaaaaaatttttctcaaaaaggggggggggaaaaccctttttccaaaaatggggaaaaaacttgggggggggtccctgatctgaccaacaggggtttgcaatgggggggacccccaaacccaagggttttaaatgggaattccaaccccaaggggggaaaaaaaaacccacagccctgggagcaaaaacttttaatggggagccccaggggaccaccaaaccctt

SEQ ID NO: 60427 - DNA, 1528 bp, Glycine max
  Clone ID: PAT_MRT3847_25577C.1
caataatggaacatttatttaaacaggaaaaaaaaataatctagaggttttagatttctacccaatagttttttatttttgggaaggaggggagtggggataaaggaaaacggggtgtccttgcctccttggtcacaaacgccgacgaccaccggcgagtattttcccggctagaacatcgacgacatcaacatggcttcgacttcaatcactaccttgtccatctactctcactcccaaccaaagttcctcaatctgcttcaacacccactcattcacacccgcaacaaaagcacatcaattacgtttaagccagcgatagttcgcgccacccttttctctacactcacttgttctcacacccattccacaccctcttcaaatttaccaccgataagggctttaaccaagttcctctcagaaaaggtagcatttttcctcattgggtcgtttctcttatcgggttgcttcagcaaaaggcctgcattcgcagaaacagctccttccgtgggttctggagcagtgttggaggagaaaatgaatcccactgaagagaaaaacgaggaagagaaaagtgaggaagaggtggaggaaatgtgggagggcattttggagaattatccgaaaaacgttgaggctctgaaggtggttttgtatgggaagattaggaaagggaagtcgaaggaggctgtgaagtttgtggaggatttgattgctgcggagccgaatgaggttgagtggaggctcttgctggcactttgttatgagactatggggcaattgagcaaggctaaaaaattgttcagggaaatcttgaagaagaggcctcttctagttagagctttgcatggtttggctatggcgatgcacaaaaatcatgaaggccctgctgtatttgaaatgctaaataatgctcaagagttagcttctcgtgaaaatagagttactgaggagagaaatataagaatcttaattgcacaaatgcatgttgtccagggtaatttggaggagggcttaaaaagatttcaagaattgattgatcaaaatcctcgagattttaggccttatatttgccagggtataatatacagtctcctgggtaaaaatgaggaagcagcacagcagtttgaaacatatcaaactcttgtgcctgaagaatttcctcagagacgattcctcgatgatgttgccatagcagcaaaaagatcatccctggaacagtttaagaaggaattcagagatcaattttcttatcggaaatagagataatataggacgttttcttatttgctgtcttggcaataatcatcagtgcaattcagtagcaggctcttgtagaagcaaaaagctagacaactttcatgatgaactacaatgtaatgtataccacagttttgttttttgtatttttttttcccctgggcttatagcacatggtttggataggattttcttgttttactttggttagatcatgtatttcaatccttaaatatggtcctttattttggaataaccttttttgttc

SEQ ID NO: 60428 - DNA, 390 bp, Glycine max
  Clone ID: PAT_MRT3847_25578C.1
gccacgcataataattccacagtccttactgttacaaaatgacagggaacaatgcgagcattaaatcgaacctatgaaacccgcgtgtaatatttgaaggaaacacccacccactctccattgaccttccttattacggatttggaacagaagaatgcttataatgggggcaaaaacactaacatatgctctctattggaaataactaggggcctgctcatttagagccagagaaatcggcatcaatgacatcaccggggggttccttggctgaggatactgaggggccagaatccgcaccgggtggagttgatggccattctgcgcctgcatatcctggctggctgcaaagggactgaccaatctggatgactaactgatttaagcggc

SEQ ID NO: 60429 - DNA, 523 bp, Glycine max
  Clone ID: PAT_MRT3847_25579C.1
aaaaagaattgtattgaaaaaagtatcaaatagtatatattatataacacattaagacttctatccacagattggatgggaagataaaacatttcaaagaggtgtcgatcctcaatgaactcgcccagcaagttcctaacaccctcaaaagagaacaaaaaaggtgattccaaaataaagcaccatatttaatgattgaaatacgtgatctaaccaaagtaaaacaagaaaatcctatccaaaccatgtgctataagcccagggaaaaaaaaagctgatatacattacattgcagtacatcatgaaagtggtctagcttttcgcttctacaagagcctgctactgaattgcactgatggctattgccaagacagcaaagaagaaaacgctctatattatctttatttccgataagaaaattgatccctaaactgcttgttaaactgttccagggatgttctttttgctgctatggcaacatgcatcaagaaatcctctctgaggaaatgtttcaggtccaaga

SEQ ID NO: 60430 - DNA, 545 bp, Glycine max
  Clone ID: PAT_MRT3847_2557C.1
accaaaaggattttaaacaaattcccttttttttaaacattttttttttataaacaaagtacttggacaaagtgttaaggtaccccccgccttaaaaaatttccattaaagtttcaaccattggttttttttacaaaagggtttttccaagatccaaaattttaaaattattttcctaataagggggaacccagtttattcacaaaaccctccaattttttttccaaaatttttaaacattcccaccaaatgatttttagctgggtggttgtcctactaaaggccagggttaatctttcctaatgtaaaattcttaaaacttccattaagtttggacccttttgggggattttctccctttcgttgatttcgttgaaacatttgcaaaagtttgtgcaccctccgaataagtttttgttgcctaagcctcttttgctgcctcctttgtttttgcaagggcggtttttgtttaagaaactgttcgggcagaaaatgcaactgccttttggggagtaataaaccttattttttctaactctaaattt

SEQ ID NO: 60431 - DNA, 510 bp, Glycine max
  Clone ID: PAT_MRT3847_25580C.1
gtgaagctccaagatttgcctcttgtgcttggtgcttgttgtgttttgcataatatatgtgagttgaagaatgaggaaatggatcatgagttgttgaagaatattgatgatggtgatgatgattatgttggtgaggtgatggagccagaggttgccatgagatctgttagctccttgaaggctagggatgcaattgcgcataaccttttgcaccatggactagctggaacttcttttgtttgattggaattgaaaactgaagattaagataatgtataattaattcttttgcttgtttttagttctagacatatgatgatggtatttaatcaaggtattcatcattgtttcttgaagggactttgtaactaaaaggtatatttgccccctccgacaattatgtggttaaatgtaatcgtcggtgtcaggtgatgatattctagtttctttaactatttaggtgatgatatttagacattcataaattacaaatagtctattactatttta

SEQ ID NO: 60432 - DNA, 122 bp, Glycine max
  Clone ID: PAT_MRT3847_25581C.1
tgctctcgctcgcagaatctgaaccctaggaaatttacccttcagacgcaaccctagattctcctctcacaaatctctcttcagttccccattctcgggattcggtgtcaagatcacagatc

SEQ ID NO: 60433 - DNA, 128 bp, Glycine max
  unsure (1)..(128): unsure at all n locations
  Clone ID: PAT_MRT3847_25582C.1
caacntcaaccccattcatacgtggtgttgttactgctgctcttancncgaatctttgcnctgnagtncnctcntccccnnacngcttcgtggtcnatgcttctagagttgangaagcngcgatncca

SEQ ID NO: 60434 - DNA, 221 bp, Glycine max
  Clone ID: PAT_MRT3847_25583C.1
tcgcccacgcgttcggatcgagatttctagaaactcttgtgatgaaaattaaagtccggtgtttcttctttgctacaatttttgtagcatggcaattccattcgtaccatatgttccctcttcgaatgaacacttgctattgtgcccgttactccgaagtgaaatgcgcaagttggaagctttgtttttaatcacacaacatctttggcttttagaccatt

SEQ ID NO: 60435 - DNA, 1585 bp, Glycine max
  Clone ID: PAT_MRT3847_25584C.1
cactaactaaccaaccaactgattaacgttgtgttggtacctcgggccgctccccctccagccacggctctccggttaccacacacaaaaaaaacactaactaaccaaccaactgattaacgttgtgttggtaactgtgttcactcaccttgcaacaatggcactctcagtttgcagcatgaacattaaccccatagcattagcagcgccatctttctcattcaagtctctcaaattcccttccttctggccaacacaaaaggtgaagatgggtcctctgagtgtgtctcccatgggatttggaacatgggcatgggggaatcagcttctgtgggggtaccaggaatccatggataatgagctccaacaaatcttcaacttggctatggacaacggcatcaatctctttgacactgctgattcttatggcacgggaaggttaaatggtcagagcgagaagcttctggggaggttcattcgagaatttcaagagcaaaaggggagccaacgtgaaatagtcattgctactaagtttgcagcatacccatggcgccttacaccagggcagtttgtgagtgcttgcagggcatcactagatagaatgcaaattgagcaaattgggataggacaacttcattggtcaactgcaaattatgctcctttgcaggaatttgctctttgggatggtttagtggcaatgtatgagaaggatttagttaaagcagttggagtaagtaattacggaccaaagcagcttttaaagatacatgattatctgaaagaccgtggagtccccttgtgttcagcccaggtgcaattttccctgttgagcacggggaaggatcaactagagatcaagagtatatgtgacagtctgggtcggagtagtggggcttatagtcctctgggacttggaatgcttactgggaaatattcatcatccaaacttccaagtgggccgagggcgttgctgtttaagcaaattcttccgggactggatcctttgttgagttcgctgagagagattgcaaataaacgacggaaaaccatgtcacaagttgctataaattggtgcatatgcaaaggtacggttccaattcctggagttaaaacaattaaacaagcagaggaaaatttaggtgctcttggttggcgcctctcctcagacgagttgcttcagttggaggatgcagcaaacgaatcacctcgcaggatgatccaaaacattttccaaaccagataaaacctgtggcgagacctcagcactcggttcgaaggaatgcatacttttcactcaatgatggtcactggtttgtatcatctggtatcatgaaaggcagagagcaaacaaccttgaccaggagaattgacaacgtaccactctattgtggcacatgggcttaaaactaatgcgaagagtccgtgacagtgatggtgcaacgtagttttggataatctcgttgtcggataatattgctttattgttaaaaattatactgacgggtagaaatgtacaatgaaatgattctatactgaccaaaagccacgcttacattcacaaaaattaaaaaaatcagttgctttc

SEQ ID NO: 60436 - DNA, 805 bp, Glycine max
  Clone ID: PAT_MRT3847_25585C.1
ttattagtagctgttaacgggttgggtcgggtcgcgaagccggggatgttggttagatagaaagggttgacccgacagaagtggcgttgtgaagtgcactgcgtttgcctttgcgtttaattgaagatcagaaatgcaaatgtcaagattcacccaattccgagctctactccgcggcaccaccagccaccagcgctcccctctccgccaccccgccgtcgccgattcttcatttgcatcaaaaccctcagtctctaatgcctccgcgttccgcgcctcttcgcctgtgttccacccgcaacaacgcctcggcaatagcacctttcgattcttctcatccaatttcgacaaaggctttgcgcagaaggtatttgataagcctgcggcagcggtgacttcggccttctcgcggtaccgcgaggcaattgggctgcaaatcgaggcgttcttcaagaggaatactctgtttctttggggcgccggtggcgttgtgctctgcgccgttctatggaggatccttttcgggatcgccaacctcttcgttggactctccgaaggcatggctaagtatggcttccttgccctttcatctgctatcgttgcttttactggcttgtatattcgcacgaggctcacaatcaacccggataaagcttatagaatggccatgacaaaacttaacacgtcagctgggattcttgaagttatgggtgcgcctctttctggaactgagttgtgctgtgagtccatgctctgtccaacacgatgatcactggatgaaatacacggcatcgtggctacactc

SEQ ID NO: 60437 - DNA, 1331 bp, Glycine max
  Clone ID: PAT_MRT3847_25586C.1
tttctgtacggctgcgagaagacgacagaaggggtctctctctctctctttctctctcatgctttaattctccaacacgagaagttaaattttagagtgagttgggtaattgttggagggtctattttttctgtccataaatacctgtctgctaggccaacccacttccatattttgcatcctttgtacctcagttccaggttaacaccaaacaacacatatagtgcagattcataagcttccaaccatggaggatccaaatcaagctccagaagggtcttctcagaagaaaatgggaagagggaagattgaaatcaaacggatcgagaacaccaccaataggcaagtcaccttctgcaagcgccgcaacggtttgctgaaaaaagcttatgaattatcagttctgtgtgatgctgaagttgcccttgttgtcttctcaacccgtggccgtttgtatgagtatgccaacaacagtgttagggccactattgagaggtacaagaaggcaaatgctgctgcttcaaacgcagaatccgtatctgaagctaacacacagttttaccagcaagagtcatccaaattgagaagacaaattcgagatattcagaatctaaacaggcacatccttggtgaagcacttggttctctgagtctcaaggaactaaagaacctcgagggtagattggagaaaggattaagcagagttagatctagaaagcatgaaacattgtttgctgatgtggagttcatgcaaaagcgggaaattgagctgcaaaaccacaacaattatctgcgagctaagatagctgaacatgagagagctcaacaacagcaatcaaatatgaatatgtcaggaacactgtgcgagtcccttccttcacaatcatacgacaggaattttttccctgtaaatctcatagcttctgatgatcaacaacaatactctcgtcaagaccacactgctctccaacttgtctgatatgctggaagttaaagctactggaagttcatggctctagctagctatttgaatagttacgtgtattgtctatatagtgctgagcaaataatattgccatacaggcatatatatatatatgcctgcgttaatttcctgaatcagttgcgtctttagaattgacgttaattggctagctaaaggtcattattaaactgtgaactaaatgaaccattttggactcatatttcatacgatatatataatgttaatgtatcttttaataagaactagctagtttctgtgtatttgtatttgtctgcatgcatctgttatggcctactgctataaaatggttgttgaaggatgaact

SEQ ID NO: 60438 - DNA, 1270 bp, Glycine max
  Clone ID: PAT_MRT3847_25587C.1
ccacgcgtccgtacggctgcgagaagacgacagaaggggagagtgagttgggtaattgttggagggtctatggttcagtccataaatacctgtctgctaggccaacccacttccatattttgcatcctttgtacctgagttcaaggttaacaccaaataacacatatagtgcagattcataagctttcaaccatggaggatccaaatcaagctcaagaagggtcttctcagaagaaaatgggaagagggaagattgaaatcaaacggatcgagaacaccaccaataggcaagtcaccttctgcaagcgccgcaacggtttgctgaagaaagcttatgaattatcagttctgtgtgatgcggaagttgcccttgttgtcttctcaacccgtggccgtttgtatgagtatgccaacaacagtgttagggccaccattgaaaggtacaagaaggcaaatgctgctgcttcaaacgcagaatccgtatctgaagctaacacacagttttaccagcaagagtcatccaaattgagaagacaaattcgagatattcagaatctaaacaggcacatccttggtgaagcacttggttctctgagtctcaaggaactaaagaacctcgagggtagattggagaaaggattaagcagagttagatctagaaagcatgaaacattgtttgctgatgtcgagttcatgcaaaagcgggaaattgagctgcaaaaccacaataattatctgcgagctaagatagctgaacatgagagagctcaacaacagcaatcaaatatgatgtcaggaacactgtgcgagtcccttccttcacaatcatacgacaggaattttttccctgtaaatctcatagcttctgatgatcaacaacaatattctagtcaagaccacactgctctccaacttgtctgatgatatgctggaaattagagctactggaagttctgccacagtcattatatatatatatatatcggttgatgtagctctagctatttgaatagttacgtgtagcacctatatagtgcagagcaaataatgccacacatgcatgcctgcgtttcctgaatcagtttgtgcctttagaattgacgttaatttgctaaaggtcattattagactgcgaacttataaatgatccattttggactcatatttcatacgatatatataatgttaatgtatcttttaataagagctagtttctaacccataaaaaaaaaaaaaaaaaaaaaaaaaaaaaagcggccgctctagagga

SEQ ID NO: 60439 - DNA, 1140 bp, Glycine max
  Clone ID: PAT_MRT3847_25588C.1
gccccattcggttccacaaagtcccttcatttattgattccacaaaatcaaatctcccactaccaacaacactgccaccactaaagcactgacaactctccttcactccaccactcctcactcttctcattcagatctacccaacacacacacaccaaaaaataaaataaaaatgcaactccaacccactctctccactctctacctctcccttttgttaacaataacgttaacatctccaaccttggcagcacaaagcaagccgcaggatctggtccggtcctcgtgcgtgcacgcgcggtacccgcgtctgtgcctgcgcaccctctcgaactacccgggtcccgccaacacgccgttagacgtggccagggcagctttgagggtaagcctggcccacacgcgccgggcctccaaattcctccatgcactttctcatggaggcgctgccgccatgagcaagcgccagcgctccgcgctgcgcgactgtaatgaacagatttcggactccgtcgaccagctgcggcggagcctcgacgagctgcagcacctgcgctccgagacgttcaagtggcagatgagcaacgccctgacttgggtcagcgccgccctcaccaacggcgacacctgcctcgacggcttcggagggaatgccaggcccgacgtcaaacgcagagtcacggatgtggcgagggttactagcaatgctttgtatatgattaatcggctcgggcaaagtagaaccgggaagcccaagcccaaacccaaacccaggtccaggcctcagcctcgctctgcctcaagtactgaaaaattgaattagatggtctctgctgggttggaaggaagaacgtgggaactgggaagtgaagctacttggtcaagaatagtacgatagtacgtctaagaggtgaaattgtgttgactagtcaattaatcaattaattaggtaacaaccaccgtctattgtcagtgcactgtgaccacatttgctttttttttttttcccttgtgtttttcttgctacaaataagatgtatattactatatatatatattagtataataataataataataataataaaaaaaaaaaaaaaaaaaaaaaaaaaaaaaaaaaaaaaaaaaaaaaaaaaaaaa

SEQ ID NO: 60440 - DNA, 1586 bp, Glycine max
  Clone ID: PAT_MRT3847_25589C.1
ccacgcgtccggcaaagccctggtatttattaccgttcagaattggaccctagcggaatttcggtctatactggcaccataatatcagactgggggggtagattagaattagagattgatagaaaagcaaggatatgggctcgtgtgagtaggaaacagaaaatatctattctagttttattatcagctatgggtttgaatttaagcgaaattctagagaatgtttgttatcctgaaattttcgtttctttcctaaatgataaggatccaaaaaaaatagggtcaaaagaaaatgccattttggagttttatcgacaatttgcttgtgttggtggagatccagtattttctgaatctttatgtaaagaattacaaaaaaaattttttcaacaaagatgtgaattaggaaggattggtcgacgaaatatgaaccaaaagcttaatcttgatatacctcagaacaatacatttttgttaccacgagatatattgacagctgcggatcatttgattggaatgaaatttggaatgggtatacttgacgatataaatcatttgaaaaataaacgtattcgttcggtagcagatctattacaagatcaatttggattggccctggttcgtttagaaaatatggttagaggaactatatgtggagcaattagacataaattgataccgactcctcagaatttggtgacttcaactccattaacaactacttatgaatctttttttggattacatccattatctcaagttttggatcaaactaatccattgacccaaatagttcatgggagaaaattgagttatttgggccctggaggattgacggggcgaactgctagttttcggatacgagatatccaccctagtcactatggacgcatttgtccaattgacacgtcggaaggaatcaatgttggacttattggatctctagcaattcatgcgaggattggtagtttggggtccatagaaagtccattttatgaaatatctgagagatctacggctgcgaaagacgacagaagggcaccaagtagagatgaatactatatggtagcaacaggaaattctttggcacttaatcgagatattcaggaggaacagactgttccagcccgataccgtcaagaatttcttacgattgcatgggaacaggttcatcttcgaagtatttttcccttccaatatttttctattggagcttctctgattccttttattgaacataatgatgccaatcgagctttaatgagttctaatatgcaacgtcaagcagttccgctttctcagtccgaaaaatgcattgttggaactggattggaacgccaagtagctttagattcaggggtttccgctatagccgaacacgagggaaacatcatttataccaatactgacaggatatttttatttggtaatggagatactctaagcattccattaactatatatcaacgttccaacaaaaatacttgtatgcatcaaaaaccccaggttcgccgaggtaaatgtataaaaaagggacaaattttagcggatggtgctgctacagttgacggcgaactcgctttggg

SEQ ID NO: 60441 - DNA, 457 bp, Glycine max
  Clone ID: PAT_MRT3847_2558C.1
aataaaacattttacacagggcctttccaactagttaaaatttgggcttcaaaactcacccccccccttaatttaaaccttgaaatttttagccttgttatgggggggtttttttggacaaccttttgacattttttttattgggctaagaaagttggggcaagggatgattatgcaactgcagcttggggttaccaaaaaacgaaggcttgaaaaaaaaaaaaactcaaaaaaagccttttttgactcatggtgaacctaccaaatcccctggattttgacattctttggggccttttctcccaaataaatgtcggacgggtgaaaactttggaacccaccgattacctcggcggtcttaaggttgggcttggagacactgaaggggattttccccttgggtgatgagggccttttgttgttttccttggaaaggtccttcttattttttctttcc

SEQ ID NO: 60442 - DNA, 357 bp, Glycine max
  Clone ID: PAT_MRT3847_25590C.1
ttcggttctgctgcgatatacgacataacggggttctagtgtagtgttgtctgttgttgtaactcgttcatcatcgtttgctgtactgtgtttgtgtatgtcttttctctcatttaataatgtcgtgctgactgtcgtcactgtcggtaccgtagctcctgcaagtgccgcaaccggtactgtggctgcaacatgtactcacacatgaactacactgagtcaaccaccaacgtcaccttggtcataggagtgggacctgttaatgctcaatttgacggtgcagaactgggtgtgtgcgctgaaaacgattgctgcaaatgtggaccaaactgctcctgctacccctgcacttgcaag

SEQ ID NO: 60443 - DNA, 456 bp, Glycine max
  Clone ID: PAT_MRT3847_25591C.1
cccagatataaccatgtcatataacactgtcttttcattgtaattaacggcatcgtggccttacatcaaacaactggaatttatcaattccactctcaatagaagatgcagctacatactatatgttttagcaggcatataatttggctggaaggcgtggagtaagaaaaacctccaaaggagttgccttaggaattgtcaaaccagggctctcagtcatgtcaactggttgatctgatggggtagcgaattcaaatgcatgaagcagacgagccagtgtcaagtgaagaacttggagtgcaaaggacatgccaggacatgaccttctaccagagccaaagggaatgagttcaaagtttttggcctttcacatcaacagcatcacttggaaaaaatctctcgggtctaaaagcagaaggctcctgccacacccttggatccctatgaatcttccac

SEQ ID NO: 60444 - DNA, 266 bp, Glycine max
  unsure (1)..(266): unsure at all n locations
  Clone ID: PAT_MRT3847_25592C.1
atgacaatcatgagatggttanaatgtgattttaggtatagtttgattttnatttccacgacattgcttctttccattagacacaacaggcacgatttctcctaggatcttaattgttactgtttcagattattaggagttttccaatactaagttctgttgcaccttgtcattctgcataacaatggtattgaaggcaaatgtttgtaaaatcaaggagttagttgagcaaataanaaagcaacttttcctgaatcttaaatntt

SEQ ID NO: 60445 - DNA, 295 bp, Glycine max
  unsure (1)..(295): unsure at all n locations
  Clone ID: PAT_MRT3847_25593C.1
agtttgaggcaagagacctctttnttggccattataaaatcataattcaaaataaccaangtcctttaaggccattattatttnatacaactaaaaacaaaactctnnttacanccccctttaaattaaattnaaatactcttanaaacccccatacgagagagtccacctttactaaaannataaaaaaaaaatttctcccctcttaacttnaccataccnntttcttaatttttaatcactattcattctcaaaatcctttcctcaatataaaaaaattttttacaaaacttc

SEQ ID NO: 60446 - DNA, 110 bp, Glycine max
  unsure (1)..(110): unsure at all n locations
  Clone ID: PAT_MRT3847_25594C.1
ctttccctccacctcaacagcccagtaagattgatatacaattagagactggagantacttnttaagtaacaagaggnaatcagcaagatatggcaagagaagcaggaga

SEQ ID NO: 60447 - DNA, 334 bp, Glycine max
  Clone ID: PAT_MRT3847_25595C.1
gtacaaaaaaccacatttattgtcaaccgggggggtttataaaactttttaaaacgaaccatccatggatagaagatgcgcaaacataatttatgtgctgggtcgactaccatgacggaacgtgtgctagaacttgaagaggaggaactcttcaatgggaggcaccgctctcatatcggcaagagccttcttgcttgggtttgtataaccacccatggccataataaccttgttcctacgcgaagaatttgccggacacataaagtttaaagccacgttatgtacacccagtgtggctccaacacggacaaacatgccgggctgaatcaccttc

SEQ ID NO: 60448 - DNA, 163 bp, Glycine max
  Clone ID: PAT_MRT3847_25596C.1
cttattttctaaaagccaaacctgcgaggtgtgtattttatgcataacttgcttctcgggtgcaacctaaataagatgcaatctgccaatcttcaaaaatggagcccactatatttcatgacaccagttccttcctacatgataaaatgcctactcgtatgct

SEQ ID NO: 60449 - DNA, 280 bp, Glycine max
  Clone ID: PAT_MRT3847_25597C.1
aatacgagcgattcggctcgagtacggctgcgagaagacgacagaaacggggcagcactgagcacatgaggaaatgcggaaccatgggaaagcgatctacagcgctggtaactggattcgaggaacttgacaagccattgatcatctcggttagcgtctacagggcggttactacatccacaagcagctctctaggcatcgaactctgatgaacatatttgcataggctcctgttgttgataatgatctatttcttgagtcaacgactccgtcattggag

SEQ ID NO: 60450 - DNA, 205 bp, Glycine max
  Clone ID: PAT_MRT3847_25598C.1
gactgactgacaaggcatcaatctcctgaaatgatcataacgggctccttgcacagatatcgagcgaactgaattacgacaactacaaggacaagaacatgacctatctgttgctcgatcggggctcgcataaatacttctggaaaacgaatccattggctgctattacagatggtacaagtcaaagtacgcgttggggaaacac

SEQ ID NO: 60451 - DNA, 589 bp, Glycine max
  Clone ID: PAT_MRT3847_25599C.1
ttgttacttgctagatgccccaagcttgaaattcttgacatttgataggtttatgaggaaagtgaaagaaagtggacacagccaactgcaccagttcctagttgtattagctcacatcttacggcgtttaaatttagagagtatggtggctccaaatacgagttggaacttacaaagtatattctaaagaatgcaaaggtcctcaagacagtgacagtaaagatggcgaagtggttggagccaaataaaacaagtcatgctatgacaaaattggattcgttactatcatcctcaaagtattgtcgtttggcaaattatcaaattctgtgccaagattttccttgatgtatgcaattcgttcaggttgatgacaagcgatgatcactatgcggtgacaatttgaatggtaaaagagtgtttgacatcaatgatgttagtagtagtttctgtctaatgtttagtttataactttatatttactattcatgtcattgtaataaagacaaatcacatgcacccctgtagcaatgttatctctgaattggttgattttttttttaaaagagaatggttaataaatagtagattg

SEQ ID NO: 60452 - DNA, 419 bp, Glycine max
  unsure (1)..(419): unsure at all n locations
  Clone ID: PAT_MRT3847_2559C.1
ctgaactgaaggacacgcactacatatgcgcatgatccctacctttatggtgagccaccagctactagaggtccatctatattaactctgcccgacgctgtgcaatagcctcccgacctcaccgcaccttgttttatatcaccaccggctctttggtatgcgatgcccatgatatggagaagtttgcacatgtccttaattgacacacttntacatataccctttgacatatgctggcatggctatatgagcagatgctgcataggcaatgcttcgggacctagtgttcatagattagaaaaaaaatgccggggagccgacacaaaacattgacttttgaagaggagggtacctcttatctattatggtgcttgagcgctatgtgtctgatcttatcaagatgcctatgacgcggagaa

SEQ ID NO: 60453 - DNA, 474 bp, Glycine max
  Clone ID: PAT_MRT3847_255C.1
attatttcccttttgtgttcctttcgctcattgatatgccttgtgactctttcacttttctcgacactttttctggtttctttatagcatcatcgtattcctcacctcggcagcccaagtcaaatgttttttctttcaacttagtgtgtgtaacataaatttttatcatactaattgattcaagattgtgttttgacgggattctaaccagcatgttttatagagttctaaaatgaatcagtgaacttcagatatattcatgcttgcatttattgatattgcatagcatctttgcattggaatgcatttgatataatttcatgttatttaatcacactatgctccaaactcaatttcagcagatcctgcggacattgtaagtaaatcttatgaagacggagatgatgactaatgttacagagtatgaggcaattgcaaaggaaaaatgccaaagatggttatgactattatgca

SEQ ID NO: 60454 - DNA, 1289 bp, Glycine max
  Clone ID: PAT_MRT3847_25600C.1
tgcttttttctgattctcatgatgatcttgtaatgtttttctacaaaaacagttttactatcctggagatcaaacccctccctccaagagtagatctttaaaaaatctgtttttgcatctaagataaggtgcaagaaagaggtgctatcagtctctcacacctcacctcgttttgcttttttaactttttgatgttaccatctttattccctttgggtatctttacaaagcacagcaaagaaattcactgagaaagagaaagcgaagggtgatgatggagtgaattaagtacaaatgaaagatgaacagaaaatattgaattgggtcaatcagatctaatctatagagtataagtaggtaattgacaaaggagtgttatttatggctacatataccaaaagcactatagtgaagggggtcaagtcaagtgcccaagatgtctcttccaagcccaagattgattctttagctctcaagaagaagctgaacacctcaatcaaacgcccacctgattctaatctgaagtctgtcaccaccactgtcacaaaatctgaggttaaatcaaaaccggtaactgcatcatcagcatcgtccaaaacaataacaacgacaactactaccaaaaccaaagtgagagagaagaaagtctatagtctgcctggccagaaacatgatcctccagaacagaaagaacctctgaggattttttatgagtcattgtcaaaacaaatgccaacaagtgaaatggcggaattttggttaatggaacatgggttgctatctcctgaaaaagctaagaaagcatttgagaaaaagcagaggaagcaaaaagagcttcgaacaggaactcctgttaagttatcaaagccgccaactaagactgcaacatcacagaaacaacaacaggtatcaaagaacggtgacataaaagccaagaaaagaattgtcaatgagagtgatgatgatgacgacgatttcattttaagtcataaaagaagaaaatggtaagaagaaggaaagcctctcataatgtttatttaataaaaataaaaaaagaagaaatgttgtactctcggaaaaattgttggataaaaaattcttcatgtttccagcttaccgatacaataagggacaagcaatttacgtgtctctcggaatctatattttgacaatggaaattgcttccctctgttacctcagtgccttgaaattgataaacattctgcagaacaatttaactacctctttcttcccacacaaatatataacattacccttcaatttgaggt

SEQ ID NO: 60455 - DNA, 1305 bp, Glycine max
  Clone ID: PAT_MRT3847_25601C.1
aattcggctcgagttcacttgttacttaccaaaaccacttccaaaaagcctaagattaccacatagtcacattcacattgaagttaaacttgcattgaaaatggagggaagagatgaggatgtaagagtaggagccaataggtatggagagaggcaaccaataggaacagctgcacagacacaagatgccaaagactacagagaggcaccaccagctccattgtttgagcctagagagttaacatcatggtctttctacagagcaggcatagcagaatttgtggccactttcttgtttctttatgtcactgttttgactgtgatgggtgttgcaaaatctcccagcaagtgctccactgttggtgtccaaggcattgcttggtcatttggtggaatgatctttgcccttgtctattgtactgctggtatctcagggggtcacattaacccagctgtgacatttgggctgtttttggcacgcaagttatctctcactaggacagtgttctacatgatcatgcagtgcttgggagctatatgtggtgctgctgtggtcaagggattccaatcaaaccaatatgagaggcttggtggtggtgccaacactctcaataaaggatactccaaaggtgatggccttggagcagagattgttggcacatttattcttgtttacactgttttctctgccacagatgccaaacgaaatgctagagactcgcatgttcctattttggcaccattgcctatcggttttgcggtctttctggtgcatttagctacaattcctatcactgggactggcatcaaccctgctagaagtttaggtgcagcccttgtatacaacaaggaccaagcttgggataaccattggatcttctgggtagggccttttattggggcagcacttgcagctttataccatcagatagtgctcagggccattcctttcaagtcaaaataatgaaaaattgaagcaaaggctgaaaactagtgcccggtttagcctaaaactgggtactcacaacaaagatgttcctatttctgctgccactacaaaatttctacctatcttattaatttatataatttatcagttcaaaacttatgttcttggacatgcaattgaacttatggaaaatgtggctggtgtgatttatttcgtttctacttataatatcttccatgcacatatcaaagactcttggtttagatttgctggagtgtaagtacactgtaaaatatgtttgtgtacaagtttatggtattaaatatgatccctatttacacaaatcattagtcccc

SEQ ID NO: 60456 - DNA, 776 bp, Glycine max
  unsure (1)..(776): unsure at all n locations
  Clone ID: PAT_MRT3847_25602C.1
ccacgcgtccggaaaacacagcttatattacagcaactaaaacatcagatacgtaaaggaattcctataataggagctggtgcttggactggtatatctgctaagtttgaagaagctggaggagttgatctaatagtattgtacaattcagggcgcttccgaatggctggaagaggttcattagctggattattacctttttccgatgctaatgctgtcgttcttgacatggccaatgaagttttgccagtatgcctttatttttttacttgttccatgacactttagaagtattactgttgtccaactactaacttttattcaagtacttttcactacaaatgcctgatttttcagatgcttcttaatttgaacatacacaaatttcaaataggtggtggtaagtggagaaactaaacaatgaaatgtcaccaaatttgattggtagtctttaaggaagaaacctttttcaaaacaatgtacatcagtaggggggtgttgaagaggtgaagggaacagtaggatgttcagggtaaaggtccaatggctaaagcagaaagcaatttgggtctgggtcatcatcacaacttactggtaatgatccctaaaggagataataaattcttagactctgctggttgacttctctggttctcgtataaacatagaacattattggcactaaatnnttcattaattgatctgcangttaatgttagaatagaaaatgtatttaaaagacattcatgtgacttgacctataggatatccttttg

SEQ ID NO: 60457 - DNA, 255 bp, Glycine max
  Clone ID: PAT_MRT3847_25603C.1
atgacagcattggtcacgctaggcccaccaggtgcgctccattctttcttatcagctccgtcgcgaagccaccgcgagccgcctctaccaattggtttcctcagctctgctttgagttctagaccccaatttctgatgcatcgtctgctgttcagggatgttgaattccatatcagcttcttcatgaatgcgcaaaccgtccacgtacacatcagggtgttccatgggattccaagtgcaaataaacagctgtaa

SEQ ID NO: 60458 - DNA, 295 bp, Glycine max
  Clone ID: PAT_MRT3847_25604C.1
atggaacaccctgatgtgtacgtggacggtttgcgcattcatgaagaagctgatatggaattcaacatccctgaacctactgaaaatgaacacaaaacctatcactttctcttaaagccattaaaggaatcaaagaggattaagcgagctggaggacaagctacagaggttcacttcaaacgatgcatcagaaattggggtctagaactcaaagcagagctgaggaaaccaattggtagaggcggctcgcggtggcttcgcgacggagctgataagaaagaatggagcgcacctg

SEQ ID NO: 60459 - DNA, 439 bp, Glycine max
  Clone ID: PAT_MRT3847_25605C.1
aacagacgacagaacgggtcttacaagacgttatgaaaatcgtgtggaactcatttttcgggattttgtgaaattcaattacacgggtttccatacaccattttaatgtcttcccattcgtacaaaggcacctgcttctacacgcgatgccctcccttatcgttccacattggggcttatcactcgacccgttgcatcctccgatgaaatccaattgcacatctatccctgtatcaacttccacgactaaatcaccagacttcgtggtcaaattaaaaaattgaaaaatgttgcttaacagatacgctcataaatcatgtttcaaacaaattatcttgaacacgcgcaaatggttatgatacaagctcaagctctggtcaagaataacttaagaagattgaacactagcatctttaaaaatgcttccaacaatattgtt

SEQ ID NO: 60460 - DNA, 327 bp, Glycine max
  Clone ID: PAT_MRT3847_25606C.1
acagtttatatttctcgcgaacacactttctcagtagcgcggtgggttgttcggtcacggcgctaacaatgaaacaccacgcaataacgctagtaacgatatactgacacgacaattcgagaactgtcaagagctcaaatatctggtagctgagcgtacataagaaaaggagaacgggtgtcggatactctataaactgaaaactagcgcagtgcgctgtgcaacgagcgaacattcgtgttcgcgtgtgtgcgtttctttttttgttcctttgttcttttcggagcttctgggatgtctccggctagaagaggatgacccccggaa

SEQ ID NO: 60461 - DNA, 362 bp, Glycine max
  Clone ID: PAT_MRT3847_25607C.1
tttgagtatatctgttatagtttatttactactgaaagatggattcgaagaggaagatagcattacttatcttcggtctgctggccatgctccttttcatctcctcagaggtggcagccagagaactgaaagaggtcactggtgctggcttgtctggtggccgtggcgtaaactttggtggtgttggtggcgttggtggcatcccaggaggatttccgtaaaggctgttgagatggggatgatgtagtgagtgaagttgcttgattaaggtgctgatgccctagctatcagaggatacatagttgagacgacagtgtaattctacgtacttaaaataacatatttcatgaataaaatctctt

SEQ ID NO: 60462 - DNA, 852 bp, Glycine max
  Clone ID: PAT_MRT3847_25608C.1
ctcgagccgattcggctcgagatttcatttgagtatatctgttatagtttatttactactgaaagatggattcgaagaggaagatagcattacttatcttcggtctgctggccatgctccttttcatctcctcagaggtggcagccagagaactgaaagaggtcactggtgctggcttgtctggtggccgtggcgtaaactttggtggctttggtggcattggtggtggccctggcttccgctttggcttcaataatggcttccccctcttcttccctggattccccagcttccgtggattccccggcttccctggattctccggcggccctggattccccggcactggattccccggcactggattccccggcactggattccccggcactggattccccggcatcttccctggctttggtggtggcgtcggcggcggcttctcaaacactggctttggtggtgttggtggcgttggtggcatcccaggaggatttccgtaaaggctgttgagatggggatgatgtagtgagtgaagttgcttgattaaggtgctgatgccctagctatcagaggatacatagttgagacgacagtgtaattctacgtacttaaaataacatatttcatgaataaaatctcttgcgtgttatgagaggcacatgtggatagacggcaagtcctgtcttttcttcccacctttcttaccacctgagatactactagaattagttagtgttgaatatatattacgtcgttgctcatttgtgcctgtgtcattaagtttatgagtaaactcaattatctattgtacaaataatttgtcatataataaatcttgacttttacttc

SEQ ID NO: 60463 - DNA, 177 bp, Glycine max
  unsure (1)..(177): unsure at all n locations
  Clone ID: PAT_MRT3847_25609C.1
ctattgaaagattgtcttgtttgtggtcttttacagacagctagctagctagctctcaagaataaaatcgttttcttgtttagtcttttgcaatggctttctgtttcatcgagtaaagatttggtaagtctgcatgaatcatacataaatcagcatttcttgaannnnnnnaannna

SEQ ID NO: 60464 - DNA, 475 bp, Glycine max
  Clone ID: PAT_MRT3847_2560C.1
acggaataatttttgtttcccccaaattctttattaaaaaaaaaagtttttttataaacaaacaacttcttcaaaaaagggggaaaaagaaaattttttaaaaaaaaacgccccccccccctacaaaaaaaatcacggtggcccacaaaacaaaattcaacaaaactaccttctcccccattttccccgtattccccccgccaaaatttcttttgcaccccaggaatcttcccccccctaggatttaaaaagcccctcacccccttaaaaaaatcaacccccccccccctgcatgattattattgcctcaaaccacccagatgcctacaaaggcttcaaaagccgcccttttcctaataaaagccccactccctccaacaaccctattaaatagcaacctcttggtttcctcctcccgcctaattcccttcctacccccgcctgcctgccaaataactgcttttttatagcgccc

SEQ ID NO: 60465 - DNA, 228 bp, Glycine max
  Clone ID: PAT_MRT3847_25610C.1
tttatttaacgaatttatgacacacctaagaaagccgccgattttgggcgacatacccggcgtgattcttacaataaaagccctatgggtgcacctcgttagctagggggaatatcagtaaaggagctccctgcaggaaacatatcgcttagtgtagcaaagtttatgaccaacgaatcaaggaacccttatcgaaataaactatgcagacggaagggacaagaacac

SEQ ID NO: 60466 - DNA, 487 bp, Glycine max
  Clone ID: PAT_MRT3847_25611C.1
tgcccgaggatgtggcgtcaacatcccttacaagatcagcaactccaccaactgcgccacgtatgttaaactcaccactcactccatatgctttattttaatttcctcacacatttcattcaaaatctcttagagagaaatgttaagactctttgacacactcttatgatcgaacacactcttttttattttatgaattttaacattttatatggtgtatattcaaaggaatgtgttagaaaatatttttttttaacacttatatttcactaaatacttaaaagagaaatgttagttatactcactttaaggttgagtctaatcaaatgaattaatcttttgtaatgtgatgaaccagaatttcacttttcacttaaagaaatatttatatttagttatggtttgattgtgtttaaatagaaaaaagggggagaaatttttttaaaaaattttacactttttttttattttaatttaaatatttatt

SEQ ID NO: 60467 - DNA, 310 bp, Glycine max
  Clone ID: PAT_MRT3847_25612C.1
ggggtcaaaagcaaacctgcccattgaacggtaaaaaaccagaaataaacccctacccaaagtgaggcaacattgtacaatgaaacggggctatagttcatttcacaacgcttgaaaacaatcaggctatttcggtaactagcgcaacctagagagtcttggcccattttttcctaacaagacagctagggaaaggaaaaattcgcaaggactccagagttgcatcaagatgtttcaattttggaaggctgcccacaaatgaaacatgttaactcattccatgcaagtaagaaacaccttaaccaaaatt

SEQ ID NO: 60468 - DNA, 655 bp, Glycine max
  Clone ID: PAT_MRT3847_25613C.1
gaacaaaagaaggttcattctcttattgatcatgaaaacaaggtctgatgcatagatataatgcaacaaattctaaacaataaagacattcatcaaattcagaactttcttcttttcaacaccaatgatgatgatgatgatgctcaaatctggaaatttgctttgaatggtggggggcctactaggttcgttactcttaaaacctctcttcttcaataggaataaagcgtgttcaaggaaacgggaagaaattatgggctctaaaaatacctcccaaagtcatgcatcttatttggaggattcaaccagatttgtcttccttccagagttaggcttcgttcagaaggagttcaatgcccttcaacaacttgcccttttctgccacaaccatcttgaaaaccctagacatatttccttcagatttgaccatgcggtctcagtgtgtctgaccttaggtatatggcaaaaaatttagcaacaagtgcatcaagcagagggtatccaataagtaatttttctcctcattgacacattgaaccacgaccaagattgcagcaaatgggccattatcttaatgaccatatggcgtaggcagagaaaaagtttgagatgatacttgagacctcgccggcaatggcggtttctttagcttacc

SEQ ID NO: 60469 - DNA, 824 bp, Glycine max
  Clone ID: PAT_MRT3847_25614C.1
gcattttattggttctattgacatatcacatatctatccgagtcttacactgtctatacattgagaacctcacttgttgtacattttatctatccatccactcatttggccacacaatcatacccttcgccctctaccacaggagtcccgccctctaccccatgactccctctcttcagtccaaaacccaaccaagcaccacgtcatctactcatcacaaaaaaaaataaatcacaaggccccgactctgggcccccctccccccctcctcatcgcgtgtgaggtgactacagtaagaaacaaaataaataacagtacaacattaactcacatttaaagtaacgttgtttctctcccgctaaggtacgagattaatcaattagaaagatactctaaccatttataaccgctagatgtaaaaccaacggtggatatcattgttggatgcaatggtggttaaagaaacatcataacatatgtttaagacaaaaataattttatctactaatcacaatcattatttttgtattcatttttatccactgcaacattttcaactgacctatgaatcttttgcagtcattttaaccaagacttcccacagccgttggatctctccgaagacatcatcggacggcaaccgaaacctgcagcaaggacacgtgttccttttccccatccacggcaaaatacacatccaatgaaacaagtgttgacatggcaactcgcacacgtcccttcctattcccatctcctccttgcatatcacgcactccctcccgtcgtgcctcacctccaccgacggtagcgccaccattattgcc

SEQ ID NO: 60470 - DNA, 403 bp, Glycine max
  Clone ID: PAT_MRT3847_25615C.1
atttgcagcctgagtttttaagcttgcttgtgtgcaagcttatgtctagttcttatctcacacggcagcattcatggttgcatgatatcatagagctcatagcttcttacaaatgtaagtactgctctagatgtacgcttctgaactttttggggaaactctaaaggtcaagttttatattaccaaagatatttttgcacatttgtttaagaaaatgtagtgatttttgagtttttgtttctctggttgtcaatatgtgggacacagcaaaatgttgctaggttgtattgttccatctcactacatcttctttatcatggtatccttggttttatccactgttttcatttgtagatgatgagttggtctttgtgtttggaaatgatatcagctgacttcttac

SEQ ID NO: 60471 - DNA, 383 bp, Glycine max
  Clone ID: PAT_MRT3847_25616C.1
ccacgcgttcgttcggctgctagaagactacagaagggtcattttctttttcacttaatttctatcttttggggatctttaaaactccgacattgcttccccccctttaaattatggctgggttgttggatcttgctttttggtatcgctatattttttctttatatatttatacactttttgtgcggacatttgtagactactagttaaccaatatccttattcattgaactcccaaagaaacatatttttattagcctgataaaaattctgtttttttaccgctatgatgggttgacactcacttttcttcgtttcttaatggaaggagaaaaaccatcttggaccacgaattttatgttctgtatattatttctttttac

SEQ ID NO: 60472 - DNA, 357 bp, Glycine max
  Clone ID: PAT_MRT3847_25617C.1
atttgatttacatgggcgtccggaatgaaggagcaagagtggtacccgcaaccgccctagagactaaactgtcaaacactgccatggacgaccctagcccaatgatcgagttcaaaaagagaggggtgagctcccataccccgatggcaagctcaacgatcacgactgactgtccactttcaagagcaaccaaggaaagtcaaggggtcctgtcggagttacattaacacactttactacgtaggttgaatcagtacctctaacagccggaaaccaaagatgcaaccctgagcatccacaccgaactgcgtttcgtttttgttctgcgacagcgtttcacatcctctaaggcacaaa

SEQ ID NO: 60473 - DNA, 455 bp, Glycine max
  Clone ID: PAT_MRT3847_25618C.1
acgaggaaattagtgacaaacacgagaaggtagatgaattttcaaaaaacttagaaatatgtggaggtgaagatgaaatgtttgttgaacaacctgtagcagacatttcaactgatatagaagctgtagaaccattcataggcatggagttcaattcaagagaggaagccagagaattctacattgcctatggtaggaggatagggtttacagtacgaatacaccataaccgtcgttcacgagtaaataaccaggttattggtcaagattttgtctgttctaaagaaggctttcgtgcaaaaaagtatttacacaggaaagatagagtgctgcctcctccaccagccactcgggaaggttgtcaggccatgataaggctggctttgcgggatagagggaagtgggttgtcaccaaatttgtgaaggagcatactcataaactaatgagtccccag

SEQ ID NO: 60474 - DNA, 485 bp, Glycine max
  unsure (1)..(485): unsure at all n locations
  Clone ID: PAT_MRT3847_25619C.1
actagccggcggccgccctgnngnannannnaattttattgaactttatttacaacgaacagcccacgaggggaccaacggggcaacccgaagcgggacaaaacggcgcaaggaaaaaaaccgggggccaaagaaacaaaaaacggaaatgctcttcccaaggccaaaaccaaagggggaaaaaaaaaggccccaaagggggagggccaggggacacccaaaggggcacccaaaacaacccaaagagaccaggccgggaaaagccggaagggggaacacagaaccccacaaaagcccacaaagcgggacggccangccaaagaccccaggccctgggaccagggaaagagccagggccctcaaagcaacccaaagggacaaaagccccccccgggtgtttgttcttccttggggccccaggaatgctcctttggggccccccaaaggaaatacccaggaattcaatggcccaaatgggggggtgg

SEQ ID NO: 60475 - DNA, 1821 bp, Glycine max
  unsure (1)..(1821): unsure at all n locations
  Clone ID: PAT_MRT3847_2561C.1
aaaaaagcaagagagaaaggaagattaagatcgtgtctattttgcaatcaaaatcccttctaacttctccgttgatgtatgtatattttgttcacagagcaaaccccacaatccacatgataatgataatgatggcgatgtctttctctctctcttttcctctcacactcttcccatctattccctcatggtttcttctctcttccttcccaataaaaattacccacttctaatcagacaaaaagtagagtggttataagtccatttgtttcttcagtttccacacaactttcaccagaagaaactaacaccttccgttactggctttttctgtgtccttggcaaccctttgctgattttcactgccacaatcacaaccaattgaagaagaagtttctgggttatggttcacgggtgccgtatagttatataatctgagctgggccccattccatacgcaacttttcctccttcattctccttttttttttattgtcttaagaagtgatggacatggaagaaatttcagagttgaatttggatggtttttcttcttctcacgaggttttggaatcagaacagaagaacatgggtacccagagaatcttggtttcagatcacacaaacggatatcagtattcggctgaggaagctgatagctttgtgattgatatggattccttctcttccggcatcaataaagatagcactaaagctaattccagaattacattgcagcggagcctttccaggaaaggatctcagcgtgggggcgacaggaaggtgaatggcaatgtcacacttcatgatagggatactgccccaactacatgctcaccaaaagctgctctagcagggtcctgcacggctgaaaagtcagcggtggtggcagtagggtccacacatcattccacaaacacacaagttcatcatcagattactattactgccagtaacatgtgcaccaccaccacccccaccaccgaaagcaaatgtataactcgaagaaatagttttaaacgatcttcttcatggctccttgatcctaaaagagtccttcttttctttgccaccttgtcaagcatgggaacaatgttgctgatatacttcactcttactctcagcaagcaaaatgcagatgaatatgggggtgactggcagcagtgactgatgccactgatttatattggacaaatgagataatgggtcgtgtaaattataaatcctaggattggagcaaaactcaggaacaagaagttggagaacaaatttgcagaacaaaatacctgtcagactcaattacctatttggaagctacaaaaggcaaatacaatgacacaatacactacgatagacaggaaggaatatatttcttttatctgaatggaagccagcaagttagcaacagataaaaaagatcacatgtaagagagtgctctgtagtttattgggagtgtcatttaagggcataacggagttggaggatcagaaagtcactgtttcgctctttctactcagatcttatttttatcccccgtatcttttgttttgctcttgcatgtaatggcaagtgaacctttttctaatgtgtgtaactttagttttaacagtggaaaaaggggaggggaaagtaaaaccaaaaccatgagagctacctacctatacaagctacaaaagtaggcacaaacggcatgcgtgctgaaatacatttttccttacggaagaaactgaaatccacgagtgctttttctagggacaaagaatgtttatatatggggaaacctttcgaaataaactanntgtgtataaaagattaagatt

SEQ ID NO: 60476 - DNA, 196 bp, Glycine max
  Clone ID: PAT_MRT3847_25620C.1
acagaaagggcgagaatccattaaggaaacagctactaacattggtgcttctgccaagggtggcatggacaagaccaacgccactggccaacaaaaggccgaaataatgacagcacttgatccggtgcaaaatgagttgtcaacccaacataaagaggcacatatgaaccaggcgtagctggacaagcacgccggc

SEQ ID NO: 60477 - DNA, 370 bp, Glycine max
  Clone ID: PAT_MRT3847_25621C.1
cccccttccgaaggctgggttccttaaaaccggccgcttctcttttttttttttttttttttttttgaagggggacaattattacaaaattttctacccatatgaaaaaaatttgaggatgcaatgcgaggtgttaataatcgaagagggttaatttgtaaagtttttttttataaacaaacaccgtgaattttaatgaaatttttaaatcgatcttggaaaataatttatggaaaaaatccgggcatttatcgtttggaaaataattgaatggctaaaacaccttttggaattttaatgagcaagggggggaattaaaataaaaagggttaaattattctaaaagctggcccctattatttttcattcc

SEQ ID NO: 60478 - DNA, 423 bp, Glycine max
  Clone ID: PAT_MRT3847_25622C.1
aagctaaaaaaaatacttaaatataacagattaaacaaacgggtgcaaactataatgtactaattcacattatataaaaaatgggtatagacactgaattaactgtactagaactaccacaagtcctttgtcttgaagggactctgttgtttctaaagggtttaagggcttttcaatactagtaagctttccaccacataccaaaccatttttacagggatggtttctttgctttgaagacaccccacaagtagtacttttcttgaaatcttcggcattgaatagggagtaatttagaaggaaaaattagaagctctgcattttcaacctctgttcttaaggaaaggtcaaagtacatcatgtcctttaccaggttgggaaagggccttttaactctttcactatcaggaaaaaaattaagag

SEQ ID NO: 60479 - DNA, 786 bp, Glycine max
  unsure (1)..(786): unsure at all n locations
  Clone ID: PAT_MRT3847_25623C.1
gatttttattttaattaattgttctgtatctatgtattttagaaggcatcaaagcatgacaacaactatcttggattgttggtgtcagctatatagagtttttattgctgtcctctagatttattttttctgtaatctttcataagggcaagtgtttttcccgttgatgatcttggtgcatttttcaaattatggatgcaacactagcagtcagggactcatttgttaagttgagggaattgcccaagaactaaagttatttatttgtcctcctatgtaaggtgagcactaagcatcatttcatctattagtaaccatgcataaattgatttccccgcatcaatgccgcttcatagtgattggctaagatgttttaaccgatagccatttgacatcaatgttcgataccaaggctaagggatggaaaaagactagttcttttggggtgaaaatgaagactgaggaattatgatattcactaaagagagattagggatataggagagagaatgaataagaacaatttntgttgatgtttgattgattgataaacaaaacaaggctagaatttttcctccaaggatttcccctttaacaaaaggtttcctgttttacaactgagctatttcttgtttatgcaatactaacaaatctggattccctcttctacccctctcctactatttaaagctaaaccccaaattccctactcttaaccctttagctgtgcttattgtttgtagactaccctaactgattattctctgtgccccatcaagttccttc

SEQ ID NO: 60480 - DNA, 229 bp, Glycine max
  unsure (1)..(229): unsure at all n locations
  Clone ID: PAT_MRT3847_25624C.1
attactacatgattgaatatatcgtggatacactaaagagaaagatatcataggtattaagacctatgagtaggtcccagtgtgttaaaatttattgatagaggagatgaacttcatcttttataaatacacaccctagggttagggctctgcatatccattgcaacaagtatagntcatactctcacccttctctccctcanctctctcttcctctggtgccgaattc

SEQ ID NO: 60481 - DNA, 175 bp, Glycine max
  Clone ID: PAT_MRT3847_25625C.1
acaaaacccattttacttcttcttttacaaaagaaccatatgtgttggtatttggcaaacttcgaacattatttaaaaccatggctttctttaccaaattggctttgggccttttaatttcattcctttttattcatgcctttttaacttaaaatgtgtgttaaggcccggccaa

SEQ ID NO: 60482 - DNA, 391 bp, Glycine max
  Clone ID: PAT_MRT3847_25626C.1
tgtctcttctcttctcttcactttccttgcaattcatcttcctttcatttttcaataacgagagagagagagagaaacgtagttcagttcaattcaattcaccactgtcattcccaaatccgatcgcaacttcaattcttcttcatttttctctcttctctctctctgacaacaattattttgtggtgacaaactcactcaccggagtagcttcttcgcgtttcgttccgtctcccgaatccgttcgatttccttttgagggtttgaccgcgccgacgccgatgtctgtttacctcgtaatcggaagctcttcatccatcatcggtttcagatcctgcttcaccaaccgcgccaggcttcgctgtcccgctaagatactcttcgccactgg

SEQ ID NO: 60483 - DNA, 407 bp, Glycine max
  Clone ID: PAT_MRT3847_25627C.1
agactaccaattcaactttcattttgacagggggtattgtctgatacaaacatgtactggtgaatctatgtcttctatatccggtgccggcatatatgacaattcattgcactaacgcacttggtatcccgcttgtgacggctatctttacttgccagagcatcatattccagatgctaatggatttaagggctcatatttaccacacatacgcaaactctcctcatggttgataacagtgaccaatgcggttccaacagagaattaccatgctcccacgtggttaacctatctgactgcccctgatttatcgagatggtgtgctcaaacttgtggagccgggctaccataagctgtctgggctgttcaaggggccggccctgaaatggaatcactgcttcccattg

SEQ ID NO: 60484 - DNA, 693 bp, Glycine max
  Clone ID: PAT_MRT3847_25628C.1
actatcctctaatagaggcctttgagaagacttttaccaatctatctatctatctggacataagcatgaacctttgttcgctccaatatatccatgactcattacaagaacaatgcaggactgcgcgacagcttccacacccttcacactcctcctcctaaagcttgattatgctttagatattgtcttctctaatccataaccgcaagatgatgtgacacatgcaagaacatagttctctctatgagtgcgatgaagccgacaagcattctgccatgagaacgacaaactacttcctacatgacatacaaacaccgcaagtgctcataaggctgtgcactactctttcatcgttatacgatcctcatgactatgtatgtattgattctattgtagtgcttcatcttataccaccacaatgaaatacagatagacgtccttcctttaataatccgagaccgcgaacaagcttatggccataggggcgctaaccgtcgcgctactggatccctcagcctacatcagcaacatgctggcgaggctgctcatcggactaaatgctgatacctaaaggaagcccccgatataaagcttgacgatttaaagcctggacaacgaggagagcactgaattctctactcccgaagatcgtctccctagatcccaaccatctctttctttctatgaatttgt

SEQ ID NO: 60485 - DNA, 457 bp, Glycine max
  Clone ID: PAT_MRT3847_25629C.1
cacaaagctgctggagcatttggtggcatcagaatttggagccggcctcaaattcctgtgccttttccttctcctgccggggacattaccatacttgctggagattggttcaagcttgaccaccgaagactgagacgactcctagagaatggtcataatctccccttccctgatggccttcttatcaatggacgtggttggaatggaaacaccttcactgttgatcaaggtggaacctgacagcaagtggaccaagaccaaaccctcagggatcataccactatggattgatcaaaccgagtcgaaccatcatgcttgcaaattctgctccttatatcaatggcaagcagaggtatgcggtcaacggtgtctcatacaatgaaccagataccccattgaaacttgccgactacttcaacatccctggagttttctacgttggaagcattcctaccta

SEQ ID NO: 60486 - DNA, 788 bp, Glycine max
  unsure (1)..(788): unsure at all n locations
  Clone ID: PAT_MRT3847_2562C.1
ccccaactacatgctcaccaaaagctgctctagcagggtcctgcacggctgaaaagtcagcggtggtggcagtagggtccacacatcattccacaaacacacaagttcatcatcagattactattactgccagtaacatgtgcaccaccacnccccacccccaacgaaagcaaatttataactcgaagaaatagttttaaacgaccttcttcatggctccttgatcctaaaagagttcttctcctctttgctaccttgtcaagcatgggaacaatgttgctgatatacttcactcttactatcagcaagcaaaaagcagatgaatatgggagtgactggcagcagtgactgatgccactgattaatatggaacgaatgagataatttgtcgtgtgaattataaatcctaggattggagcaaaactcaggaacaagaagtttgagaccaaatttgcagaacttgcaataactgacaaaaatttcaactacctgtcagactcagttacctatttggaagctaaaaaaggcaaatacaatgacataatacactacgatagacaggaagaaatatttcttttatatgaatggaaaccagcaagttagcaacggataaaagatcacatgtaagagagtgctctgtagtttatttggagtgtcatttaagggcataacggagttggaggatcagaaagttacgtttttgctctttctactcagttcttatttttatcccctgtatcttttgtttttgctcttacatgtagatggcaaaagtgaaccctttttct

SEQ ID NO: 60487 - DNA, 228 bp, Glycine max
  Clone ID: PAT_MRT3847_25630C.1
acatctaatgcacgccatgcacacctgcgtaatctggctatacatctcgagttcaaagcttcttaacatattgacgattaatcgtatctggttaaatacaaaattgcagccgccactgacatatttcgtgatgaatataaagcgaatgagattgaataagctgcccaggcctacatgtgacagtatttgtccccagtggactttattaatgtccaacaatttgcacat

SEQ ID NO: 60488 - DNA, 2088 bp, Glycine max
  Clone ID: PAT_MRT3847_25631C.1
cttggttgtaggttgtcttctctattattgacctgtgctataaatctttgttttgtaacaacaaacagatctataatgtaaagggaagggaggttcacattcacattacaagcaacaacttaacgcttaacaacagcactctccctaatccttctgtgtatgcaaaatgagaccatgcaaatgcaaatgcaatgttctctctgctctcattcttcttgtcacattcctttttattgcttcttccgtccactgtgaagacccatatcggtacctcacttggaaggtcacctatggtgacatctatcctcttggtgtcaagcaacaagggatcttaattaatgggcagtttccagggcctcaaatagatgctgttacaaatgacaacttgattatcaatgtctataactacctcagagaaccgttcctcatttcatggaatggcttacagcataggaggaactcatggcaggatggagtgtatggcacaaactgtccaatcccacctgggaggaacctcacatatgctatccaggtaaaagaccagattggtagctatttctacttcccttctcttggaatgcacaaagctgctggagcatttggtggcatcagaatttggagccgccctcacattcctgttccttttccttctcctgccggggactttaccatacttgctggagattggttcaagcttgaccaccgaagactgagacgactcctagagaatggtcataatctccccttccctgatggccttcttatcaatggacgtggttggaatggaaacacattcactgttgatcaaggtaagacttatagatttaggatatcaaatgtggggctcacaacatcaatcaacttcagaatccaggggcacagtttgaaacttgtggaggtagaaggatctcataccctccaaaactcctattcttcccttgacgtccatctcggacagtcctattccgtgctggtcacagctgatcaacctgtcaaggattactatatggttgtctctacaagatttaccagacggatactcacaacaacttccgttcttcattatagctattcaaaaacaggggtatctggtcctgttcctccagggcctacccttgatattgcatcgtctgtctatcaggctagaactatccggtggaacctgacagcaagtggaccaagaccaaaccctcagggatcataccactatggattgatcaaaccgagtcgaaccatcatgcttgcaaattctgctccttatatcaatggcaagcagaggtatgcggtcaacggtgtctcatacaatgaaccagataccccattgaaacttgccgactacttcaacatccctggagttttctacgttggaagcattcctacctatcctaacgggggcaacaatgcctacctccaaacttctgtcatgggggctaatttccatgaattggtggagattgtattccaaaattgggaggattctgtgcagtcatggcacattgacggctattccttctttgttgtagggtatggtagcgggcagtggacagcagacagtagagtacaatacaatctgagagacacagttgctagatgcaccactcaggtgtatccaaggtcatggactgcaatctacatggctcttgacaacgtgggaatgtggaacataaggtccgagaattggggaaggcagtacttaggacaacaattgtatctgagggtgtatacaccttccaaatcatggagggatgaatatccggtgccaaagaatgcgcttctatgtggcagagcaagtggtcgtcgcacaaggcctttctaatttaatttaggtagcaattagcattgcaattgcatcatgtcacgagagggtggcatattcatattgtgactgcttctatttttttagctacgtgcaggcaattttacttttttattgattgggattattttttaacggatggtgagatgagatgaggtatctgacgcatgatgcatgtgtagtaactatgaacttccaagttccatcattttcacgtattaattattaaataaataaatcaagttctgaagaacaaacaaaaaaaataaaca

SEQ ID NO: 60489 - DNA, 457 bp, Glycine max
  Clone ID: PAT_MRT3847_25632C.1
gacacagttgctagatgcaccactcaggtatatccaaggtcatggactgcaatctacatgtctcttgacaacgtgggaatgtggaatataaggtccgagaattggggaaggcagtacttgggacaacaattgtatctgagggtgtatacaccttccaagtcatggagggatgaatatccggtcccaaagaatgcgcttctatgtggcagggcaagtggtcgtcgcacaaggcctttctaatttcatgtcacgagagggtggcatattcatattactgcttctgttttttagcatatgtgcaggaaattttactatcatagctcgccctgagcttcgagtaattgattttattttttaacggatgaggtatctcatgcattggtagtaactatgatcttccaagttccatcattttcacgtattaattactaataaataaataaatcaagtcctgaag

SEQ ID NO: 60490 - DNA, 282 bp, Glycine max
  Clone ID: PAT_MRT3847_25633C.1
caagactcctcaatcatccatatacatgatttccatttcttctacagcagtttctattcgctcattggctgatcttaatgcacgcacaatcatacagagtacctactcagctaaagactcagcttcccaagccacaaggttctacatcatcaatgcttacctcaaagacattgtagtcactcttatggccacttctgcgatcaccattctagctagcaacaccatggccatataaatgtcactgttcactgatgaccgatctatgcttttctctacaaactc

SEQ ID NO: 60491 - DNA, 308 bp, Glycine max
  Clone ID: PAT_MRT3847_25634C.1
ggtggttttattttttttttttttttttttttttttttttttttaattggacatgatctctcatagatgacaaagtccgttacattaaaccagaatacaactttggctaatgtagtacaaataaaaaagccaaccaaaaaggcctaattgcatcgataaacaaccagcaaacccaaaaataagtcttcttcaatgttggtttcaaaaattgcacttctagactcatatctacccgataggaaggctactaacttcttcagataagattcctaaaccaaattgaaagacaacctgtcaagactagcaac

SEQ ID NO: 60492 - DNA, 343 bp, Glycine max
  Clone ID: PAT_MRT3847_25635C.1
gcatcctgattgtgtgatgctggtttatccaagtggggttggtgggtttgatgtgaattggaaagaattaagtggaactatattgggatttggtggggtggacctgaaaaggaaaccttatttccttaaccaaaaacattgttggtgggaaagtatttattagaactgttaaggttggaaaaaaccctttaccattggggaaaaaatttttggttgacccattcaaaagaattgtttttttggggaaaagtccttttaaggaattgactgtaaggaaagttgttaggaaccgtaggattcctgttgatatggatggagttactgaaatggaaaaaaatgcctt

SEQ ID NO: 60493 - DNA, 295 bp, Glycine max
  Clone ID: PAT_MRT3847_25636C.1
tttttaattcccacacaaaatttatccatgaaaaaagggtgcccttgagggttcaaccggtccatcccacaaatatatttgggccaaaaaaagaggggggaaaacttccttttttaatctgaatcctagtggcagatattgaacattctttaatatctggtgtgggagagctacaatcacatttttttttttacttggcaggccaacacaattttgaacattggttggcacctctcttttttaagaagattcccaaattgaggggaagaatattttggttggaaggggaagaggg

SEQ ID NO: 60494 - DNA, 685 bp, Glycine max
  unsure (1)..(685): unsure at all n locations
  Clone ID: PAT_MRT3847_25637C.1
ggctgatgaggacattatagacttgggatgattgaaattgtccttgaattttcatgtgatgtctgcaacaatctcaacatcttctagcacaaatcttgcatccacagttctatgtagtactttgctgtagattaactacaaaaaaaatttcgtggctcttctattttctgtcctggaagcatgtttgagaaattattcttgcatttcgtagtcttggcatatactccttcctgataactcatataactgtaaggttcatgctcttctattatttgcaccttattggtaatcaggtgaaaggtgaaggtgaaacacatgttttatgtttgagaaaaccgaccataattccccctttttattttcaggggatattataagtgcagcagcatgagagggtgtcctgcaaggaagcatgttgagaggtgcttggaagagcctaccatgctaattgttacctatgaaggcgaacataaccaccccaagttaccaacacaatctgcaaatgcatgaactatgtggagagcttaaccagatcaagcccatcattcaatttgtcaaaacctctctgtgattggcttgagatgctgctgtacatattntaagtgatgcaaacaagcagggatgatggatattgttggcgcagattttgtcttttggatagtttggctaaccagccgttttattt

SEQ ID NO: 60495 - DNA, 399 bp, Glycine max
  Clone ID: PAT_MRT3847_25638C.1
cacacaaacaccgaaaagttgattgaaaaggacatgatgatgtggcaaccataccaaactatgtttggttgactgaagaggatatggtagtattatattcaggcaaacaaccttctttgggggatatgagatttaataaatcaagctgttccttttgtgataattttttatattcaacaaagaacacgagtcatatttgatttttatttataaaaccaaatggccttaacatttctatttgccattgatttcagcacaaaatggaatctgaatcactgatatggggtgacaaactcacacagacgggattgtcaatcgttggttttcatggagcactacctgaagaaaggaatctacgccagaaattcatggtagatgtagatgcatggatggatctca

SEQ ID NO: 60496 - DNA, 828 bp, Glycine max
  Clone ID: PAT_MRT3847_25639C.1
aatcggctcgctcgagccgaatcggctcgagggctgaggtaaaggaagatcttacagctgaggaggcatttgaaagtaagaagcataaacttgcagagttggggaatgccttgcttacagatccagagtccaatattaaatttctgaaggagacgatgcagatatctaaagataatgatactatcggatcaggcttcctactgaaaaggaactagaaatgaaggtttcaaagactgttagaaagatgcgttattatgagtcatctcttctttctgcatacaaggttcatattaatgctcaagtgttacgcttactataattactttatttagctgaagcatatttatactgtcatatatgacttccatttcctgtgctagcaatggtgcttgttgcctttttcttgaacctacttcctccattggccaattcttttttagatatcttaactgaaattgtcataaaatatgaattttgctatatgtacaccactaatatgttactcgttttatgtggtaattgcgcttagtgcaaaggttatgtgaaaaccaagctgaactacccctataaaaggaggagagagaaaaaggaaaaaaatagtcagtaatttcaagagaatacaattcctttccgaagacattggttaggagtcattttttccctccattcccttttttaactatttccttccatattcactatcctcttgcaattgtaaagttttttatgacaatgagaggctaaacccctttgttggaaacgtagcagttaacggctgtggatgtaattttttcttccctatctcattatgaatattactttttcatt

SEQ ID NO: 60497 - DNA, 426 bp, Glycine max
  Clone ID: PAT_MRT3847_2563C.1
ggctcgagcgttacgaggatttttgtttgcgcacagctagccttgcaagctgctcaagaagcatctcaagccaaaacggctagagatctaagtcatgagctgcatgaagctgatgcgactctagaagaactaccagcgatggttgctaaaagattcagaaaaccgtcaactgaagaaaagagaaagcttggagattgctctcacccggatgccccctgaagatccaagcacagcattggaaattgttgccaaaacaatcccagcttcccagctactgccgaataggtggaactcgacatggatgctcacaacgagtctaccttggggaggatcaagccctcttgttcaggaggctcctatcatgttgcggggccccgaacctcacgaaacccttgtggtgggcatatgtcaatatccccccactct

SEQ ID NO: 60498 - DNA, 231 bp, Glycine max
  Clone ID: PAT_MRT3847_25640C.1
ccgatatcctcttctattagctacacactggtactaatatcgtggcattattgctgtgtactgggctgtattataccggggtggactgataggtttaacttcatgctgtctaagatggttatcggcacatagattgaactcagatactaagccggtcgcgtagagattgatttatgatgagactaatgatttaaagaacttatattaattccagaagacttattgctcacc

SEQ ID NO: 60499 - DNA, 258 bp, Glycine max
  unsure (1)..(258): unsure at all n locations
  Clone ID: PAT_MRT3847_25641C.1
gcttanttntagctangttatcggcctatatgggcnattgatnttaagcctgtgacctggggatatgtttcggctttgatccgggagtcattatgtgaaacatcgttgtacatatggttatggctttatttttgtcattaccgagaggcgggagctgatggattggttgtattgtcgttcgtctaagggattaccttgataatttttatgtgcggtactatcagtattcagtagcccacatggatcgtattgttgact

SEQ ID NO: 60500 - DNA, 397 bp, Glycine max
  Clone ID: PAT_MRT3847_25642C.1
gaagggggctcccccgaatccatattcgaacctcgaaagcgagggcacgcggatattaccaaaagaatttctctatcgaaaatatgtgcatcacccacccggcggaatcacactagtccagagaccccccggggtatagaaacgtcgagcatggctcaaaggcagcgacctttgcacggacggggagaagttctgggaatatatcgaatcctcctctaactcagtacttggaaacattttcatccgagccattcgccctggaacaaccgagactcttaattcccttacgatactatgcacgtctactttcccccaccgcgagggccctcaaccgtcaccggggcccagacacccatcgccaaaaacccgcctaagttacaatgttgcgtaacccccg

SEQ ID NO: 60501 - DNA, 398 bp, Glycine max
  Clone ID: PAT_MRT3847_25643C.1
ggggaccccaaaattaattgattttaacgttttttttttgaaataaaaagcaaaatggtttatatatacatttaaagtaacattgtttgccaaaagagaaaaaaaacaaacctaataaaattgtttatttgatagggaatcgccaaaatattttaagattttggaaggggggaaaacttttacgctggaaaagttttaaaaaggaaggtcacgctttaaatgggtttttgggggcttcaaaacatgattaaattcctttttttgttcccgcttggatcgccactgtgcattcattatttgaaaggttccaaaaaaaagggtatcaaatggcttttttttctttttaaggaatttgagaaaattaatttccgaccaaaaagatggaacccctttttaaa

SEQ ID NO: 60502 - DNA, 566 bp, Glycine max
  unsure (1)..(566): unsure at all n locations
  Clone ID: PAT_MRT3847_25644C.1
ccacgcgtccgcttttctctcgtgatatattgatttgaattactcaccaactttttcacttaattaatctttatcaaaaaatgttacttaatactacttacttttttcttttataaggttcaaaattcaaattttacttaagagatttaagcttagtatcacttaaactcacacatattaatatttataaaactgttaattaaattattggatttcgaaagaattttgagtcaatttgaaacaatttagaaactttgcacctaaagagggcttgggatctatctgttggttagttttcatgaaaaccattttaccttccttcttttgactatctttttcctgaggtgctttgaaaattataggaatggttagattttaaaaatattatgaatatggataagttgtattttaaaacacaacttcatataaagaaagtcgtgttttactttanaaattcatttaaaaaaaatgaaatnatgttttaaaataccacttanaatattatttttcaaaaactcaatacttttaaaaaaaaactaaacaatcatnacctcaatattttttta

SEQ ID NO: 60503 - DNA, 834 bp, Glycine max
  Clone ID: PAT_MRT3847_25645C.1
tacggctgcgacgacagaaggggattgtaaaaaatttcatttatggcaagagagaagggagcaaaatctggaaaagcttttgaagaggaaaaaaaggctgagaattataaataaaaagtaaagaaaagaaggaaggaaatggtgtgtgtatatgtgttggtgcatctgcatgacaccaaatcagtgaagaaactgagtaatattactgccagctcaaatttctcatttataacaagccagcctcaggaggaaaatcacatcaaggagtactcatggaggaggggttgagtatttgctgttgctattaatttcttcttcttcttcttcaatatctctgtctgttctatctccctctagatttttcttttgctagaattctcttgcttatgagtttttttctttctgagattggggatgtgaattaaagaggactcaaattgcatgtgggttttccagaattctgatacagttttggggttcaaggagaaaaagaacactctctcaggtgaagcagaagaaggttaattgttatatataggacttgctataagagatatggcggcatcatcttcctcagcgtcgctctttggatttagagaagaggatcagaatcagatgaagcaacaacattccctgacaccatcttcatcaacaacaccagctgcaccccccccccagaagaaaaagagaaaccaacctggaacaccatatccagatgcggaggtgatagcactatctcccaagaccctaatggcaacaaacaggtttatatgtgaggtgtgcaacaaaggtttccaaagagagcaaaacctacagctacacagaagaggacac

SEQ ID NO: 60504 - DNA, 426 bp, Glycine max
  unsure (1)..(426): unsure at all n locations
  Clone ID: PAT_MRT3847_25646C.1
gctcaagtttttaattgattatttgatttcaactgagtccctgtttctaatctcttaagattcacttatttaattgttattgtacttcctgatgtttcatttcttcagattgagtctcttcaccattttttgcaactgagattttgggttttgttgatcgtgcctaggtgaaaagctgagatctttattttgagaatagcaattattcatctatttggacgctgggttttatcaaaatgaggaagcgtcaagtcttgaagcattcaattgctattgtaagcatgctggtgtgtgtttgctgcttttttattgtgtctgtgactgttttcaagctcccagaggccccaagaaaagataggcaaatggggttttacccaacaatcagatccagaaaagtttcccttcaagatntcaacttgggtaagt

SEQ ID NO: 60505 - DNA, 1926 bp, Glycine max
  Clone ID: PAT_MRT3847_25647C.1
ggactacgacccttctcatggggcctcgctcttatattagttcaacttcttttctcagctgccagttcattttccttcttcatatcatctctctcactgtcacatgctctctatctatcccagccactccaatagctttggttcactgccacccctgctgacatttttctcgttggaataaacaaactttgtgttaacttaaaaggtttaagggaaaaagaaaaactacaaaatgggaaggcactcttgttgttacaagcagaagcttaggaagggtctttggtctcctgaggaggatgaaaaacttctgaggcatattactaagtatggtcatggatgttggagttctgtgcctaagcaagcaggtctgcaaaggtgtggtaagagctgcaggcttaggtggatcaattatttaaggcctgatttaaaaagaggaacattctcacaagaagaagaaaaccttatcattgaacttcatgcagtattagggaacaggtggtctcaaattgcggcacagttgccggggagaacagacaatgaaataaagaatctgtggaactcttgcttgaagaagaaactgaggcaaaagggaatagaccctgtcacacataaaccactgtctgaggttgagaatggagagaaagcagcagaagtgtctaatgaactgaacctcctgaaatcagagagctccaagtctgattcagcatcctatgagcagagaacatcaatttctccaaaagcctatgcacctgagatggatggttcctgcagctccaagattgaaatcaattttgtaaccaacaacaactgttacaacaaagacttgttcctagacaggtttatgagtagtagccgccaagagagttacaccactagttgccagccctcagatttgatggggaattttccaattcagatgagttatgcaaccaatgatcactgtctccctaatgattcaaactctagtcattggttcagccaaactggaaggtcttttgatatgaacactgacgtttcctttcaatgccgctgtcacttctatcaatcctacacctacaaccaacttgtttcttcctaataattctttttgctacaagccttcacttgctgttccctctgacaatgtttccataccctatggatcccattactgggaagccagtgcctccaacaacagcaatagtagcacagaattgagaagtagcagccccttgaacatcttttcttcttggggattggcagattgtggcacctctactactaaagaggcacaaattcatatgatggagaatcataatacagaagaagctaagtgggatgagtaccttcataaccctatctcaatgctggcttcttctgtacaaaaccaagctcctgagtctctatgcaatgatataaaaacatccatgcatttggtacctgatactttaggggctatgctacctcataaccataccaagcagcaagaacagtctcaaacttctagtttcttttccaaggacatccagaagctcagggcagcctttggacacatgtaaaaggattttagaaagggttccaattcaagggattgctattcttagtacaggtgtgtgaaaccacagattttttgctcttgtatgtaggtctaatacaaaacatttattttcaccttttgtttttccttcactttgtttaacatttgtgagccaaaaaccatttgtcttttactttcttctttcgggtgtggggtagaattgaagaagaataagggttgctattctgtcttaaatctactctttctttgctacactgtaaccgcaatggtgcattttgcagtgtccaagttcaaagccatcacagattttaattggtccatgcaaagtttcatttccattttgagtgccagggacagagttactttacctgcaaacaattttcagaatc

SEQ ID NO: 60506 - DNA, 1592 bp, Glycine max
  unsure (1)..(1592): unsure at all n locations
  Clone ID: PAT_MRT3847_25648C.1
tacggctgcgagaagacgacagaagggcaattatttaaggcctgatttaaaaagaggaacattctcacaagaagaagaaaaccttatcattgaacttcatgcagtattagggaacaggtaattgtaattgtaattttaattcagtctctctcatgattgaattaatgaattctctccctttttcttttctactgtggttaacatttatttttctttttcatttgcttgacatgcatattattatcctgtgctgtctcaggtggtctcaaattgcggcacagttgccggggagaacagacaatgaaataaagaatctgtggaactcttgcttgaagaagaaactgaggcaaaagggaatagaccctgtcacacataaaccactgtctgaggttgagaatggagagaaagcagcagaagtgtctaatgaactgaacctcctgaaatcagagagctccaagtctgattcagcatcctatgagcagagaacatcaatttctccaaaagcctatgcacctgagatggatggttcctgcagctccaagattgaaatcaattttgtaaccaacaacaactgttacaacaaagacttgttcctagacaggtttatgagtagtagccgccaagagagttacaccactagttgccagccctcagatttgatggggaattttccaattcagatgagttatgcaaccaatgatcagtgtctccctaatgattcaaactctagtcattggttcagccaaactggaaggtcttttgatatgaacactgagtttcctttcaatgccgctgtcacttctatcaatcctacacctacaaccaacttgtttcttcctaataattctttttgctacaagccttcacttgctgttccctctgacaatgtttccataccctatggatcccattactgggaagccagtgcctccaacaacagcaatagtagcacagaattgagaagtagcagccccttgaacatcttttcttcttggggattggcagattgtggcacctctactactaaagaggcacaaattcatatgatggagaatcataatacagaagaagctaagtgggatgagtaccttcataaccctatctcaatgctggcttcttctgtacaaaaccaagctcctgagtctctatgcaatgatataaaaacatccatgcatttggtacctgatactttaggggctatgttacctcataaccataccaagcagcaagaacagtctcaaacttctagtttcttttccaaggacatccagaagctcagggcagcctttggacacatgtaaaaggattttagaaagggttccaattcaagggattgctattcttagtacaggtgtgtgaaaccacagattttttgctcttgtatgtaggtctaatacaaaacatttatttacacctttttttttcttttcactttgtttaacatttgagagccaaaaaccatttgtcttttgctttcttcttctcgggtgtggggtagaattgaagaataagggttgctattctgtcttctttctactctttctttctttctttctttgctacacactgtaaccgcaatggntgcattttgc

SEQ ID NO: 60507 - DNA, 338 bp, Glycine max
  Clone ID: PAT_MRT3847_25649C.1
tttccgggtccgaccacacccttccgccacacccttccgatggttggtggtggaacctcgtcctcctcctttggtggtcctgggttggggttggtttttcctccaaccggaaaatgtcttgctgcgggggtacctggggttgcggaagctcctgcaggtgcggcaccggctgcggaggttgcataatttccccaaacttgtgctccactgagtcaaccccccccgagcccttggtcatgggagtggcccctgttaaggctcaattgggggtggctgaaatgggtgtgcccccttggaacgatggcttcaattttggcccaaactgttcttgcaacccc

SEQ ID NO: 60508 - DNA, 491 bp, Glycine max
  Clone ID: PAT_MRT3847_2564C.1
ggcttcgaactttgggctgagttatgtgcttgtttatgtgcttgtttatgtgcttgcatggtcgtgagaagatgatagaaggggaagaacaggagtttaaaaatcattacagttatcgatcgacctagaaatctccaggtacagtgaaaacgataattattcctgtgattgctgtaggatctggcggcgtactatcgctacttattctactctgctctattctagggcccgcgaaactgttagcgagcgtcaggaactttccgaggtaagtcgcggtaacgggaaacgggagggccatacgtcctgagaggaaccggtcgtgggtagaccatagcgcgaccgggcccgggccgaccggccggtcagtatttctaagtgcattggtcactaatggcaaaagctcgatcggttctcctcccgagagtaccggagtcgagtccgtctatccttttattttcctcgtttccatcctacttccccggccacggtcg

SEQ ID NO: 60509 - DNA, 481 bp, Glycine max
  Clone ID: PAT_MRT3847_25650C.1
gacggctgcgacgttctacactttgaccccctcttctctgatttgcgcttgcatcgaggattagatctacatgacttggcactcagggatcccgagccagtctctgatgctagcatttatcgaagtgccggtagactggtacgacatgctcgctaccaggttgactatggtggaagatcatgatcgaccatcggggagcatttgatacacttcggggtgctgcaaggaggctacacataagatctagctgacttggctctgaaggtagtactacctgaaccctgggaacaagaggctcgcgtgagaacctggactttgaggcactaatctcgagggcttgatacttgatggctcttgcatcttgcactgatatttcatcctcaatgcctttattgtgcgagcttgatgacccgtgtgaatgctctaacgcgtgatctctcgccctttcatctgacgaaatcttcccaagacctgcttatgc

SEQ ID NO: 60510 - DNA, 321 bp, Glycine max
  unsure (1)..(321): unsure at all n locations
  Clone ID: PAT_MRT3847_25651C.1
gtcgcangcacgcgtacgtaagctcggaattcggctcgagcnnncgnannnanttncgnantgnnnaccggaagctcatcancanagttntggnaagctgtnanaantcatggatgncttgncancagcaacaatgcttngtatgcaanagatggaggaattacnanaatagngatggncntncnccgangtggacnntgcntatggngtgggtatccnntnaaatgtaancgcnggcaccntccaagcgtactgngnacatctccacagcgaaatgctgctgangcagccnctgnatacggnagatcgncatanngttta

SEQ ID NO: 60511 - DNA, 267 bp, Glycine max
  Clone ID: PAT_MRT3847_25652C.1
tcggtgttttttgttaatacagagagaagtgaaagcatggggtagccttgacgggggatgaacaacagttgagatttggcagagttgagagccctgtatggatggcgttaccatgcacctacgtgctaaagatactgtgcggtggaatgcatgaataaagatgaactgctggggaatttgccattgttgggtgaaccactttaaaaagatgttaggcttgcggaagtctacgatggaacctaggacatcatgtggcatagtgtggta

SEQ ID NO: 60512 - DNA, 737 bp, Glycine max
  Clone ID: PAT_MRT3847_25653C.1
gaggagcgatgtagcacgcaacggttcaatctagataatacttttaaactctcttgactgtcacaatgcaattgtattacagagaaagcagttggatgttatttttacattttttatgtcaattatgaagtctagattaaaatagtatttgatgtgatttttttatcttaaattatttaatgaactatcactctcgagccgattcggctcgaggggctccaatgctgatgtatagcagtggtaacccaacaaatattgcgaacccaatcaaagatgcaagtgctcgggttgatataaagacatcaagtggaaggttgacattgtttgagactactttgtgcgaaaagatatcttgggaaaagcttgaagcacgcaaaagtttggatcccctgggttatcttagagcatacaatgagaaagacattcaattaatttgttgccaatcagaggcaagtacattgtggcttgttccgccaattgtgcaggccagatttataaagtcccttaggtggaacatggacattactttctcctgggaatttatcagagataggcctaaaggaaaggaagcagtaaagtatgaactaaccatactggagcaggatcttcccaaatcttcagaagtgactaaagttttcaatggtagttcaaatagtttcactgtattcaatatttacccgagatattttcgggtcacgggctctggagatgtgccgtccttgaacagtcggtggagc

SEQ ID NO: 60513 - DNA, 142 bp, Glycine max
  unsure (1)..(142): unsure at all n locations
  Clone ID: PAT_MRT3847_25654C.1
ttgcaagttagcaagaaagaaacagtgctcgctcgaatttcgagaacgaaagagccgacgaaaaaatgtacaccagcggtggcgatgaagctgaaccggaatctgaatctgagcgnaatagaatgggtgatgatcaggacga

SEQ ID NO: 60514 - DNA, 258 bp, Glycine max
  unsure (1)..(258): unsure at all n locations
  Clone ID: PAT_MRT3847_25655C.1
aaaacatatagactacgttataaatcgtcccntaaccgtcatttgttcattaaagagaattttagccagtgctgagacacatgagcatcctcgtcaaaagcaacaangcaacgagtatgatcgaaagagccaaggacaagagcgagaactgttagacccggagtggaactgagtggcaaagagcctagacgcgctcagcaacacctatactagaaggcaggagcaaggagcaggcacacaaggcaggaacagctgggt

SEQ ID NO: 60515 - DNA, 590 bp, Glycine max
  Clone ID: PAT_MRT3847_25656C.1
ttccggatgaaatgagaaaaataaaaatgcaacatcacagtattcttttttcttcttttttttttctgcagagaagagtagaagaagaaggagatggcgaagcgcttgattccctgcttcaatcgcattctcgttgagaaaatcgtccctccctccaagacaagcgccggcattctcctccctgagaagtcctcccagcttaattccggtaaggtgatagcggttgggcctggatcacgtgaccaggcagggaacttgattccggtgtccgtgaaggaaggtgatcacgtgctcttgccggagtacggtggcacgcagatcaagctcgatgacaaagagttccatttgtttagggatgaggacatcttgggtattctgcatgattgatgttgtgaatgtgatgcctcctaaaacatgcaagttgcgatttacctgaaatttttttttgtcttagtttaagaatgcaacttgttacaaacatttgagagggatttgttttttaggaatttatatcctgttttgtattctaaaaatgacaatgggaatggtgcttcttctagtcttctttgttggtgtgttttttctttcgg

SEQ ID NO: 60516 - DNA, 1159 bp, Glycine max
  Clone ID: PAT_MRT3847_25657C.1
cgcgacgtaagctcggaattcggctcgaggagagtatttgtatccaaaaaatggtgaaccacgtctcaaactattctcctttattcatcatcttggttttgcttgtcaaaggtcaaatagaagtgcaaggagatttatgtgtaaaagctttgaattattgtgaaacccaagatgattgtaaactaaagtgtatagccccgcgcaaggatgggtttgcgtattgcgataacacacacacgtgttcctgttttttctattgttaattaggcaagctttgaaaagtgctattttccaccttctcgctaagccaatctgcaggcttagtaagcatccgctaagcgcatcactcatgggctaagcgtgaggaagactctggaagaagatgagttgtacaggttcactaagcgcaccgcttcagttcatccgctaagcgagaaaggcatgtgctaagccaaaattcactaatatacgctaagtggtccataattgcgctaagcgcacgagcacgaacaaggccacctatttaagcctgaaatcagattttagagcgggagtttggactgggattcggagctttacatgtctagagattctagagagagaaaggtccaagttccagagagttttgagagattttgttgtgtgaagatctgcagagaccagagcttgaagcaggagccggtttgagagcttgagatgagtttgtgagtgattgtgagatcctagaggtgaaggagacatcctcaccacttgtatttttgcaatctttcatcttgttcttctctttgttgtaaagaaggcttcctggtatggaaagctaaatcctctgttggatcttccctgtaggtacctgatgtaaatatatttctatctatttaatgatgttttgtgtgttctctgtgctatctgcttttcattccaatatgcctttaccttgatcacgtagatgcatgctttgttagggtcattcaacagtggaaactggtctgactctaaagtccttgatagtacaggcctaagttgtcgtactatcacgaggaatcggggtgcgataatttagttgtgtatgtgtgtcttaatgcggtcctggttgagtttagtccaacaagaggaatctgcagacaatgcttgatcaggattaggctaaactatcatgagc

SEQ ID NO: 60517 - DNA, 1384 bp, Glycine max
  Clone ID: PAT_MRT3847_25658C.1
ctatactataaaaagactttctctgtccacaaccatcataccattataccttaccaccccttccttccaccaccctttctttctctcctttatacacacacaagacacacacatcacaagaaagagggagaaaaataaaaacaaaaacaaaaacaaaaggtggtagatgcatgagccacaacacaacacacattatctcataccacactcaccaccttgtattccccaaaattcacataattccccttctcttgccttttccctcagatttctcaccccttctctcttctgtgttgctacccttttcaggtactcttcctactaaattgaaggaaaaagttggtattataggaagttaatcactgctttgatgacttggtaagaaaacttgaactaacaatggtaagtttgagaaggcgcagacttttgggactgtgctcaggaaacagttcctttgtcacaccacttcctctatattgtgagaatctatctggttttgaaaattcaaaccagcaagctaaacctaagagtgaacagcctgcgctttctgatgatgcaagcaacccggacagtaataatgctgtgcaagaagaaccgggatcatcaaatgcttctggttctagctcatcgaaagagcagcttattcaacaaattacaggacctcctattaaacgcagaaagcgacatagaagaaagaatttgcacaatcaagaacaatgcataatgaggggtgtctacttcaaaaatatgaagtggcaggcagcaataaaggtggacaagaaacagatccatctagggactctcgggtcacaagaagaagctgctcacttatatgatagggctgcttccatgtgtggaagagagcccaattttgagcttcccgaggaagagaagcgggatttgagcaaatttaaatgggacgaattcttggccatgactcgccaagcaatcacacgcaaaaaacacaagagaaggcttagtcccggaccaggtaatagtcatgatatgcttccactgtccaaagatgattgggacactaagcaaggagtgattgaagatgcagagcaggaaacatcagtgtcgtgaaaattatgattctggaaataacccaagagtgaagatggaaagcctctagtcctaacacttcaactctaatatcatgctagatccatttttattgtagaaaaatgcagcattatgtcagaccttgatagaattgattatccttaatttatgcaaattgctatacctaaacccaataaagagtccattcaatgttagacgtgtcaactaccaactgttgaactctatatcagtttcatcaaactagtgcaacgccattttcttcttccacttggtgggaataaatgaatttttccaaaaa

SEQ ID NO: 60518 - DNA, 350 bp, Glycine max
  unsure (1)..(350): unsure at all n locations
  Clone ID: PAT_MRT3847_25659C.1
gagagtatatataatcacacgggtaaatatatcaattggtanttttaaaaacatggaacacatcaatttttttttcataagaatggtggtgtgacagcaagctggccaaaatcttacttgtgcccctgtcatggtgattttttttctgncttctccattttcccctaccaaatatttggtttgcccactttgtgtattgcacgaactctaaagaaagatatctatcaactttattctagttacttttttttctttcctccatttttaaattaccctaccgtctacttttttattttattttattttatcatatatcaaatcagggtcagtttttgtggtttatgtgaaaa

SEQ ID NO: 60519 - DNA, 431 bp, Glycine max
  Clone ID: PAT_MRT3847_2565C.1
cccacgtgtccttatacgcatccgctacaatggtctctgtcgtatactccaccactttttctttcttctactccgccacctcttcctcctcctccaccgcgagcttggagttcacctcctccttgcgcgcgcagctgactgtgctgcctgcgctcccgcccggtgggccgcctgggtttcgccgagtgggacccgctcgtcgcggcgagtgtaggaggacgcatggcggcgatgagaggaggatgaaagggcacgaggagggtggtggacatggccaagaagaacctgagggacctgaacgcggtggacctgaacgggaagaaagtcttggtcaaggacgacctcaacatcccggtcgacgacaaccagaacatcgccgttgacaccataatacatgccgtccttaccagcatcaaagatattatctaaaa

SEQ ID NO: 60520 - DNA, 265 bp, Glycine max
  Clone ID: PAT_MRT3847_25660C.1
tggaccgtataatggaacgtggcgctcgatggcacagaagatgggaaaatatgattgctaacagttgtgagatgactagacaatgaaaacatgtcagacgcattggcgcctgaactggtaagcatctactgcctctgtggagatactaactagatgccatattactacatccaactgctgaaattcacaggtaattctttaccgcaggacacaaactgtccccatgactgtggatcagtagccggatagacaagatgtacttttg

SEQ ID NO: 60521 - DNA, 383 bp, Glycine max
  unsure (1)..(383): unsure at all n locations
  Clone ID: PAT_MRT3847_25661C.1
tacacgcgtaagaactcgtcataatgattctaccaacaatgctgctataaactactgaggggtatatataaagggaggccaaacagttcatccaaactcgttcagtataaaagatccaagattacgtacacatacataccatcctctaactgttatctnaagcctccatactgcaactcactctaccgagattaacatcaacgctacatggcataaccctggatctacctatcataatcaccttgctactcacactcattatgacagctgacatactagcgaaaaatctcacaccaatcacacttcccatcatcactatcactctgaataccataagaaatgcaccctataacgttccattcagctcacactgaattcatcct

SEQ ID NO: 60522 - DNA, 138 bp, Glycine max
  unsure (1)..(138): unsure at all n locations
  Clone ID: PAT_MRT3847_25662C.1
ttctaatgaggaaacacagaactatatataggtatgggatctacaaaatgaagctcgttatttgatattgtcagagtannngggacttgtgcattattcttttcctaagtaaaaaatacacttttccgggaaaggttt

SEQ ID NO: 60523 - DNA, 468 bp, Glycine max
  unsure (1)..(468): unsure at all n locations
  Clone ID: PAT_MRT3847_25663C.1
ttttttatanttttttttttgttcttttttttttttttgtttttttttttttttggggggaaaaaggggcccaacattcgaccaaatattcccgaagggcctaagtgatcaacgctaaatacttccccctcagtttgccattagttttttgtatatgtggaagggcccgcattaacatgttaagagctcaacattaacctaaaattgtcctacccatttttttttttaacccgggcaaacctttgaacaaacagtgcggtaaaggcctaagcgcctgctggggaagggataacattagtaactggaccagggggggaagagacaagaaaaaaacggaaactaaaacaccaacagaacttccaagaacaagcttcacacaattattgggggaaaagaatttgcagttgttcataaaaccattatatccaaggcttaacctaaccaaaaaaaaaaaaatggttggtagcc

SEQ ID NO: 60524 - DNA, 432 bp, Glycine max
  Clone ID: PAT_MRT3847_25664C.1
ctctctgaaacttgggatgacaattccaactgcctttagaatagcacttgaaacttggtcatcatgggttgacagagagattaataaaaatagaacacgtatcttctttagaacttttgagccttcccactggagtgatcttacccgttggatttgcaatgtgacccagtacccaacattagaaactaatggaagggaccaaagcttgttttcagatacaattttacaagttgtaaagaatgttactattcctataaatgttcttcatgttacttctatgtctgctttccggagtgatgcacatgttggtaactggagtgacaacccatctattcaagattgtagccactggtgtcttcctggggtacctgatatgtggaatgaaattatcctgtcccaactttttactgaatttgaaatcccttctcagca

SEQ ID NO: 60525 - DNA, 405 bp, Glycine max
  Clone ID: PAT_MRT3847_25665C.1
tatacaaccatacacagcttgaaattgtatagcatatgaccaacattttcaagggcccaagaaaaaaaaaatcgtcccctactgcctacaccaacccgggattttgtaattgccaatggtttagagtggaattgaaaacttatttagtccacaaaagagcctttaaattttcatcagggaataataacgcgactacaacaaagggtaatgaggatcgcccaaaagaaaggttttcaagaaaaggctgctttcacctctattgttaactatcttttacctatatgggcaaatcttgtagcaacaccaaataggagatgctttggcaccagttccgtgtcaagactacaggcaagagcaaaaagcaccagcaatgactagcattttggggttgttaacgccctgggg

SEQ ID NO: 60526 - DNA, 364 bp, Glycine max
  Clone ID: PAT_MRT3847_25666C.1
ttcccgggtcgacgcacgcgtccgaacctatagctaaccacaataagatcacttcctactttctccttcactcactatataatccagtcatgggtctcttctctattttcagctgctcaacccacctattcaggaatcatggctaacgctaatgactcaatctattaatgtccctgcactattgactgagcacacgcctgatcagcaaacagaatcacacaacattaataagatcgacccacatgatcactgctctactaacaattggattaagaatgacaggttcctcatggcttcatactttcaatcctttggatactatctcgagacctggcatagactctcattctaaggtctccatcgc

SEQ ID NO: 60527 - DNA, 148 bp, Glycine max
  Clone ID: PAT_MRT3847_25667C.1
tccttaaaacctttataccctttttatattttttcccttttttgggggggacagaggggggtccctttgctcctacgggttcctcaatttgggatgagagaatcagacctaccccttctgtggtcttctcgcagcccggcgggaccgg

SEQ ID NO: 60528 - DNA, 1246 bp, Glycine max
  Clone ID: PAT_MRT3847_25668C.1
cccacgcgtccgcccacgcgtccgcccacgcgtccgcaaaaactgtaagcattaattttcgaaatgggaaaaaacgaaaaataacttttccaaattcatgacaaccgaatcacacaaaaactattttatatgctgtttttctgtttgaaggatcacacaaactagtaaccagaaaaatggcagaaacaaagttgagctccttcaaagacaaaagatggtcactccatggcatgacagctctagtgacaggaggcacacgaggcatagggtacgcaatagctgaagagttagcagaatttggggcagctgtgcatatttgtgcacgtaaacaacaagatattgataaatgtttagaagaatggaataagaaaggacttcccataacagggtcggcatgtgatgtactatctcgtgaccaacgtgaaaatttaatgaaaaatgttgcttcaatctttaacgggaagctcaacattctgataaacaatgctggaacaactacacctaagaatctcatagattatactgcagaagatgtaacgacaataatggaaactaattttgggtctagttaccacttatgtcaactagcacatccacttctaaaagcatctggatatgggagcatagtgtttatatcctccattgcaggtctgaaagctttgccttacagttctgtgtatgcatcctctaaaggagctatgaatcaattcactaagaacatagcattggaatgggcaaaggataatattcgcgcaaatgctgtggcaccggggactgttaagactgtacttctggattctatcatgaaagctgctgctgaagctgataaagccgttgagtatatagtgtctcaaacaccagttggtagacttggagatcccgaggacatatcaccactggttgttttcctttgccttccagctgcttcatacatcactggccagattattactgcggatgggggttacataatttaaagtgtaatgccaaaaataattataaaataaaataaatgcccaaaacataaatctcaagatcaactaggtttttaagaaggtccgaaactaatgattatctgtagttgttttaagtacaatatttcaagtgttataatgtttccaatgtgtgaagttctttttatcattttaaaacttgttgtggtatagggttttctctaaggtttcgggttgcttacccagaatataaaagtgtaatttaccgtttccctagatttaatggggattat

SEQ ID NO: 60529 - DNA, 254 bp, Glycine max
  unsure (1)..(254): unsure at all n locations
  Clone ID: PAT_MRT3847_25669C.1
attccaatatgtcggagcatcaatgtgatggaatganantgtnnagaggtnnaanaccntgccacagatgtatanngtatgggcncatnatacntngaacaccgggaccacntacaataattcaataggaggagtatgatatntcaggnaaattnnnattatatattccatactttacattatggccatgtgaagntatngtgncacggnattngaactcncaaacgnttttgttgttgaacngcangtctgtg

SEQ ID NO: 60530 - DNA, 358 bp, Glycine max
  Clone ID: PAT_MRT3847_2566C.1
ggggaaaaaagccccatgtttcccccaatgggcttttttaacaaaactaaaaacctaacttttttaaaaaaaaaaaaactttacctgctgggggggaacagggccctaaattaaatctttcaaggggacaataaaactgggaattcaacatttacaaattggggggataaaatttttttggggcggcaaaaaccaaacttggaattcccacataactggggggacgaaaattttactttccaagctttttacatgaaaacagggggggaatgaacccaaaatttcccctccccaaaacgggccatttgtttttttatcttcagggggacttaaccctggccaaggtataccctttaaa

SEQ ID NO: 60531 - DNA, 397 bp, Glycine max
  Clone ID: PAT_MRT3847_25670C.1
ggaaaaggggtgggtgtatattattgaagttgggggatacattctaggatatgggttttttttccctcttttgggttggaggtttttctatgttcatgggtaatgacacttaaaaatagggcccaaaacaaaaatcatgatcctttgagatgctccaaaattggtgaaaaatcacaggcctcatagctcttttttggaaaaaaaaaggtggggcttttttgggagaacacaactttttttttggaactggcttcactgggaaaaaacctttcactggcatattaaaaaaccccctttaaaacaagggttttttgtatgccaacccctaattttttataatccgggtgaccttttttttccacaaatacaaccactttggatagaacaattccccact

SEQ ID NO: 60532 - DNA, 387 bp, Glycine max
  unsure (1)..(387): unsure at all n locations
  Clone ID: PAT_MRT3847_25671C.1
ttcaaaattgtaggaagtagggttaattnatctatgccttgttttccttaccttaatgtcaaggctctaaagagaatctttagacgggaatttggggcatcttctttcccctacacttgtatttctgcaaattgttttgatacttacttctggacctatttacttgacccatttcacaatgcgacggatgtttctatctatggctactgataagcataagctgtgctaaattacaaataatacattgttatatttactgtcaacacgcgaaccgatccaataacatgcaaccgcttggttatttattgtccacacaaaattatcatattacagattgacttaacttcattttgacagcataaatgatctcacacttttcacaaagtt

SEQ ID NO: 60533 - DNA, 528 bp, Glycine max
  Clone ID: PAT_MRT3847_25672C.1
gtgtgtttttttttttttttttttttttttttttttttttttttttttttttttcacccaaaaaaaaaaaaggtttttggttgttttttttaaccaaaattatccaaaatccatttttggcttccccaaaaatatcttggccctaccccacccgggggggtgtggcccaaaatatagttagcaaacccttgggtctataaacttataaagttatcaatcttggggaggcggggcatttttttaaagaagggcagtttcccctacatataaacttgaccaaagttaatggatctgcccccaaacccaaattctgattgagggaccctgtttttggccaatctgctcataatagcaagaccttcattctttttataaagggaggacccccttccctttggggatacttggccctggttcaaaaatccctcgatttcttaataaaacttcctttccaaaaccccttgaaaagttataaaagcatcctttgttttcttaaaaatacggttctaattttccatttccaaacgt

SEQ ID NO: 60534 - DNA, 248 bp, Glycine max
  Clone ID: PAT_MRT3847_25673C.1
cagaagaaaactaccgtacccaagcctaccaacaaccacaccctctctacatcatcctacctctgattagctagggccacagcaccttcctcttcacttcgttcttcaggactctacaaatgagcaacgacaaggacacacttcaacgtggctgatctcactatcgctctcaacgaggacaatacaccacaccttgtcaatgctctcaagagcaagatacagagcttggctggacagcattctgatat

SEQ ID NO: 60535 - DNA, 765 bp, Glycine max
  Clone ID: PAT_MRT3847_25674C.1
aagatagagcagaatcatctgaattgcagtcattttctgattctctgcggtccagacttaatgcggtgtccatgagatacaaagagtcaatctcaaagggcactaggggatggaaggagaggctgttctcgcatagttcttccatgtcagaacttggttcagaaacaaggaggagagagatgaaagctggaattgctagtgtatcccgattgatggaatcccttgaaactagtgaaaataatagagctgtgggtacttctttgtcaaatcaaaatcatatagaggatagttccatgggaggggtgagcaaccagaacaatgttgaagctagtggagagaaatcttcacatgatgacaatactccagctgcatgttctgctagttcacatttaaattgagctcttttttgtttctgttaattcatctttcctcagcatctcatatttgaaggtaactttctccagacatgacatgctgaggagcagatgcttcggaaatagtcgtgcggcacttacgtcgtggtttgcaataaagatgaagatatgaaaaacagttgtgcttatagctaaaaagttaacgtttctatgtatatatattatgtgcatggaacagtgaagagttgtacgtatctaaagtgtctgggtgaacggatttataaactggcatgtactctggacatcaatctatccgtgggagaaaaatgctatgaaattcaacagaacttgtgcccgaaacaaaaaaaaactaaaatccaaatctatcttt

SEQ ID NO: 60536 - DNA, 1041 bp, Glycine max
  Clone ID: PAT_MRT3847_25675C.1
agaggagaagcccttgatttctctggtctattctttttatgttgcacgcatagaacacctctttgcagaggagcttcatacaccggattcctttcttgtcatttttaatggtttaatccttggcaagcataggaggccactgcgttttgctactgcaattagaaagttgcggagagctggtaaaattggtgagtttgtgtctgtctatgtcaatgaaaagcagcattgtgtctacttagcttctgatggtggtagagtttgccgtcccctggtcattgctgacaagggaatatcaagaatcaaacagcatcatatgaaagaattaatggatggagtatgcacatttgatgattttttacgagatggcttgcttgagtatcttgatgttaatgaagaaaacaatgctttgattgctttatatgaaggagatgccacatcagaaactactcatattgagattgagccttttaccatcttgggagttattgcagggttaattccatatcctcatcataatcagtcacctagaaacacgtatcagtgtgccatgggtaagcaagctatgggaaatatagcatttaaccagctgcgccggatggacagtttgctttacctactggtttatcctcaacgacctttgcttacaactaagacaattgagctggttggatatgataagcttggagccggtcaaaatgccacagtagctgtaatgagctatagtggttatgatatagaagatgccattgtgatgaacaaggcatctcttgatcgtgggtttggtcgttgtattgttatgaagaagtataatgccatcattcagaagcattcgaatgacacatcagaccgaatacttaggcctaatagaactgcagacaccgctggacgtatgcagatacttgatgatgatggtattgctgctcctggggaaattcttaggccatatgacatctatatcaataaacaatcaccgattgatacacgtactccaaaaacaggatctgcagcaaatttgccagatagtgcatatcggtccaatgc

SEQ ID NO: 60537 - DNA, 373 bp, Glycine max
  Clone ID: PAT_MRT3847_25676C.1
cctgttgcgacagcgcagagtacgctctcttggcgacggtctttctgccaaaacacccaatgagacgctctgcgggagtttccactgccagactgaaggtcgttctcactcggctctcatggccatggcaaccatgtgctcgtgctaatactgcatctatcaaactcggtccctcacactatcaccccttccatgcccgagccacctacgtgccggagagcagcgccggcgacactccggtcactactcaggaacttggagccctgacagggctctggatcctcttgagcagcgactgaaacatctacgacaaacaggtctcaaagggctaccgttgcccgctaaccagaagcaccctgcagttcgatgcggg

SEQ ID NO: 60538 - DNA, 675 bp, Glycine max
  unsure (1)..(675): unsure at all n locations
  Clone ID: PAT_MRT3847_25677C.1
gaattcgagctctgtacccggggatcctctagagtcgacctgcagaggagcttatacaccagattcctttcttgtcatttttaatggtttaatccttggcaagcataggaggccactggtatttgtctctctttcatcaaatgtataatttgtaaaaaaaatatgcattcatgattgttttcttatttattgttaaccttaacattgttttttattcaagcgttttgctactgcaattagaaagttgcggagagctggtaaaattggtgagtttgtgtctgtctatgtcaatgaaaagcaggtaaataattctgttcatgttttttccccaccccctttgtttctgttattttcctgttttatgcttcaattattttgtttgtggttgataagtttttgtttagttcaagagaatactatttggttctagtgtattcttttacttttttaggaggtatttgtttgctctaaatcataatatttattatttccatttagttattgtacttcaacttactatttgaatgttgcaaatgtgtgaatggatgctggtcttaatggaaaaaaaacatgtctacagcaattgtgtctacttagcttctgatgggtggtagagtntgccggtccctggtcattgctgacaagggaatatcaagaatcaaacagcatcatatg

SEQ ID NO: 60539 - DNA, 689 bp, Glycine max
  unsure (1)..(689): unsure at all n locations
  Clone ID: PAT_MRT3847_25678C.1
cgtgaagctcgaatcggctcgagaccaaaccaaaaccccacttccaattttctcttctacgtgcctctagcttgttctaatttgaataatttggcatggaaaacatgaggctcatgaggaaacacaacactactcacacatgcatggccaataattcacacacaccttcttcttccctagccatgcacaaaggttcccacatgatatccaaaaccaaaccaaagattcgcataatccacatatttgcacccgagatcataaaaacggatgtggagaacttcagggagcttgtgcagaagctaactgggaaaccaagtggagaaaatttgaagtacttttgcaacaacaagaagaacaaggcaattgcaagaacaagggttgtggcaaaaagagaggaattagaatcttattcgagtgagagtggcatgtcagaggatcatcacaacaacacagtgaaaattaataataataacaataataataacaatggtgggtattgttggggattggatgtgacaataagagacaaagncaaagaagaggttaatggggtttgttgcagtgatgatcaaagnaattcttctggaggatacttgggngggttctctgatttggaaggggtcatttctgagatttgggggggttcctttgcttcctttggatgggaatcacatgatgcaagggttaga

SEQ ID NO: 60540 - DNA, 471 bp, Glycine max
  Clone ID: PAT_MRT3847_25679C.1
cagctactaggatgcggcctcgcgatctagaaccattcttcttctctacttgctagccgtttatccaaacccaaggtttcactctcttactctgagaacaacaaatcccttctcaaataataataacatagctgtaaactgaaattcagaggaaaatggggtctcttcctctcaccagtagtaaacccttcttcacccagcttcactggttttcatcggacagaacaagaaccctttctctgaatcagagagtcaaggtctttgcctcacgatcacgaaatgaaggagaaaaagaaccacctaaattcgacagctacgacctcatggaactcaagttcggtcggttactcggagaggaccccaagctcacccttgccaagataatgggaagaaaggttaatcctgatgcttcttatcttgatattgagaaagccttttataagaacaagataagaagcatcaggattaacc

SEQ ID NO: 60541 - DNA, 389 bp, Glycine max
  Clone ID: PAT_MRT3847_2567C.1
ttcttgtcatatctcaaactgtttcactacatgaaaattcctccatctttcagatacagcttttcacgtgatatgaactctacttactactttattaaacctttcattcactttttctatcttttatatcattaattacatctgcatatattataaatttcaccataacattccttttacataccctaattacatatttacatttcatacatcaattatatatattctcattttaccaaatattctatttttaccttttttactttacattaaccttatatttttattcctcattttaacattactttcagattcctattttactacttatcaaaatctttcctcataaaaaaatttataccactgatcaacataccatttataaccta

SEQ ID NO: 60542 - DNA, 427 bp, Glycine max
  Clone ID: PAT_MRT3847_25680C.1
tttggttgatggttgctacttgcaagtacggaggtacatgtttacaaaaaaaaaaaagtacggaggtacatgatatagagacaaattcctaacttttctgaattaaatgcactttaccacttagctatttttttttacttaagttgtagggctgaatggctgatcaagttgggcatgtgagtgaccttaccttgtgtcttgtgtctttattatcattgatggagggtgacatgtgcacatgagaaaagttttgctggttaggttcttattacatagttcaacatgcaattcattctgggagaatggagcttgcataaccttatacaataaaggtgagtcagtttagaagatttatgctgaggatatgattatggattatgactaaaacctgcattcactttgttccttgtgaaaactgaagaaaaca

SEQ ID NO: 60543 - DNA, 833 bp, Glycine max
  Clone ID: PAT_MRT3847_25681C.1
agtcagtacggctgcgagaagacgacagaagggggcacattcaacaggtactttctgtctgtgatatcttaggagggagcatggaatagaacagaaaataagtggtggccttctaatggtgcttgttccatagtcaagtgattgaggttgacaaacaccaaattgaaggagaatatgggaaaacctgacaatgatgacactgattgtggaattagaagtagaaagcaatcaggaaataacaacatgaagaaagggttgttacaatcagaagctttcaaggtttaattacctaattgatcatatgggtgttgccattttactgctttacaacttttggttcatgtacttaccttgttggatctaaatctgagagcttttaatttctaattttagggtgacagcagatatttcattatcacattgttgcccatttcttccacgttacaattattgctaagaaattcaaaatctgaatgcgagtgctatttaccatattaggataaaatctattgctaaatgggtacaaagtcagttgcagaaaaatcgttgtggttctaattaagcaactcaatgccctgaatttatcgaactgtgctgagtagtgtaaattgaaccacttgcacatatgcaaaagtaggtccaacgagttgagctgttgaatgttgaacccacagaagagttttctgcacttgacttgtgttgaaggtagtttctggtagtttagccaaaagaatgaaacttgtaattcatgctacatatgtcttggcgttcactttggtgagaatgtttgggcaatgttggctaccctaccattatcctattgaacattcctg

SEQ ID NO: 60544 - DNA, 254 bp, Glycine max
  Clone ID: PAT_MRT3847_25682C.1
tgatgtgggggtatttcttcccggaagaaaaaaaggagtcacaacgccgacaggaggtttggaaggttttcgacgacagctggtgcaaggcgtttgaaaaaaggtaccatcggtgcaatgaagcttctgcttcaagtgcagcgaaagagtctgaagccccattccaaatccaccatcactgacaatgctatttccctcaagcaatcagtcttctgctcaagttgattctgcccaagcatccaaaacacaaaatg

SEQ ID NO: 60545 - DNA, 2052 bp, Glycine max
  Clone ID: PAT_MRT3847_25683C.1
gaagttagatgaaggttgtgaattggcctgctttctcaagtctcagccaacttgggtttaattcggctcgagctaaaatcttagtcttcttaatttcctcactcacaagacacaccaatggcaaagctattcaatttcctccctttcctcttcctcaacatttctattcacttcatccaaacaatttcagcccaagtagcaccagcaccagcgggccccaccaacatcaccaaagctgagaaaacggcaaatccagaaccttcaacagacaacgcaaggcaacataaatagatgattacgaatcaatcagacgctcaacaaagactcagcaagtatacatcatgcttgccaaatccttaatcattaaagtgtgttcataatcccaattaaacatgtgtaagaagtaagaacggagggaaacacactctggtcactgatgaagataaaaacaaccgattgcaaaggccaaccaaattcagtagcttatcagatagtagaaggggcagagtctttcacaatcgttatagggcaactcgcatttgcggtgacataattagtcacactccccagtaataccctttgtatggcacccaagcctctgctacccatgaccaaagagtcaagcttcaaatccccaacggcttccacaattttctctcttgcatccccccagtatagctttgccaccacattcacctgtttctgcctagaagcggtgtcaagcaagtccaacacctcagcatcagtatccacctcatagtgacgcatcacctccttttcacgaaactccgacaatggaatcagaggtgaaccagtggtggaccagagaagatttcctgattcacttcctccggaaggcttggtgtggacgatgtagagagtgtcaccgttgctgataagattgtcaatagcccatttcagagcgattttgcttcctttggaaaagtccaaggcaaccccaattttcctatcactgttcatcgtttcaccaaatcctgggttctgattgttaggtgagggttcactgttcggaggaacaatccaattcacccaagttcttgagaaagcaggacaattcacaaccttcatcaaactcctcaaagcctcacaaatagctgatagaatcaattcacagctaaacaactcaaaccaaggcctaaccgtgtttgcacccactgataatgcattctcaagcctcaaagcaggaacattaaactccataaactcacaagaccaaatgcagctgatacaattccacattctccccactctctacaccatctcacagttccaaaccgcaagtaaccccttgcacacgcaagctggaaacagtgatgatggagagtaccctttaaatgtgaccacctcagggaaccaagtgaatgtaacaactggggtggttgatacaacagtgtccaatactatctacagtgataaccagcttgcagtgtatcaggtagataaggtgcttcttcctatgaagcttttcggcgcgacggcaccggctgctgcaccggcggaggctcctgcgccatccaagccggagaaaaatgtccgggcaggggctgctgatgcttcatctgggtcatcgggttcatcggttgatgcttcgaatgcagtgagtttgaatagaaagacagttaaaggttttatcatgaccgtggcaatcattgtttcttgtttgtggatgtaagtcttaaaatggcaacttttgccctggattttgttcttttttttttttttttcttttcttccgagttaagtttgaattgattgatgatggagatctcgtgtacttttctgtcgctaccaagttaaaattttgggttccaagtgaaaatttgcttattgctacgaagttaagaaaattttgggttctatataaatgatttttttttttttctttcaaatccataagttagagttggagctatttgtttattattgttggaagtatgcttgttctatcgctcaatgctggtctttgcacttgcaagacaaaatcaagctttgtaacttttatcagagagtaagatggtgaaaattttgcct

SEQ ID NO: 60546 - DNA, 421 bp, Glycine max
  Clone ID: PAT_MRT3847_25684C.1
cccacgcgtccggctactcgtactagtcatagccttaatggcctctgtattgatccgaggtggggtcctcagacatgttcttctcactgcttacaagacttctgatcgagacctctcctaggtctcaaggaactcctctttatctagacttgccaacagggactgcaataacatcaataatgataagccttatgcaaccatatgatatattgagtaaaagggatcgagatgaagcatctgtcattcaaggtatgtataatggcattacatactatgtagacaaatacagggctaatgtcatcagttacagacctctttacgacgatattgactgaggtgctaccgatgatgactacgctgacgatgctactgtctagaatatctgtgctgcgacactacttgatcttttagctctgactgc

SEQ ID NO: 60547 - DNA, 191 bp, Glycine max
  unsure (1)..(191): unsure at all n locations
  Clone ID: PAT_MRT3847_25685C.1
caatccacagcattattcataatttttatatccacattccatgatgaaaccaagtcccttttaacagctggtagcctttacaaaactctanttacatattcctacaactacatcccaaatgctatcaaaaccttcaagagtgttgaaaacctctatatgaacaagacccctcgaaccatcaagaacatcac

SEQ ID NO: 60548 - DNA, 661 bp, Glycine max
  Clone ID: PAT_MRT3847_25686C.1
accgcaagcaaccctttgcacacgcaagctgggaacagtgatgatggagagtaccctttaaatgtcaccccctcagggaaccaagtgaatgtaacaactggggtggttgatactacagtgtccaatactatctacagtgataaccagcttgcagtgtatcaggtagataaggtacttcttccaatgaagcttttcggcgcaacggcaccggctgcttcaccggcagaggctccggcaccgaccaagccggagaaaaatgtccgggctggggctgctgattctccttcagggtcgtcggacacgtccgctgatgcttcgagtgcagtgagtttgaaaaggcacacagttgaaggtgttacctttgttgctgcagttgttgtcatgattgtttcttgtttctgaatgtaagtcctaggatggctcatttttcttggtttttttttttatgttattctttcttttttttgctccagcgagtttgggttgattgatgatgatggtggagatctcgtgtgctgttattgctacgaagttaagaaaattttgggttctatataaatgattttttttcttttctttcaaatccataagttagagttggagctatttgtttactattgttgaaaggtatgcttgttctatcccaaaaaaaaaaaccaaa

SEQ ID NO: 60549 - DNA, 706 bp, Glycine max
  Clone ID: PAT_MRT3847_25687C.1
gcaagtaaccccttgcacacgcaagctggaaacagtgatgacggagagtaccctctaaatgtgaccacctcagggaaccaagtgaatgtaacaactggggtggttgatacaacagtgtccaatactatttacagtgataaccagcttgcagtgtatcaggtagataaggtgcttcttccaatgaagcttttcggcgcgatggcaccagctgcttcaccggcggaggctccggcaccgaccaagccggagaaaaatgtccgggcaggggctgctgattctccttcggggtcggacacgtccgctgatgcttcgagtgcagtgagtttgaaaaggcacatggttgaaggtgttacctttgttgttgctgttgttgccatggttgtttcttgtttctgaatgtaagtcctaggatgactcatttttcttgtttttttctttttatgttttttttttcgtgttgggttgattgatgatggtggtggaaatctcgtgtgcttattgctacgaagttaagaaaattttgggttccatataaatgattttttttttcttctttcctttcataatttagagttggagctatttgtttattattgttgaaagtatgcttgttctatcgctcaatgctcgtctttgcacttgcaagacaaaatcaagctttgtaacttttatcagagagtaagatggtgaaaattttgcctaatcc

SEQ ID NO: 60550 - DNA, 189 bp, Glycine max
  Clone ID: PAT_MRT3847_25689C.1
ccgctcacagttatttgcagtaagctctctaatgagatgcttgtctgatataagcttgagagcctaccgtgccacgcttaggctacaagcatgcttttccaatgctgaagaaagctcgtgtctttgagggtggttggggattactgctgaactttggttcattaatatttcaaggcgcacgttaagggt

SEQ ID NO: 60551 - DNA, 696 bp, Glycine max
  Clone ID: PAT_MRT3847_2568C.1
ttttttttttttttttttttttttttttttttttttttttttttttttttcagggcaggtcttaccccattttgtttaggcattgataaaatgaaaacattttggtttacccaatcttccaacaaaagggtttccaacgcctaaagtgaaaattggctctatgttgaatcctgggaaataacatatcagggttgatgaaaaaagttacccccttgttcatgggggggattggtcccaggctggttaaccacaggaatatccaagctgtttccatcagtttaaggagctacttcctttacataaattatcctcgcctttggaccctgaatatcactcctttctttatccccaactggttaaatgttcacctgatctgttgccatggggactactttctttgcagggacggggatggttttaaaaacactcaggcttgctttatccacttttttttttggggggtcaacatgctttgtatttaaacataactttgttttctaaaaaacttgagttgtatcaatgggttgcctttgaagttgggcttttaaaccattcacatttgcaaaaagctcttccttttcttttaaggctggggtttctctttaaacaaccccccttttccttaatttaaaaattttgttttttgaaacccctaaacctttttttttggggctctatacaaaaagggtggttttt

SEQ ID NO: 60552 - DNA, 1085 bp, Glycine max
  Clone ID: PAT_MRT3847_25690C.1
aacaacagaatgaccatgtttaaattgaatgacaaacatagggatggatttgttgttaaagaaagccacccaaaactaaacatccacacaaacaagtcatagaatagcccgaaagcaaaagattgataagagtatatgacgcagtaaagactgagaatcaaagtatcaaacatttcacaccaccacatcatgtgcactagtaagtttgaaatagatccagcacaaagcttatttataagcacaattttgtgattataaccaagcacttaaaagagactccgaaaatatacattatgcttgccgaatccttaatcatcatgtgtgttcataaacccaattaagcatctgtaagaagtaagaacggagggaaaagcagtctggtctctgatgaagataaaaacaaccgattacaaaggccaaccaaattcagtagcatatcagttagtagaaggggcagagtctttcacaatcgttatagggcaactcgcatttgtggtgacataattagtcacactccccagcaataccctctgtatggcgcccaatcctctgctacccatgaccaaagagtcaagctttaaatccccaacagcttccacaattttctctcttgcatccccccagtatagctttgccaccacagtcacctgtttctccctagaagcggggtcaagcaagtccaacacctcagcatcagtatccacctcatagtgatgcatcacctccttctcacgaaactccgacaacggaatcagaggtgaaccagtggtggaccagagaagatttcggaattcacttcctccggaaggcttgatgtggacgatgtagagtatgtcaccgttgcggagaagattgtcaatagcccatttgagagcgattttgcttcctttggaaaagtccaaggcaaccccaatattcctatcactgctcatcgcttcactttcgccaaatcctgggttctgaataactcactcactcactgttcaccttcgagctttggaatggtagggttgattgttaggtgagggttcactgttcggagtaagacactaagagtcccccttctgtcgtcttctcgcagccgt

SEQ ID NO: 60553 - DNA, 466 bp, Glycine max
  Clone ID: PAT_MRT3847_25691C.1
atttgtttcgtgctgtggcattatgtgttaatcacattcattaacattattatttttttgtaacaaggaatgtgtattgaaaatttgaaacactcacaaaccaaccactagtgacttatttaattacgtaccagaagttcattttttgtgtatgacaaattatatatattcacttggcctaacgttacaatttactactattcaggttgcaagttggggtgcctatcttctgtcacgtgacatattagcagtgtcatttgcaccaagagatacacatgaagctcaagttcaatttgctcttgaacgaggagttcctgcattgattggagttcttgcctcaattaggcttccttacccatcaagatcctttgacatggcccattgctcacgttgcctcattccctggggtcagaatgaggggatttatttgaatgaagttgatcgagttctacgtccaggtgggtat

SEQ ID NO: 60554 - DNA, 302 bp, Glycine max
  unsure (1)..(302): unsure at all n locations
  Clone ID: PAT_MRT3847_25692C.1
ctactccccaattgtaaataactcatcccttatcttgatgtagtcactgcaagcattctccgttatcagttgtggcattnttggtgctctccagagcttctcctccggtttctttgtnagggttcccaaacgttaganagaaggagaagggattgaanctccattccaaggtcttacnagtntatgcatctttctccattcacaggaaatcgtttgtaaatcccaatggtgacgatgtgcagaattaaattgcgaaccacatatcaaaatttcatgacaatccaatggttaacgagttcggg

SEQ ID NO: 60555 - DNA, 571 bp, Glycine max
  Clone ID: PAT_MRT3847_25693C.1
gtataaaaaaaaaaaaaaaaagaaaaaaaaaaaaaaaaaaaaaaaaaaaaaaaaaaaaaaggaaaaaaaggaaaaaaaggtgcccgacggcggcccccccccccccaccgggaagcccaccccggcccgggggagggaggcgcatagcggaaagcggggggaaaggggaaacgggtaacaaaaaaaaaaaaccgaccacccaaaagcaaaaaaaaaaaagccagaggggcggaaagagggaacaaccaaagaaaaaaaaggaaaggcccagggcccaaagaacaggccaaaaccccgacccgggaaaagaatgaaccacccccccaccccccagaaaaaggcgagcggcaaataggggaaaaggggggggccccctttagacaggcaaacgggcaaaaggtgacggccggtggccctccgccccttaaagagaagaaacaagcgggccacgcccgatacccccagccccccaaaagccgggaggaagggggccaacaaaggcccccacaaggagccaaaaccgggggagaaggagggaaaaaccggagaaccccaaacacccccccccccg

SEQ ID NO: 60556 - DNA, 1053 bp, Glycine max
  Clone ID: PAT_MRT3847_25694C.1
gacggcggcgaggcggcgccgggggcggccgagggggggttggtgctccggaccgacaccgagaccggcaagccgcagggggtggcggtgaggaactccggcggcgaggaacctaacgccgcgaaactcgccgccgctgcttcgtcatccaggaagaactctcagaactccgccagaacttccggcgactcttcggacggcggcggcggaggcggagggattccgagaatttcggaggatgtgatgggagctttgtcggcttttcaacagactttcgtggtttcggatgctaccaaagccgattacccgatcctgtatgcgagtgctgggttctttaaaatgacgggttataagtccaaggaagttattgggagaaattgtcgttttttacagggtgcggatacggctgccagaagacgacagaagggagcaaagataagggaagcattgcaagctgggaaaatttactgcggaaggctattaaattacaagaaggatgggacacctttctggaaccttctcactatttcacccatcaaggatgaagatggcaaagtgctcaaatttattggaatgcaagtggaggttagcaagcacacggaggggtccaaggagaagacgctacgtccaaatggattgcccgaatccttgattcgatatgatgcacggcagaaagagaaggctacaagttcagtaactgagttgctgcaggccatgaagcgcccccgagcattaagtgaatccgcaagccgtccctccatcagaaaatcaggatctagatcttcagacgaagaaaaattagaacaagaacaagagatgacaaagagaaagcacaaaaaacattaagaagaatatctgagagtggagcttcatttggacgcaagtccgataggatcaggaaatagaatttcaatggaaagaatcagtgaactgcccgaaaataaacacagaaactctcaacgacgttctttcatggggttcaggaggaaaagtcagtccaatgatgagagcatggataggtgaagtcattgaggacgagagctctgagagtga

SEQ ID NO: 60557 - DNA, 239 bp, Glycine max
  unsure (1)..(239): unsure at all n locations
  Clone ID: PAT_MRT3847_25695C.1
cgtgagaaccgtgagtgactatatatcaatcttcagagtcctaaaaaagtgtgatcactttcgcattgacctatataaccttttctctccggttaccagagccgtaagtcgctgaacatgaanccgcaatcttcggttcgggcggaaccggagcctccggttccgacgttctccccacggttcgcgctcacgtccggttcgcagcggaaaatcgcgatcgcggtcgatctgagcgacga

SEQ ID NO: 60558 - DNA, 772 bp, Glycine max
  unsure (1)..(772): unsure at all n locations
  Clone ID: PAT_MRT3847_25696C.1
gaaatttcctttcaatttcttatggtgggcataacagtcatcattttttaaaataaaattattgtaaaagcttagcaaagaaatgcaggagacatatttttatgtataactataaccttgtacggtcaatttatgtcatgataagctgacaacagacgtttgcatgctttgttaggttataagtatttcaatgtcccttttaatataatccaacatttgttcacttcttttgctacctttgaattcctgcaatcttaaattgtttttccatgcttactctggtttttatggatgtctctattatacatgaatttgtgatttatttagaggataattgattctgtgaactgtcaggtttggtcttaatgtttcattaaaagtgattttgattgtacaatactccatttgttttcatgtaaatatggaaatctgtggaggagtaaggattatgtataggatgcattttttgttttcaatctgtcaatgatatcaaaagtggattctaggcatacttccaaaactttgggaagtttgtattgtctatagcatcatgtgtgtattaactttgttgtgttcaataaaaagataaatttaatgtgttattttctttttctggtaaagtctttgatgatgatttattgtaattttctttttcaggttcataattctgagaaatcaaagcccanaacagctatcagaaatgctgatatgaaatgtagntaccaagactgtgccacagcaaccgtctgcattgcacattgcaagccaatct

SEQ ID NO: 60559 - DNA, 232 bp, Glycine max
  Clone ID: PAT_MRT3847_25697C.1
gttgcgacacaatgctggatacgtacttcaaatgtgggtctgtgaggagtgcgaggttggtgtttaaagggatgagtagcaggaatgttgtttcttggaatacaatgattgatggttatgcacaaaatggtgaatctgaggaagcgtttgcgacgcttttgaagatgttggatgaaggggtggaaccacagactgttagtatgatgggggctttacatgcttgtgccaattt

SEQ ID NO: 60560 - DNA, 362 bp, Glycine max
  Clone ID: PAT_MRT3847_25698C.1
acaaagaactagacaacaacattgtacaaattcaatttacaaagaaaaatgtaaaagaaaacaaaatctcaaaccatttaaattttttacaaaggctacaaagagaaagcccagaacaacattgcaaactgaaacacaacaccttcaccaaacaacatacttttttggacgataaatgttgaaattgaaacttctaagatttacagcaaacaaaacgaccaattccttttggagcaaccccttcaccatccttttaaaaaatctgcacctccttcttgggctttttcagggtctcactctcatccttaggcactgttactgtcaacaccccatcacacattgaagctctgacaccatcaacc

SEQ ID NO: 60561 - DNA, 284 bp, Glycine max
  Clone ID: PAT_MRT3847_25699C.1
ggctcgagcactcgggctcatatggcacatatcttgccttttatcgagccccaagaggaccctgaggacagggggcttacatcgatcacaaaatgcacaatccattatgcggcgtctgtggcaaaacattcatattgtcacgtcccgtctagttggcgtcccatgcatgtacttatactgagacgatgggctatgaccgacaagcactaaaacatggacgcaacatacagactcacccctacatggagacacaaatggggccacagacgccaaaccaacgactg

SEQ ID NO: 60562 - DNA, 269 bp, Glycine max
  Clone ID: PAT_MRT3847_2569C.1
tcggattctgctcgaggtgaacaatggcctctgcatcagcatctcttctcaagtcttcacttgttcttgactagtttgagtgcgtgaagggacaaacacttcgccaaccttctgctgcatcagttgtgagatgcaaccccaccactccttcaggcctcaccatcagagctgtttcctatgctgatgagctctttaagaccgcgaaaacagtggcttcacctcggaggggtattttggccatgtctgagtccactgctccctgttcgaag

SEQ ID NO: 60563 - DNA, 555 bp, Glycine max
  Clone ID: PAT_MRT3847_256C.1
ccccttgtgttttttttgggttttaaacactacaaatagaaaggggacatttaataaaccaaagcaacacaacgcagcaaagtcctgaaactcgctgcgcttaacaaaaatgggatcaggggggccgacaaacacaacacattaaaacacagataaataaaagcgatggggggaccggcaatcaagaacccagttctggggacaacagttgcgagatgaggggggggacttcaaactttgggcgaaaaacaagctacctagaaaagaagacacaagaggacagaaaagaaaccaacatttattgggaccaacatcccctggggagccaggccgcacgattcacttcttcttctgggcagccttggggaccttggctccgggaggagccttcttctcaacggtcttgaggactcccacagcaacagggtgacgcatggccctaacagcaaacctaccaagggggggggactcggagaaaggttaacaaccatggggttgggtggaatcatcttaccaaaaccagcgtcaccggtcttcaaaaacttgggctccttc

SEQ ID NO: 60564 - DNA, 480 bp, Glycine max
  Clone ID: PAT_MRT3847_25701C.1
tcgtttagaaagacaaccctaccttacctttcagaatgctcaagatgcacatattcgatatgacactcactgccaagacaatcacccttgaggtgtacagttgacataccatatataatgtaaaatacaagattcaagacatggatgggaacccaccacaccagcaatgtttcatttttggtggcaagcaatttgaggatggacgcacacttgctgataacaacatacaaaaggagtacactctacacattggagctccgtctacggggtggaatgcaaatgattgtgaagaccttgaccggaaagacaatcacccttgaggtctagagctctgacaccattgacactgtctaggctgagattcaggacaaagaggggatcccaccagaccaacacaggcttatctttgcaggaaagcaggcagaaggaggctaaaccttggctgattacaatatacagaaggaatctaccctacacttg

SEQ ID NO: 60565 - DNA, 360 bp, Glycine max
  Clone ID: PAT_MRT3847_25702C.1
ttccattcttgtattctcgtattagcacaagatttcgtttttgtctatctatgtccccatcgtaattgatggtataacatcaacatgcatatgattatgggttatgagagagtgagagtgctgtttcttctgtttctgataccactgccaacggttctgggttggggcaaggagggccactatgccacttgtaagattgcacaggagtatcttagtgaagatgctctatttgcggtcaaacaattgcttccagattctgctcaaggtgatcttgctgccgtttgctccttgggctgatgaggttggccatactcaccgctatcattggagcagcgcttacattacgttgaccaccggatt

SEQ ID NO: 60566 - DNA, 275 bp, Glycine max
  Clone ID: PAT_MRT3847_25703C.1
tattagcaaagcccaacactaaaacatattgttagtaccccggaatggaattccaccaggggctactttgggtcttccggaggattatccaacgcgccattctcttgaaagaactgggaccctgaagaaagggtctgttccttaaatctgggggtggataacagggggaacaaggaatcatggcccctcgcaaattgcatagaaaacattaccctcttttccatcaagagcgccttatgatcttttttacccacaaaaaggccttttctattggt

SEQ ID NO: 60567 - DNA, 180 bp, Glycine max
  unsure (1)..(180): unsure at all n locations
  Clone ID: PAT_MRT3847_25704C.1
ccggttcgacttacgcgaccgcggattcttttccgcacgcgcgggcggacgcgaggggcgcaaattctccgaanggcacaggaggaaaccccgccaccgagggcaagcgagcccagaaccgcaacggcgagcaaaaacagcaagccccaagcaaccgcaaagcaagagggagccacagaa

SEQ ID NO: 60568 - DNA, 337 bp, Glycine max
  Clone ID: PAT_MRT3847_25705C.1
gcgccctctcctgttaatgcatctgtttttgaatggtatgaaagattccaaagaactggggactgttccagaaatggacgccgaactatctatggaacctgcacaccagacctctactcgagttctaaccggccaaagaccaatactcgccccaattggtggagattaggcttacgccttgttcaaagcagcttctgctctttcaacagttaggtggccttattgtggggcaatggcactacccttttccgcgttatttactaaaacagggatcccatatatgggtattctaccgaaaccccccgtcagagccatcgttaaccattggtctttaaaa

SEQ ID NO: 60569 - DNA, 402 bp, Glycine max
  Clone ID: PAT_MRT3847_25706C.1
gatcaggcactcaaacaccgcgacatcggagagtagttaaacaagaaaaaacgagaacaagatggtgttctgaggaaactgaccgttaggcttgcgactcgaaacaagcgactctgctgaaactggaaccgttccaggatgcgatgctgccgcggcattacgagtgaggaagatagggttctctgaaactgatcacgtttcaccacccaccgttgatttcatgcttaacctccctcccgaggaaacttctgccgctgctacaactgatcgatcagatccacctcagaatccagctacttcgacggttgacaatactcttcctcttctcgattgctcaaagcctcatgccatcgcacttgtcatctgatagacatctgtaacgtccttccggatgaacatgtt

SEQ ID NO: 60570 - DNA, 405 bp, Glycine max
  Clone ID: PAT_MRT3847_25707C.1
attttagttttttgtattagattagattagattgctaaaactaagattagattttcaaaagaaaaattagattagtttggccacaatattaacttaaaatcttatctttatttatctttaaaaaaaatttaaacctatatctagatccgattgttctgaaatctacttaaaaataattcaaatttgctagttataaatataattcaaacaaaacttttaattatgtatagttcgtgattgccaaatacattaacattgtataacaaatttctaagttataaaaaatggttgaaatgaaattttaaattttataaaatttgttggttatccacattattttcatttacattttacagaaattaaaattgttagttagcttctaaaaatgcatgaaacgaaaattta

SEQ ID NO: 60571 - DNA, 374 bp, Glycine max
  unsure (1)..(374): unsure at all n locations
  Clone ID: PAT_MRT3847_25708C.1
ggaaagccagccaanccccccgcacccaccagaaccgcaacacccgggcccacccacgcgcccgcttacgcgcggggaaccaggggacggcgaagagaggacattgacaccgggaaccaccgcagaagaggcaaacaacaagcaaatagacgaaccagagaaaagagaccccacataggaaggcaccgaaagacccaaggacgagaaaccaccccgtagcaaaaaaccggacaaaccaaaaacgcgccgcaacacaaccaccccaaaggagcaaaaccaagcggaccgacagaagcaaacaaacaacgcgaggcaaaacacgaaaaaaacggacaagcaaagcagacaaggagcaaccaaccaaaaccccacgg

SEQ ID NO: 60572 - DNA, 787 bp, Glycine max
  Clone ID: PAT_MRT3847_25709C.1
cacgcgtccgctcagaaggttcccctgtatacccctacgtttgagtgtcttctagagcagcagattgtcaaacttgagcttcctgtaggtacctccctttatggaactggagaagctagcggagagctagagaggacgggcaaaagggttttcacatggaacacagatgcatggggttatggacctggaactacatccttgtaccaatcacatccatgggtgttagcagttcttcctaatggcgaggcactaggaatccttgctgacacgacaaggcgctgtgagattgatctgaggaaagaatccacaatacagtttgttgctccatcctcatatcctgtcattacatttggtccttttgcttcacccacggcagtgttgatatctctatcaaaagcaattggaactgtatttatgcccccaaaatggtcattaggctatcaccaatgccgttggagttatttatctgatcagagagttctggaggttgcaaaaacattccggaaaaagagcataccttgtgatgtggtgtggatggatatcgattacatggatggttttcgttgtttcacctttgacaaggagcgttttcgagatcccatgtctttagtgaaagatctccattatagtggttttaaagctatttggatgcttgatcctggaatcaagcaggaagagggttattttgtatacgatagtggttctaaaaatgatgtttgggtccaaaaggcagatggaactccttacgttgggggaggtgtggcctgggccatgtgtcttccctgac

SEQ ID NO: 60573 - DNA, 333 bp, Glycine max
  Clone ID: PAT_MRT3847_2570C.1
cccaagctcgaatggtgggtgtgctcatgctacatgctttttgacgctattgaccttgttctgatccctgcttcatcgtccgcgtttatgaagacttactggagacatacaaaacacttcatacctaaccggtttcggcctaaaagactagatatcttaaccggaccttatgctccatcttggctatttaatcactgtccttcacccacttttcttaatacgaaaaaattatcctcacacccacccaaaagagggacttaattattgaagagggatgaaatctagaaggctgggcatgtttcgggtagatgctagctgattgggcttgtgttg

SEQ ID NO: 60574 - DNA, 358 bp, Glycine max
  Clone ID: PAT_MRT3847_25710C.1
gttttttttttttttttttttttttttttttttttttttaattcttatttatacgatcgggatttattgaaaaaggtaatgagcccaaatcccagcctacggacaagggcctgcgacgaggtgggaaaaaaaaaggggccccttaattcaattcaatggccgtaattttacaccgaaatgaccgggaaaaccccggggtaaaccaaaataatcccctggaaaaacatgcccctttcgacaaaaggcgttagaacaaaaaggcccctcccgaacgcccttaccaagaaatgcaggccccaaaggggaaatgggacctcccttggaaaaaccaaatgaacccggggggggtggggggtac

SEQ ID NO: 60575 - DNA, 325 bp, Glycine max
  Clone ID: PAT_MRT3847_25711C.1
ataggtatctataataagaaattataaaagaggcaacgaaagcagcccggagggtaaaaaataacggcaggttatttgaacctaagagggggggggaagaacaaattttctcttttcagaaacaaaacaaaagttgaaaaaaaaaaaagggcacacccaacaaaaacacagggcaaaacatgggggtggccaaggaacaagggaaaggaaccaaaaaacttgccaagaccactaagctgggactcgaacaaaagaatggcatgcaagaaggccaacccatgggccaaacacacctgtgagggatcccaggcgagactccaaaaag

SEQ ID NO: 60576 - DNA, 597 bp, Glycine max
  Clone ID: PAT_MRT3847_25712C.1
cccacgcgtccgcccacgcgtccgctgatacttgctctggtcatagtttgctgtttttgtcagtgcttaagttctggcaacgataccattacaccaggccaattcatcagagatcctcacactctcacctcagctaatagtgccttcaagctaggattcttcagccctcaaaattcttcaaatcgctacctgggaatctggtatctctctgactccaatgtcatatgggtagctaacagaaaccagccactaaagaagagctcttccggaactgttcaaatttctgaggatggcaatctcgtggtattagatagcaacaaaagggctgtttggtcaacaaatttgacacataatattgcaaccaattcaactgccaaacttttagagactggaaatctagtcctcctagatgatgcatcggggcaaactacatgggagagtttccgacatccttgtcatgctctcgtgccaaagatgaagtttggtagtaaccaaaaaacaggtgagaaaatacgcataacatcatggagaagtgcttctgatccttctggtggatactattctactactcttgaacacccaaacactccagaaatg

SEQ ID NO: 60577 - DNA, 1923 bp, Glycine max
  Clone ID: PAT_MRT3847_25713C.1
tgtcgtccctagaacaaacaaagagaagaaaacccgggaacgcaacctagaacaaaaacgaagcagttgaagatggagcacgacgaagacgaagagccacctcttgctgttcagattcaagggaatgatgaatccgtttctcagcaatcttcttctgttggggtcactctcatcaccggttatcttggttcgggcaagtccactctagtgaatcatattttgaattcgcaacatgggaagaggattgctgtcattttaaatgagtttggtgaggaaattggcgtcgaaagagcgatgatcaatgaaggagataagggtgcattggttgaagaatgggttgagcttgccaatgggtgtatatgttgcacagtcaagcatagtttggttcaagcacttgaacaacttgttcagagaaaggaaaggcttgaccatatattgctggaaaccactggattggcaaatccagctcctttggcatctgttctatggttggatgaacagttggaatcagaagtgaagcttgattctattgtcacggtggtggatgctaaaaatttgcgcttccagcttgatgagcatcgtggatcatcttcatttcctgaagcatattttcagatagcatttgcggacattataattcttaacaaggttgatttggtatctgtagagagctctggagctctggaggaacttgaggtggaaatacataacattaattctcttgcagagataatacattctgttcgatgtcaagttgacttgtctaagatattgaaccgccaagcttatgataccgcacgtgccacacaattagaggcattgttagaagaaagtcgttctttgtctaccaaaaagcttcatgatagtgacgtgagaaccatatgcatttgtgagacacggatgattaatcttgataagactcggatatggcttgaggagattctctgggagaagaaatatgatatggatgtataccgttgcaaaggagtgttaagtgttcaaaattctgatcaacttcatactttgcaggcagtgaaggaactgtatgagattgttccatctcgcaagtgggaaaaggaagagaaacgcataaataagatagtgtttattggtcataatctgaaagaagatattctgattaactcctttagagatcgtgcaacttgttgagctgtatttgttcccattgtgtgggtaataatagttcaataatcaatgatttgatgataattttgagtttcaaccaaatcaccatcatgttttttaaatttacaattaaaatttgtcaaaagactaattttaatgtatgattaaaaaaaattaaaattcctaattgtaggttctgcagattgattttaattccttattgtataaggaaaattttggaggggggcattgtttatctcaaaactaagaaaagaaaaatcttttgagataattaatttgtttatgtattgtctatttacctctagcaagcatctagattttagaacaccagatcctaacctgctgataaaagggttttgtataatccataactgcttctgaagatttgataaatttatttaagatacctcatgggctcgtatctgttattttattatcagatgcttacgaagaaattggtatggtaatggagttactttctctcatatgttcttctatttgtttttcttttttttttttttatcgacaaatgttagttttgttaccaaaggttcttctatttgtttattgtgtattattgttaaatcatttatttgtaaaaaaacttgcaggcagtgaaggaactgtatgagattgttccatctcgcaagtgggaaaaggaagagaaacgcataaataagatagtgtttattggtaatttgatctacttttctagttttaacacaattttgacccacgcgttcgcccacgcgtccg

SEQ ID NO: 60578 - DNA, 463 bp, Glycine max
  Clone ID: PAT_MRT3847_25714C.1
ccacttacaccgaggctgtgtttactcgtgtgaagggcattaggaacactgcgaaattatggtgaatctctccataggaccggacttgacgaccttgttctgagggggccagatgtgctcgacctcttaggagagttttagatcgctcttatgactgtgtttgacataacccatttgctccttgtcatgggtaagaggtgcttatgggctgctcagactcactctcggtctattactttacgacccttttgggtgcagcatggaggacatgctaaagtatgggactctctcaagtgtgacgagtctctgagaccacttagcaaatctgctccttctagagtccatgaggaatgctcagagagatgactaactggacaggcttgggtgaaggagctttgtacattcaattgatgacggccatctctggagagagtctgggcaaccggagatactgagtgcctgg

SEQ ID NO: 60579 - DNA, 462 bp, Glycine max
  Clone ID: PAT_MRT3847_25715C.1
cataccataggtccgcaactcacccacatttgtatacaaaatcatagtttggcacatcaaaaattatggttttttttggagggggaaagcgggggttgatattaaataaggaaacataaaaccatagggatttttattttggggagtaaaaatgccaagggatccagcgggtttttaggactatgccgcgtaacccacccataaaaagccttttcacaagaaagcttccccgcacattatgggacaccaattaccattgcctccctgtccagtgccgcctttgttttttacaaggaaggcattcttgggtttcggcaaccttaggagatccatcacttgaatcggtttttgccttttggaaattgcggcctctttggagatcttttgaagccgctgtctctttaaaccaaaactatgggggtcaaaaacgccttctctctggctgagtggaggaggataagc

SEQ ID NO: 60580 - DNA, 340 bp, Glycine max
  Clone ID: PAT_MRT3847_25716C.1
gataaccaataggagctggagcctcttttaattccttaccttgatgatgaatatcacacgcaaagtggttaacatccctgtgatgagcctcaccaccgcaaatcacagtgacttcttccttgagagtagcatccttgggaagcctccagccgtcaatagcaatggcaggggcccggacattttcaactttaccactctcaatggcattcaaatgctgagtgtatgaaatcccagcttcttcctccgggtgaccaacgaatctatgtgccgactttggccacaggaggtcccacacgaagaaggcgtcgaagacgacaccctgcgcggtgaatatcaacag

SEQ ID NO: 60581 - DNA, 162 bp, Glycine max
  Clone ID: PAT_MRT3847_25717C.1
cgaagttggaagtcatgttaaccacattgatggcaaccaccagggatttgtggactcttaaagccacttctttcctttgcccatggcaagggtcccaatcccattcctttaaggattgttgcttcaatcgaacctgggagagccacctggggcaataattgg

SEQ ID NO: 60582 - DNA, 424 bp, Glycine max
  Clone ID: PAT_MRT3847_25718C.1
gtaccttgtatgctgatcatgtgtttcaggtgctccctgccttgggcatcttctcttgtaactttagtgactttgggctgtgggtccccccatcatgattcttgagtcaagctaactggagttatgcctagctcaagtttatctcaatgagaaatcgagctcagtttttgggctcaagcacagctcttgctttactcaagcttaatgagcccatattgagccttgtaatagttgagtattttaggctcaatgggttaagcctgaacttgtaatttagtaatttttttttttacatatattcagtcgacaaatgattcctcaagtattttcatttccgttgttttctttccccaattgagccatgattttggaaaagcgttcaattaaaattttgcagccgaaattggttcttaatgccacatta

SEQ ID NO: 60583 - DNA, 316 bp, Glycine max
  Clone ID: PAT_MRT3847_25719C.1
ggctctaaagcacatcctcaatgagctcagggactggcagaaagacccaccaatttcttgcaccgctggtccagtagctgaagacatgctccattggcatgcgacagttatgggtactgctgatactccttatgctgcacgtgtatacctaggcactatccacttccctccggattgttctctcacgcctcttgaggatgcctataggactaatgtgtatcacctgatcataaatagcaatcgtagccactgtcttgttatcctagaggagcagcgtgagcatgcgctcaccatcactagtgggctggactctatc

SEQ ID NO: 60584 - DNA, 251 bp, Glycine max
  Clone ID: PAT_MRT3847_2571C.1
cacgcgtccgcgcacgcgtccgacaatatcaaatttacctttccctctctattactctctttcggattagagatattattagatgattcaggacatagtctcattgtagttaaattttttataaaattgaattttttgtttatatgaaccatggtcaagaacatagacgctgctagtttgagattatgtaccaatagtttagatatgatgattgactctgagcctgtgctttcactaattttaaattctga

SEQ ID NO: 60585 - DNA, 658 bp, Glycine max
  Clone ID: PAT_MRT3847_25720C.1
gagcccgcagccctaatcctaaaccctagcaatactaatagtagaacttattcgcgatctcgttctgttctgtacctgcacccagccgcagcagcaagtgatcgaagcgaaaagagagtaatcagcagagaaattcatcgtcgtagttatgggtaaagttcacggatcacttgcacgtgccggtaaggttagaggccaaaccccaaaagtggccaagcaggataagaagaagaagccacgtggccgcgctcacaagaggatgcagtataatcgccgattcgtcaccgccgtggtgggattcggcaagaagaggggacctaactcgtctgagaagtgaggctgaggcttaaagaatatgtcactactctatatttgatttatctttcttgtctttaatttgtatgttttgattgtgttctgtgaacgggttttgttagctttaatatcaaactagaaattttgaatacaattctaattctatttctaagttcatttgctcggttcgattgctaaagaatatggtgtttctgtgttggtttaaacaatctgtcgtttcacgttgatgcactcttcaaacaaagcctttgtgtactagacataaaatatgaaattaaagtttattttagcaggtgaaaaaaaaaaaaaaaaggagaaaaag

SEQ ID NO: 60586 - DNA, 1524 bp, Glycine max
  Clone ID: PAT_MRT3847_25721C.1
gcatcgctcgcctccgaacaattcttgctggattttgttgaccaaacggctttcatggaatatttcaaagtcgcctggttgcccaagcttgaaatgtggctttcaacgatgagaaattttccactagcaagcctggaagcttctggagcattagaagcctatcatgttaagctgaaagcctaactttttgatgattcacatcttggagcactgcaaagagtagattggttagtccccaagttaacaactgagttgcattcaagctgctggcttgaccggtatgctgatgaaagtgattctttccagaatgtgaaggaaaaatatatagcttctacatcatggcatcgggcacttcaaattccggactatgctgtttccttggatgataaagaccacctctttgccaaggttgtgagccagaaagatagtagcttaacacatatagtgtggaatccaggatctgaatttgcattctgtgattgttcttggtcaatgcaaggtaacctttgcaagcatgttgtcaaagtaaacatgatttgtgaaaatcttaaaggttatcaaccatccatgtctttccggtcttttcaagaggttttgatggatctatggaaaaagccagtggatgattcttttgcgttggatctgtcattggcttggacccatcagatgctagatcaaattcaaaaacaagttgaactgaataattctactgatattggcactgtagttaacaatatgccactgaaatgggtttctaagaaaggcagaacctacattggcaaaccatcatcaagtttggctcttcctcatggtagcagtaacacaaaaagtgtggttgtgtataataagaagaatcggaaacggaaaagattatcacgattaagatgaccaatttggctggtaccagtagtcatcatgtttgatctagaatgtttggtcaatgcaaactggaattcatttcaaaatattttgcaactttttgaatatgtggcactctagtcctgttgcctcttgtctttgaggttgcagcatctattaaaagatcagcatatgctcttacgctgatcagagaacagttattgctgtaattatatgagcatggttggtagttggagatcaaatggaggaagcaaagaactttttgtgcgtatgttttgttcagcctttatacctggcaatagttttaggtgatcacctgggaagggttagttgtcaaatttttttagaaagtggaagccattccagaacttttcaatttttatgaatttcccctcactttcatagtcaatagtcatgctagagtaatcatttttttttttttatatttttttacattgtaccatcttttgaatttgaagtcctttcaagtactcagttcattgtagaggatagatcattccatggatcatgtcttttcttttagtttttggctttgatattctcgttctttgatttatatgttatgtacatatactatttactgacattatttggaataagttgcaaggtattaatatactttaa

SEQ ID NO: 60587 - DNA, 147 bp, Glycine max
  Clone ID: PAT_MRT3847_25722C.1
acttcaccgagggagggggcgccactttgcacattttatcattcagtgtactcctggcagggagaagcaactggcccttaacaggccatgattacgttcacggaacagaaaccatttcttcagtggaggctaaccagatgaccactg

SEQ ID NO: 60588 - DNA, 369 bp, Glycine max
  Clone ID: PAT_MRT3847_25723C.1
tttttcttttatgactgaagcataaccagaaatcgccgtattctttccatgaggaaaattgacataccagcctgcacaaacgtaagtcgtacactggcaaagctgtcataaaaaggggcacagtggtgaaattctccatggctggttacacttacagagtgaaataagacccttctattcctaagtgttatttccgccaaacaaaattccccttttttcagttttggggacccaacttggttacccgttggtttgttggggcattaagcaaaaggattttagttccctatttccttaaaaagtttggaatatatgttgctggtaaagcaaaacgcccctccaggctcaatagttggtaggattttttgg

SEQ ID NO: 60589 - DNA, 536 bp, Glycine max
  Clone ID: PAT_MRT3847_25724C.1
tcttttcgaaagccattcttaatgcgtctggaatttcaatcggccagatagcgggaaatggtgtggaactctccatctctggacaggcaaatgggactgctttattatgcctgatggtcgaccctgccattaagatctcagctgcgttcaagacggccgattttgcagcttcggccacgacaaccgatggcatcctttccacaacccttaacccattagcgttgaatgtaacaaacatccataatcgcctttgcgccagcatttctcttgcctcaaaacctgtgcaatattttcctattttccgccttaacgcctggacgactgcacacgtcctcgatggatatagtgccttgcagcgcacatgcttttatatcgcgctttcgtcatacgtgctgctttggctaatgtccggctaccgattagtgcatttttggttgtatttcttcctcatacacagaaatcctcgcttgcgagttcaacattccttcactctcacgattctcggcatcatcctcgctctcctatttgccagttat

SEQ ID NO: 60590 - DNA, 235 bp, Glycine max
  Clone ID: PAT_MRT3847_25725C.1
ggagttcggcacgagatggtggacggccaagatgtgtaaggagaattgacagttgctactcttagcgttgtgattctaacagaggagatagagtgggtaatcgttgtcacatgggtaatgtatgaacctcactgaactgttttcagagtctgataatacgtccaataagggcgaattagatgtgggttactatgatattgcatgagtatatcctgggttttgatatataaatctg

SEQ ID NO: 60591 - DNA, 445 bp, Glycine max
  Clone ID: PAT_MRT3847_25726C.1
gtttgaaaccttgataaatagttgttccagattggcatcaaaagtaagaaggtgcacaattcgaccttctccactataatttgcaatgacatatatcaaacagtgataccaactaggagtgacatgcagcaaattcacactgcaaaattcacaattaagagtttcattgttgaaggtggaagagaatttccatgaagaaaaaccaacaacaacaatgaaagaaatactacaatgatcaacagcacgaaagaaactgattttccactaaaacaagaaggtctttcttcaagtgatcatgagaaggcaaaggctccatcgagctcatcatcatcacaatggctaaaactgaaggatccaaggattgttcgagtatcaaaagcctttggaggaaaagacaggcatagcaaggtatgcacaattaagaggactaagagatagaagagtg

SEQ ID NO: 60592 - DNA, 575 bp, Glycine max
  Clone ID: PAT_MRT3847_25727C.1
tcctttttttttttttttagacagaataacaactgggaatcgattaactaacatttatattcgatgatgcatgaaatcaaaattatctttgtatacagaaagggcaaagtgcacacataaatagtcagcttctcttcatctgcgtcttcttctcggtcttgttcttacatcagtggcagactattcaccatctgccattcggtagcttgtttgtactaaaataaaataatactgatggtgtattgacttgtggtgcaatcaagtctactactttatgccaccaaaccaagtcttgcagagccataccttcaaccataagaaatttgtatttgcctatgatttgcatattcatttatttacaatgagatgtattgcaaaccaggtctgcacactcctactcacacatgggacatataccagaatccgaatattaatgattaaaaagaaggttaaatgagctatgattaaataataaaatttatgtaacaattagatataggtagctctactctcatatgtaataccctccattcactaactgttttccccttatgtcaagggagcctaatgctcag

SEQ ID NO: 60593 - DNA, 222 bp, Glycine max
  unsure (1)..(222): unsure at all n locations
  Clone ID: PAT_MRT3847_25728C.1
tccagctgcgatgagacgacagaagggataggcgatgtgaaaaatggatgcggaatgacattgtagactcaaaagaatccaagacaacatcataggttcatagcgagtttataggacagtaagcatgaagnccagatagtgacctaggcccatttccttttagcagatgggtagaatagtttgnccttatctttatcgtactaggtagttgatgagatacca

SEQ ID NO: 60594 - DNA, 282 bp, Glycine max
  unsure (1)..(282): unsure at all n locations
  Clone ID: PAT_MRT3847_25729C.1
gggaagcatacagtcttagaggatcttcatgatgctgnatcatttnccaaganntatcatccttctgtaaacttattgtgcctgttggtctgccctccttaagtaaaagtaaagcttccagattcctccacnntgaagatgcgaagattanccattcaagtgcnncttatgctgcagcactgcaactccattagtccaaccttttcggaatggttccagttgggccctantgnnatggcttgtactgtttctggtgnggaaaatgtcccagggntcgtacaa

SEQ ID NO: 60595 - DNA, 104 bp, Glycine max
  unsure (1)..(104): unsure at all n locations
  Clone ID: PAT_MRT3847_2572C.1
aaatgaacaattctagcttganagaccatttccaagtacagaggctgaagcttcaacaaaattncattccaatgctactgaaagctggctaaggaaagataccg

SEQ ID NO: 60596 - DNA, 712 bp, Glycine max
  Clone ID: PAT_MRT3847_25730C.1
gacaaaagtgttaattgtgattacttctctggggtaaatacatgtggtgctttcagatttctctgagatgaactaaaataacatatcccacaggaaaacataaagaactccatttacagtgaaaagacaccaaagtccataataaaagcctgaacctcccaaagaggccactacaaaggaatcctcgtaattcccctcactcatcttaacagttgaaaccccttcagatattgtgatgttcttctgcacacaaggttttactccataaggcatttcgtgcgtcgttggtttggccatgcaacagagatttgtattattccaagctgcaaaacgcattcccattttcatgtaaaacctctctgagaactcaagtctccctgtcaagttgtttccatttacatggagagctgtaagacatggcagtttttccaaacttctagagagacttccacaaaggtcgttgttgctgaggtccagaaacctaagccttttcatttttgccatggactttgggacacttccttccaaacctatgttggaaaggtccaatgcttctaagttttggaaattttcccacttaacccccaagagatcaccccctatagggttgttggacagaaccaaatgctttaaggaaacaagttctttgattgtcctaaccaacccacctctaattttgttatgacttatatcaagtaaaagtagattcttt

SEQ ID NO: 60597 - DNA, 1385 bp, Glycine max
  unsure (1)..(1385): unsure at all n locations
  Clone ID: PAT_MRT3847_25731C.1
ttcgatcttcctttccttcttcctttgctttgcttctcccttccnaagagtagcatcggtgatcccncnccccctctcttctcttgcatagaaacacgcacatcatcttacatacataccactgttcacaaccatgaattgggttcgcggagagcctctcggcagtggcagtttcgccaccgtcaacatagccataccgacaaacacttccactcagtttctttcttccaccgccgtcaaatcctcctatgttcacacctcgtctatgctgaaaaacgagaaggaaatactcgattgccttggagcttccccttatgtcattaactgtttcggcgacgatcacacggttgaaaacggagaagagtattacaacattttcctcgaatacgccgcaggtggttctctcgctgatcaggtaaaaaaacacggagggaggctcccggagtcttacgttcggcgttgtacgaggtcgctcgtcgaaggtctaaaacatattcacgacaacggttatgttcactgcgatgtgaagcttcaaaacattctcgttttccagaatggggatgttaaaatcgcggattttgggcttgcaaaggagaaaggggaaaaacaggggaaattggagtgccggggaacaccgctgtttatgtctccggaatcggtgaacgacaatgagtatgaatcgccggcggatatatgggcccttggctgcgccgtcgtggagatgctgactggaaaacccgcatgggatgttcgcgggtcgaatatctggtcgttgttgattcgaattggagcgggagaagaattgcccaagattccagaagagttatcagaagagggaaaagattttcttttgaagtgtttcgttaaggatccaatgaagaggtggagcgctgagatgcttttgaatcaccctttcgtcaacggtgaaaccgtttcgtttcagaaagttaatgagccgttgccgttaccgtcgccgtcaccgaggacacactttgatttaactcactgggcttccaccgtaacggcgttgcttccgtcttccccggattctgatgagtggcatatgtgggaatccgggtcgtcgtgttcgccggagaatagactccggcggcttgtaaccgttcagacgccggcgaattggtcagaatcggatggctggacaagcgttaggtgaagtacttggaagtgcagcgttgattgttccatggtcatcagatcttacggctcacattcgatcacgttcgttgattctttgtatttcattagttctgaattaagtagagataggaggattgctagccgccacctttggccaagtgtacagagattcatttggttaatatcacaattttgtttctttaattctttagttgttattcccttgc

SEQ ID NO: 60598 - DNA, 687 bp, Glycine max
  unsure (1)..(687): unsure at all n locations
  Clone ID: PAT_MRT3847_25732C.1
tgcatgcctgcagactccgctggacgtatgcaggtaatgtctttgtagttcatagaaattaattactaactcattttactgtagttatttgctgaagatttaggtttaatgtatcttataacctgttggttaaagtgacattaggtattgaactctgtaaagtgaaacttcactaatggtgtgtttgatatagtagaaatggagggggaggggaagaaagagagtgaaagtgagaaaattgagtttggtagaagtttttacaaaagctaaagattatttacaaaaacagtgggtcctggtgaagtttttctattattataataataataaaaacaaataaataaataataaaacaaaaaatgaataataataataatgataaaaatgtatttttactctattaatttctttctcttttcctttttttacctaacaaattcttagaatgtgggttatgggcataactcagcccctacaaatccagcttgtaaggtgaggattgcttcccacttatatacactattttggccaactagtcgatgtgggactaaacctctaaaccaccaccctcaaggttgcacttcaggcaacccccaaagaggccgcaactaaggcaggcttaagggngtgtctgcaattaaggcggctttttcaacacanacatctttaattcaaatattttccttc

SEQ ID NO: 60599 - DNA, 323 bp, Glycine max
  Clone ID: PAT_MRT3847_25733C.1
gtgcctcaattgcgctgactaacacactcacagatacgaaaccagatagagagagtgaaaacaaaactacacaattacacatagcagagcatagcgtaccgtgtcagatggtagacataggaacagacgttgtagaatccgcgccaaatgcataacagagcatctctgacgaacatattcgtacaagatatctgtatgcactgtgatcggaacatatcttctactaatgtaccaatgagcgcaattttgagtttcgtgctttccatgcatcattcgtctgcctatttccagtctattgaatttggctcatagatcagaacatg

SEQ ID NO: 60600 - DNA, 983 bp, Glycine max
  Clone ID: PAT_MRT3847_25734C.1
cacacgcacgcaagcgcggaattcggctcgaggaaagatcatgaagccattcaagatactccatatgcatcttcttcattctttactcttattcaatatcatattatgttcttctataccccagcataatcatgcaaacttctgtgggaatatcaaaactcaaacacctttcttggattccaattcttctatgttagacaacatcaccttgtgcatatctcagaatctctacttgagaacatcccttggcctttttcatgtttcatcacttgacaacaatggtagattactaaccatcactcactcttcttgttcttctctccaatatgtttctcctctggctgtcacatctggtttcccttctcctccagaacctaactcccttgttctcttcaactgctcaagcagaagagacaccactttaccaatcatgcaaaattgtagtgacctgtacaaatgtggagctgggtgcatagaagtacttcagatggtggacatgatcagggatataaggtgggaacaaggttatctgtcgacattccacgtgtaccagaaatttgtcaagggtgtgaaaagcctaatggaaactgtggtgctgggttgaattgcttatgccaccctaaagagtgcaaagacaaggtcatctccaaggctgggataaaatctactgctagtgcttttttctctatgctttctttgattggttcagttactgtagcctactagccttcttcatgcatgtctaagtatgtttagcttaagggttgcattgttaggtaagacttaagagtatttggtggttttacatatgccacttgctatatgcctctaatatgtttaagtataatctttgcatctcatctgttaattgtaactgccacaaagtagtgattgatcttggttagtcctgccaaaaatggattgtaacaagagtattatgaaccatgtattcagctaaagaatttcaaagtaagctcagattg

SEQ ID NO: 60601 - DNA, 256 bp, Glycine max
  Clone ID: PAT_MRT3847_25735C.1
ggttgggctccccaccccgcatcaaaaaataaaattctgcaaatttattttaaccttaaacatatatttccacatcaaatctccctaaaaaatttgaatttaatttttaagagtgaatttcctttaattttaaaaaaacctccctatttttttttgttttttttaaacacactaaaaaactaacccacttctccaaatttaatttttacaacctccttttattatccaccccttaaaccacaaaacaacttactac

SEQ ID NO: 60602 - DNA, 271 bp, Glycine max
  Clone ID: PAT_MRT3847_25736C.1
ctctatacattctctgtatcttttgggggtaacttcttggcagtttttcagtgttcagccatgtcagttgaaactagatttttctgtagattttttacttacccatgtgagcctaacactatcctgtaattcattttctcaggctatgtgtaaatgtagaaccctaatttttctataaaaaaacaaactaactaactgtgtaaagaaagaacaagggaagtaccaatgggtttttccaccttatttttacctctgatctacccttgcagat

SEQ ID NO: 60603 - DNA, 620 bp, Glycine max
  Clone ID: PAT_MRT3847_25737C.1
cagaaatcgaaagattcaatagattgcggtttagatccagcaagttttcctctggtaaacaaaaaaacagtgttaaggatgatgcttaattgaagaaacagcagaaagaatttcaacattatactcaaagtcctgtgtttctttctgaaggtacattacatccatatcagcttgaaggcttgaacttcttacgattctcttggtccaagcagactcatgttatacttgctgatgaaatgggacttggaaaaaccatacaaagtattgctttcttagcatcactttttaaagagggtgtctctccacatctggtggttgctccactttcaactttgcgaaactgggaacgtgaattcgccacatgggcacctcatatgaatgtgctaatgtatgttggatctgcccaagctcgtagtgttataagagagtatgaattttactttccaaagaaacagaagaagatcaagaaaaagaaatctggtcatttaattagtgaaagcaagcaagacaggattaagtttgatgttcttttgacatcatatgaaatgatcaactttgacacagcatcactaaaacctataaaatgggagtgcatgatagttgatgaaggtcaccgtctc

SEQ ID NO: 60604 - DNA, 417 bp, Glycine max
  Clone ID: PAT_MRT3847_25738C.1
ggctcgagttttgacgtgtacctaaaaaagccccgctttcttctgtcagggttccatctgtctgtctattaagaagaacacgaaatcccaatcttaatcgtaagcaattgctctctctgagagaagctctcgaattccttctgagcctagtagaaatccaatggctatttcatgatacgattgaaaaccagtgacgtcactggtgcgacgtcccttcctaattccgtgacctttcgatactgtgatcgccctacgcatgctcgatactcgatgatctctgcctatgataaagcctgagctctctggagtacttgaacaccgttgtagcccagctatcgtatcagaccacaacagggccacgggaaagaccaattctcaacgctcattgctgtgacgatcgatggcgatgacgatagc

SEQ ID NO: 60605 - DNA, 307 bp, Glycine max
  unsure (1)..(307): unsure at all n locations
  Clone ID: PAT_MRT3847_25739C.1
tnnttttttttttttnnnggggtgttgggtaaataaaaccacaaggttggccgggggggaattatattatctacgcgtgctaacaattttattctccataaagattcctttattactctgtttaggttataggtttcggcttatatgggtttaatgtatttagcatattattggattggtcatatggaaaccccaaattttattagtttggtagagaatgaatatgtctcttttggaataaagaataaataattttgttttataaaaaataaattttcaattaaaaaaaattattttatttctttct

SEQ ID NO: 60606 - DNA, 243 bp, Glycine max
  Clone ID: PAT_MRT3847_2573C.1
aaaatacctgatgctattgggaacttacattctttggaagacttaaatttgaggggaaacaaatttgtgacactgcctaataccatcaagcaactttccaaacttaaatatttcttctacttgctgtgctccaagttcaaatatttaagtttggaaagttgcttgaacgtattaggcagtgtcacaaacttaaatatttgaacttggagcactgctagcagctgaaatacttgcccgagcttc

SEQ ID NO: 60607 - DNA, 328 bp, Glycine max
  Clone ID: PAT_MRT3847_25740C.1
gtttacacgtgcgtctaatgcactctcgcgcacttagctactgtttgtattagctgcgtcttcattatgctagggcacaaaacccgttattggttaggtggaacgaggtcgtttcgtcgagagctctgaagctacttactctgggatacttcatggtggtaccactgccaagatgttagatgttataaacaatctcaacgacacgtatttccaaatcggggggatccttccgggcacccttggtgcagcgaagattgtttctcaatctgttcagggctcaaatttttatcgtggtggacagcatatgcttattgattaaggaaaatta

SEQ ID NO: 60608 - DNA, 904 bp, Glycine max
  Clone ID: PAT_MRT3847_25741C.1
cacaaagaacgttctatgatcaaaattgaaagttgtgctaagggtgatcttaatatagtctcctctctggaagatacttcaactaacaataacatgtcaaagtgtcgtgctctagtggcagttcctgccattaacatggaggcattggcggtggttccattctggcgcaaatctggaaatcctgactttgcacaacgccgaatcaggaggccattctctgttctagaagtagaagcattggttcaggctgttgaaaaacttggaactggaaggtggcgtgatgtcaaacaacgtgcttttgatcacgcaaagcatcgaacttatgtggatttgaaggataagtggaagacactagtgcacactgctagaatctccccgcagcaaaggaggggagaacctgttcctcaggagcttctggatagggtcttagctgctcatgcctattggtctcaacaccagtgtaagcatcaacttaaaccactgtgagtcatttcaatcattgaaggacgcagaagaacaaacacattgttgcaaaagtacagtttccagagtgaagtagtgtagttatgataaaagttgatagtatataacgtttacataatatactcatgtgattccataatttatcctccctaagcctgataatgttttggttgcttgtacatgattgttttggcctaaaggaatatggtgtcactcataccaccccttgtggtcgattgctggtatgctatcaatatgcatactagaatatataataaataatgtatagtagttaaacctcttagaacttgtttcttggttgtatcttcattgttactagccattacaatgacataaaggaatacatatgaacaaatacaaatgaatatcttatgccaatagatgtaactatagttatagc

SEQ ID NO: 60609 - DNA, 256 bp, Glycine max
  unsure (1)..(256): unsure at all n locations
  Clone ID: PAT_MRT3847_25742C.1
ancacanannaccgaagtcnanaactggtgccgctacanangaaagntgagnnnactgagaaggncaacgacatctaccnaaagcaaacacgnagancnncgncgccacggnantggtggcgatgagtcggnggccgananccgtgggcggcggggaccaccacttgggaatgggatgggtttccagcacgtgcaaggggaccatggcnnattgcctgggaggggaggagtacgagnggatncccngancagccgg

SEQ ID NO: 60610 - DNA, 786 bp, Glycine max
  unsure (1)..(786): unsure at all n locations
  Clone ID: PAT_MRT3847_25743C.1
tctgaaacaacaccatacctgtgcctcaattcaatttctccttgctccttcccttcctcacaaagtgaatgttattgtttgtttggattggatgatttggactcatttttctacgtctaacactgtactttgccagctaactgcacttggactttatgcttattcaagttttaactctccattaggtcaggcactgcattttgtgccaagctgatgcatcattacttttgaagaaagcccctcagttttgactatgacaactaattcatctcttccttctggagttcataaagaaaaacatattctctttgagattggaaactctgaaaggcagctgtgggcattgatccattctaaaggccctgtacactcagatgttcaagtcttgtatcataacatcaggtcaagttatgagagagaaatcctcaataaccacactcattcagaacttcaagaagttgaatattccttgtggaagcttcactataagcatattgatgaatttcgcaaaataataaagaagagctctggtaatgcagagaacaaaaaatcaggaacgtcaaaagatggncgttgtgcagatagacaatgacaatcatatacaagcatttaagtcatttcttttagaagctgctgagttttaccaaactctgattgtaaaactcagaaaacattatggagtcccagaagaggctttgtttcataaaaagggntgtgtttcaacttcttttgaaccggaacccctgcagaaatgtcaatatttatgtcatcgctgcttagtctgca

SEQ ID NO: 60611 - DNA, 344 bp, Glycine max
  Clone ID: PAT_MRT3847_25744C.1
ggaacttccaaattgcatttctacacatccctagcctctgtccgtaccgtcgcttgacaatggtttttcatgtgcgaaaccctgacctctgcgctcactttcgtctctctcgcttgtcgatcgattacgtcaatgtcttcttcgaagatcgtttctatgacggttgggaaaatcgatgggttaatcagagtggaaagaagatcagaacgtcgctggggaatggaatgataactctggtcaacggaatggcaacgctaatgacatcggtaatcatgtcagtgacgattacatcttcgaaggtaattcaactgactagattgacttccacgacatcggtaagaaac

SEQ ID NO: 60612 - DNA, 1393 bp, Glycine max
  Clone ID: PAT_MRT3847_25745C.1
cccacgcgtccgtacggctgcgagaagacgacagaaggggatccccaacagtaaaagaagaaaccggattcatactctctccctcccctctgtctctctttaccaccggacctgcttttaaagcttgttcttcctctttcacatgaagacactagtcatggacacaacaaactcatcaacccctcgacctcaacctcaacctcaagactcatcctcctccaagaggcacttccactggaccaacaaggttggaaatgaagacccccaactcctccccacttcagaaacaatgtccaaaatcatagaagaagacacaaacacaaaggaagaagaagaacaacaagaaccagaagatgacaaggctgttccacttcctggccctgcagccacttctcaagcagcagcaacaaagagaaagcttcaagcagtggcaatctcaaggctccgctctgttctcactgtattcagcaagaaccgttccaacctccccttcggcctcggctccagagttgttgggcaccctcttcggctaccgccgtggccacgtgcacttcgccttccagaaggaccccacctcccagcccgccttccttattgagctcgcgacgccaatcagcggactagtccgtgaaatggcgtcggggctggtgcgaattgctttggagtgtgacaaagacagagactcagagaagaagaagaccctgaggctgcttcaggagtccgtctggaggacttactgcaacggtaaaaaatgcggctttgccaccaggagagaatgcggtgccaaagactgggacatacttaaggcagtggagccaatttcaatgggtgcaggtgttttgcctaacagtgatggagccgatggtgaagtcatgtacatgagggcaaggtttgagagaattgttgggtccagagactctgaagctttctacatgatgaatcctgacagcaatggagcacctgaactcagtatttatttgcttagagtctagtactatgatctgtttagttatttatacttttaactttctttctttccctttttttagtttgttctttgtggatgttaagcactaggctattcctatactacctgtttagctccttaatcatgaacaatggtgacctagttttcttcagcttatttttctttttttccccctcttctttcaggaagaagtagggtttctgtttttttttttttttggaggggggggggtgtaggataggtgggtagggtaaaggcaaagggggaatttaattgtgggtaaccaatagttactttacagggtgatggtggtgtgggtgggtcatgaaaggtgtatgtatatgtatgtatgtatagtttccttttccaaatccttttatcagtggatgagacggaggttaatgc

SEQ ID NO: 60613 - DNA, 414 bp, Glycine max
  Clone ID: PAT_MRT3847_25746C.1
tttttgttttttttttttttttttttttttttttttttcgcgggtcattgctttcggcaaagccctccgcgacaacgggcctttttttttaaagaaagaggcctacccttttggccatttattccaagtccctttcccccgggcctagggtaagtttgtcctatgggtttggcaaccttcccattacttttttataggggcgggacccttatccctacttaacaaagctcatcctatgctttttataacactttcccgggaaccctttttatagggctaaatatacttgcgcctataggggggaccacgttcccaataattcgaccctcttgttgtggattgccattccttagggattggcctttgtctctttaaattaataattgatatcgcatcaaccaaagttggctcgtc

SEQ ID NO: 60614 - DNA, 159 bp, Glycine max
  Clone ID: PAT_MRT3847_25747C.1
tccgggtctttttcttagtctgacctgggatacatgtgcttactttccagaaacacattatgaattgggataactggagttggtaatttggcatttgtcatagtaacggtaatatatgctttctcttttaattaccaaccggatttggtaatttggtgt

SEQ ID NO: 60615 - DNA, 389 bp, Glycine max
  Clone ID: PAT_MRT3847_25748C.1
attgagaatgctcatactcatcaagaggaaaccgggcctacgtacactattcctatgattccttatcctgggcgaccaatccatctcggggagtgctgacataactagcaatgccctgagaaacagatgtagctatgatctaaacaagcaccctagcatccatctttctgcacagaaactgtacatggagaagagaccactgaatgcactgtattatctgcatgccgaatgatgagacaggccgcctgacgaatgacatgaatgatgactgacaatcaatagcgattataaactgcattgcccgattgccgcgtatgatgcagtttgaccgttactgaatcacgcgatgcatatatggagccatatacactcatatctctgcaagccac

SEQ ID NO: 60616 - DNA, 1787 bp, Glycine max
  Clone ID: PAT_MRT3847_25749C.1
gtccaactcatcatcaatgatttcacttataaaaaacaaaataaaccaccttgctcctccaacggctcgagattcttcactcctcctcctccctctctcttccaaacacacatcctcaaccatggcagcaccatcttcagagacaaagtcaccatcatcctcgaacacgcagcttccgctgaaaccaatcccaggcagctacggaatgccgttttttggagcaataagcgacagacacaactacttctaccaccaaggacgcgacaagttcttcgcgacgaggattgaaaaacacaactccaccgtgatccgaaccaacatgcctccggggcccttcatctcctcggaccctcgtgtcgtcgcgttgttggacggtgcctccttcccgatcctcttcgacaacgacaaggtcgagaagctcaacgttctcgacggcaccttcatgccttccaccaagttcaccggcgggttccgcgtctgcgcctacctcgacaccaccgaacccaaccacgcactcatcaaacagttcttccttaacgtcctcgccaagcgaaaagactcttttgtccctctgttccgaaactgcctccaggagtcgttcgcggagattgaggaccagttgagtaaaaacaccaaagcggacttcaacactgtgttcagtgacgcttccttcaacttcatgttcaggttgttctgtgatggcaaagacccttcgcagaccaacctcggttctaagggaccgaagctcgtggacacatggcttctctttcagctggccccactggcaactctaggcctccccaaaatcttcaactacatcgaagacttcctaatccgcacactccctttccccgcgtgcctcacaaagtccggctacaagaacctctacgaggcctttaaaacgcacgcaacgacagcactcgacgaggccgaaaagctaggcctcaaacgaaacgaagcgtgccacaacgtcgttttcactgcagggttcaacgcctacggagggttaaagaaccagttcccctacgtcttaaaatggctagggctaagcggcgaaaagctccatgctgacctcgcgcgtgaggttcggcgcgtggtgaacgacgagggaggtgtcacgttcaccgcgttggagaacatgcctctcgtgaagtccgtggtgtacgaggtaatgcggatcgaacctgcggtgccgtaccagtacgcacgcgcgagggagaaccttgtcgtttcgagccatgacgcgtcgtttgaggtgaagaagggggagatgctgttcgggtaccagccgtttgcgacgagggatccgaggatcttcgaggatgctgaggtgtttgttccgcggaggtttgttggggagggggagaagatgctgaagcacgtgctgtggtcgaatgggagggagacggaggagccttcggcgagtaataagcagtgtcccgggaagaatctggtggtgctgctgtgcaggttgtttctggtggaactctttttgcgttatgatacgtttgagtttgagtatacgcaggctgggtttggtcctactattaccattaagtccctcactaaggcctctaccatctgagtttggggtttattatcttccttgtggcagcgtggttttagcttaatttttaaaaaaatgtatgtgtttttaactttttgtttttttctaaagacatgttgtaaaaaaaataagcgatgttttttttaaatttaatttggaccgaaaatattattattattgttatatattatatattaaaaacaattttatattaaatcta

SEQ ID NO: 60617 - DNA, 321 bp, Glycine max
  unsure (1)..(321): unsure at all n locations
  Clone ID: PAT_MRT3847_2574C.1
gaattnaagcntattcagggggaggttataatttgacaaaaaaaaacattttcaccatttactgcaacattttttttcataaccagatccttcattatttcttttatgacaccctgcgacactggacacttatgaccataccaaggtgttttgaaagccaaacattggttcctctaagagaaactccactttaattccccacaatttaatatatgcgaaactttgtgattaactctaatcccttccctaatggtatttaccacaaaataactcaatcttttactgtaacccagctatacagaggccactactacttcaccc

SEQ ID NO: 60618 - DNA, 525 bp, Glycine max
  Clone ID: PAT_MRT3847_25750C.1
acgacagaagggggtcatacacagcatcatcacgcgtgggtagcaatggccgccacaaaaccattgttaaccgacctagcctccaccattgatcgcgttccctctaacttcatcaggcccattggtgaccgtccaaaacttcatcaacttcactcctcccttgcttctattcccatcatcgaccttcaaggccttggtggctccaatcattcccaaatcatccaaaacattgcgcatgcttgccaaacttatggcttccttcaaattgtgaaccatgggattcaggaggaggtggtgagcaagatggtgaatgtgtcaaaagagttctttggtttgccggagagtgagaggctgaagaatttctctgatgacccatccaagacaacaagactctccaccagtttcaatgtcaagactgagaaagtttccaactggagagacttcttgagacttcactgtcatccccttgaggattacattcaggaatgggcctgcaaccctccatctttcagggaagatgtggcg

SEQ ID NO: 60619 - DNA, 232 bp, Glycine max
  Clone ID: PAT_MRT3847_25751C.1
ggccattttaggataattttcatttgggggttttgttgactttttttttgtatgttaaaaaatattggagttttggattaattggaaggtctttacttttaaaaaaaattattgttgttggtttgagtcttgatataaattgtatgttctgttgcgaattgtttgaatcaaaggataaagactaaacttcctgtagtaggaactgcagctttgaatatagcagattctgcat

SEQ ID NO: 60620 - DNA, 525 bp, Glycine max
  Clone ID: PAT_MRT3847_25752C.1
ttgactacccgagtcttcagcttctgcatatgagacataaaatgcagtaatgaattgaatgttcagagttcagaaaacaagaaacacacaaggtttctacccgtctactatttgtgttaggatataaggagaaggaagagttagttaatatagttaaactactaatgagttagttagttagttagaggggtttattagatataaatagagaaagaaggataggagagaggggaatcttatcatttgtagattgagcattatctctttgtgaaaggagaaatcctttgtgaaggggaaacccttggaggagagttttctctcctattttcttcctcatttcaattcttggtacctgccttcccattttgatgacaacataagggtcactgctcaccacatccctgatggcaagattgacacctttttcaacatgaattctcagcagacccaacaagttctccatggaaagaaaaaaacactatgtgagggaatgaaatgaagcaaaatggattttcaatacaggac

SEQ ID NO: 60621 - DNA, 303 bp, Glycine max
  Clone ID: PAT_MRT3847_25753C.1
tttttaattctactagtctagcgattgtttgatgtttctagtttatttcttaaaataaattcttgacgttgtgtacgtttggttttctaagatgtggggtctagggtttttactttcttaagggtagtaccatttgcgactttacatccctttaggaataaagggagttgaataattttctaattttgatagccaagggcaagtctttcatggctaggatctccagtttcttgcagaaatgaatacttattttaggatggatgcatgcagaaaaaaaaaaaaaaaaaaaaaaaaataaattta

SEQ ID NO: 60622 - DNA, 434 bp, Glycine max
  unsure (1)..(434): unsure at all n locations
  Clone ID: PAT_MRT3847_25754C.1
nncgccacgcgtncggccacgcgtccgaatctcggtctctctcttcttacctacatacatgctgaggggcacacttctgtcggggaactcgatttcattattctaataatcagatctgagagagacagtgtttgggattgaaggaagaagctgaccaagttcgagacccaaagtaatagagtgaaaggactgagtttccacaagcagagaccctggatcctcgcgagtctttacagtggcgtgatccaactatgggattaccgaatgggtactctcattgacagattcgatgagcatgatggtcctgtcagaggtgtccatttccataattcccagcccctgtttgtctctggaggggatgattacaagattaaggtttggaactataagatgcataggtgcttggtcactcttctaggacaccttgattatat

SEQ ID NO: 60623 - DNA, 908 bp, Glycine max
  Clone ID: PAT_MRT3847_25755C.1
aatcacagccacattacaatttaaatctgcagagcatctctgttaatggccaaattgtgccaattgcccctgcagtttttgctacatcaaacaacagaggtaccattgttgattctggaacaactttggcataccttgcagaagaggcttacaatccctttgtcaatgcgattacagctcttgttccacaatctgtacgcagtgttctttccagaggaaatcctctttctggctattctgtgtttagcaatgttgacatttttccacaagtaagtctgaacttcgctggtggtgcatctctggttttaagaccacaggattaccttatgcagcagaattatattggcgagggatcagtgtggtgtattggctttcagagaattccggggcaaagtataactattctaggagacctcgtattaaaagacaaaatttttgtctacgatcttgctggtcaacgcattggatgggctaactatgattgttcattgccggttaatgtatctgcatcagctggtaggggcagaagtgagtttgtggacgcgggagagctaagtggcagctcttctttacgtgctgggcttcacatgttgataaatacactgttccttgctctcttcatgcacataactttaattttgtagcatgtggaattggaactgatattcttttttgctatgtatattctcttgccgctatataattgcggcattgtgcaagaccacacgttactacttggattgttgcttgtgtttttttttcctacacagtatagggttgtctgttttagcttcatgtgtttatgtaagtcactcattttgcctctcggggattttgtatttttgtagcattgtaaattaacatgattattgattgaaatttgaaacgaagatacaagttatacctcc

SEQ ID NO: 60624 - DNA, 594 bp, Glycine max
  Clone ID: PAT_MRT3847_25756C.1
ctcttatattataagagataatattcatgatctcttatccctatctcccaacctgtgtgcttccttcaagtccctttcctccatttcctctattctctcaattattttctgttgatccagctcccatgtcatccccagctcctttgccttgttccaaatagtttgtgcttccgaggccttggagttatcagtttcgtgatatatgagagtccctttaacttggaaatctgcttgctgtctgtcttgcccacttacggagttatttccgatacaaagcaaagttccttcaggctctgtcatgtgctgctgtcgggcctttacttctagttccattgggcctgctgtgttttgttgcttttggaacctccttcttgaaaagaatttcagcttagtgtttgtgtgagcagttatggcatgtgggctgttttcactagaattttttagtgtgggggggtgtaaatagaggagcccagcccaatatcccccccttctattcccaactggttgtcacgtgccttctcctttcctttaatattatccactccttctcctttgtttccttttctgtgataaaagctgtcctcctcgaggggg

SEQ ID NO: 60625 - DNA, 698 bp, Glycine max
  Clone ID: PAT_MRT3847_25757C.1
actcgggaattgcattattttgtcctttaccattcacactatttaaaaaaaagacaaactatttgaatctgaactatagcacataaataggagtagtattacagcatgaacggggggtcacacagaaaaaaaaaaaaaaaaggaagaagaaaaaaaaggttttccggggggaacaataaagataaataaaaaaagggagacgggaattaaagaaaggaaggaatcaaataaattaacctgaaacttattttccaactatagtattttttttttttgggaattattgccaaaaaaaggggaacaaaaggagaggcaagggggctggggttaccgggcaattaaaaggaacccaggtttttatggattcaccaaggggggttacttctccgtttggggcattggaaggcgcaaaacaaacattaagggcctctcaaacaataattaaaaaaccccccttaggggcctgggccagggctgggaccgggagccttaatctaaccaaggggcgaagtggggggaaaatggggaacccctttctccgggggtaggaccccaattttggatccccccaggggcgggggggtaaaaaaaatggggggccgggccccccgggaactaggaccagagcccttaacccccccaaggggttaaaatttgggggagaatgggggaccccccccgcgggactggcgcccaaa

SEQ ID NO: 60626 - DNA, 363 bp, Glycine max
  Clone ID: PAT_MRT3847_25758C.1
gctacgcgtccggccacacgtccgcttttgggggggttgttttataaaaggggcgggctacaatatcaccagctcttgaggcttcaattgactatcaacttaagatattgacagttggcatcacatatggaggtccagcgctcctccattacaaggatcaattcaaagaagctatcttcttggcttttgactcaccatcttggaaggttaatggggctgctgatcatcttcttcggtcccttctcggaagtcagattcattattatccaataaatcagtataactgtgttcttagacaccctgatgctgttgctctagaagaatggattagcacaaaagattcttcactgatgaagggtgatc

SEQ ID NO: 60627 - DNA, 482 bp, Glycine max
  unsure (1)..(482): unsure at all n locations
  Clone ID: PAT_MRT3847_25759C.1
atacgcgtccgcgctcactcactcactccttgggttgttcttttctcccttggcttcctcatccatcatcgctatcattagcaaattaacaaagacatggggtttctcttcttcttcttctccttatttttcttctctccaaccactttcaagatgtgatgctgatctggggtgttgctggttttcccttgtgatcgatttctcttgtgttggtggtgatcaagaaagtgtggttaattttgctttctttgctgatccgtgcgtgtgtgtgatcttgaaaaatcaatccaatggaagaagatcaagaagtgaaacacatgtgcaagttctgcagcaagagctttccttgtggaagatccttgggtggccacatgaggtcacatgtcaccgncaatgtttcaaccgaggcagagaagctttcatctttcaacaacaatggttgaggatgagattctgcatcaggagggactaacactggagga

SEQ ID NO: 60628 - DNA, 466 bp, Glycine max
  Clone ID: PAT_MRT3847_2575C.1
cccccaccagatctagtcattgtaattaatccctattctgattttgctgcccttaccatctcttcttcatgacaatgaagcggaatggctctaactattaaaagatggaaagtggattcctgttaaccactctctaatgcttttgtcatcaaacgaggagacatggtggagatactgaccaatggggttaccgcagcattgacatctgcggatagacgattcagaagaagagaggatttccattgtcatgtttcaccggcctgaaaagaccaaagatatatggccagctccaaacctacatactcctgaatgacctgcgttgttcaaaaggattggagatgctgatgaccttgatggattccttatacgtgagctaagaggactatcatacatggatgttattatgatccaatacgagatcggtagataatatatgttcgtaggactaacctctgaattgaatgat

SEQ ID NO: 60629 - DNA, 277 bp, Glycine max
  Clone ID: PAT_MRT3847_25760C.1
ggctcgagcactgtcacgcatggggcatacctattttctaggtcggatctagatgtgggccctggggccatccggctaaacgtgatgacacaatgcattgcctatcatccggcctatatggcaagctaatggcttcgtggggccggggtcttcttgcctggcattgcctggatctggtgcgcggggttgagcttgaccacccaccccttaattgaggccacaactgccgcctccgctgatcaggagaggtggcttgagggtttgttgctctaccagt

SEQ ID NO: 60630 - DNA, 855 bp, Glycine max
  Clone ID: PAT_MRT3847_25761C.1
gggagcaaacaagcatcattcacatgattgattaacacacaggttaaacccagagcaaacatggggaataatggacaaaaacacgttgccccacttagtcctttgctcactaaccagcatcttgaagcgcttgtcagtatgcattctatttgttggcacaccatgcgcaaatttgcagcatattgaccatagcaatcatttcaaaccacacaagagctccaataaaaaaaaggggggggccaacaattaccaaatgctttgtaaaacattaagaattagcagagtcatttagaaaaattaatctgattaacataatatgaaaaaaaaaaaaacagaagcctagttgtatggaactaaaaactaatgcacaatggatgccttttcaagtggtctcaaagttgtaggagaagatgccaatgggagaatctgagatgaacctgaaggaaactgtggtagatattgttgaggctgtttgtgttctgttgtttgaatgaacttaagaaaggacccatctctaaaatctgtggccaatgtttcattagaacaatctttaaccccacattcttggacattattattatccacagcctttctcctcgcctcttccatcaatttcctatgcaacttctcttccgcgtccctcatgaacttgaatttcggaggtggcgaagatctaaacctgttgtactctaattccacggaggattcaaagagagggttgaatccttgatgcttataagaatgaagagggtccaaaggcaaagaacaacacttcaaaggcgaggaagccacaggggtaagaaagggggtgtcaattgtcaacatgagatcacttaaactccttgttcttgaccc

SEQ ID NO: 60631 - DNA, 150 bp, Glycine max
  unsure (1)..(150): unsure at all n locations
  Clone ID: PAT_MRT3847_25762C.1
acacagttaacacatatcttgtgtggttactaatggtatggacttgcctaaaagaattcacaatataanaaaaataccatttacaagtcataacaaaatcagttctatcattctaaggacccccccataatttaagggggtgtttggata

SEQ ID NO: 60632 - DNA, 276 bp, Glycine max
  Clone ID: PAT_MRT3847_25763C.1
ataacttgcgaatgcaactttcattttcccatttgctagaaatcaaggtcctatattttcattttacttcttgtaaactagaaactgagggtccttacaacggtctttggcactatttgtcataatttggatcaccaaagagggatcatctgcacttcaaaatttggcaagtttgtttgctccctggcccaatatttttctttgtaatacttggtctccttacctggatactgaaggagatcatgacaatgcaaatctaagtaaaacatttgatcg

SEQ ID NO: 60633 - DNA, 310 bp, Glycine max
  Clone ID: PAT_MRT3847_25764C.1
acagaatgaaatctgcttggatgcttctccaaaacgaagggacttgtatgagatggaagggtgatgcgctcaggggagaggtcctgcttactagagcggtctacatgttgcagggactttgactactactggttcttatatctgattgtaaaattatctctatgtttgttggattcgacctaggatcggattttgtagaacaggagaaatctatgaagcttccctcaatctttagcgtacttggatgtgttctttcagaacatatatattttttatgatgaaacaaaaaaaaatgttctctcactaaaaa

SEQ ID NO: 60634 - DNA, 197 bp, Glycine max
  Clone ID: PAT_MRT3847_25765C.1
attaaattaccctcatatgatattccgttttttttctatcttccaccttttctcacataattaaacccaaacaaatactaacaaaaataaataaaaactaaatcatgtcctcactactgcaacttccccataaactactatcccctcctaaatcaacatatttcatattctcaaacaactataatacctccccatat

SEQ ID NO: 60635 - DNA, 260 bp, Glycine max
  Clone ID: PAT_MRT3847_25766C.1
acacaagctcttcaaagctactactgacaaccaaatggatttctcgggaatctccaacacaagtgtgaccactgacgcccgggccgatgccttattggaatgcacattcactaaactatatttcatgtctggctcccgcacacaaacgaccacaaatgacattacctatattcataaccactgaggactaccgcaatgcatgcatgtcagctctcaccaagacactgagagaggatggactgtatactacctggaccatc

SEQ ID NO: 60636 - DNA, 1068 bp, Glycine max
  unsure (1)..(1068): unsure at all n locations
  Clone ID: PAT_MRT3847_25767C.1
gtccgtgtcttaagccagagtttcaagcccccagaagaccaggaagggggagccangtctnanaggaaganaacgcctagctttcattgctttcacagtgaatgtatcattagatggtggaaatggcttcaaaattctaacaaagtagactcttctaatacagatagtgcagctgcacatcgtaaccaagataatcctaagaaaacggaagagagtgttggaaactgcccagtctgtcgcaagccttttcttgccaaggatttggaccatgtgcttgctctagttggttcatattcttcccaattgagttcagataatgaagaactcaacgaagaggaaaagctccttcaatcagaggatgagatcaataggagacagaaatatgaagccatcttaaatttacagaaggagaacagtggtttgattgaacccaaaaaagagatggtaatattgcccggtatgtatcttccacaaccagtagcaatgcccagctccacaccaaccaaggaatctgatgagccgcaacaaaaagatccacttgcagttgtgccagaaaaacatgcaggtgggacatccaacagcagcatacctagttctagcaggcagaggaattttggagcaaggagacagaaagcaagaagtgataaccactctagttcaaccgcaagaaatccaagaaaaccagcccaacagcagtgggtaagaagagataatcctagcaataagccatagaagtgatgtctttccctgctataggtcttattatcccatcaaggtttaaaagttgcgaagtaaagtatagatagtagaaaaagccagaaataggggcctctggtgggccccatttctgttaaaggggtgttggagaaccagaaaaagcgaaccaaggcccatggggcttcctggcgcaatttgcggggtttttggtttttccttttttgattccgtgagcaagttttgacttgacatacggccttttttggggaaagggtttttttaatcccgaaattttcaatatgaagttatgaaggctacttttaagtagttaggcaatcggcatgctccccc

SEQ ID NO: 60637 - DNA, 875 bp, Glycine max
  unsure (1)..(875): unsure at all n locations
  Clone ID: PAT_MRT3847_25768C.1
cagagaagagagccgaagtggccgaagtggcggacctgggacccgcatgggtgagaatgaccccaccctatgggtatctccgctttcactgcctccttcttcttcacttcgtcactccaccttttcttttttcatttctcgctttatccttagttttttttcttcaacggatgaaggaatcatcttgatcgtacggaacttgttctatctttccgtaatcgaacttggtggccactgtatataaataagttgtttattttattcggtcatgcagttcagttcaacaacacaatcattttgtatatgatcaaattaagtgatggggggcatctgttctaggaagagagatgagcatgagcatgttgtggaagatgaattacacagaggagtctcggggaggtattgtaggagtggcagcacaaaatggatgagggccagaagtttacgtgctaagcccaatcattgtgccggagggggaacatgcccctccctcatggatttgtgcataaacaagatgcgtgaggattttcataagtacaattcattttcgattcttccaagagacataagccagcagatcttcaatgaattggttgattctcactgcctgacccaactgtcactcgaggcttttagagattgtgctcttcaggatattgatttaggcgaatatgtgggagtgagcgatgattggatggatgtcatctcttcacaagggttgtctntactttcagttgatgtttctggttctcaggtgacagataacggactgcgattcctaaaggattgctcaaatcttcagcattgactctcaatntttgtgaccaattttcagaatatgggcttaagcacattagtggtctttcaaacttgac

SEQ ID NO: 60638 - DNA, 586 bp, Glycine max
  Clone ID: PAT_MRT3847_25769C.1
aaaaaaaaaaatctaaagggtgttttgtttggaaaaaactttataggggccccctttccttttgggccccccataaacaacttttaaaaaacaaacgggaaaatattaaagttttttttttcattatgggtaggacctcgggcccaaaagcccacccccaaaaaagggaataaaattttaaaagcctccaagggccttttttggagaggttccagttgcccggggttttgcaactttttcctcggccttgaaaattttttcaccacgctggggttaaaccatgggtcttttcccctcgggtgggtggggaacaaagggtattttgtttttaatttttacaccaaattcgggtttttttttctttagggggcccggcttaaacccgagagttttaaaaagaggaaggccatcctttttaagggctgggatgtttttaggggggattcaagggtgagtcccatttttggaatatcaaaaaaaaatttaattggagggccctcttgattaaaaaataaaaacaacttacccttgcgggcaattataatcaaaactttgggaaaaaaaaccagagcaatttttataaaaa

SEQ ID NO: 60639 - DNA, 297 bp, Glycine max
  Clone ID: PAT_MRT3847_2576C.1
atcttgaagcatcaggcctaactttaattcccaatccgaatagttgatcttataaaagttaagtacacccaaactttgctagtttttcgggtaacactcgaagggaaccttaatttagatttgtgaaacacactcaaggtcagaataaacctctatagttataaagttctcagcactcatttaagagatcatggaatgacttatcaacattcaggatgcctgctccaagtggttcagtggatgctcaacacttttggtggccttatacttgcgcaattcgcctggtcaaaaacggct

SEQ ID NO: 60640 - DNA, 188 bp, Glycine max
  unsure (1)..(188): unsure at all n locations
  Clone ID: PAT_MRT3847_25770C.1
ggaattcggcacgagggcttaggaagctttgcattaaggggtgccccgtgtcaaatgctgggattgcggctttcgcttcagggtgtcctaatttggttaagctcaaggtgaggaagtgcanaaaggttaacggtgaacttgtggagtggctgcataagaacaggagtcctctcatgcttagtattaat

SEQ ID NO: 60641 - DNA, 479 bp, Glycine max
  Clone ID: PAT_MRT3847_25771C.1
tcatatgaaagaatacgatcacacctgaaagataaagatattggttaagaagcattccttatgctccttttcttttgaatctttcttatctttcctcttgcaccaatatatttatgtaatgcctagcttcccttttgtacccttttaataattgcaccttttaagtgacttggttattttcttcccttcattttcaatacattttcctttagcctaattgtaatttttacaattttctataataaaaaaaatatggtgactttttttgtgtgcatgaccacttatactacagccaacttctggtgttctaggctcttgtggagcaaaagcttcacaacacaaaaggagaactcaaataaaatataatgttttgaggttacaacagccaagtttgaaccatcattacaaaagctttgaaacagtgtctacatatcaagattgcaataaaaaatatgttccgaatgcggtccctaaaccat

SEQ ID NO: 60642 - DNA, 319 bp, Glycine max
  Clone ID: PAT_MRT3847_25772C.1
agctgaggcttattgcctgcaacatttgcttttttcaagagctaactttggccctgatggttatgctgaggctgatggggaagcagagggcggaagccgagagctctcgacaggtggatcacccacacgataaaaatggcctttggttggcgaacaagacctcaagctgctacgggtatgggttattgtctgtaacatatgcaccaaatggacgctgctatgaccctaatcaagctggatatttcagccgtcaacctcaccaatgtcttctctgccaagctctgagaactctgtgcttcctatgccgtaacctacactg

SEQ ID NO: 60643 - DNA, 208 bp, Glycine max
  Clone ID: PAT_MRT3847_25773C.1
ctataccctcatctgcacctttgggactaccagtctattgtctgccataccccctgtattgaagatcacaggcttgatatcccttgatggcacgactgggaatcaccccactggatctctccttttccccaatgctcgagagtattcccatcgaaaatcttctgacgaagatgatatccttgatggctactttggcgaacttggtgca

SEQ ID NO: 60644 - DNA, 715 bp, Glycine max
  Clone ID: PAT_MRT3847_25774C.1
ccacgcgtccggggaaactgcagctcctccgattccactcagcttgccacggccaaactccttctgcaagacgggaggctgcaggagttctcctacccggtaaaggtttccttcctcttgcacaactatcccgcctgcttcatatgcaactccgacgaaatggaattccacgacgtcgtttcgcccatccacgaggaccaagtgctgcaacccggacaactctatttcgcgcttccattgagtctcttgaggcactctttgcagcctcacgagatggctgcattggccgtcaaggccagctccgcgctcatgaaaaccgcccacaaatgcggctctcgccgaaaacagattttgttctctaacgaatatgactctaaccctaagcgcgtgtctcccacactcgctgctgatgccggaactgtacataggagaggaagagccactggcgcttccggtggtaaggggaggtttgcggcgttgttgagttcgataccggagtaggggctgttttggaagaaaattatacggtggtgattttgttcgtttgtatataaatagtttttctaaaaaaagctgtttcagatgaagcgattagattcttggagatgaactaagtcgttcgtgttttagcatgaaaatgttttttatttcttttttttaacattctttttgctttaagttaagttttaaatatataattatattatagatttgg

SEQ ID NO: 60645 - DNA, 675 bp, Glycine max
  Clone ID: PAT_MRT3847_25775C.1
cctccagaagacttttttttttttttaagagaagacatgctatttcatttcaagtaaacataaattcatgcttcctattttctaaattaagtcaataatcaacggatggcgattttgatatggttcctgggtgttacacatcacttactacgattaaatacaggatttcagcactaacaattgaacaatcacgaaacaaggaattcaacgatatatagtcctaaatcaaaattgagtatgctgccccccatggatgcaagtatctcctcacgttacctatctgtgccaacagctgaactatttacgaattctaatgccaggaatgtctttcaaacccatttttattgcagtttttcggaagagagccggaggcctctgtaaaccaattgattcagaaaatcggtttgccagctcagccatagtggtcttttccctcccaatttccctgatggagttataatagcccagccaagcatgataagctgcttctttgatgtcattatcaatctttgccattgaattctcaatcttaagctttgtatgtggatttatatctggtaaggggaaattttgtagaggtagatccttgatttcatctaaaaaatactcttcccatggagcaatcaacagtacaccttccccttctttgtcttcccgacctgttcttcccagacg

SEQ ID NO: 60646 - DNA, 599 bp, Glycine max
  Clone ID: PAT_MRT3847_25776C.1
attcccgaatcaccctactggtaccaaacctcggagtattcaacccggtgccgcttttccacaccacgtcacgtatgacgtttaccatttcagttatcttcgtcctcggagtggcatggcttcgctttgtgccctaaactatcctcctgctcgcagagacgattcagtcgtcgaagattaccatggtgtcaaaattgccgatccttatcgatggctcgaagatcctgatgcggaagaagtgaaagagttcgtagcgaaacaggttcagctgacggattcggttcttcaaaaatgcgaaacgagagggaagcttagggaaacgataacgaagctatttgaccatcctcgttacgacgctccgtttaggcgagccaataagtacttttacttccataacactggccttcagccgcaaaacattctatatgtgcaggagagtttggagggagaggcagaggctttgctcgatcccaataccttcagtgaagacggacccgtttccttgagcacactttcggtgagcgaagatgccaagtacttggcttatgcgcttagttcaagtggtagcgattggactactataaaagtcatgcggattg

SEQ ID NO: 60647 - DNA, 439 bp, Glycine max
  unsure (1)..(439): unsure at all n locations
  Clone ID: PAT_MRT3847_25777C.1
ttttcttttttttttttcttttttttttttctncaaaacgggaaatgaacattgggattcattcatcgcctaaaaatcttatccaaattatctatatttaaacctagagaaagttactttggccaattccaaccacattgtcgtttttttttctaaactctttcgggaaaaaaatcaagcttccaaagaacccccatattattaattaaaacttaggttcccaaccaaccgagagggttttacttacaccaaatatccaaggagccccacttactgtcaacccagcaaaattctttttttcttatacaaattagtcacgacttgggagccaaccaacaaccaaaaaatttggcagggcctgtgttctcaaactttttacacttcattgggttggaagatgctggtgcacacttacctcttgttttctccaactttttat

SEQ ID NO: 60648 - DNA, 471 bp, Glycine max
  Clone ID: PAT_MRT3847_25778C.1
gggttggttttttttttttaacaacgaatttcaaaatttaaatatggtaaaattaagtttaaaaacgtgacataaaactatgtatgaaagtggccaactctatctatcacgaagctgcaacttgtaataggccattgtgcctaagcaatgcatctggtgttggttctctcccacggaattgcacaaaaacatctagtggtggcttgccacctccaagagcaagaatggtctcccggaacttgcgccccgtttctttaacagccttgtcattatccaatccagcatcctcaaatgcagagaaagcatcagcagacagcaccttagcccacttgtaactatagtatccagccgcatatccacctgcaaatatatgggttaagctgcaaagggacctattctctgggaatggaggaatcacttgggtttttttaaaaactctgggggcaacattataaaacgacttaaggcccc

SEQ ID NO: 60649 - DNA, 348 bp, Glycine max
  unsure (1)..(348): unsure at all n locations
  Clone ID: PAT_MRT3847_25779C.1
ccactcctccncccacccctccgggcactcttcctcccacgcgtccncttacaatttggtgtatactttaaggggtgagactgctccccncataangcaccctttattttttatacctttttcatatgctttaacacttctacttctgtttttgccctcaatcttattctctaatttttatttaatacacaataccttaaatttacagcttttttttctttcctattcttacaccccccactccatttttttgtatcctaacctcttttttttattcaatctttctccttctttctttatcaaaactttattcttcctcttttctaccctaataactttttttttttt

SEQ ID NO: 60650 - DNA, 441 bp, Glycine max
  Clone ID: PAT_MRT3847_2577C.1
caaaaaaaaaaataaaagggaatttttcaaaccgggggcctaacaaaaaagggggttttcccaggacctggtttgggcaaactaggacctaacccccattggggggggggggctttcgggaccataccagcgggggtggttggccctattgaccctttctggaaaaaaaacatagggctttactttttttaaaaagcttcccttttttacttcctttgggggtaaaaccaaaagaacctttaaaattttttttccccttttggggaagccccccccccggaaaggccacctaaaaaatgtaacccttccccttttggaattaaacgaccccgggggccacccgggaatttccgacccggtcccggggggggtcccagcttcccctatagggagccgtttaaaacctgggggaaatcagggccatagcggtccccggggaaa

SEQ ID NO: 60651 - DNA, 143 bp, Glycine max
  Clone ID: PAT_MRT3847_25780C.1
ggagattataagcggggattcataattgagattggccggactttatacagaagcggcccattaccaaacattgaaaaaaaaaaaggagccaccatgagcttaacacacccatcacaagggcaaaacacttgaacttggtgaaa

SEQ ID NO: 60652 - DNA, 342 bp, Glycine max
  Clone ID: PAT_MRT3847_25781C.1
ctaagctctaaactcgggcctcaattagcaacatatgccacgctttgtgctaccatgaatgaagcaacacctcttttggccttgaagaaacatcacatatatgatcactttttttaccttaggccaaaagcaagcctttcttcacaagagaggaggtgtactagacacctcctctttagtggaggaggcttgcttgtgtccatgggaaaattaggaacagaaaagtgatgaaaattaagggccttagaggtgttgcttattctaggcagcacaagagggagcttatgctgcaattgcgggctcgactttagcgcttttaactgatgctgcagggtcggccgc

SEQ ID NO: 60653 - DNA, 371 bp, Glycine max
  unsure (1)..(371): unsure at all n locations
  Clone ID: PAT_MRT3847_25782C.1
gaacattgtaaatgggtctaatattgggtgggggtatggaaaagaacatagaatgtatcaacctaacaaaatggggggtttncagagaaagtggcaaatgcagaaaaaggagatattaaatatacatttcataatcgatttgatggtctaaacaaataaggagttgtgggggggaacgggaaaggcggaaaaaaaattgcaagggtcgcttttaatccaagtggtactaaacaggtccccctaaaaattaaaattttccatgtggggttaaaatccgggggggttagaatattaaacgggcatgtctgaaaaaacttttaaaaattttttgtgcaaattatgagccttggtaattttttttttgaaaagaa

SEQ ID NO: 60654 - DNA, 303 bp, Glycine max
  Clone ID: PAT_MRT3847_25783C.1
aggtcaacgtccaagacaaagacatctgtgttggtgagtttgatggatttagcatagaaataagcttgttgctacaattttggtaacatatgtgtgctctgggtcacagtactagaagttccctcacgaactgaccactgggtttgctgggcaatgtaccatcgcggtgggatgtgccacttggatgattggtcttcaagcgtacaatgtactcatgtgacactttgtgcctgcagcttgcggatagtacatatctgactaagtcctaagagatcagttgagatcagattcgactacagttat

SEQ ID NO: 60655 - DNA, 528 bp, Glycine max
  Clone ID: PAT_MRT3847_25784C.1
gcggccgcccttttttttttttttttagtttgaatgattcagtgttcgattaatctgactagatgctacaatggctaatcttaagagcctactggtctacaatttggctaaaacatgctgttcctgtacctcacaccttgggattacctggtcgatgatgcttatacgttcttcttggcgagatagccagatagatcacctaggggtacgctgaatggcataccggtgctttcaagcaccagcgccagcataatccaccagccacaaatgcatgtgacaaaggcgaaagccccttccgctcgtagaagcgaggtgggatcgcggccctctccaatgcggaagtatccagctgccaggaggaagaaagcaacgttcagggtgaagaagagaatcacaaaggtgacgttggtgcggagggatccgagcatgtagatgaagaccatgacgccccaaatcaagagataaactgcaacgctctctgcgaataccggatttgcactaccctcggtagcacttcccgtagcactg

SEQ ID NO: 60656 - DNA, 301 bp, Glycine max
  unsure (1)..(301): unsure at all n locations
  Clone ID: PAT_MRT3847_25785C.1
aggagngcagaacccnggagacaaagcagcgagggggcaggggccaaagggcagaacggcagaacaccaccgccacaaagaccgagaaacaacagcanccacggccccacaggaggcaggggacggaaccaaaacccaggcacccgcagggggccacgcagagacngcgggattgtttcatcacatgctacatgaactcaagggaagggagcctggaaccaaccccgccagccagggccggggaagcaaggccaatttatgggcacccaattcatctagggacactgcctagcagactaac

SEQ ID NO: 60657 - DNA, 558 bp, Glycine max
  unsure (1)..(558): unsure at all n locations
  Clone ID: PAT_MRT3847_25786C.1
gtaagctcggaatncggctcgagggggaccccaaggcacaccatcacatggggttgctgacactgcaaatgggccacacacacatttataaaatgacaggttgtgaataggtcctacccatgtgagtgatgccagtgccactttctctttcatagatatttctctctctaccctttagattctctttcatgacaggaaaggacatgcacagatctaaaagtagggtagatgcccacacgtatgacaaaagtggccagttactcgaatcttttggggtctgtggccttgtgactgagttactgtgctatacttttttttgtattttttttttaactttccctctttgaagttttcaagaacccctaggtgtttgtggaaaaccaaatatgttaagtgagaaaaaaggtttaaaatttaaaatcagagtggcatatcgaggattagcacatagccgaatgttggtaggtaggttttgacacgttagttgcctttttaattatgattcaactcaaagaccatatgcaaacagaacattacctcaatggtggagacccatgc

SEQ ID NO: 60658 - DNA, 303 bp, Glycine max
  Clone ID: PAT_MRT3847_25787C.1
gaaaaaaccaatcctctcatcttttggacgtccatggatagataggaaaatgagattttaaactcaagcaacaaatccgctcataaaagattcaaatcctccacttcacatccaaaaatgtcaacactacttcccccaacaggccataccgtttcgtacaaataccaccactctggaagacagtccacatacactcaagccctttactcaaaagattcatgatcatcgcccggaaggggctgactaagctttgcaaaacgctcagccttgtgctgttgctgtgcacctaaaaaaaattgaact

SEQ ID NO: 60659 - DNA, 236 bp, Glycine max
  Clone ID: PAT_MRT3847_25788C.1
caaacatcagaagccattcgctattgctacaagatgacgctggtcgtcgaatagattgcgatatcggatcaacaatagttacggtagtaccgaaatcagttgtacaaaacatgtgattgttaaccatgtgtacacctcatcaagtcgaatggacatcactaaactagaatggtgaagccatcgaatctgcacatttcgaatttgatgaagtcaacttgttgccaccgtatacattt

SEQ ID NO: 60660 - DNA, 313 bp, Glycine max
  Clone ID: PAT_MRT3847_25789C.1
ggaaaaaggcagagggacatttggttttaataagatccaaccttaaaagaattttaattttaattaatctatcccccccaacccccccccaatgttggaaaaataaaaaaagttcccctacaataataagtaaagctttccaagcccatccattattttttacgttacacttggaaaaaatgatttttaatttatgggatgattaccatagttggatgaacctccaagtagcacccctccacctgaagctgcttagacttcatgagaacgacccaccattggagatgaaaatgaaattccatttttaccacca

SEQ ID NO: 60661 - DNA, 274 bp, Glycine max
  Clone ID: PAT_MRT3847_2578C.1
ctaatatattccattctctctgtgtattgccctacctctcgcttcaagatgcagatgcttcgtcaagactcgcaccggcaagaccatcagccgtgaggtgtatagctcggacaccatcgacaacgtcaaggccaagatccaggacaaggaaggaatccccccggaccagtagcgtctcatgttcgccggaaagctacttgaggacggccgtaccctggctgactacaacattcagaatgagagtactcgtcacctcgtcctccttctccgtggt

SEQ ID NO: 60662 - DNA, 424 bp, Glycine max
  Clone ID: PAT_MRT3847_25790C.1
gctaagttttctgacagcgggcaatcttagagcatgtgtttttttgccgctcactcatagtcttaaagggctgataaaaatggtggccacagttgccattcccgagaatacatggatagcatgggcctgtgctatgaataggtcttttagggggcgctccaggtgtgttatcaacaccatctggtctcaagactgtgaataatggaatcctgcttgcacaaaagcgacgactatgtcatgcattccaaacccgtgttctgatgcatggagtttggaatttctcaagcgaaccgagtttaactgtgatatgatctgagacactggacgtgactgcacacctcagagcaagatgttcacgctacaattgattggttcatttcctctcaggagaagtttgctaggacctattgcgttctaaatctac

SEQ ID NO: 60663 - DNA, 1642 bp, Glycine max
  Clone ID: PAT_MRT3847_25791C.1
gaagggtgcgagaagacgacagagaggcgaacaagaaagaaaagaaaagaagaggaaaaggagagtggagaggaagaaaaggattgaagttgttgctgtgagaaagagaaagagtgaaatcggagtttgggaaggaattgcaatcaatggatgtgataaagacgcagcaaatctcatctcgaccaatcgagaaggtggtggttcaccctctcgtgcttctcagcatcgtcgacaactacaacagagtcgccaaagacactcgcaagcgcgtcgtcggcgtcttgctcggctcctccttcaaaggcaccgtcgacgtcaccaacagctacgccgtgccctttgaagaagatgacaaggatcctagcatctggtttcttgaccacaattaccatgaatctatgttttccatgtttaaaagaataaatgcaaaggagcatgttgtggggtggtatagcactggtccaaagctgcgcgaaaatgatcttgacattcacggcttatttaatgactatgttccaaatcctgtcttggttttattagttgtggtacctaaggaattgggaatcccaacaaaagcatattatgccattgatggagcgtcaaagagaatgccactcaaaaaagtcaaaaagtgttttgtgcatgtgccatcagagattgctgctcatgaagttgaggaaataggagtggaacacttgcttagagatgtgaaggatacaaccattagcacccttgcaacagaggtaagtgcaaaactcacagctttgaagggtttggatgcaagacttaaagagatcaggagttaccttgaccttgttattgatggaaagcttccattaaaccatgagatcctgtaccatctgcaggatgtgtttaacctgctaccaaatcttaatgttgctgatcttatcaaggctttcgcagtgaaaaccaatgatatgatgctggtaatatacctctcgtctctcattagaagtgtaatagcactccacaacttgattaacaacaagatgcttaacaaggaacatgaacgggcagaagactcgaaaacagttacagtgccaagtgcagctgcataagttttgaggggtttgtgatggccggagctctaaatgtcatttgaatacatggatttgagattattacaccttttttctatttctgctaggagtagagaacttacacctaacatggcataacgatccttttatgctgttccggtgcttaatgtattttactcttcaatactttgctcattttccttgtttggtagctttggtgacagccgttaaaagaattcaatattagattataaacaaattgaggattaagatatcagaaaaaaaaaaaaaaaaactgacgcttgggtgagtggcaagctacagttcttcagcagcgtaatgtggtcgagaatgttcaccgttgggcttgtggacttgcaactgcattacaagatatgaagagggatagtgatgatgaagaccttcatgacagggactatgatgttgcacctttagcaaataatttgagccaggctttttaaatacaaaatttatggaaatgaccattatgaaaaggaacatggtggtcttgatcgaaatgatgaggatgtctacttttgcccatgattctgctgaaatag

SEQ ID NO: 60664 - DNA, 395 bp, Glycine max
  unsure (1)..(395): unsure at all n locations
  Clone ID: PAT_MRT3847_25792C.1
gctcnnctcctgagttttgggttcttcaatgggagaattggggtgactacctctttgttcnaatgactcannaacnnaagttcagtctgcgaaagtggaaagggaatgttgtttgtggaaacccttttggaagaagatggcgaccgatgccagaatacatgaanggcaacacggacctgttacttgttagggccctctcaagattctttgttcaccgatagtagaagaatcaaaacgaagatttanaatcttgatgatggcgaaatccaagtgtgacaaagagtggaaaaaggttcaaggggtaagaagcttgggtgatttactagttgtggagacaccatatatgacacctacaacttctccacctttctttactcctcctttcactacttcta

SEQ ID NO: 60665 - DNA, 419 bp, Glycine max
  Clone ID: PAT_MRT3847_25793C.1
gggaaagccaaccctttaatcacatttatcacatacttaaatcccatctttatccgccaaatatcacactggggctatctaaaaatattgttggggtacagaaaaaagaaggaaaaaccaaaggaatttattttttttgaaatacagcaaaaacccttttcaagctttaattagcaaatccattttgcatcagggatcgaaatttttaaaaatccacaaacccatttccatttttataaaccctttttataatacgctggcactctttaaaactacatttatcaccccctaaattgatcaaaactttttgcagttccttggctgaaataaggccattcttgtcagggtcaaaaataaaaaaagcatccttgagggaaccaccattttgctccatgccacttccaaatttttcttttttt

SEQ ID NO: 60666 - DNA, 382 bp, Glycine max
  Clone ID: PAT_MRT3847_25794C.1
atttattgtggattctatgctttttgttttttgttgtggagaattctatttatgctgtgatttatctgtcacagacaacaatgtctattgagctttgtaagtattactttttggcaggaccaaagaagaaagggacccactcaccgaaaagattgaggactcccataatatggcttggcaaaagttggggtctggggtgccttccatatgaaataagtaaggataggaaatggaaaaaaaatggcctatattacttaggtgaccagattctgcaaaatttttttttcatgccagaactataagaaaaggatatcctcttctacacgtggagttgtaagcagcctatggagactgccaaccttaaggccgaaatgataaaaag

SEQ ID NO: 60667 - DNA, 107 bp, Glycine max
  Clone ID: PAT_MRT3847_25795C.1
tggtgttttttaatgacgtttggatattgtattatccttcacaaccaaaatcacaccagtgcgagacggtgcaacaccagataacttaaattttacctccacaggcg

SEQ ID NO: 60668 - DNA, 981 bp, Glycine max
  Clone ID: PAT_MRT3847_25796C.1
gtcgcccacgcgtccgtacggctgcgagaagacgacagaaggggatgacatatctccaacataaaggaccacctcaccctccccctccattactcccactgcatcttcttcaaattcctgtcctgaagatgacagcaaagtggtatctcattgtgtgtgttgtagcgatctgggccgttgatctgggttcatcatcacaccatgcccgtgccccagcaccagcaccgtcagtggagtgttcaaacctggtattgaccttatcggattgcctcaccttcgttagcaacggcagcaccgtcaccaagccacagggaacatgctgctcttccttgaaaactgtgctcaacacagcccctaagtgcctttgcgaggctttcaacagcagcgctcagttaggtttagccatcaatgtcaccaaggctgtcacgcttcccgctgcttgcaaactctctactccttctgccgctaattgtggactgtctgcaacgcctgctgctgctcctggcccctctcctacatctgctactgcaactattgggactccaggaggagctccatcatcaactcccgggaacgcagcatcagcattaatccccatatcagctggatcctctattgtttgccttttagtagctctatctctcatttcactttcagagtagggacatgacattagagactattttcatgtcttctgacttttccatcttctatgtgagacttaatgaagtagataaagtcattcagtgactcgaatttattttgtggttgtatatttataacttataatatatatgtatatgagtgagtgattttagcgttattattaaatgctggaatgatattgttgtgtgatttgatttcttgttgacacacaagggagaacatgtttgtggttgaaatgtaatctataacctttaataagggttattatcctgatgtatacattttcttagattattttatcctttaattaatttt

SEQ ID NO: 60669 - DNA, 224 bp, Glycine max
  Clone ID: PAT_MRT3847_25797C.1
aatatttctaaaccatagcagaagtaacaatgagataaaagcaatagctgttattttttgtccattaaaataatcattaatgtaaagctttacctaattttttcaacatgtatgctgcatctttatgagggaacactgctcatgagcttgtaacacttttgtctgaaaatgcaatgatacaggatggcgtgtgtgatgtttagtctaaataaaaaaaaaaaaaa

SEQ ID NO: 60670 - DNA, 451 bp, Glycine max
  Clone ID: PAT_MRT3847_25798C.1
gacggagactcggaattcggctcgagtaactttcaattcggctaatggacacatcattggtgtttaccgtgaggaggcgtgaaccagagctgatagctccggcgaaacccacccctcgcgaagtgaagctactatccgacatagatgaccaagatgggttacggttccaaattccggtgatacagatcaatcgccacgacccatccatggcagggaaggaccctgttgaggttatcagaaaggctttggccagaacgctggtgttctactatccttttgctggtaggctcagggaaggacgtgatcggaaactgatggtggattgtactggggaattaggtgttttgttcattgaggctgatgcagatgtcactcttaagcattttggtgatgctctttaacctcctttcccatgctgggaggaactcctttatgatgttcctggttccca

SEQ ID NO: 60671 - DNA, 520 bp, Glycine max
  Clone ID: PAT_MRT3847_25799C.1
tgaaagcagggaagccgagaagaaacgtcgcaggcaagtgattagattgaggctctgctggtatcggcgtcagcactctccacgctgtgccaccccagatcagcctgtatttgcgtgttttcatgtgcgtgagctagtcatgcagcaacactttgcgtctttcaaggccgtatatggaacgaaagaacgcgtcgacctgcttgtgcattcacgtgcggatttagtgtgtgttaggggtgtggtgcacgagctgggagtactaatagcatgggcgacccttcgtagtaaaattttctgagaagaaactaactgatgttgttgggttgctctttgacctggtgcagacggaaataacttcagacaccaagcagagaagaaaacgttgccataattttaagtattgaccatgagctcgttcaaaaaggagcattcatttgagaagcgccaagctgaagctcagcgcatccggtccaagtatcctgaccgtatcccggtgatttgtgaaaaggcggaccgcaca

SEQ ID NO: 60672 - DNA, 280 bp, Glycine max
  Clone ID: PAT_MRT3847_2579C.1
cccttttctactacaccaaatttatatacatacaaaaaccaaaaacacaggaagacatattataaaaaaaatcaaacattttcaattcatatttacacactttattaaatgctttcatcccttttaacatatacttatatactaataccttccctattcttaaaaacaactctctaactatttcacacttaaatttcttactaccacaccttctcaattttccctactctttccttaaataaaaattatattctaactccatcattatcctttcatttaa

SEQ ID NO: 60673 - DNA, 154 bp, Glycine max
  Clone ID: PAT_MRT3847_257C.1
ttgtgttattgggtggagtgtgagaatccaaatatctgtatctatcgatctccctctgcagttatccatattgtggggcgcatttgagcaacaatggtgcacacaacagcagagcctaaggagggagagtcgatcgggaaactaacggcggaag

SEQ ID NO: 60674 - DNA, 331 bp, Glycine max
  Clone ID: PAT_MRT3847_25800C.1
atcagacattcctcgacgcgttcgtgaatatagagctaggcaagtgcgattgccccggctcagaccatgaccatgaccatggccacacctaccaaattttccctctgagaatgaaaactgtccatggaggccactacattccagcagtatgctgccgctatcagaggattggagcctgaaggacctctgatgcttactggacaaccgttcctcacgattgccagggatgtattgggaactacatgcttggctaacaatatagatcagactccaaaatagttgaccaacaagcttatttctatcctaaaaccctcactatcactgacaaaac

SEQ ID NO: 60675 - DNA, 432 bp, Glycine max
  Clone ID: PAT_MRT3847_25801C.1
aaaccttaaagaaaacttcttgatcctcacccctcccacgttttaagacgaaggggacaagtcccccccccgaaggggaatttggaaaaaaaccccgggggggaaaaccctccccagaaaaaaattccagaaaaattcaataatccccaatttttttttttattttcatttccccccctttaataatcaggggggggaagctgctcggggggggggctgaaaaaaacaaccttgtaaacaagggcagggattccccccccgatgagaggcccggcccaataaatccaggggttggtccaggtccagctcacgacagggggcccaaatgtcacaggggggttcatggccgctccaaaaaaggccccccccaacaaaatgtgtgcgccgacaatgaaaccaagggggaggggagcaataattcccaaattaccc

SEQ ID NO: 60676 - DNA, 329 bp, Glycine max
  Clone ID: PAT_MRT3847_25802C.1
tgggcttcttctaattcaaaggagcgttagaaccaccatatctcgaaaggactcacaccagctccataaagacaagatcatgagtttgacaatgaaccacatcaggattgatataaaatggactacttataaaatcaacttttgagttcgggggcttgacatttaaagttcgccggagctgaacatgataaatagttaaagacagtacttacaagtgcggacacctctgaatctgtatctaaaggaccaacatgttttttaaccgtaccaatagcacaaaaggtattctttgcccaccttttgaaacgctttctacatagcctgtacct

SEQ ID NO: 60677 - DNA, 541 bp, Glycine max
  Clone ID: PAT_MRT3847_25803C.1
cttgttttgttttctttttatttttatttttttgtttttttcttttttcttttttttttctttttaagaaacaaaaacgttaatttttttcctgggggggcaaaaattcccggggggataattcgccaaaaataatctttgcaacctttggggttgaatcaacatggttttggaaatttccaaaatttgaaaaacatggaaggctaaaggaattggcttaggattgaaaaaccccccccgcttgctcaaaaataaccctggtttttggttggctcacccaacctggaaaaattttgggagtttgggggcccctcacacttttttttaaacaatttggtggttaaacaaggtttccttcggccaaaaaaacctcaactttattggccacaaattcgaccccctcacccgatgggtttttttccctaaccttcaaccaggatggtaaatgggccaaaaaatgggccaacatacctccccctccgggggggaaaaaacggaaggggcttaccctccctttgaaaggatcaaacttttggtttaa

SEQ ID NO: 60678 - DNA, 458 bp, Glycine max
  Clone ID: PAT_MRT3847_25804C.1
atggaaaacccggggcccggcggaagttccaaccggaaaatattggaacagaacttggggggggaaaaatttttttttaaaggggggggtaaaaaaggggggagaaaactggcaaaattgcgttcctgggaaaaaaggttttcccgtaaaaaaaccaaaaaaaaaaacggcgtaaatgaataaggcaaagcgcggggggaggcaaaagggggatcaaccccaaaggggggtgttttttttaaccagggagatggaaaaaaaaaaattgccctccaccccttgataataaaaaacaccaccccgggggggagggttgttttctttaggggcaaaagtttttttttttttgccaaggggggggaaaaaacagggagttgcttaaagcaggggcgaaaaaaaaaaaaaaaaaggggccccattgtgtgtcccccactaagaaaaaaaactttttggggggg

SEQ ID NO: 60679 - DNA, 251 bp, Glycine max
  Clone ID: PAT_MRT3847_25805C.1
cttacacatagaagttcctcatctatactcctgatccttatcagataatcccaaatcacgctgccataatcgcttatctcaccgatgaatggcatcactctgatggcgtgcgtgtcacggacgtaggaatgcagcgcaacgattcagggttcgtgcaaactcggttatgagagcacggtctcgctgcacagatgactactacgtggtacttgacttagacaaggatcataggtacgcagctggacatgcaa

SEQ ID NO: 60680 - DNA, 558 bp, Glycine max
  Clone ID: PAT_MRT3847_25806C.1
cctacggctcctctttgaaacccaacccaatttcaccgttgctagctcttgtttcttttttgtcggagaaaataataataacaatatataatgtcggttgaggagatgcagtcacagaagaggaatgtgtttgacgcagaaacggcgtcgtccttggtgaaggagctgagggacaacttcggttcgggaaggactcggagttatgaatggagagtgtcacaagtgaaggctctgttgaaggcggtggttgataacgaggaacagatcgtcgacgctcttcgttccgacctagccaagcctccactcgaaaccatcgtctacgaggttggtatgtttaaaaactcatgtgaagtcatactgaaggaattgaaacaatggatgaagccagaaaaggtcaaaacatcaatcagaacttttccttcgtcagctgaaatagtacctgaaccactgggtgttgtgttggtcatctctgcatggaactatccaattttgttgtctcttgatccagtcgttggagctatagctgctggaatgctgtggttctaaaccatcagaaat

SEQ ID NO: 60681 - DNA, 577 bp, Glycine max
  Clone ID: PAT_MRT3847_25807C.1
ttttctcacgcgtccgccaaaccacacaatttttttctcctctctctctaaattcaattatggcgtttaagaaaacgctagcccagcggcttctcaacatcacaaaaatctccaattaccgcatttcctcctccgtagtccgttccccgaacccgacaaaacctgacattgctccggatcccggagacagccgcaggttcctccacaagagggcctccgtgctcccgccggagctccgcccgccgctgcccgccggcagcctcctccagaggctccgggaaatggacattgcgcggagccggatccggctagacggtctcgctccgccggagactgaacaaacggtggcgccggaacacgtgaggaaggtgctcagagcggtgcaaatcgaaacggtgaaatcgaagctgagaaaaattccgcagagttgcataagctattcagagttcattcgaatgtgcagtgagaattgctctgatcaagagcaagcaatgagcgttgcgaagatgctcgacgagtcagcatcggttattatcatcggagacgtcgtgttcctcagacccgaacagaaaatgaa

SEQ ID NO: 60682 - DNA, 167 bp, Glycine max
  Clone ID: PAT_MRT3847_25808C.1
ctcctggctcatcgcccggcgccttttttgaatttcactccaaaattgacgaaatctagattacgctcgcctaattgcaaacactgttaatgcaaaagacattcctatacacaggtttcaaatacattagactcatgcaatcaacacatatttgaccggcccataaa

SEQ ID NO: 60683 - DNA, 259 bp, Glycine max
  Clone ID: PAT_MRT3847_25809C.1
caacttttgaggagatgcttggggataatgaacattgtttctgcttaaggcatttatacaatactttcaataagagatttggaggaggcattgtcatgggggatctaatgatgggtgcaacaagagctacctaccatgaagcatatttagagaaaatggctcaactaaaggagatcaatgaagctgcacataaatacttggttgacattggtgaacaacattggtccaagcatgctttcaagacctatgcaaagtgtga

SEQ ID NO: 60684 - DNA, 139 bp, Glycine max
  Clone ID: PAT_MRT3847_2580C.1
gggcggcaacattaccgaactgggcgcattcgtagacgtcgtcgtccaactcctagaattcatactggtctccttccttctcgtctgcgctagtgcctgcagtgcgacagcatacgggctaaacgaagaagtaggagtg

SEQ ID NO: 60685 - DNA, 378 bp, Glycine max
  Clone ID: PAT_MRT3847_25810C.1
gaaaagggcaggttcatagctcggctttagagtttcctccacccccactatccttctaagcatgaccataaatccaggatctgtgaccatctactttctatgagagctgacaactccggtgcctctatccaacaaacaacatgtatccattctgtaaagccccatgttggagcttttgtctagatactacccacttcattgctgaggaatattcctcatgtctgacaactttcaccctgatactactcgcatcctacgttataaatgactagaggacctcttactctcttccttgacctcctcttctaaactgagaaacgcatatgtgatacatcacccatccgatgcactccgattcatggttccaagccaaccgcc

SEQ ID NO: 60686 - DNA, 319 bp, Glycine max
  unsure (1)..(319): unsure at all n locations
  Clone ID: PAT_MRT3847_25811C.1
gaaaaccttcacatccataaaatgtatatatggtatcacagaancaacctgttgtgtttcaaaactaagagggttctcaaacacatatttgctctaccaattctttctcccattcctttcgcttcaattctttgtgcctactactaactctccttgtatatctacgatggattgaataggatgtaacacattttgtaaatccctcaataatcattttcgatttccaccaattaaatatactatttttgctcactttttgttccatttcgtcacattaattcaacctattttccaattcaagattacttaacaaccatac

SEQ ID NO: 60687 - DNA, 433 bp, Glycine max
  Clone ID: PAT_MRT3847_25812C.1
gttccaaggagaggtttcccgtcatcactgtatgacgtcctccttctttgggggggggggggggggggggggggggggggggggggaaaaggacccatgaaggttaaaaggtaagagcgtcctttagcccctgtaaagacgttgttgttgaaaacccaggaaagccggcaaagataaccgaagagttaagcgaaaaataccatggtggtgttacgcgagaccggtatggtgaaccagataaaccctgtcaccttcaagagtcacctggattgatcctcggtagcgtcatcgtagacatgtggtgagaccccgtattgaaaggtaaggtatgcccttcgtcggggataatccgtccgatgccccaaaaatttgcctcggatttaatggaagaccttgggtaatataggtttttggggcgttaatgccctcgaag

SEQ ID NO: 60688 - DNA, 133 bp, Glycine max
  Clone ID: PAT_MRT3847_25813C.1
gctccgtactatgaattgaaacgaagttcagcttcgcagggaggaagaaggtagtagagtggtccggcgacagtccaattattttcggagacggcacggtggtcacgtttaattagccaattgcgtacacttt

SEQ ID NO: 60689 - DNA, 666 bp, Glycine max
  Clone ID: PAT_MRT3847_25814C.1
gaattttataaaaaggcctacatcttctactccatttgaaaacaattgttttgggaggattctcgttttaatactcttaagctaaacaatttgtttccttgttttctaccatgtaccaaacacgaaagtgaaagaattgatggatgggtacaacatttttggcttctcaaaggtaaacttaattaatcaagtagttgtggaattttgtggaaaaaaaaactaggtaagaatttataattaattttacatgtgtaattctcttttttgaagtttattgttttatctatgtatgtattaaaaggggttgaactttttttacatagttgtttaaatattgaaattttgataaataattatttaataaataatagatttgacaaaaaaaaatatttattattaatttttttttgtaaaactagatatataatcacctagaaaaaattaaataaatatcaactcggacagtaaattcattgtttgactttttaccaaaattggtgtgatgaaacctagtactaataataatttttttaaatttgtttacaatttttaacggctaaaaattgtttttataaaacataagtttctggttaaaaaatatcacataggtgaatccattatcttggctttttttagtgaaaatggtgcaagttttctaattaattt

SEQ ID NO: 60690 - DNA, 336 bp, Glycine max
  Clone ID: PAT_MRT3847_25815C.1
ttccccggctaaagcggcggtgcttcttaagagtcatgggctgaaccgggtgtagttttatcaaacccacgccctcgtcttaaccgcgtttggcaactcaggaatgaagggggtggttgccatgccaaacgagctttttgccaacgccgtcgcgggacaatccttgactgacgcgggggttcaaaccaacatctgcaagtacctatcccgccacgcaaaataaagccatagctctgggatacgaagtgttcgtgggcccgaaccacacgactaagttctcttgttccgccatgaagaacggttactctttttttagtcaaatacagcctggacaaa

SEQ ID NO: 60691 - DNA, 325 bp, Glycine max
  Clone ID: PAT_MRT3847_25816C.1
tggcatgtcagaaatgcttgtaaaccccatcaacttcaatggtgccacaaggccagatccatctgcttctagtcctgcctccttcaagagtgaggctcttttctccaaaaagaaggctacaccatcaccttcaaaaaaagctgctgctgctgcatcctgccacatgatgagcttgccaagtggtatggttgctgacagaaggatcttctctcctgagggtctcttggatcgaaacaaagtaccagagtactttacccgaaaagaccttggaactatgggtatgaaccatatgggcttaacaacgaagccgaaaaatatgtcaaat

SEQ ID NO: 60692 - DNA, 253 bp, Glycine max
  unsure (1)..(253): unsure at all n locations
  Clone ID: PAT_MRT3847_25817C.1
tnacangcacgcgtacgtaagctcggaattcggctcgagncggtgaggagctcgtgttcatacttgtagctatgccgtccaagggtccgctgcagtccgttcaagtcttcggacgcaaganaacagccacagctgtggcccactgcaaacgaggaaatgggctcatcaaggtgaatggagtcccctggagatgatcgagccgcgcacgctgcagtacaagttactggagcctgttctgcttctgggcaaggag

SEQ ID NO: 60693 - DNA, 179 bp, Glycine max
  Clone ID: PAT_MRT3847_25818C.1
aagggagagccacgcgtacgctgcagaagatacatataggaagaaaatttcttctcctataaatgaagtacctgtgggcatgtctattcacaagatttctaaaaacatgcccctacatttctaatggtgtactgaataacccttttacacttcctgtttctatataacaacttgatcta

SEQ ID NO: 60694 - DNA, 1093 bp, Glycine max
  unsure (1)..(1093): unsure at all n locations
  Clone ID: PAT_MRT3847_25819C.1
tagcaatgctaattggatagcagttttgatatggagatctttattagttgtgtcaagggaatggaaatattgttggctgcatcttattctttatatgcttctcacgctgtgtattggaactgtattttctggtctggggcattctctgtcttctgttgtgacaagagttgcagcaatttttgtatttgcatcattctcttcccttctaagcattgccagggtgcctgcacttaagaaagaaatcaaggttcgtttcattattggagttgatggacctaagcatgtgcggttggaagagatgagagaaaagcattctcttcaagatcgagttgaaatgttgggagctgtgcaacatgtacaagtctgatctgttctaatatatgggcacatcttcttaaacagttccttaacagaagctttttgtatagccatattagaagctgcaagttgtggattattaacagtgagcacacgtgtcggaggagttcccgaggttttgcccgatgaaatgattgttttggcagaacctgatcctggtgatatggtgcatgcaattcaaaaggcaatatctatgctgccaaaaattgatccgcangccatgcataatcgaatgagagaactctacaactggcatgatgttgccaaaaggactgaaattgtatatgatcgtgctttcaagtgctccaatcaaaatctacttgaacgtctctcacggtactcttttaacatcgcttgggcgggcaacttgttttttttggttatgacaaatggattcttgttatggcggctattggaattatggcagcctgcagatgatatagaggaggtaccagatttcactcttccatgcagctgtgatgaaaagatgttggagaaaaactcagtgaaatgagtaatgtgataaattattttggtgaaccatggagttaatgttttgcagaatatcaaaagaatacaagtgctgttaaccctaatccaagttccccgatcagaaaaaggagataatcatcaatctgttgcataaatatgtgctaatttagtgtaaacattgttgtcaacattactttgttgagttttttagtgaagcccgttt

SEQ ID NO: 60695 - DNA, 601 bp, Glycine max
  Clone ID: PAT_MRT3847_2581C.1
cgaattcgagctctttacccggggatcctctagagtcgacctgcagaattaatacgtattttacaaggcccacgcgcacaagtgagacaagtatacgcatttcacacgagggcggccaccgaagagtgacattgagcctaccgactttccttgctatagactgtataccactgctaagtgctgaccaatatgtggtgttatgcacaaatgaccctttaacgggcaattgtgaacacagaaggagaaaatttgtcgtctaagcttaaaaagaggattcaatcttatagttgtacagtatgctaaatatcaagtatacactattgaccaacatagaacctacaggcaataaacaaaaaaaactggaactaccaagctagaacagtaggatcttgtaaaaaaacggaggcatatctaaaggggatagaggaaattgatacacacattggataattcagagaactcacgataaactacatgcactgggactcataagataaataaacatcaaacttgtggctgaatagagatcattagttcaagatcccagatttcacattgcgtcaaggacccagatggaacaatgaaagaaaagggggaatgg

SEQ ID NO: 60696 - DNA, 1698 bp, Glycine max
  Clone ID: PAT_MRT3847_25820C.1
ctctttatcatttggacagtgtctcggcacttttaatgatggttacattgaagagacttgcaagcactggttacactctcatagtgaccatctatcagagcagcacagaagtctttggcctttttgaccacatatgtttactttcaaatggaaataccctcttctttggagaaacattagcttgcttgcagcacttctcaaatgctggatttccttgcccaatcatgcaaagtccttctgatcactttctacgtgcaattaatactgattttgacaggataattgcaatgtgtaaaaactggcaggatgacaatggagatttttcttctgtgaacatggacactgctgttgctatacgcactctcgaagcaacttataagtcatcagcggatgcagctgctgttgaaactatgattctgaaacttactgagaaggaaggtccagttctcaaaagcaaaggtaaagctagcaatgccactcggatagcagttttgacatggagatctttattagttgtgtcaagggaatggaattattactggctgcatcttactctttacatgcttctcacgctgtgtattggtactgtattttctggtctggggcattctctgtcttctgttgtgacaagagttgctgcaatttttgtatttgtatcattctgttcccttctaagcattgctagggtgcctgcacttttgaaagaaatcaagatatatgcctgtgaagaatcaaaccagcactccagcacattagttttcttacttgcacagctcttgtccagcatcccatttctttttctcatctccatttcatcaagtctagtcttctacttcctcgttgggttggaagatcaattcagcctgttaatgtactttgtgctgaattttttcatgactttgttggtgaatgaaggacttatgctagttgtggctactttgtggcaagatgtgttttggagtgtcttgacactgttgtgcatacatgtggccatgatgctttcggcaggctattttagagttcgaaatgctttgcctggacccatgtggatgtatccaatgtcgtatatagcctttcatacttactctattcaggggctattggagaatgagtacctaggaacctcctttgcagtggggcaggtaaggaccatatctgggtttcaagctctccaaaatgtgtacaatatctccccggacaccaattcgaagtggaaaaatttgttggttttgtttcttatggcaattggttatcgtatttttgtgttcatcttgttatttttctctgtggggagaaaaatatcgctgcgtaaatgtttcaagtgtaataatagggacacaacagatacaagttgatgggaaggaacgttgttcagccatttactttgtacaattccttttgatcgagttttgcttgttaactcttagttttgtgaatttatctttgactaatgaagagaagatgtaatattattaaccttggtcaataccaggtttaagagttctattattcattattttttacagggcaacctagcgtttcattattggagttgatggacctaagcatgttcggttggaatatatgacagaaaagcattctcttcaagatcgagttgaaatgttgtgagcttgacaacatgtacaagtctcatctgttctaatatatgggcacatcattcttaaacatttccttaac

SEQ ID NO: 60697 - DNA, 690 bp, Glycine max
  Clone ID: PAT_MRT3847_25821C.1
tttaaatggtctttctggtggatgcatttagtagggaaattttccttttttgtttgtaatttctgtagatgagagaactctacaactggcatgatgttgccaaaaggactgaaattgtatatgatcgtgctttcaagtgctccaatcaaaatctacttgaacgtctctcacgatacctctttttttggagcatgggcgggcaagcttttcttcttggttatgattgttggattcttgttatggcagctattggaattatggcagcctgcagatgatatagaggaggtaccagatttcactcttccatgcagctgtgatgaagagatgttggagaaaaattcagtgaaatgagtaatgtgataaattattttggtgaaccaaaggagtttttgttttgcagaatatcaaaagaatacaagtgctgttaacactaacccaagttcccagatcttgaaatggagataatcatcaatctgttgcataaatatgtgctaatttagtgtaaatattgttgtcaacattactttgttgagtttttttagcgaagcacgttaattaggtctgagaaatcaaaagttcaaatgtattctgtacaggagcatctaagaccagaaagtaatggagagtgatcctgatatccaaataggcaccagctctttctatgaaaaagagaattttttttctcccttt

SEQ ID NO: 60698 - DNA, 268 bp, Glycine max
  Clone ID: PAT_MRT3847_25822C.1
tacggcgagaagacgacagaagggagagataattagttatgacagcacagttcaatatatatataggatagtgtctacttgttggtggtgatatataacaataatgagaatttatgtttttgttaattgattgattaatttgtgttttgatggatattattttgtattacagcaggaagaggaagagatccttcttggaggaatatgagaaaggaactggaaagtctttcaaaatgggggaacagcagtggcagtgcgatttgagagc

SEQ ID NO: 60699 - DNA, 159 bp, Glycine max
  unsure (1)..(159): unsure at all n locations
  Clone ID: PAT_MRT3847_25823C.1
gtagaccgctgccaccaaaacaccagaanggggcagttttacgcttgcaaacagtgccacaataccgggctctctgttggggagggggacctcacacttttttccctcagcgagaatcaatatgtcttctttttaatgtacaagtacccctctattcaa

SEQ ID NO: 60700 - DNA, 264 bp, Glycine max
  unsure (1)..(264): unsure at all n locations
  Clone ID: PAT_MRT3847_25824C.1
gtataatgctattcctggaaaagagaagttgagaatatagtgatcccatattttgcttgattttcgttcccatgccaagtgataagtattttgatttcccacgacaattttaagttatcttgtaaccacaatattanttccctttccacttcaaatcttttctcctatcatttgaattttactaaatattaagatattgaattctaaccaaacatgtttttgagtttacctagaaataacattcttggtcctagtattcaaaaa

SEQ ID NO: 60701 - DNA, 420 bp, Glycine max
  Clone ID: PAT_MRT3847_25825C.1
ttttattttttttttttttttacttaacagtatcaatattgatatatataagatcttgtaaagacacatatgctagccacgttactgggtcctttattacacttacaagttcaaattcacacaaaacaactaagcatatttttgcagaaatggcttgggaagcgaaattgagaaaattatttatccaaggtccaagccagagatgggatcactatttaattatgttccctgttaactttgttgttggatccgaattgcttctgaagggagacgactatgtttttgcccacttgaaaagctttggcgagaacttcatcagagataggaggtttagatccaaaaacagcatttgcaattgtaataactccagggttttggctactaagagcagtaaaggccacggcattttcataacctacg

SEQ ID NO: 60702 - DNA, 456 bp, Glycine max
  Clone ID: PAT_MRT3847_25826C.1
aattcggctcgagaagagaatggcgaggcaggtgggaacctgctcgcgctggtggatcagcacgctgcccatgtgcgtatacctctggagcagcttatgattgattcctacgagaagcaacaggcacatggctctggtcggaaaaaattactgtcttctactctaattcctccgctagagataacagtgacagaggaacaaaggagactcttatgacactagtgattctctggtccttgtgggaaaagtaccactatgttttgtggaaagagaagccaatgaacttcggagaggaagatctactgcgaccaacagtattgtggaggaatttatccgagaacaactggagctactccagaccaccggatgcatccaagggacattgccactgactgtccagaacgtgttggcatcccaagcctgccacggggccattaagtgtaatgatggcccgag

SEQ ID NO: 60703 - DNA, 360 bp, Glycine max
  Clone ID: PAT_MRT3847_25827C.1
gagaaattgaaaattaaaaaaatgtttgcacatgattgttgtttctgattatgcagctggatgactgggtgctgtgtcgaatttacaacaagaaaggtgcaattgagaagcagcaaccagcaccgccaccaccgagtggtgtccacaaaattgaatgttacgaaatggaagacgtgaagccggagtatacggcggcggattgcctgtacttcgaggcttccgactcggtgccgcggctgcacacgacggagtcgagctgttcggagcaggtggtgtcggcggagtttgcgagcgaggtgcagagcgagcggaagaggcagggcaacagcgagttttcgtataattacatggatgccactc

SEQ ID NO: 60704 - DNA, 295 bp, Glycine max
  unsure (1)..(295): unsure at all n locations
  Clone ID: PAT_MRT3847_25828C.1
tctgtatacagcaggtgacnaaaggacagcttgaagatgcnatataccattccnttgtaaatncggtttnaaannttccncnagtataaagaataagagatttcctacaattgctgggagaaaagttaatgcaagggtccactaatggttccctccagttgtctccaactttgtntaaccggngaaaataaanggaatcgaggaatcccagttatnaaatttccaagggttttatgggttgggaaatgccagtccattggatgatttcccatggattatattggancatttgagg

SEQ ID NO: 60705 - DNA, 184 bp, Glycine max
  Clone ID: PAT_MRT3847_25829C.1
ttcataaatagtagattagcgatgaacaacttttgacaataatccattgtatggtagacacctagcaacagagcgggccccaaagatatactagttgacaatggattattgtcaaaagttgttcataaatagtagattagcgatgaaattttgtacttgattataaacacgactttccctttct

SEQ ID NO: 60706 - DNA, 195 bp, Glycine max
  Clone ID: PAT_MRT3847_2582C.1
tacgggtgcgagaagacgacagaaggggatacatgctttaagcactaatagggtccaaaaaaactaaacacattgggacaccaatctaaataggataaatattccaaattcaccacaggactctggagctggtaaaatccatagctggtaccaaccattttcaataccccatccaagcctaaaaccaggtttttt

SEQ ID NO: 60707 - DNA, 487 bp, Glycine max
  Clone ID: PAT_MRT3847_25830C.1
ggggggggcaacatttgttttctcggggtggcacacgacaactgaaaatactggacaccaatcaatcattcctaaaacaatttctcaaaaaaaaaaacatcttgcggggaaaaatgaacaatgggggaaccaaagaatccaccccaggtgactacaactaaaacgggaaactgggggaccctttatcacctaacaagcaattatcagcactgcaactaaaggggaacacactacccatacaacaacatattggatattatcactatggggcagcattttttccggcccggaaaacaaaagggaaggtggaaaaccagctacctcaaaaaatctcaagggataaatcttcaaaaacctcccccaaaggggtaagggacgactaaaatatgggccgggggcatgggcttcccggagcaacacttccccgcactggtttgggattcagggaacgaaaaacagcatcttcaacccatgggggggtgaaaaa

SEQ ID NO: 60708 - DNA, 450 bp, Glycine max
  Clone ID: PAT_MRT3847_25831C.1
cgggcgactggctttatttcatcatctctgacggaaaactgtttagtggtacatacgggttcggtgcaaaactagtagcgctctaaaaaaataggccgctgtccgaggccttcttattgactattgtttaaaaaatgcaattatgaagattagcatgtttggctggcgctctgaatttcaagtagaaaagacaccctcacctggaagctgcggcggctatacataatcaggtcattcttgatttccctgagacggttgccctcttttacaggattctgaatgggatggcgtgttcctccagaagatgaatattttggaagatcctagtacacgtaaatgtcttgaaaattttatactttggttgggaagattagaccgtaactggttcacttactgggctagaagctcgtgcctaaaccgttggtgatttggataggccatcaagaacct

SEQ ID NO: 60709 - DNA, 1958 bp, Glycine max
  Clone ID: PAT_MRT3847_25832C.1
acggacgacgtcggaggggagccgacgatggtaagcacgtcggagttgcgcgcggcgtgaggggaggggcaagtgggctccgaggtcgagaggggctgggccttggaggggtgcggttaaacggtagggtgaccggccgataggtgggcgcacatggactggcccatacgccggtgccgatccagcccacgcgcgtgttggatagcttatatgggtccgccgcagccataactggcatggatgaagtgtggaaggcgggtctgtgagcctcgagcgaattggctcgagctcgagaccggcgcggccggttccaagtcgcttgatttgtacggaaagagaatcttgaatagggatttggaaccggggttcttcgtgaaccacttcgttaaggatttggggatttgcttgaaggagtgtcagaatatggggattgctttgcctggcttggctctcgctcaacagctttatgtgtcgcttagggctcacggtgaaggtaatttgggcactcaggctcttattttggtccttgagcgactcaacaatgttactcttcctccctcctccaatacctgaaatttttaaacatgcattgtattgtatctatagtctactttgcagaatgaatgctatcgcataataactatttggctgtttatggaatggaacttgttcagtgaaccaacgcccaatttgtaactgggatacatggacactccctaattttaaataccccatcaatacctcttcttattcttcaaacattttccatggaaaaattgtttaaaagctttcgggttttatcatttatgttatgtctgaggctatttacaaaatgagtatggtttgaccaaaaaaaaaaaaaaaaaaaaaaaaaaaaaaaaaaaaaaaaaaaaaaaaaaaaaaaaaaaaaaaaaaaaaaaaaaaaaaaaaaaaaaaaaaaaaaaaaaaaaaaaaaaaaaaaaaaaaaaaaaaaaaaaaaaaaaaaaaaaaaagggggggcccttttaaaagaaccaaattttattacgggggggcgggatccaaaaattttttttttggggcaaaaaaaataaattcccggggcttggttttaaggtgcggggagaaccccttcgttaaggatttggggatttgctttaaggagtgtccaaatatggggattcctttgcctgggttggctcccgccccacagctttatgtgtcgcttagggcccccggtgaaggtaatttgggccccccggctctttttttgggccctgagcggcccaacaatgttactcttccccccccccccaaaacctgaaattttttaacatgccttggattggtggtggggctggtgtagggcatggtgtacgcgcacaaggccacgcttttggtggggttgtacctggacgcaatttccaccggcgcggccggttccaagtcgcttgatttgtacggaaagagaatcttgaatagggatttggatccggggttcttcgtaaaccactttgttaaggatttggggatttgcttgaaggagtgtcagaatatggggattgctttgcctggcttggctctggcgcaacagctttatgtgtcgcttagggctcatggggaaggtaatttgggtactcaggctcttattttggtcctagagcgactcaacaatgttacacttcctccctccaatacctgaagaaaattttaaacatgctttgtattgtatccatcatcgtctactttactttacttccctgccattgctatgcagtctacagaatcgtatcgcataacaaaaactttcaatcccgaagctgattattgcaatgagcagtgtcttttttatattattggtgatgtaatctagacacctaatattatgaatggagaacttgttcagtgaacgaacgcccaatttctaaatgggaaaaattatggaaattttgtttaaaagctttcgagttttatcaaaa

SEQ ID NO: 60710 - DNA, 405 bp, Glycine max
  Clone ID: PAT_MRT3847_25833C.1
caccggtccggaaaaccgggcaccacccacccgtccttccacccgtccgtttgatttttctccgggatgaagtagaggcaggcccccaacctgagcgtggcctaggcaagcctagaaaactcaccaccctccaaactatggatgaaggagaaaggagcacgctgccgaagacgttgtcgatgccgactacaccaacaacagagaggactgcgacgactccaacgacaccgggatcggcccgaaaagctgacaacgattggaggagcgtcttccatcctgggagcaactccgccacaaagaccataagtgctcacaagtttgacaaaccagttgccaacactcccactgactaagactggctgtacagtggggagaccagaagcaggcaccgctgaagctgaagcc

SEQ ID NO: 60711 - DNA, 573 bp, Glycine max
  unsure (1)..(573): unsure at all n locations
  Clone ID: PAT_MRT3847_25834C.1
aaaacaaaccccaaatttttccataaaatttcagggaaaggtttgctcaagcctatttcaaacaggggggaaaatttatccaaccccagtagcttttaattcacgacttttaaaactaaaaaaatttaagtctcaaaaaacattaacaatgacaattttttcccgaaacaaaacacccccagatttgccaacaagacccattcaaaaaaatcccatagccctaaaaaaaatatccaaatcagttaaagggctgcaagggaaaatttgcaggctaagggcctatctactgccccccgcttttaccctgggttgaaagttttgcggaaacttgcttttcaaacaaagggagatagtaaaccccaggagttgctggggttttgcggaaaaaaccatcccaagggacaataggggggccaactttttcaggagagggggggggagatgaaaccccttctcttgctctgggggggggttntgacaatggggggggaggtggggaaaaagacggaaactggatgctgctccctggccaaaaggggggaaggctcctgctgtagaaaagggggaacagga

SEQ ID NO: 60712 - DNA, 357 bp, Glycine max
  Clone ID: PAT_MRT3847_25835C.1
cccacgcttccgatcaaaataagcattttttttaaagactacatattcaagaatccggcggtggcaaaaacaaacgccgggccttaattaaacaaaaactcgcttatcctatactgattcaccaataaagcctccctctgacctatcaatctcatgagaccctaaaatgttaactttatggacacaacaacaccataacaatgaacacctatatttagctatcataatactaaccaatatatcttcacatatttcattaaaaccaacttctgtaacacctatctctacgttattaattacataatcattaattgttttaatatgctgtactatacacaccacacattttgcaaatat

SEQ ID NO: 60713 - DNA, 486 bp, Glycine max
  unsure (1)..(486): unsure at all n locations
  Clone ID: PAT_MRT3847_25836C.1
ggtctgttgaatctgctcattgtaattgctatcttgaggtgtactgttttgagtctctggtttttttggttatgcttattactattgttaatgtgattgagtgataagaatatggtatggatgcttactgattgcattgtagttaggattgagacttgagagactactactactgctggaagttgcaacaggagaaatattccccttcctgtagaagggatttcatattccacaggtagtactccgggttctgtgggttgtttgtgtcattttgacttttccttatgtctgtgtaaagcttgctttggattcgcagattgcattatccaatacaagcttgctctctctattagctcatagtgcctaagttttggtgtacctaaaccatatatctntgtttgctttgctgatattcttcccttttccctcctcctcatcttgtcttggggccttctggttctgctcaattcattctcagataacttg

SEQ ID NO: 60714 - DNA, 509 bp, Glycine max
  Clone ID: PAT_MRT3847_25837C.1
gaaaattctcatacacaaaccttttctttattccttctacagtgttaaagtctctatcaacacaattcataacttgttaccttatcataggtgtgtactgtgacatgggttgtttcactagaattcatttgcttcttgttgctgatagggagttgaagtttttatagctcggaacaatcaaatggatgcaatccaaaccgagaaaatctatgttgctgttgggaatgatgtgcaggatggatataagactttgaattgggctctcaagaagtggaattctcatccaatttccattgttattctccatctcacacacaatagtaccaaggattatgtccatacaccatttgggaaacttccagcaagatctgtgagtgaggagaaactacaaattctcaagaaagatgagccagataaaatcaaccagctgcttttcaaggatattgctttctggggaaaggggccagcagaaattcttggaggtgagaaatttgatgaacctattccaa

SEQ ID NO: 60715 - DNA, 2156 bp, Glycine max
  Clone ID: PAT_MRT3847_25838C.1
ggctcgagcccttcctcaatgggcaactgttgctctcaaggcaacgttgccgacggcccggctgacgactctgccgccgccaatgacaagggagaagctaaccaacaaggtagtaataaccatgcaaacgacaacaatgataattccacaaaccctaccactgccccaacgacgacatcaaagccaccacccacggtcaccccacccacttcaaaaccctcgaaaccggctgcaatgggcccggtcctcggccggccgatggaggacgtgagagccacgtatacaataggtaaagagctagggagaggccaatttggtgtcacacatttgtgcacaaacaaagccacggggcaacaatttgcatgcaaaacaattgcaaagaggaagcttgtgaacaaggaggacatagaggacgtgagaagagaggttcaaatcatgcaccatctctcgggtcaacctaacattgtggaacttaagggtgcatatgaggacaaacaatcggtgcatttggtcatggaactttgtgcgggtggtgagctttttgatcgtataattgctaagggacattacactgaacgtgccgcggcttcgttgttaagaaccataatgcaaattattcacactttccactccatgggtgtcattcatagagatcttaagcccgaaaatttcctcatgttgaataaggatgaaaattcacccgtcaaggctacggattttggtctatcagtttttttcaaagaaggagagacattcaaagacattgttggaagtgcatattacattgctcctgaggtcttgaagaggaaatatgggccagaagttgacatatggagtgttggtgtcatgctatacattcttctaagtggtgtccctccgttttgggcagaatccgaacatggtatattcaatgccatcttaagaggtcacattgattttacaagcgatccatggccttcaatatccaatgcagcaaaggatcttgtaaggaaaatgttgactacagaccccaaacaaagactgacatcacaagaagttctaaatcatccatggatcaaggaggatggcgaagcaccagataaaccacttgacaatgctgtactgaataggctgaaacaattcagagcaatgaaccaattcaagaaagtagctctaagggtcattgctggatgtctatcagaagaagaaatcatgggattgaaggaaatgttcaaggggatggacactgacaacagtggaaccattacaattgaagagctcaagcaagggcttgcaaagcaaggaacaaagcttacagagcaagaagttaagcaattaatggaagctgctgatgctgatggcaatggaaccattgattacgacgagttcatcaccgcaacaatgcacatgaacagaatgaacagagaagaacatctttacactgccttccaatactttgataaagataacagcgggtttattaccactgaagaactagaacaagccctccgtgagtataacatgcatgatggcagggacatcaaggaaatccttcaagaagttgatggagataatgatggacgcattaactacgatgagtttgcggcaatgatgagaaaaggaaacccagaagttatgacgaagaagaggcgtgattcattgccattgccattgccataatggagggactctaagggaaggaacttaaaatggtttcatcagtacaatggttttcttaggtggagaagcttatgggtgaatgaaagaatgatcatgggctgcatttcatcatagctttgttggttgcgaggggatacagattaggaacgggagaaaggtggaatcaaaaaccaagaaaagagggaaagggggagggggggtaagaagaacataaacaaatccttgagaaatgttaagatacactaggtggtttggttgattaacatttttttgcttttgctttttccttatatgtgaaaacgttgcaacatgacatgtattgatattgcggctcacataattaggaattaaaaaaagggtatttgtttatgtattatttccttttaaatactaggccttaatagtttgtgctaggtttaccataaaaaaaagtttgtgctaggtttcatatattttactgacttatatatatgatgatcatgctctcttgaaacttg

SEQ ID NO: 60716 - DNA, 164 bp, Glycine max
  Clone ID: PAT_MRT3847_25839C.1
ttgtaccttccaaacgggaacctccgaatagcttataattcctagctacctccataaaactgggagggacgttaggatttcttataaaacaataccacaaagttcggtcctaggttgttttctcatgctttttttattaaccactgcacctgggttaaacaaaa

SEQ ID NO: 60717 - DNA, 780 bp, Glycine max
  unsure (1)..(780): unsure at all n locations
  Clone ID: PAT_MRT3847_2583C.1
cttgaagttacggatgacgaagatgagttggtaaattcatttttggtttatgatgaagaatttgttatcaatgaagaaagaagacactgttttgtcaatagttccacccaaccaaagtcattgagaagggtatacaatgaaagcagtggaaattggttcagacttcagagtggacacattagttctggtgaataccctgcattgaaaatgtttaaatcgtcacatgatgttgtccgtggtggcccaagtcgtctagctttgaaccaaaaagcaaacaaagagaaaaaggagagtatcattcaagatgatctttgggcagtggagacatcctcttgtgactcaactgcagatgaaccaattgaaatttctagctctccttccactccaacaagattgaaaaatcagtatcatctaagaccagaaaacctcatattacaaagaactgtagcaggaagacctcaaacacagaaggtttcaaacaatgcagtatcccatctagaggttcagaaggaattgctcactgtgaaatcagaaaaagatcagaaaaatgctcaaaatactagttcaagagggaacttaaaaaacaaaagccaacaatcctctgatgtcaacaacaatggttctttcttttacatggagatgacttcaaatcaaagcctatttccacgttcggtgtatcttgtaaatgttgtcatagggattttgntgntaatagtcattagttgggacgtattatcatgttagaacttanaagcaaggtagtgtgtacgaagggctggt

SEQ ID NO: 60718 - DNA, 1415 bp, Glycine max
  Clone ID: PAT_MRT3847_25840C.1
taggctgcgagagacgacagaaggggacgtcctatcgctctcagacttgtgttacaaacaaaaacccttcttcaaaaccttttctctaaaatttcccacaacccatttctactctctactcattccacacccaactcacaaaaaacccattctttcttttgctcactcattttcttaatcatgtgtggcggtgccatcatagccgacttcattccccgccgtggaggccgccgcctcacggcctccgagctctggcctaactccttcggcaaagacggtgactttgacttcgattactcccacatcgccgatcaacaacgttccactctcaaaatgtccccacctcccaaagctagcgagcaagtggagaataagccggtgaagaggcagaggaagaatctctacagagggattcggcaacgtccgtggggaaaatgggccgcggagattcgcgatccaagaaaaggggttcgtgtctggttgggcaccttcaacactgcagaagaagccgcaagagcctatgatcgtgaagctcgaaaaatccgcggcaaaaaggccaaggtgaatttccccaacgaggacgacgaatattccattcaagcacgtcatccgattccaccccttcctttcacaccacaaacacaaaaccctcccctgtaccagcaacagtaccgttgcgatctcaacattgcccctaaaaatctcaactttgagttcgggtacgacctgaaccacgcgggggcatttccgtcccacgtggacgccgtcaacgctgactcggtggttgtctccggcgatgaaaattcagggttagcgtcgggttcagagggtgcttattcgacaacggagtttatgggatccagtcaaaacgggaacgggtatctgggtgttaccgcaatggagaagaatgagaaagagacagaggttattgaagctcaagaagaaaagaacaaagtgcaggagctttctgaggagctgatggcgtacgagaattacatgaagttttatcggattccgtactatgatggacaatccacggctccaccgaataatgttcaggaaagcttggtcggggatctctggagttttgattaacgaggaatatatcaaaggatgttcttttcatgcatgtgtttgttccttcgtcaatgctgtgaaagcttctgctgactaatatctttgcgttttagcagggatggacaaaaatgtaaattgggtgcttcggtagaaatggtctcatgattttccgactttttttttttttttttaccaatttatttaatattaatttatttgtttctagaacttagggctatcatctggttttgttgaattgtaatttttcttttggtggtatgtcgaactgtaattttactagatatattcaaccgtgtttgaattccaatttttctttc

SEQ ID NO: 60719 - DNA, 391 bp, Glycine max
  unsure (1)..(391): unsure at all n locations
  Clone ID: PAT_MRT3847_25841C.1
ccctgtanggnggggcaaacaaaaacgacagttgctggtatgtgacagttgtccacaacggagttcaaaaggggggggtccaacgcccctgtcaggtgcaaaccacacggaaagaatgcccttcaaacatgcggaaattaacgaccggcccaggtaataaaaggatgaggcctcagtggggggctcctaggcgcccttgcccatatcccaactgaggccactaccgggagaaaacctaccctgcctaacaaccccttttatggaacaaaaaaaggaatctgaaaaacaaaaacaccaaccggggccaccaatcattttaatctttccaaccaccaactcaggcacgctcaccacgaatccttcttgccagctgaatatcctgggggcataa

SEQ ID NO: 60720 - DNA, 456 bp, Glycine max
  Clone ID: PAT_MRT3847_25842C.1
ccacgcgtccgactagttctccttaatatttgtgtttggagagatgagtagaatctagtaagatcatggaaagattatttagttcactagttttccaaaactcaaagttccaagaaatgttgtaaaaaataaggatcccttagaaataaacttttagggacttacatgagtacagtaaacttttttttttacattagtacagtaaactttgggttgacttcctacacattctattctaaaaaatatgtaatctcaattacttagttccataaagttacctcaaatggaaagcgacgtaatcatttagctgccaaaactatgcttctggatccctgaactttcctagactccagcctcctagctaacaaaattctctcttccctggtgttgatgtgtattttgtacagtacctcctgtactgctgtttatatctaatatattagtatttttgctgat

SEQ ID NO: 60721 - DNA, 385 bp, Glycine max
  Clone ID: PAT_MRT3847_25843C.1
gtgtttttaaaaccaaacgagggtatagtttgtttttcaagaaaatcgtggagatattttacctcactttcgtccccctgtttaagagaggatgtatcaaatttctacggaaaaattcttaaattatgacatcccgattaggaacatagatttttacttcccttgtatccctcttacatttgaaaaggttctagtcctgataaatgcccaccccatgttttttaattcttcttatcccaaacccggtgggagacacccctcaagatttaaggggaaaaactctattgagaagaccgagctatattctttgccatgggggtggggggggggggggatctccccacaaactgggagggaattgattgctcccccttgccccctcttt

SEQ ID NO: 60722 - DNA, 236 bp, Glycine max
  Clone ID: PAT_MRT3847_25844C.1
ttcaacagggtcatcattgtcgatgtcttaggaccttggtcatgcccatggcgtctttattcagatcaaggggatatgcatctactgtcacataaatggggagaagggccggataatgccaccgcgaagcgctttcatactccagagattaattcgaggagcttatctatgtccagaatatgcatggtggaatgagacaggacacttgccatgcttaccctgaggcagggagcttt

SEQ ID NO: 60723 - DNA, 516 bp, Glycine max
  Clone ID: PAT_MRT3847_25845C.1
ctactatcactggctcgactacactgtcaacgggtaaacctgtcctttaccgcaaataagtcccagcaatagactgcttcttcagcgggacatgtgatatggttgctgcgctaactgccgcccggctccgagaagccgtatttgcaggtgcggatgaaaacctacgatataaaaagtcatggattccagctgatgatgtgaagccgacggagttgccgttggcaaaggcaacggagatgggtctggctagtatgcataatgtgctggagaagaccagcgaggcgagagatgcggagcttgtggctactgcagctgctgctgctgctgctggagctgaggagactgatgaaatgaagaagagggaacacttgcgacggacgaaggcagcggagataccgctggtgcggaatgtgcggcttctgcgtgaaccaacggtggagtttaaagcgaacgagtgggagaagcgcgatttagtctaggatatttgaccaccggatctggtcctatcattactag

SEQ ID NO: 60724 - DNA, 221 bp, Glycine max
  Clone ID: PAT_MRT3847_25846C.1
gaacagacaatataaatatatataaaatgtgggaaggaaatattaagaaaattggcccatccaaaaggaatatataagaaaattgaccacccgggagagatggtaaacatcatcgtggttgtcgtcgttatcaacctcctctttacaaggaaaattttcgctgcaggctgagcctgcagcgagtgttttaaaactacatgagacctggagccctattgctg

SEQ ID NO: 60725 - DNA, 465 bp, Glycine max
  Clone ID: PAT_MRT3847_25847C.1
ctgagatacttggaaaaagtagttctctttggaagcaacaagcaacgcatggaggcttgggataatggtggtttgatgattcatgatgctcttagagctgctcaaatcgagggaatttcaagaaggatgattggaatgataagaggtatatcaaaacttccaacttataaaaggaagtttcgtcaaattgttaaagctctagttactcattctctggagaaagacgtttcagaaagggctttagttactcatcattctgtggatgtactagatgtttctgaaaaggctttagttactcgttatctggagaaagatccttctggaagatcaagtaggtctatagtatcagttgcctctgatgaaattgcttagctagttttgttctctaacattgtcaatgaatgagaatcattgtaaattcatatagtttgttgattgattgatgcaaaagaactttttgagtgc

SEQ ID NO: 60726 - DNA, 291 bp, Glycine max
  Clone ID: PAT_MRT3847_25848C.1
ggatgatactcactcatggctccttcatcctattgaaatactcatttctcagtaacctcctcctgtggcagttgtgaccatcgtcacgggaggggagttctccatgcaacttacctgcccaagaggctcctctacactagaaggacaaggcgctttgactatcctctcacatgacattagcaatacatcattcactatgctaaatctccgacaattgaatatcctagaataaagttctgaagcataatcaaataaactcaaaactaaatctataatgaacaatataggcat

SEQ ID NO: 60727 - DNA, 813 bp, Glycine max
  unsure (1)..(813): unsure at all n locations
  Clone ID: PAT_MRT3847_25849C.1
tcgacccagcgtccgggactgaattgctgactgtaaagcatcgcattgtccacaattgtccaaaactctctttgacttcaacgactactcttcgggagctctgtgcaaatattccttattcagatttcgaaaacattggactttcgccgttggactttgtctactcgatttgtaatatgattgaatcagatgaagtttcgaggaggagcggcacgaatgagttgccttcatcacagattaatgaaaaatcagagaacgattttattgggaatattcctggttcagaagcacaggctgctgcaacttcaacaaattcagagccgaataaaaggccaaccccaagtcccttggataattgtcaacgtgaaacacattcacatgagttggtggatgggcaatcaacgagtcaatcatattttacagaccaacaaaggccacttggaaaaactgaaagtgccattggaattcctcagcatgagcagaatcccgcgccagaaaacacttctccatttcaaatgaacctagaagatccatcaacatccaaaagtaaaccaccttctccacaagtcaatgataacaatcaatttgtactgggaagcataactgaaacagtacgtgaacataagcaatttgaaagcagagtaactgtgttcgaaacaggcgagtgccctgaattagagagagaaaacaaaaggacatcaaacttacaaaaactggagcaaaaattgtcacccatttcttctccaacatgatagnagnatatgntnntttctcttaatcttttaaaaactgtatattagtaaactaaatatg

SEQ ID NO: 60728 - DNA, 493 bp, Glycine max
  unsure (1)..(493): unsure at all n locations
  Clone ID: PAT_MRT3847_2584C.1
naannnnnntttttaaaacgtgcgcaacagccaaaggaaaaacacccgggagnggggggggacaacaccaacagaaccccacaaaaacaacaggacaagccgggccacccanngccggaaggagggacnccaaaaacaccccccaacaaaaagcccgaaangcaggaaggggcaaggaaannaaaaaccaaacgnccacngcagacncgccacgaaaacaccanaaaggaagggggggcagacccaaagcggcagcagcaaagaacggaagggccaccgggcaaaaaccagccaagggggccccaggcccacaaaccccaagggggaggccaaaaaccccnccaagcgcccgcaacaaagcaagaccctgcgggaaggagggacccccccnccccacaaagaagagcaaccacgcggcaagcaaaccggacccccccgcccgcaaggcccganaaaaaccacgaaagggggcagcaacaccaagaaagggggc

SEQ ID NO: 60729 - DNA, 253 bp, Glycine max
  Clone ID: PAT_MRT3847_25850C.1
tccctttttactttcattttcatcacataccttttcatttcggggacggtcacttaaatatgacaccacacccccttatttatcttttctataactgatagagcccctatttctgtgaactcactgcggagttctgcgatatcttatctaatttcaaacctgcttatttttcttgttttcacttctgcgcatttttttgctttcaatatattaaatttcttattccaacacccaaaagctaactttcataata

SEQ ID NO: 60730 - DNA, 311 bp, Glycine max
  Clone ID: PAT_MRT3847_25851C.1
cccacgcgtccgtgatatcattttggttgtcataatgtatgaatcgttgaattgttcaatttattgtttcttcagcccgtggttaaaaaaaaaaaaaaaaaaaaaaaaaaaaaaaaaaaaaaaaaaaaaaaaaaaaaaaaaatataaaaaaaaccaagctaacaaacccgagcatacaaaagcaataactcttctataagagacacctaatttcatttcactggccgactttttacaccgtcgtgattcgaaaaaccctggggttacccatttaaatagccttgcataacatcccccttttccacactggt

SEQ ID NO: 60731 - DNA, 835 bp, Glycine max
  Clone ID: PAT_MRT3847_25852C.1
cactgtcctcgctcaaggaatcacctttctagatcacccagtaacaattctagcaaagcatgggatgatgcttctttggattcaggctctgaccaagtgggttcatgcacaacaaaggatatgcttggcgccctttacttacagtactctgagaactctccaccttaccagcgggttccattttctgagaagataaccgagttagctaaaagccatccaggattgatgaggttgaagagtgtggatatttcccccacaagttggatggctgtttcatggtatcccatttattccgtaccatgccacaaaaataaaagggaccaaacaagcttcctcactttccattcactttcatctttccaagactgtgcaagcaaatatgacgaaattcacacagggaataacaaaagttgtttaattgattggcgaagtattgtgggagagaaatgcaagaaaaaagagaggggttgcatgtctctctctccttttgggttagccacgtacaaaatgaggaaaaacatatggttaaatccctataacaataaccaagtggtgaccgatctatacaacgctgcagactggtggttgaagcatatcaacgctgaccaccctgacttcaacttcttcacacgccaacctaccttgtagattggtttgtgttgtgttcatcaccaccagctcaatgcccctttgctcagtttgctactctcatttcggtatcagaatttgcttagtttggtactctgaccttcaccctaggtccaactctgagaacattaataaataaaatgtaaagtttagtttaatgggttcatgtaaagtgatatttatcttt

SEQ ID NO: 60732 - DNA, 784 bp, Glycine max
  Clone ID: PAT_MRT3847_25853C.1
aagaaaatgaattctttggatattactacagttgagaagcctcatgcagtttgtattccttacccagctcaaggccacataactccaatgctcaaactagcaaaggttctccatttcaagggttttcacatcactttcgtcaacacagagtttaaccacaaacgtcttctcaaatcccggggtgcagattccctcaacggtttcccttcctttcgcttcgaaaccatccctgacggtctaccagagtctgatgtagacgccacacaggatacacctaccctgtgtgagtcccttagaaaaacttgcttggttccatttaggaacctccttgccaaactcaaccactccagacatgtccctcctgttagttgcatagtttctgacggtgtcatgagcttcaccttaattgcttcagaagaactaggcattcctgaggtcttcttttggaccataagcgcttgtgggctcttgtgttaccttcacaatggtcaactcgtcaaaaagggcctcgtacccctcaaagttttgcaggaagagtgtgggagagctaagcatgcttctgcaatcattttgaacacatttgaggctttagagcatgatgttttggaggcactatcgtccatgttgcctcctgtgtaccccattggtcccttaactttactcttgaatcatgtcacggatgaggccttgaaaacaattgggtcgaacctttggaaggaagatagagagtgtctaaaatggcttgacaccaatgaacccaagtcagtaatttatgtgaactttg

SEQ ID NO: 60733 - DNA, 262 bp, Glycine max
  Clone ID: PAT_MRT3847_25854C.1
cactgagcatcgtctagctatctcgatcgaactgtccaaggtcctgtcaccggggcgggagggcaaaggaatagcgactaaacagcgggccaagtagtccaccaaataacccgtataacagaaacccccaatggccaccaggagctcaaacaagcccggccagagtaatactaggattaagcggaaaccgcgtaggccaattcctaggaatagtaggccacacggcgtcatattcggatcctgggcctcgtttatagtgcta

SEQ ID NO: 60734 - DNA, 290 bp, Glycine max
  Clone ID: PAT_MRT3847_25855C.1
aagattaattcctcattatcttacaaatgtcacttcaaggttagttcttttatactttggttatacccccccatatctctcattaacacttcatttagatatatgtaatcattcactttacactaataatataccttctctctacatcatgaactaatatacatctcatacatactattctaccatttacttaatacatgaacacatacccaacttctttcattctctctataacataactactgctataattaaatatcacctaatacaatatgacaaccaatacaccc

SEQ ID NO: 60735 - DNA, 354 bp, Glycine max
  unsure (1)..(354): unsure at all n locations
  Clone ID: PAT_MRT3847_25856C.1
ctataagacacaaaataagcgtgcctgagcaactacaaagcgacaaacgcaagtcatttgctagtttcggcatgctgctacatggcttattgagagcaaggcacattgtacgccacagatagattgtaagtcagtgctccgcactaaatggattccatgcatgactagcacgcacacccggtgtcaaagcatcatacctaggagagagcgggagtcgtaggcacacatatgatcatcatcgcgtggggggagtgtatcccatgccacactttatgcatacttaccagctatggaagcgctgcatttggtcgctncctgcagcgttactggtaagatctggttactgaccccccc

SEQ ID NO: 60736 - DNA, 394 bp, Glycine max
  Clone ID: PAT_MRT3847_25857C.1
atttaattctatttttgtttttctgggaagattggaaaaaagagtatacatgtatttccatatcctttacaaaagaaaaagcctaaaaatacaggggaaattggactagatcagcggtaatgaattgaggcttgtatttctttgaccccaagaccacggattggtatgacaatcctaccttttcataatttggagcgggagcaaaatgaattgattgaaaatgggaataaatttcttcggggttaaacccccttttcatttgtcaacctgcgaagcaaaccaacacttaacgtggattttggatgccgccaacggggatacttttccccacaattattgaaacactgcttcaaaagagagggcccatttccagggacccttattttaatccaaa

SEQ ID NO: 60737 - DNA, 1485 bp, Glycine max
  Clone ID: PAT_MRT3847_25858C.1
atgggaactaggaaatggcctccattaatcattgcattagcattttgcctaatggctatgagtgttagtgctgaagataagccttactatggccaaccatccaactactatccgcaccccatgcccccaccatatcaacaagtaaacccaccttattattacaagtcacctccatattactataaatcttcaccaccaccctctccatcaccgccacctccttatgtttccaaaatccctccatattattacaaatcacctccacctccatctccatccccaccaccaccatatgtttacaagtctcctccaccaccatctccatcacctcctccaccatatgtctataaatcaccaccacccccatccccttcaccacctcctccatacatttataagtcaccgccgccaccatctccttcaccgccgccaccatacgtctataagtctccacctcccccatctccctctcctcctccaccatatgtttacaagtctcctcctcctccatcaccttcaccacctccaccttatgtttacaagtctcccccgccaccatctccatctccaccacctccatatgtttataaatctcctcccccgccatctctctcaccccctcctccatatgtctacaaatctccacccccaccatctccatcacctcctccaccatatgtttataagtcaccaccacctccctctccatcaccaccccgtccatatgtttacaagtctccacctcctccatccccttcacctcctcctccatatgtctacaagttcccacccccagcatctccttcaccacctcctccatattattacaaatctccaccaccaccatctccctcgccttctcccccatacatttacaagtcaccgccacctccttcaccttctccacctcctccatattattacaaatcacctcctccaccatctccatcaccacctccgccatatgtttataaatctccaccaccaccatctccttcaccaccacctccatacatttataagtctccccctccaccttctccatcacctcctcctccctatgtttataagtccccacctccaccatctccttcacctcctccaccatacgtttataagtctccccctccaccttctccatcacctcctccgccatatgtttataaatctccaccaccaccatctccttcaccaccacctccatacatttataagtctccccctccaccttctccatcacctcctcctccctatgtttataagtccccacctccaccatctccttcacctcctccaccatacgtttataagtctccccctccaccttctccatcacctcctccgccatatgtttataaatctccaccaccaccatctccttcaccaccacctccatacatttataagtctccccctccaccttctccatcacctcctcctccctatcacccctacctctataactcacccccacctcccgtatat

SEQ ID NO: 60738 - DNA, 1329 bp, Glycine max
  unsure (1)..(1329): unsure at all n locations
  Clone ID: PAT_MRT3847_25859C.1
atggaggagggggagacttgtcgtaatatggaggaggcggtgaaggtgatggaggaggaggtgacttataataatatgggggaggtgatgatgaagatggtggaggtgactaattatcatagtatggaggaggtgaagaagaagatggaggtggcgacttctaatcataataaggtggaggtgaaggagaaggtggaggaggtgacttataaacatatggaggtggtggtgaaggagatggtggaggaggagatttataaacataaggtggaggaggtgaaggagatggtggaggtggagatttgtaaacatatggtgaaggaggagaaggagatgatgaaggtggagacttataaacataaggtggtggtggtgatggagatggtggtggtggtgtcttataaacatatggaggaggaggtgagggagatggtggaggagaagatttgtaaatatatgnaggtggtggggatggagaaggtggtggtggggacatgtgggggagataagaaggtggagggggagacttgtagacataaggtggaggtggtgaaggtgacggagggggtggagagttataaacatatggtggaggaggagaagagggcggaggaggtggagacttataaacgtatggtggaggaggtgaaggagatggtgcaggtggggacttataaacatagggaggaggaggtgatggagaaggtggagggggagacttataaatgtatggaggtggtggtgaaggagatggtggtggtggagatttataaacatatggcggaggaggtgatggagaaggtggagggggagacttataaacgtatggtggaggaggtgaaggagatggtggaggtggggacttataaacatagggaggaggaggtgatggagaaggtggagggggagacttataaatgtatggaggtggtggtgaaggagatggtggtggtggagatttataaacatatggcggaggaggtgatggagaaggtggagggggagacttataaacgtatggtggaggaggtgaaggagatggtggaggtggggacttataaacatagggaggaggaggtgatggagaaggtggagggggagacttataaatgtatggaggtggtggtgaaggagatggtggtggtggagatttataaacatatggcggaggtggtgatggagatggtggaggaggtgatttgtaataatatggaggcgacttataatagtagggagggtttatttggcgatatgttggtggtgtggggtgtggatagtagttggatggttggccatagtaaggtttatcatcggcggcaacactcatag

SEQ ID NO: 60739 - DNA, 166 bp, Glycine max
  Clone ID: PAT_MRT3847_2585C.1
tacagctgcgagaagaccacataatgggtccgttttttagcttaacagcaacaagggagcagctgttaacgccatattctgtttctattcttctcaaatttatttaaaccttcataattttatacgaatagtcgctatcttattacatagagttaacaaatatttt

SEQ ID NO: 60740 - DNA, 433 bp, Glycine max
  unsure (1)..(433): unsure at all n locations
  Clone ID: PAT_MRT3847_25860C.1
gagataagaaaaaacaaaagctagtgacacatccatggcggaagaacaccaatgtgaacctgccgatagacaccgtactttgagtaaacaactgcggctgtcttcggtagcaccgctcgcggatgaacctatgctccaaatgctacngacggcggatcgcgtcgtgacatgcagcaagcacagaatccgtgcaccataactccacatgccaaaccgggctctcttgtgcatactatgcgaagccgtatacgcgcaggttacctacgctcgtcggcggatgaagcgctcatggaagcttcaccgtcggctgcgcatgacgatgagggtgctggcacgggcacggactcagcggcgtgaacttctatttccataagctcaggttcggttgcgcaaccgaaccggtgtgccacgtgtacggagctcgtggagctga

SEQ ID NO: 60741 - DNA, 2403 bp, Glycine max
  Clone ID: PAT_MRT3847_25861C.1
ggtgaaatcgaatttctggaatatcatgtttggtaggaaatgtttgtccttcgacagaattaaaccttgacaatgtgtcactgatgactgtggcagatctaattatttacaaggaacttgatttttcctatatctctttgtcttcctttattgtctcagttgtctgcagctatttgaagcctttaaattggagaaaataaaatgaatatttgtacttgattgttgatgattggaaacaagagatgataagtagctatgtagcaccatcaagcttcctcactggttgttagtcccgcaatttcttttagtggtttccacataaactttctccagtttccacattcagcaatgaccctcacattaggcctaagtgttggcagcaaagctaggaactgcagttctgccttagagagaaccttggcttcaattatccacaccaccagtcctttggcatttggtggcaatgcttctaatctgtaatcaacttctggtgggaaataccaccttgctattggctgcttcccaacatgaggagggcaaacagggtgaatcttagtgagggtggtttcaggatcaccaaggccacgagctgtaagatcaagaaaatagtatccctgacgtttgaggcgtgacaagtagcgaccctcatagcctccttcatgaggagggtatattgcaagtgctttgtgctcttcaacatctgaaagccaacgtccaagatcaaactttatcaagtctccacctatgaagtcccctaaccctctacactgcacaactcctaccacccttttgaataaattgcaattattaccatgtcttcctctccaacccttcaccactctcatcacactgttatgctgttttgtggctatgaaactgttcctcattgtctgatgaacaacattgttgaagcaggttggacccccataacccaagctagcagtggatgacatgcaaaaccctgcagcccatgctgcagcgagttttgctgctacattttggccatatgcaaatgcagaaacttctgcagattctcccgtgtgcactccagattttccatcaagacaaattggctcgcctccaagtgtgacagctattgcagctgctacagtagctgctgcaactgcatggtgggctgcccatggactgcttcctttatgtggtccactccatacagcttttgcctgtcctcctgcatcagcaactacagttccatcaatgattattgatgaatcaccacaaaaaacagaacgaggagagattaaaccacaaaatcctcctctgcaagatcagataccggatccagaacactcggaagctcaacattcagctcctaagtcaccagctgtttcttcatccaaatctgaggataggggagatgccaatttagatacttcaccaaaggctactaatcatgagatgaaccaagcaatttctgagaaccccgattccaacaaaatgaagggcagaaaacctgtagaccgttcctcatgtggttccaacacaacctctagcagtgaagagactgagttactagagaaggatgagaaagaaaaggaagagcccaaaacacctgatgcgaacgttttagataccgagcttagtaatcgtcgaagtagaagcattagcaaccttactgattcttggaaggaggtctctgaagaggtatgattgcatatcttatgatgaaatgttaatgtaatgtacggatgtattgcttctttcctcatgccactgttattttcaggggcggcttgcctttcaggctctattctccagagaggtgttgccacaaagcttttcacctactcatcatttgataaataaagataatcagatagatagcatcaaggataacgagctaaacacagactacaaagatgaagaccttgaaagcaagaaatgcagttctatttgtgatggggtgcagaaaaatctgctatttgtcaaagataacaatgaggaggagggactgctaaccataggtcttggaccaggaaagctaaagactcgtcgaacagggtttaaaccttacaaaagatgttcggtagaggccaatgaaaacaggatcggaacagcctgcatccaaggtgaagaaaaaggtcccaagagattacgcttgaatggggaggcttcaacttgatgcctgatattcccatgcaaccacacaaagaaaatctctagttttgcatatatttctaagtttccttgttcattgtctgtattgctttttttctaattctgcagctcacgaaacttgtcgtgtaggtctgtgtaccatattaaattactacatacacactttttactttcttggcctgatgttactgcagttaaaaactccgctaaaatagacttagacaagaaacattaagtaccgtttgagcatttgatcatttaagt

SEQ ID NO: 60742 - DNA, 639 bp, Glycine max
  unsure (1)..(639): unsure at all n locations
  Clone ID: PAT_MRT3847_25862C.1
gacgtcgcaatgcacgncccgtacgtaagnncttggnattcctnctagnagacggcacnngccctttnntttttttnnttttttnnttttttnntttttttntnntttttttttttttnttttttttttttttttttcaaatcaaaaatcccccatcatataaccctaacaggagagaaaaacaggacttttggctggcctttttttttctcctgggggggccccttttttttattcttcttcaaaagggataaacctaaaaaaaaagaaaatccccaccttttttaaattatacatgacaccttaaataaactcgggaacaacggtttttccatataatacaataagatggaaattaaaattagctcctaagcccaaaaaatctcctttgctttaaaaactttggggatttttaaaccccctttttttttttttttcagggttaaaaatggaattaagcaacagcaaaaatgctgaagttgcccctatccctgctaaggcaataaaaaccttaaatcctaactgcagggggggggggaccaaacttaatcctaacacagccttttgctgagaaagatggtgaagggggtgccaaggaaaatgcaccaaatttctcattaccattactaccaaattgct

SEQ ID NO: 60743 - DNA, 1436 bp, Glycine max
  Clone ID: PAT_MRT3847_25863C.1
agagagtttcaggtaagggaaacagtgcgtgatgtcgcatttttgcataatgagctcttttttgctgctgcccagaaaaagtacccatacatctataatcgagaaggcacagaacttctttttctccaggaacatggtccagtgttaaggcttcagtttctggaaaaccattttctcttggcttcaatcaacaagtttggacaacttcgttatcaggatgttacaatgggttccatggttggtaattttcgaactggcttaggacgtacaaatgtaatgcaagtgaaccccttcaatggggttgtttctttaggtcactcaggtggtactgttaccatgtggaagccaaccagtgcttctcctcttgtcaagatgctatgtcatcatgggcctgtctcagcactggcatttcattcaaatggcctcttgatggccactgccgggaaagataaaaaaattaagctttgggacttgaggaaatttgaggttcttcaaaccttaccaggtcatgcaaatactctggattttagtcaaaaaggcttgcttgcttgcggtaatggttcattgatacagattctgcgtgatgtttctggtacacaaaattattccaagtatatgactcattccatggtgaaaggttaccagataggaaaattggtatttcggccatatgaagatgttctaggcatagggcattccatgggctggtctagtattcttactccaggagcaggagaacccaactttgactcatgggttgcaaacccatttgaaacttctaaacagaggagagaaaaggaaatacggtctcttcttgataagcttccacctgagactatcatgctggatcccagcaagattggtacggtgaaaccaagaagagagaagccaacaaagcaagagagggaggctgaaatagaagctgacgttgaagcggctaagggcaagaaactgaagaagaagacaaaaggaagaaacaagccaggtaaaagggtacagaaaaagcaagaggcagttgctagagtgaagaggccctacttggagcagaaaattcaagaagaggaaagcatatcaagaaagaagcagaagactagggagggtgttgaactaccaaaatctctacagcggtttgttcgtaaaaaggcttcatcatgatttaactgtccaatagagtcttgtattcgtctttactttccccccctattgatgttaagctcttgtttgtatttttttgttgcatttcatatttgtagcctttttagcctttgatgtgatgttttttgcctttaaagtaaaggcatatccaaattttgctttacagaccccttgattagaattttttttttaatattataagaatcttctttaccttcccaaaaaaaattgacgggaccgaatgtttggattgataaaaagagatgtaatagaatggaatg

SEQ ID NO: 60744 - DNA, 2311 bp, Glycine max
  Clone ID: PAT_MRT3847_25864C.1
gaggcctttgtaaagggtgttccaataggacaagctcttgatatagacatcccccctccacggccaaaaagaaaaccaaacaatccttatccccggaagaccaatgttggtggtgccccaacattacatagcggagcaaggcatggaaagcctctcatttcaattgtatcttcacttggtaaacaagcattgggcttggagaaagaaccccttccagagaagcatgatgtcgacctaaggccatcaaccgtaaaagaaaataaggaccaaagctgctcaaaagtatttaccattctccaagaggcaccctgttcatctgtatcttccgccaacaagaattcaacatcaatattagtgccgctgagaaattcatgtgccctaaggaagtttataccttcggtgaaagatgtgataactcaagatgaaaccaacgactcttttgttactgatgatcttgaaaatcagaagttggagatagatgatggcaagcacactcaaaagtctaatggcacttgtaaagtctctaagtcggagaattctggtgcttcagaattggttcaaactgagaaaacagatggtcttaattgtgcattaacaattgaaggggtgcaaggcaatcagaattacccaagacatgtccctgtgcacgttgttgatgggaaccttggaactagtactcaaaatccatccccagatatggtgtttcaagactccatatttcagccgaaaggaggggttaatgggcaacctaaccttgtcaccatttctgctacatcaaacataagtgaaagtcaaaacaacactgcacggtcctctattcatcaatcatttcctccttgtcctaccttcacacaggatgattatcattcatttcttcaggtgtcctccacattttcaagtcttattgtctctaccttgctacaaaaccctgcagcccatgctgcagcaagttttgctgctacattttggccctatgcaaatgcagaaacttccgcagattctcccatgtgcactccagattttccatcaagacaaattggctcgcctccaagtgtgacagctattgcagctgctacagtagctgccgcaaccgcatggtgggctgcccatggactgcttcctttgtgtgctccgctccatacagcttttgcctgtcctcctgcatcagcgattgcagttccattaatgaatattgatgaatcaccacaaaaaacagaacaagaagagattaaaccacaaaattcttctctgcaagatcagatactggatccagaacactcagaagctcaacattcagctcctaagtccccagctgttttttcatccaaatctgaggagaggggagatgccaatttaaatacttcaccaaaggctactaatcatgagacgaatcaggtcatttctgagaaccccgattccaacaaaatgaagggcagaaaacctgtagaccgttcctcatgtggttccaacacaacctctagcagtgaagagaccgagttactactgaaggatgagaaagaaaaggaagagcccaaaacacctgatgcaaacattttagataccgagcttagtaatcgtcgtagtagaagcattaacaaccttactgattcttggaaggaggtctctgaagaggggcgtcttgcctttcaggctctattctccagagaggtgttgccacaaagcttttcacctactcatgatttgataaatgaggataatcagatagacagcatcaaggataacgaccaaaacacagactacaaagatgaagaccttgaaagcaagaaatgcagttctaatagtgatggggtgcagaaaaatctgctatttgtcaaagataacaatgaggaggagggactgctaatcataggtcttggaccaggaaagctaaagactcgtccaacagggtttaaaccttacaaaagatgttcggtagaggccaatgaaaacaggatcggaacagcctgcaaccaaggtgaagaaaaaggtcctaagagaatacgcttgaatggggaggcttcaacttgatgcttgatatatccatgcaaccacacaaagaaaatctctagttttgcatatattatttcttagtttccttgttcattgtctgtattgcttattttctaattctgcagctcacgaaacttgtcgtgtaggtgtgtgtaccatattaaattattacattacactctttttactttcttggactgatgctactgcatttgaaaactctgctaaaatggacctagacaagaaacattaagtactgttttagcattgatcatttaagtaatttaatgatccttcattc

SEQ ID NO: 60745 - DNA, 176 bp, Glycine max
  Clone ID: PAT_MRT3847_25865C.1
ttggcatattgaatatgcgttttggtgaagagaaagcgcgacagctaggcagaaagtggagatggtgagagtagcagaggacattgatcaatggtcaaagaactacacagcattgacaccgttgtggtttctagaaagagcagcacaagtgcaccctaccagagactcccttctcc

SEQ ID NO: 60746 - DNA, 4201 bp, Glycine max
  Clone ID: PAT_MRT3847_25866C.1
caattccaaaacattaagtgattccttcacgttaccgtggatgcagaaattatctaattcctcaagtgtagctctatatcgactatcattagatgcattgtctgattcgccatcatgatatgcattatttgatagatgagagccaacccctgatctttgtgcaatagtcaagtttggcaaatatcgaccatcttttagactatgctgaaactgtccagaacttgggtactattgacgcatttcatgactcccgatgcattaacaaccttactgattcttgctcgaggcttgtgcctttgttgtagttgaagtcgctcccctcattcttctttcgttgctacttctactgtttcttcctccgatccctcattgccgcaaatgactcctcctgctagtgttaggtgaattccctcgcttcacatgcatgatcgcaccttcaactctcttcttcttcttcttctccatggctttttttcaaggttttggcgccgtggagttcgttttgtagcatcaccgtatcatcagcttcagcttgctttcaccaaaacggctttactatttggtgtgttccatgtcacaaaaaacgaaaggagatattccttttacccactcctcgtcagggaagatctgaagcagcgctagcagcacacgtcctctaatggacgccgactcctctggagaagaagtggttattaaaacaagaaaaccatatactatcacaaagcaaagagaacgatggacagaggaggaacataacagatttctagaagccttgaagctatacgggcgagcatggcagcgcatagaagagcatataggaacaaagactgctgtacaaatcaggagtcatgctcagaaattctttacaaagttggagaaagaggcctttgtaaaaggtgttccaataggacaagctcttgatatagacatcccccctccacggccaaaaagaaaaccaagcaatccttatccccggaagaccaattgttctaagactgctgttttttgcagtactcccttcgttgctatttcttctttttttcactgggttccctctctgcagcctcttacccttaaatgataccttttggtagatttactcgcttcacatcccttcacataccttaaaatctcttcttcttctttttgttcttgctttttgttggtggtctttacatagcggagcaacgtatggaaagtctctcatttcaattgtatcttcacgtggtaaacaagcattgggctttatgaactctgcctctctatagaagagtgttttttaattatggtttttttacttttttaactatataatctttattagttccatactacctaccaatcttcactgtacgccttagtttctcaagatatgctagtaacttgagatcaacctcaatgttaattttgctttcaaatatccctaccaccagtcacatgtcattttgtggtaacgctacgcctctgtaatatacgggcgatttcaactacgaaaatgatattgtatacttaccaacattggactgtaaatcagggtacatccttagaaggtctatacaaggttgtcaaatgttccgggccgaaaagtcgaggaaatagtaccacttccaaatgagaagcataatgtcgaggccaacataaggaccaccataaggtggttatactacgagagctttgtgctcttcaacatctgaaagccaacgtccaagatcaaactttatcaagtctccacctatgaagtcccctaaccctctacactgcacaattcctacccttttggatgtgttgttagtgttaccatgtcttcctctccaacccttcatcactctcacactgttgtgcttattgctcaagaaactgttcctcattgcttgctgcttctttgtgtgatgaacgttgttgaagcaggttggagccccataacccaagctagcagtggatgacatttttttcttttttatttacaattatctaagggtcaccaaatgcaagagtatcttccgccaacaagaattcaacatcaatatcagtgccactgagaaattcatgtgccctaagggagtttataccttcggtaaaagaggtaataactcgagatgaaaccaacgaatcttttgttactgatgagcttgaaaatcagaagttggagatagatgatggcaagcacacacaaaagactaatgacacttgtgaagtctctaagttggagaattctggtgcttcagaattggttcaaactgagaaaacagatggtcgtaattgtgcattaacaatagatggggtgccaggcaatcagaattacccaagacatgtccctgtgcacgttgttgatgggaaccttggaactagtactcaaaatctatccccagatatggtgtttcaagactccatatttcagccgaagggaggggttaataggcaacctaaccttgtcaccaattctgctacatcacacataagtgaatgtcaaaacaacgccgcacggtcctctattcatcaatcatttcctcctagtcctcctttcgcacaggatgattatcattcatttcttcacatgtcctccacattttcaagtcttattgtctctaccttgctgcaaaaccctgcagcccatgctgcagcgagttttgctgctacattttggccatatgcaaatgcagaaacttctgcagattctcccgtgtgcactccagattttccatcaagacaaattggctcgcctccaagtgtgacagctattgcagctgctacagtagctgctgcaactgcatggtgggctgcccatggactgcttcctttatgtggtccactccatacagcttttgcctgtcctcctgcatcagcaactacagttccatcaatgattattgatgaatcaccacaaaaaacagaacgaggagagattaaaccacaaaatcctcctctgcaagatcagataccggatccagaacactcggaagctcaacattcagctcctaagtcaccagctgtttcttcatccaaatctgaggataggggagatgccaatttagatacttcaccaaaggctactaatcatgagatgaaccaagcaatttctgagaaccccgattccaacaaaatgaagggcagaaaacctgtagaccgttcctcatgtggttccaacacaacctctagcagtgaagagactgagttactagagaaggatgagaaagaaaaggaagagcccaaaacacctgatgcaaacgttttagataccgagcttagtaatcgtcgaagtagaagcattaacaaccttactgattcttggaaggaggtctctgaagaggggcgtcttgcctttcaggctctattctccagagaggtgttgccacaaagcttttcacctactcatcatttgataaataaagataatcagatagatagcatcaaggataacgagctaaacacagactacaaagatgaagaccttgaaagcaagaaatgcagttctatttgtgatggggtgcagaaaaatctgctatttgtcaaagataacaatgaggaggagggactgctaaccataggtcttggaccaggaaagctaaagactcgtcgaacagggtttaaaccttacaaaagatgttcggtagaggccaatgaaaacaggatcggaacagcctgcatccaaggtgaagaaaaaggtcccaagagattacgcttgaatggggaggcttcaacttgatgcctgatattcccatgcaaccacacaaagaaaatctctagttttgcatatatttctaagtttccttgttcattgtctgtattgcttattttctaattctgcagctcacgaaacttgtcgtgtaggtctgtgtaccatattaaattactacatacacactttttactttcttggcctgatgttactgcagttaaaaactccgctaaaatagacttagacaagaaacattaagtaccgtttgagcattgatcatttaagtaatttatgatgcttcattcagtccaaaaaaaaaaaaagagtgtaatgtaataatttaatatggtggacccacattctgcactacgtggtatgcagatcaccctcacgactattactgttaacactattgtgctgaacgtggacacgctcgacactatggacgatatgatggagaaaatgcaagacatcgaaggagtccaaccgaagctgcttatgcttgtcttacctgtcgaagatcta

SEQ ID NO: 60747 - DNA, 313 bp, Glycine max
  unsure (1)..(313): unsure at all n locations
  Clone ID: PAT_MRT3847_25867C.1
gaatttngtnaacgtntaggnagcgaggacttaggctnnagnaaacngaacncnnactgangtntagagggangaanaggannnctnagcagncnngcatantgagttangagngnanggtgcanacannnnaanangaggaggnnngncgtagnanggngnantnnnanncnngnnagaagnnggacannggggancangctgtnnagnagntagcngaccgnnagnngatagnnatgttggagnagnaanagnnatttnggganaagatngnannnnannnggtagtatannntnnngtagnngnnntgnc

SEQ ID NO: 60748 - DNA, 270 bp, Glycine max
  Clone ID: PAT_MRT3847_25868C.1
gctagtaaggcacctaacgacgtcgtcttgggcggattgtgagggattgtgccagaacaactgtagctgctggggggcgctgtatagcaacgcaaccgggttttgttatatgttggactatccgatccagacaatggtgggtactggggatgggtcaaaagtgggttacttcaaggttaaaaaagaggaacgaggaaagaaccgggtttggatacgggttggggttgtggttacggttttggttggggttggggttattattattggaac

SEQ ID NO: 60749 - DNA, 220 bp, Glycine max
  Clone ID: PAT_MRT3847_25869C.1
cgacttttcctactcttgatggcctgcacaaccctcttcctcgatcccaattcctaagccaagatcaccctctactcactcaccacttccctctcaaacaacaagtacatcatcacaaaacagctccaactcatgaagttctaaagccacatgcaaagttcaacatattggaaatgatgggtgggagaggactttgcaatggggaaaagggtattcaaca

SEQ ID NO: 60750 - DNA, 247 bp, Glycine max
  Clone ID: PAT_MRT3847_2586C.1
gaatattatgttactaatttttaaaatatgaataaatgttatcttatttcaatatctttggatttgattatgcatattttctttttaagttattttttggatttgattgcacatattttcttctatcatgtgtactatttttattcttcaaatttaattgaactattgtcttgattgacctttactttgtatttttggttcttcaattcattgttttcttgcaaggatcttttcatagatgtgttga

SEQ ID NO: 60751 - DNA, 520 bp, Glycine max
  unsure (1)..(520): unsure at all n locations
  Clone ID: PAT_MRT3847_25870C.1
cggaattcccggngtcgacccacgcgtccgcagagatcataagagtaatagaaattagaatggaggttaaatccagagctcccgggaaaattatcctaaccggcgaacatgctgtggttcatggatccaccgctgttgcttcttctattgacttgtatacctacgtttctctccacttctccactccttccgacaacgaggattcgttgaaactgaagctgcaggagacggcgttggagttctcgtggccaatcacgagaataagagcagcgtttcctgaatccacggctcagctatcttccacgccgaactcatgctctgtggagaatgccaaggcaattgccgcactcgttgaagagcttaacattccagaggccaaactcggactcgcctctggagtttccgcctttctctggttatactcttccattcaaggatttaagcctgctactgttgttgtcacttctgaacttcctctgggctcaggattgggttcatccgcctcgttttgtgttgcgct

SEQ ID NO: 60752 - DNA, 394 bp, Glycine max
  Clone ID: PAT_MRT3847_25871C.1
gttgaaattgagagtgagagtgaaagtgaaaattcagagtctgaaagcccttcttctgattctggtagcggaagtagtagtagcagcagcgacagtagtagtgatagcgaggacaccgacgatgatgataaagatgatgatgtggaagttgaagaaggcgagataagtggttccgatgaagagaaaatggttagttggagcatggctgatgaggatgatgatgaagatggtgatgtgggaggaggacccatcaggtcaaagaacgagcttcaggtgttcttttatttatttattttgtttttcaattttagatttatatattaaatttttggtaacttgattgtgtagagtttcattgggaattagcaggtttttttatatatataaaaaagta

SEQ ID NO: 60753 - DNA, 365 bp, Glycine max
  Clone ID: PAT_MRT3847_25872C.1
cagcaaatgggatttctagctgacctgattgttgatgaattacaagaacagctgatggaagaacttgattataccctgcaaccctgaactataggagaccatattgacaaaattaaaaattaccctactgtcaaaattcctgaagcatacaaacaatcatttggtcaacgactgctggtaatggaatggattgatggtatccaccataccaatccacatgccaccagcgaagcctgtgtcgacttacaatgatccttaacaattgaagagtgtgctggcacacaacaattgatggaatcacgattatacaaaggagaccctttccctactaatatagaggccatgcgtgaaaggagagctgcata

SEQ ID NO: 60754 - DNA, 390 bp, Glycine max
  Clone ID: PAT_MRT3847_25873C.1
ctacaacaatggactaaacaaacccttatccatcacaacgataatggccacctgtgctattcaacaatgggcgctgactgggcaaactgatctgaagcagctcactgagttcggcgcaagaccgaaggcgctggcaaaggtcgcactaacatgcgccgcaccgtcaagagtgatactcagaacatatgttatggccctaaccgatccaaggacttgggtccattctcggaacagattgcatcatacctgaccggagaaaaccgtggaaactacggctgggacacatggtggattatcatctgacccggaaaccattaccaggtaccctgaactgtaggtgattcacagcacaccctcaatgctcgttgcccttgactgcaccttcccaga

SEQ ID NO: 60755 - DNA, 102 bp, Glycine max
  Clone ID: PAT_MRT3847_25874C.1
ctcgagccggtagttttgatttctggctaaacaggttcgatcgatcgaggctggccaaacaacaggaattgcagagaaagtgaacagcgccatcttcaaagc

SEQ ID NO: 60756 - DNA, 268 bp, Glycine max
  unsure (1)..(268): unsure at all n locations
  Clone ID: PAT_MRT3847_25875C.1
attgttgaacaagggtttctctgtctgcttctncactttctctcgtttccaatcganaccagnaccnnaacatgggcagaaaattcttcgtcggtggcaactggaaatgcaatgggacaacnaaagaggtaaagaagattgttactactttgaatgaggctaaagtccctggagaagatgtcgtagaagttgttgtgagccctccttttgtgcnacntcctgttgtaaaaagtttgctgngccctgatttccagtntcggcacaantc

SEQ ID NO: 60757 - DNA, 241 bp, Glycine max
  Clone ID: PAT_MRT3847_25876C.1
tgacctgtggggaaactggatgacactgttaccaatcaagagatgtgagcatgctgctgaccttagcagtctcaagtgaggagagggtttcattatctaggcccctcgagtcaacattctcctatttacctgagttgatgcagcattcgcctgcgagagttgtgcgcgaagacagaccacatgttggttcttttattgttgccaagaatctttgcaaattacagtggaaattggatttaca

SEQ ID NO: 60758 - DNA, 325 bp, Glycine max
  Clone ID: PAT_MRT3847_25877C.1
acggtttgcttttcccctcctgagttctctcgctcccaccaacggcagggtcaggccacggggcgggccccacccctgcgcatacattgccatctgtttctcctgtttttgtttgtttgtttgttttccgatttccctttttacttttttttcccctttcttcctacacttagtttcttgggctgggtgggatttgcacagctgcagtcctggccccaggcagtcccccacactctccttctggcatcagtccctgccctctttttcacatagagcctggcttgggagaggggcttaactcttggtgtgcctggctgtctggtgt

SEQ ID NO: 60759 - DNA, 319 bp, Glycine max
  Clone ID: PAT_MRT3847_25878C.1
cgacacagctgactaggaaggcggccttctgctgagaagacgagagaaggggtgatatcaggggactacggggggggaagccttagtaccacttttacccatgatgaaattgaggaccgcaaaactacgtatatattttaacgtatgaatgtatagtgcgggaaaatgaaggtgtcgcatctcgaggtatttatttttatagcgggcggagaaacgtgtaaaacgtcggaccgtgtaattttttcttgaatttggaaaagcggagagaataccaaaggcattggaccttgaaaagaccctaacagatatgtggagtgaa

SEQ ID NO: 60760 - DNA, 178 bp, Glycine max
  unsure (1)..(178): unsure at all n locations
  Clone ID: PAT_MRT3847_25879C.1
ccggaaaggaaaaggaaatgtctccttctaaaacacccttatttacagggtccagggccctgatggggtaccttggcnatattggaaaacaatggggctatccctcaactgtgccttcctcctatttggatctgtgatacagcttatagcatgtgccagagacatctatttcataaaa

SEQ ID NO: 60761 - DNA, 370 bp, Glycine max
  Clone ID: PAT_MRT3847_2587C.1
ccacgcgttcggtatgattgcgttgccatgactttacaaccccaagtggaggcgcgttttgacatttctcccaaaaagatataatgacatcctgaaggctcatttgactattgaagaacctgccaacatctttgactacatcattttcccactctatatgtgagacttctgaggatcgaaaaagctcacattctcacccaattctaagatgacttacaaactgagcgcgaccaatatcggcactcaaagccgctgccaaggtccccaagaaccaaataagcgcccacgtggccctatacttctttggcttatttgccttaagccacacgaaacatgggttcccgaatgtcactggcaacgccactcctcc

SEQ ID NO: 60762 - DNA, 1525 bp, Glycine max
  Clone ID: PAT_MRT3847_25880C.1
tcagccatcaaaaatatttttatttaattctatcaagctcattatccacaattaacaattaatactaacaagcactaatctttcagcagcgtcgtagtcttcccgtcactctgttcacaccccttgccatcctccgatctgtgtgccccttccgtcccgtggctccgttcctttgctcttacccatcgctcgtcagtgcacttgacctacacacacgttgtattggcgaagtccccatgctagtttgggctcaccgctctctctggctcgatgcagaacggctccgttgattccctcccccttcccctgcagccatccgcgttcgccctgcacctaattggcgttgtacatccgcgccccatcgcccccaccaacctcatttttttttttttttttattttttttttctaattaattaatcaagcaattttaaactcaaatttctttaaagatcaaagaagaaaggatcattataatcccataaactaccagtgtagtcatcctcgttcgccatggaccaaaaaggcgaaaaagatccaagccccattgtccccaccaacgccagatccggatccaccgaaaaagcatccatagcagacgcaaccgaacccacgacgggggaattattcactccctccaccaccacgccattctgatgttgctgttgctgttgattcaacaaaaccccatgttgcacttgcacatgcacatgattattattactatccagaaaaccatgcctttggtacgaggttgatctaatagaaccatcaacaacaaaaacattattattcacacctaaacccacatcggattccgaattatgttggtacgatgttgatagagtatgtgccacttgcacttgcaccaattcctcgggacaacgatggtgatgaggatgatgaacttgcactatattattattgtgattatcattagggcacagaaccggtggggagtaagtgtaattgtgactattgttataagggtaaggcacggtagcggtgttaaatggaaaattgacagaaaaacctgaagggcgaggaagcaagggtcttagggtttgggtggaagaggaagaggagcgagaagaggaagattgagaagaggaaccggagggttggaggttaagctgtgccctggaaccgtagaggatgatggcggcgcggtcgtaggctctggcggcgtcctcggcggtggcgaaggttccaagccacttacgagttcgcttgcgtggctcgcggatctcggcgacccatttgccccagcttcgttgtctgacgccgcggtacctaaatttgttgttgtcgggcggacgcgtacctttgcacttacgactactgattttgttgttggtgttactgttagatgtttcgctgggagtggtttcagtggtggtggtggcggtgggtttggtttcttggggttgaggaaggcggacgcgccattggttggttgggcccagttagaggggaaagatggttgggaaggtcgttccttcagtgttgatgttgattaggctctg

SEQ ID NO: 60763 - DNA, 707 bp, Glycine max
  Clone ID: PAT_MRT3847_25881C.1
aattcccggttcgaccaaccaagttcttactttgaagagacaattgacaacagacgacagaaggggaggcaatagaaaagaaaaccaagtcaagttctcactttgaagagaaaataacaacgtaaagatgtctgcatcaggaggcagaggaagccaagaggaagagaagaagccttctgatcaaggagcacatattaatctcaaagtcaagggccaggatggtaatgaggttttctttaggattaaaagaagcactcagctcaagaaacttatgaatgcatactgtgatcgtcaatctgtagattttaactcaattgctttcttgtttgatggaaggagactccgagctgaacagacccctgatgagctagagatggaggatggtgatgagatagatgcaatgctgcaccaaaccggaggtggacacaagtttctttaaatgtatgatgatcatcttcatcaaaatgcttgataaaacgcatggtattcggtgcttgtttcaaggtttctatttttgtatcatatcttacgatactaatgtagtaaagttgacagtttccgatatggatttttcatgtttattgaagtcttgatgcttaaaagctgctattactgtgttggatacaatactatggtcttcactattcattcttggcttgatgatgaatttgtattgtgtgtttggaatttagctacatcaatatttt

SEQ ID NO: 60764 - DNA, 270 bp, Glycine max
  unsure (1)..(270): unsure at all n locations
  Clone ID: PAT_MRT3847_25882C.1
tcaaaccttgctctatnctacacagtacacacactagangantaatggcttccatcctccactactttttagcccnctctctttcttgctcttttcttttcttcttntccgactcagtcacccctacaaaaccaataaaccttgttgttctacccgttcaaaatgatggttccacagggctccattgggccaacctccaaaaangaacccctctnatgcaagtncnagtctggtggacctcaatggaaaatcattttgggtnacttgtgg

SEQ ID NO: 60765 - DNA, 132 bp, Glycine max
  unsure (1)..(132): unsure at all n locations
  Clone ID: PAT_MRT3847_25883C.1
acgggctgcgagacacgacagacgggggtgacgagggacaacacaacagacaagaccggggccanaaccanaagacaaatcagaaactgaaaaggaactgcccctaagcattcacaaaacaccacccaacgt

SEQ ID NO: 60766 - DNA, 435 bp, Glycine max
  Clone ID: PAT_MRT3847_25884C.1
ataaaaaattataaaaaaaaaaaaaaaaaaatttaaagtaaaagaaaaaaaaaaaaacacaatttaataataactaaccaattatagaccacctactgaaattttacaaaaaaaaagaaaaaaaaaattaggaaaaaagaaaaacaactggatgaaatttaataaatttaatgggggcgaaaataatggaatcttaaattattgtttttttaaagaaaggagcatttttttattttcaataaaataaaaaaaaaaggattggtaaaatctttgttgaatcagccttggcctgtatattattaaaatgggaacaaactaaaggcacattaaacaaggttgattgaaggacctttaaagaaaaaaactataattctattttcttgaaaagaaaacggggggaagaataaataaaagaaaagggatcctctcctggtg

SEQ ID NO: 60767 - DNA, 662 bp, Glycine max
  unsure (1)..(662): unsure at all n locations
  Clone ID: PAT_MRT3847_25885C.1
cccacgcgtccggccaataatacactccctcacccttacccttttgcctacataaacagaacaattctttgtgtacggttccctcagccactgcacccaacggcatcatggaagacagtttcagagtgcgagcagagagagcatttggttctcttccaatccccgcttcttcttccctcaactcactctggtctctcaccgaagacgaaatccaaaacaccccttccaatcgcacccccaaacccaaacccaagcccaaaactaaaccccaatcccaatcctattcattttccagttcccgggttcagctcgagaaggacctcaatgatttcgacgacgacgaagaagaagagccacgtggaccctctaaaccccctgattacgatgatgaacagtggcagattaaggctggtattggccgagattgcaccctcgattacgaggaagaggaggatcaatatgacaagcaggctataggcaaagagaacttgggtgatcgcttgtatatgaaggatataaatgacgatggagttgagattagttcttgcaatgttttccccacttcgttcagagatttagtgagagacccgcgtgcaaatcatttggctgcgaggattangctgaagcaggatgatgaagcagcagctaaaaaaattgatgct

SEQ ID NO: 60768 - DNA, 310 bp, Glycine max
  Clone ID: PAT_MRT3847_25886C.1
ggtataagctgtctctcctccagggcacttaccaacgcgttaagagaacgcctctgtctatcgggggaggagctggggcaaagaatgctattgtcatgagtatgccaaatgctgtgcttacaaggtggagatgttcggtgggagacatggacatgctggtttctaagaggactgcttcgtacatttaacggacagggtctgtcttcatggcgttaggatgtctggctgatgacaccatcagggttgtggcttggccccgcaagctgttgcagtttggcgagcttcaaatatgctgtcttgtgattttcac

SEQ ID NO: 60769 - DNA, 1721 bp, Glycine max
  Clone ID: PAT_MRT3847_25887C.1
ccacgcgtccggccaacactccctcacccttacccttttgcctacataaacagaacaattctttgtgtacggttccctttggtactcttccaatcggcatcatggaagacagtttcagagtacgagcagagagagcctttggttctcttccaatcccttcttcttctctcaacactctctggtctctcaccgaagacgaaatcaataactccccttccaatcgcacccccaaacctaaacccaaaccctacccctcttcaagctcccgggttcagctccagaagggcctccacgatctcgacgacgacgacgacgacgacgacgaagaagaagaagagcctcgtggagtctctaaaccccctgattacgacgatgaacagtggcagattagggctggtattggccgagattgcaccctcgattacgaggaagaggaggatcaatatgacaagcaggctataggcaaagagaattcgggtgatcgtgtgtatatgaaggatctaaacgacgatggagttgagattagttcttgcaatgttttccccacttcattcagagattttgtcagagacccgcgtgcaaatcatttggcggcaaggattatgcttgaagcaagatgacgaagcagcagccaaaaaaattgatgctctgcatgtctctgagaaatctgcaccagacattggtggtggtagtggcagtgatgttattaaccccaagtcaatcttgaagagtaaggataatctttcggagcccagggatgttcgcaaacgtgttcggtttgattctgaatgtgatgatagtggtaacgatgatgatgggcttgaaggaagaaccagggatgttcgcatgaagacctcttcaatggaagaggctacagcttctgaccagttgtcaaagtcaaaagaatttgattcagctgttccagattacattcgtaatccttcaagatacacccgttacacttttgatgattctccaagtgacatggatgacaaatcaaataaggaagcatgcatgagcttccttttgcagttgaaggggtcaaatgctgccaagagaactggacctcaagaagatgaagctttggaagatcttccatcagtaacatttatatcgaagaagaaatctggtgatgccaatatgtgcgacagcgagatggtgtcaaagccgaagcttgatgctggcacggaggccatgaataaaagagccttccctgttggcatagctgccagtgactctgaaaacagtgacgcttgtgcaatggaggaagatgaaccagaagttaaagacattaaaaagagctcacagaaggtgaaccgccagtacaggaagaaagctcaggagaatttggaggagcctgtgtaatgtaatggcgcagttagttcctagacttgcataatttgacattatcagacttgtaccttttccccccattgtttccctcagactaatgctcccttttcgtaaatttgtggaactacatcatgtgccaagatttgcctatggccaagttcgttagtttctttctagaagtagaactgctataggtataagcttcaactcaagcataatgatcagagattcagagctaagatgagatgtgttaaaaatgtatttttcatcataaaatatcaaattgtgagcagttgcccataatagcaattttcacctggtttatatttcaaaaagattctctctttcctggtttatatttcaaaaaa

SEQ ID NO: 60770 - DNA, 243 bp, Glycine max
  Clone ID: PAT_MRT3847_25888C.1
cgaatatggctttgaaccgttggtttgtttggtaatccactactgctttccagaaccttccttctcttcaatttttttattataaaattaatgtatttattaatttaataaataattaatttccataaaaaaattctaactgatgaatgaatttttattacaatttttcttctcaattatattttttcctttccattcacatccaaaaacttaatttgaaggaccgagtccaaattattaaaa

SEQ ID NO: 60771 - DNA, 2696 bp, Glycine max
  Clone ID: PAT_MRT3847_25889C.1
ggctcgaggatgaatataaaatggactaatcttcggccgtcctgtgaactctctgtgaaaaaactaccctgtgagacaaccattgcaccaattcgtcagaattatggagtttacacacagagttacaacttactacaaatggaataacttgaatcctttgtggctgatgtctttctctcacctgaaatcaacttggaatctgcatgagcttctattgaaggctcgaggaatctccttcctcttcgcatcatgttctggcctgtattttttataatgaaatctagtacaataaagttttcctgattttatgctgtgtcctgtcgttagtaatgtctgttttagtacacaccttaattatcaagaacatggcttccaaaagttttaagaaactagctattttaattttggtttggcacagacacacatgcttatcagcatagtttagatttatttacactatttcctgcaacttcttctatgctgctagtcaattacttaactttaggagagttgtcgtagacatcttcctttttaatttaataagcatgttacatgcaaaccaaaattatgtagttaccaaacaaacataattttgaattcaagtaggtgccatatagttcctttgattgtagttggctgtagactgtacagggaattcaattgcactgaactccatgaataccaattgagttggatgcttggataaaaatggctgttcaaaactctctccaaataactagaagtggtagtggtggttatgacgatgacgggcgtgctaaaaggactggaactttatggagtgctgtggctcatatcatcacagccattatcggtgctggtgttctgtctttagcttggagtacttcccaattgggatggattgcaggaccagtttgcttgcttttttgtgcaattgtcacctatgtttcttcattcctcctttccgattgttacagaactctggatcctgtaactgtgaaaagaaactactcttacatggatgctgttagagtctatcttggcaataagaggacatggttggctggttcccttcaatatttgagcttgtatggggttagtactgcttatgtaattaccacagcaacctgtttgagagccatattgaaatcaaattgttatcacaaggaagggcatcaggctccttgtaaatatggggatgtagtatatatgatgctgtttggactagttcaggtcataatgtcattcataccagatctccacaacatggcatgggtttcaattgttgcggccataatgtcctttacatactcatctattggacttggacttggaatcacaacagtcatagaaaatggaagaattatgggtagtttaacaggagtaccggcttcaaatattgctgacaagttatggttagtcttccaagcaattggtgatattgcctttgcctatccatacacagtcatcctccttgagatacaggacactctagagtctcctccaccagaaaacaagaccatgaaaaaggcctccatgattgctatcctcattacaacattcttctacctctgttgcggatgctttggatatgcagcttttggaaatcaaacaccagggaacctcttgacagggtttggattttacgagccttactggctcatcgactttgcgaatgcttgcattgttcttcacttggtaggaggatatcagatttacagtcagccgatctatggagctgttgacagatggtgttcaaaaagataccccaacagtggatttgtgaataatttctaccaattgaaactgcctcggttgccagcttttcagctaaacatgttcaggatatgttttagaacaacctatgtggtttccacgactggactcgctatcctatttccttacttcaatcaagttataggagtgttaggagccttaggcttttggccattggctatatatttccctgtagagatgtactttgtgcagaggaaaattgaagcttggtctagaaaatggattgtccttaggaccttcagctttatttgctttctggtgtcattagtggccctcattggatcacttgaaggaatcataagtgagaaactaagctaatgaagggtgcttcatttgtttgagtttattgtcttgttgccatatcttccatgtaattcagtttcgcattaattctattactatttactattgagagttaataaaggggataccaattatgtggggatgtgtcaaaatgaaggtggtgttgagcatggtatagttctgtttggtgaagaactccctttaaaggtgtaatgctacataaacaactctctatgcacataaacttgtattgataagcaattattagatttagctgatagtgaataaagtggtactgtactctttggaataatacaagttttgttttatgcagaactcacctcaaaggagatagttcaaacgaatttgtagtttgatattgactgttcaaaaaaaaaattattaaagtattactcataacaactactaatacttcttattacttcattaattaaattaattatattaaaatattttattaaatggggcggcctcttttaatgatccaaacttacttacccttgcttccaacgttttagctttttttttttgtcacctaaattaaattcactggcctcttttttacaacgtttttttctttaatataccttttcttt

SEQ ID NO: 60772 - DNA, 310 bp, Glycine max
  Clone ID: PAT_MRT3847_2588C.1
ggctcgaggttctaatcgcgagcggccgcccttttttttttttttttacgctcttcacaaactataacctggattctaacatatgattacaacactgaaactatacaaccgtgccttataaatgcaacgaacccacggactggactgggcagcccaatcttcataaccactatagatatccacgcacacgctaaagagacttggaatctctacaaagattaaacataaaactttgaggaattcttacggatccactgatttgactgcctcttaggacaatcatctcgaatgatatctaccatgaacttac

SEQ ID NO: 60773 - DNA, 417 bp, Glycine max
  Clone ID: PAT_MRT3847_25890C.1
cccacgcgtccgcccacgcgtccgcgggttcttccgatttatatttttttccccaaggcgggggacctccttcttcttctagcgtagtttttctcttccatcttcattcgtttcttttcccttaacttccaatcttttagtttcaaaatctctcttttaatttcgagaattatgagacccgcggttgaaggatccatggccgagaggtttgacgactgcgaaaaggagaagaagaagaagaagcgccgatccaatcgacgatccaagcaaaaccctccctcatcttcagcatctgaagtgaatgacgcccaggggttgtcaccagattcatggaaaattggaacacctactcatgcttctccatccttgggcaattcattgtaccaggtcaatgtgtgttcttctaatgagcaagga

SEQ ID NO: 60774 - DNA, 478 bp, Glycine max
  Clone ID: PAT_MRT3847_25892C.1
ccctgtactcgatgtagcttacattttttgtgttttcttatttcgtggggcaaggagcaatccccttggagtctaaaattgcatccctatcattgcaccaaatctttcaacatcctttataattgcagggctccttgttaacaatactgtaatatgacctctaaatttcaaacccttaaactctccaatccccgctctggagaactgacccatattgccccaaaccccttcaaagtcccgaaaagttattttggtttcggtgtgaaaaaaaccccacattttcggagtcttgctgcgaatctcattccctaaccccctgcaaactactactattggtttaaacctcatcttcctgagggtgttccccatcttcatactcatagccctgatcatcagcagatgcatcttgggattgctggtactagcacacaaggtgcttcatgttgctctcagcttcaataactccattttatccata

SEQ ID NO: 60775 - DNA, 752 bp, Glycine max
  unsure (1)..(752): unsure at all n locations
  Clone ID: PAT_MRT3847_25893C.1
gttttgtcgctagtaatctctgctttagtacacacctatttataaggacttggcttccaaaagtacctatgttaactttggtttggcacagacacacatgtttatcagcatagtttagatttattcacactatttcctgcaacttcttctatgctgctagtaaattagttaactttaggagagctgtcctagacatcaaagaagagtcctttatcaattttgaaaaattcatataaaatgatatctccctttctaatttcataagcatgttacatgcagaccaaaattgtgtagttaccaaacaaacataattttgaattcaagtaggtgccatatatagttcctttggtcgtagttagctgtagggggatgtaattacagcgagctccatgaacaacaattgagttggatgcctggataaaaatggctgttcaaaattctctccaaataactagaagtggtactggaggttatgatgatgatggacgtgccaagaggactggtaaaaatctctaggaccataccatatccattccatactcataaacttgaatttgagtcctgaattttagtccttccaccaattataccaggaactttatggagtgctgtggctcatatcatcacagccattattgggtggctggtgttctgtctctagcttggagtacttcccaanttgggatggattgcaggaccagtttgcttgcttttttgtgcccttgtcacctatgttcccttcttcctccttt

SEQ ID NO: 60776 - DNA, 176 bp, Glycine max
  Clone ID: PAT_MRT3847_25894C.1
gaatttgggaattattgctcccatcactaatggattcattgtcacgtcatcacattagtatgggtggggcctatctctggacgggacggtcaccgctgcgacatttggaccggctgtcatgagatgcacctggacaaatcaatggatgtattgggtcagttcacccaacggttcat

SEQ ID NO: 60777 - DNA, 2609 bp, Glycine max
  unsure (1)..(2609): unsure at all n locations
  Clone ID: PAT_MRT3847_25895C.1
gtatctttattgggccttatggtctctctatcattcgtcatgttcatgggacaaaagcaatagctgaatttggagttgttttcctgttattcaatattggcctggagctctcggttgaaaggcttagttcaatgaagaaatatggcccagcttgcagtcattgcaatcactgttgaagaagtttcttcaactgcaaagcctctggttagacagcttcgattaattatatcattacatcattaccttctcgtccgggacgaggaagaagcctccctttttgacatgctctggttacttcctagtcattacaaatacctttggacttttgatatattccttgacggaggtccttcatttgcttgcctggcttgttggattttcagtggtctgtaccttctctctggcttttcttattgttatgggagaagaatattaactggggtctgtgtggtattctttctatcaaatcatagcctcttgctctatgttggaaggcttggttcgaggaagggatatttctttggatctcactctatgcctagctgaaggaggtcagctccttgcttcccgttttgagctgcatgatgttcgaagtttattgcctgtggaaagtgagacagatgatctgcaaaatcacatcataatttgtggatttgggcgagttgggcagatcattgcacaacttctttctgagcaacttattccctttgttgcgctatacgtgagaagttctagagtggcaattgggcgttccctacatctccctgtgtactttggagatgttgggagtcgagaggtgctacacatggtgtgggctgaaccgtcgagttctgttccataattgctgggggccgcttgagccaattataaatcagtttggggtctgctgaagctcctaataaacgttattgattctgccagtactcaggttgtacatcatggttcgaattaaatgacagctggtgcagcaattgctatggcagagccaggagcaaattctagtctactaccggcagtaactcagtttttcttaaaggttcaaactgttattggtccatatggtgttaatcttttgtggaccttctttatggctgatggaatgtcaattgatccaaaaattctagtttcaaactttccagtcaataatggcgtactaggactcttaatatgtcgcaaaacaattttggtttgtttgattaaaatatttctggggatttctctcatttctgtcatcagagttggtcttcttcttgctcctggtggggagtttgcatttgtggcttttggtgaaactgttaattatggcataatgtcttcccagctgtcatctttgctgtttcttgttgtgggcatttcaatggccatcacaccatggctagctgcaggaggccagctgattgcttcccgttttgagcagaatgatgttagaagtttattacctgtagaaagtgagacagatgatttgcaagatcatatcattatttgtggatttggacgagttggccagatcattgcccaacttctttcagagcgtcttattccatttgtcgcactagacgtaagaagtgatagagtggcagttgggcgtgctctggatctccctgtgtactttggagatgctggtagtagagaggtcctacataaggttggggctgaaagggcatgtgctgcagcaataactcttgatacgcctggtgcaaattatagaacagtttgggctttaagcaagtacttcccaaatgtgaagacttttgttcgtgcccatgatgttgatcatggattgaatttagaaaaggctggagctactgctgttgtcccagagaccttggaaccaagtcttcaactagcagctgctgtgctttctcaggctaaactccctacgtcggagattgcagctactataaatgaattcagatctcgacatctggctgagctcactgagctgtgtgaagcaagtggaagttctcttggttatggatttaatagaattatgaacaaacccaaatctccatccccagattcattagatgagacccctgtctccgaagggacactagcaatatgaagagtggcgcatatatacaaagtagatggcagaagaaaaggagaactagggaaaaaaaataattgtcaaaaaaatgtatagcagatcattggttccattgttatgtacagaaatatagccaaaattagttttattttctcttttcccataaaattttggttccgggcatctcaaattcctgttaaggatgatatcatgttgctgtagttgtattgcgccaatggcattattttcatttgccttggtgggttttttcacgtcaaaatcgtatagaagacacaaaagctagtattattagcttcacttggatggatgcggatcctgcgtcctccaccctcaatatgtgtccaaacacattgtcataaatatgcgaatgctctggacaagtagggcaactcctgcaggtagatagttgatgatcctcaacctcatcgtagacattagtttttgttgttgtattggaaagttgctacttgtatatctactcaaatctatgccacccccaaacttgttttccaataataaaagaaaaaaannaaagggc

SEQ ID NO: 60778 - DNA, 236 bp, Glycine max
  Clone ID: PAT_MRT3847_25896C.1
cggctcgagctcgagcgaatcggctcgagacctttttggatggcattccattgcactgagaagccagaactggcagaaatcatataaccttcttgaacgaacacagaaaagtaggaaaaaagaactgagactagttctttataaattgactgcagctatgagttccactaaaactgctatactcattaaatcgagcattatgacagttaacaatgaagctaggtctttataagttg

SEQ ID NO: 60779 - DNA, 343 bp, Glycine max
  Clone ID: PAT_MRT3847_25897C.1
ctcgagccgaatcggctcgagcggctcgagccgatcgccaccttctacttttcggcgactctcttctctcgcagtgcaccaatgaattacactatcttcgttctgtaaatcaacttcacagtcactggttcgatcaccatgctctctcgtttaattcccaaaccctctcatctccgtcgctttctctctattccgttgaaaccgtcccacacggctgtgaatcccttcttcaccgtcgtcgttcccaaacacttctccaccaaccgtggcggcggcaacgacggcgatggcaaggaccccttttcctcccgcgtgtggaaggatttccgggagaccgaggaga

SEQ ID NO: 60780 - DNA, 2190 bp, Glycine max
  Clone ID: PAT_MRT3847_25898C.1
attaaaattaaaccatatatttttattcattattttttacaaaaatacagcatagaaaactcaaataacagaacagaaccccccacccccccaaaaaaaatttattaaatatgaaacaagatcatatacccccatctgtaccagataaataaaaaaaattatatataatacagatattatataaaaactctcagagattttttttatcctgccacaagttaaattatatatttctttataggaaagcccatttcctgttcaagagaaaaggaatgagagatttgaggtatgtcattattgccttgtcttctgcaaccttgttccaatcatcttgagctcaaatttcttgattaccccagcagtgtccctcattgtggtgtccatcacataaggaattttgttctgggtgacttgtgttgtgttgacgagtattttacatgtttctctcctttctgatatggttccatgatagtggaagtatttgatcctaccttcagttttgtgtgttgtctttcctgatagatccattgacatgtgcacccctgttgcatacaaactccgtggttgcactgcatattttcgatctctacgaattcctgtaattgagtctctatacacaagcttttcaacaaaacattacctgtaagttttgccgtaatcctcagagaggcaaatcttgctgctcataggcatctgttcaatggtgaactggtcgtattccgaaagtgagtgaagcacggacttgatagtagtcttaggaggcacataaatgtactcatcaacatcgaaaaagaacatccacttggccatgaacttgtatctatgaagacaatcattgaccaccatgaactggttatgatagtatccatcaaacctctcttggtccctaatatcctgcaatgtcacaaaccctagttccatccacggcttcagcacctcaagcacctcctcatgcaccccaccagcatcatgaatcacgaaatgcgactttggcccgaagaacctcacgtggtaagcgatccactccctcaccctctgagggtttaagttcccatagagagaagagccacagtagaagtagtcatacttaggctttgacatgaaaagtgaagcgtttaaagctcccggtgcttcatggaggacctctattctgtcggtgacgttgaagccagtgtcaccggctcctgaggtggaagcatggagcaccaacttgccaccggtgttgtcaccattgacagcggtgccgttgaaggtgcagttaactaccaccacggtgtagacgtggccatagccccagtcagggaggtacttgaggccttttgtgatgatgggttttgaagagttttgcagtgaagggagatcagggatccattcacacacgtaggtgggtttgccataaacgtggagtggcttggaagaaaggccaacgatggcgaaggtgttgagtcctcctctgtatgctcccatggtgatgaagttgtaggccgcggagccgtgagggttgaagacacgcttgatggtgccattgggaaggtgtttttgggtggaagagagtggtgttgggggtgtagaaagtgatgtaaagggtggtgggggtgtagagggtggtgggggtgttagggacacccttgagatgcagaagcggagatcggaggaggaaatggtgaaacgcgaagggaggaattgaaggagagtggcaacaccacaaagaaggaagagagttgcgagaagaagctttagttcagctgcgtagtttactagtgaccctacaaagaagaacttcttctccctctccttgttggccattgccattgctatgttaagcacgttctctctctctctctccctctccctccctggttttaagaagagggagaagagaagatgggatatgaatctgagaaagtgttttgttgtttcttttggttttggtttggatgcaggggtggggtgtgtcttgcttgtcttatattatgaaactcttgcttgcaaggtttaggggcagagagttgagaagttgtgattgagatcaaatctgatttggtttaggaaagaatatgatgtgattgttgatgattgaaggttctgtgtcaacttttgaaattgaacctttcatctaatttgatttctaagggacaacagaaagatggggcggggcattcctaagttaggagttaattactcattatg

SEQ ID NO: 60781 - DNA, 591 bp, Glycine max
  Clone ID: PAT_MRT3847_25899C.1
atattaaaaagacgcccatgatcatctttttattcgaaacacagaagcaaaagagagaaaaagaaggttcataatccatgtacatcgataaaataagcatgctttgcttgcttggaagcttgctagcttcctctctcatatagttcttcgattcacaactatataattagtactctaaccttgcaactctttttccaatgtcctacatccttcaaaatacagcacaagatcaatacaaagcaggttgaatttgattattagatccctcccaccatgattcagaaaggtgctcgtccatgagcccaagcaagagcttcatgccctacctgccccactcctccatttggtggaagattatacaaaggcatagatgatggatctggcatcccaccctgcaactgtccacccccactgcttccaattccaagcggtgggggtggcgacgatcctccaccttgcgcccccgccactgaactgggcccctcatcatcctcatcaagtggaagtctctcatatgttgcattagcaaaagttgcagcaatgaccatcactggtcctgctgcaactagagatccaaccacactcccttcc

SEQ ID NO: 60782 - DNA, 781 bp, Glycine max
  unsure (1)..(781): unsure at all n locations
  Clone ID: PAT_MRT3847_2589C.1
ttcagggcccgtatgctgcatattttgacnacatgctgttcactgcagggtttcttactttaaagaactcgtttagtagctccctaattcccacctctgcttgtgtttcttgggttacaaacaatttcagattcaaatgaaacttttcagttgattggttgagtaacagatgtgagattggatgtaacagacaaaagtcttgtgccttcttaatgacatacacaagttgtatctcgagggaaatctacttttgttggtagctgaatcagcttccgccaaaatgctcagaaatggggttattccacttcccccagcaaccagaagaagggtgtcatatctcaaaaagtctaatgaagcaggtccataaggtccttcgatagcaatcggtattcccttccttttatctgcagttttgtctagttcagcatggatcagatcataaagagaattagtccaccacccttcacatttaattatcacagataaaatgtgatcatcagccctggaactagatatgatactgaaagagtgccattgaagatgagatatggttggaatcttcaaaaatataacactagtagggttatatttcatccctggatctttgggcagaattagctccagagctctgcctggaaaaattctagctgaaaccatgcaagtttttggacttgattgtatgattcggatcagtttatcaaggctaaaaaggaatattcccgggaagacagtataaaagtgcctatccccaacatgaaacaagaaaagtactagaaagact

SEQ ID NO: 60783 - DNA, 219 bp, Glycine max
  Clone ID: PAT_MRT3847_258C.1
ggcaagcatccagggctacttttgaatttttgtactgacacttacagggtttgacaactccctatcgtcctccccgatcgaggaaatataacgcatagaacagattgccatgcctcacatatccatgggtctgctttacgtcgctacgcgggagtcccagattggaggcacagctgtttgatgctggacattatgcagcccctcctggtatcgcttaca

SEQ ID NO: 60784 - DNA, 491 bp, Glycine max
  Clone ID: PAT_MRT3847_25900C.1
cttggagaaaggaagactctgcaatcacaagaatgtgacaggcttgatttggctgatgattgtcaactaggtgaaaaatcaaaggatacaccaatagctccttgttcttccaagaagcgtagatttataacaggagattatgacttaaagcaatattttggaaattctaatgagcattcatcatctgctagccaaagtgctcaaggtggtgtagatctgcgacataaagatggggtggcctctgacagtcttgagttgattagacaaaagggcaatcttcctgatgattttgtgccttctgttggtgatgaaaccaaaggatcagcattccttgctcaggttcgagataagcttagtgctgcagaatatataaactttgtgggttatatgaaggcgctgaaaaccaaaacgatgaaaattagtgaagttttacagtgtatttctagattgttcactggacctgacaggctaccacttcttaaaaggttcaa

SEQ ID NO: 60785 - DNA, 1017 bp, Glycine max
  unsure (1)..(1017): unsure at all n locations
  Clone ID: PAT_MRT3847_25901C.1
atcaatggtgagtctgtcagagattttatacactcgagtgtaaatatctttacactatcaactaatcaatggtttacgtttcaacgtgatatgagaatggtattatataggtagtatctgagttaagctcatgatagccaaattagaagccctgcaactgcaaccaaactttctaacaatctcttcccgatataagacgcactattcttcttagctgtcgccgtttcatctgtcccctgctttctaccattctgggaacttccttcagcagaaggagtgggcgaaggacggagagaaccaccattggatttctgaccaatttcattaaaagcttgagcttcaggtgatttaggatccaagtgcagaagtgccgagcactgtgagagattatcaggtgttttgcaaagagaagggagaccagcagcaattgtcatgttaaacggctgcgagaagacgacagaagggctgtctttgagaataaggcagacacacttcttgttggtcttcatggcttgtgtgagacaactgcaacaatctgctgtgggtgctttcgcgtcagcacccaaatatggcagacacgttgcaacacctgtcagggattctgcacatttctgtttgtctttagctgaatctcccattgcatgactaaccaataccaatgttattgctaacactagcaagtgtggtagacaagcatttgaatccatttctcaatcttgatgaatgaatgagtggagatagattatattatagtctatagaaaaagttgtaggtagaaattgttaggttgtggtgctacatgtaaaatataggtttttttgttttaatttattagaaggttctgtagtgtgttatgttttagaaaacatgggaattgggaaggaaactggtagatgaaaataaattctgtggtttcactgtgagttcaatgaagaagaccagtttgttgacttagtctggatcacttcaattttgtacaacaccaattgtncactaaagagttatatactatttctc

SEQ ID NO: 60786 - DNA, 764 bp, Glycine max
  Clone ID: PAT_MRT3847_25902C.1
tctctgacataatcataatccttccaagttccaaagtcctcagacatgaaagggtctttatatgttgctgatgcccacatgttagccacttcttctctttctatgagtaataaagccaacaacccttttgttcttccttgtcaaacccttgtctctcatagtagtgtgagagatttgagcttcaaggtcagcatttcttggccttaccatgcttcttgtattgtgcaacgacaaaagaatagtaataacagtggttttgttgtggtagggtgtgcaaaatggggtttggaagctgagatgaaaccacaagaagatgatgaggaaaagggtaggagtagaatggcaaggtttagacacaagtgtggagaaagaaagggggttgtggcgctgttggagtggttggaaagggaagctataatgggtgaagatgtaggaaaagagcctactgattacaaccgaagggctcagatatttgatagaagttctcaagtgttccaagcactcaaggaactcaacaatgatgttttcccccaagagtattcaaagtaaaaggaagtagctttggattgattttgatgccatctttgtatttgaaataaacaaatagtggcatactgtatcatagaattaggatgctttgatgcattaccaagtagcttattatagtactcagaatcctctctcttgtacatgctgtgtctttttttgctttttgattgttgagaaaccaacctatatatccaaaacactttgttgaccttcat

SEQ ID NO: 60787 - DNA, 341 bp, Glycine max
  Clone ID: PAT_MRT3847_25903C.1
tttttacataaaaggaggcattcatgtgcattgcaattcataataatgactaccatccgtgtgggaggatccataacatgctacagatacattaccgctaatacttactattttagtccacggagtgcatcatggagtgacaaaaacacaagtgtatgacagttccatctgaacctaaatgtgattttctactcactacaaaggcagctgtgacactaaaattaagggcaatgaccaaggcagcatatttatatacattaaacaacacgatggctgctacatatttcatcgtgagcactactcgttaagacaacacatattttcgataaaactataaaccc

SEQ ID NO: 60788 - DNA, 226 bp, Glycine max
  Clone ID: PAT_MRT3847_25904C.1
tcgcttttttctgtcccccccggttgctgaacaccgaggggcccctcatcggagcccaaatctgctatccctctctttatttagtttgacggtaacctgctcttcacccatggcaagatctagttgaatctcaaccggttcgaagctgtactcactcaagtccttgacaaatttgggggggttgattgcaatgcacactctgttgatccgattggcccggtcgaaa

SEQ ID NO: 60789 - DNA, 403 bp, Glycine max
  Clone ID: PAT_MRT3847_25905C.1
ggctcgagctcgagcctaacaggctatgagcactgcattgagggcggcgcattccataaccttcgatgcactgacaccagtgctggtacgaatccggtacccactagtgccttttgctcctgcactgtcacctgctaacaatgctctaccacataggacgatgaactgcatctatgtctgtcacaagcctacgcgctgatggcaccggctagaacacattcgcaccctatggcaacgccgatcacaccctggcctctggctagataccaatgcccctctccgattgctggggtgactgtacttgcgcgttttgctttattgtctgtggtcgcactgctagaacagctgataaagatcgaggcatgctacgagaacagcctgtggtgatgcacaggaacagccc

SEQ ID NO: 60790 - DNA, 262 bp, Glycine max
  Clone ID: PAT_MRT3847_25906C.1
aattcgagcggacgcttttttgcccgtcatttctcttttctcctggcccggtacaaaagtacatccgaaccatctcatgccaaaaatattgtctttttgaaaaccatcttttttaatgcatccaatttccttttggactatccagaaaatcttccactctttgtaaaatttattttggtttactatataatcttgggtacctgaacaataagattccccaaaatattattttcacttaggaattctcattgacataaacatt

SEQ ID NO: 60791 - DNA, 227 bp, Glycine max
  Clone ID: PAT_MRT3847_25907C.1
ccaatgatgtttctggctattttaaatgcttctccaaagcggcctgcatgcagcggttctttaccgtggatgctacgtccacctcattttcaacagtgctatgatcaacaacaccaccatcaacatcctcagtctttgggaactcctcggcggtctgagtatgatccgtcatccaagcccatcaaaggggtttttggcccacgctcatccgatgttgctatggatct

SEQ ID NO: 60792 - DNA, 518 bp, Glycine max
  Clone ID: PAT_MRT3847_25908C.1
cctgtggcagagccataatagaaacacattattctgaacaattgtatgcgtcaagttcatcacaaatattcctttttcataaattgacaaaaccgtatttcaattagtgtttatataagggtaatgtttctcaatttcatccattgaaatcagaaattccacatttgcattctatttctttgtatgtcactgtgtttgtgtctacattctcaagcatccactcattcttcatgtcttggcataaccacgagaaaacttttaatgcacagttggagtgcgcatgaacaggaactcgaatgatttccctgatcgttcaaattctagcatgcttagagcaacttgacaactttgtgagacatgaggctctggatctgcccaaaactccctaagaagggctacacattggtcatctgcaattgaaccaagaagcttaacagccctatgccaaaccattggatgctcattcacatctttaagcatattggatagagcagcttgaacaggtttgtcttgcaatt

SEQ ID NO: 60793 - DNA, 1079 bp, Glycine max
  Clone ID: PAT_MRT3847_25909C.1
ttctgcttcagcagagtcaggttcaggaatactgcagacacctaactatgttgcccagcagtggcaaactgataggttaggcgctggtttaagttccttggatcaagatcgtcctgataaacttgcagcttcagcacagtcactatcaattcccctagtagctcagcagtttcttccaagttctgcttctcctggtgcctttcctgggtccatggctataccatcttctgttcaaccagctaaccaagctcctggtgctcatttattgccccttccttcatctgacacccctgaacagttgccaccatatccattattcccacctggcctcattcctggaatggttagaaagatgcagattggtagcggagtcccatattctcctttgagccctttggatattccaactataataccaccatcgactgtaccgccatcagaaattcttcaaagagtgtcaaaattttttaaagaaattggagaggtaaatccttctgagggccctatgaattccgattcaagagatgaagatgatgaatatgatagagaatatgagagggagcctccaatacgaaagggaggtgcttgtatacctccacccccaaccttgcaggttgatccagagacgggaacctatgctgatggaagtgtagaacggaaaccaggatccagtggctcgggaagattggggcttggggccacagctaatcccaatgaggtgagtcagtatgatgatgtatatacatcttacaggaagcacagaagcaccaattaccattcatcaatgagtgctagagccgccacaagatgaaagcctctaattaccttttcatccaacatttcagattccaggatgttagactagctcagttagctttgtctttattaatgtttttttgaatggctgtagttgagctgacacttttgtttgttatttgccaatggtcaaatgtgctttttcagctgaattcatggattggatgtatcattccttgaccaaaactgaatattccataaactttaagtcacacatggtaatgggatagaaaatgaatgataatcccattttcctctaaaaa

SEQ ID NO: 60794 - DNA, 102 bp, Glycine max
  Clone ID: PAT_MRT3847_2590C.1
ctacacttaaaattacaattttagcgtgggaaacgtcgctgttttatttatgttcaatgcagtttgacaactgcagaaaatgacatatgcagatattgcgga

SEQ ID NO: 60795 - DNA, 753 bp, Glycine max
  Clone ID: PAT_MRT3847_25910C.1
agtagatggaaaccggggtgcagcagcactctttgtcaaggtcagcatggatggtgctccctatctgaggaaggtagatctaagaaattatacaatgtaccaggaactgtcttctgcccttgagaaaatgttcagctgtttcactctaggtcaatgtggttcccatggagctccaggaagagaaatgttgagtgagagcaagctgaaggacctcctgcatggttcagaatatgtactcacttatgaagataaagatggtgactggatgcttgtcggagatgtaccatgggatatgttcattgacacatgcaaaagactgaaaatcatgaagggttctgatgccattggcttagctcccagggccatggaaaaatccaggagcaggtgctagttggtattggaacatgaagagtgtggaaagagaacttatgatataaatgactgaatgccgggttttgatggttaactgctattcaagatgttgtctatggttacaagtatcataatagtgtcttggtcttttgtttgtgttacatttgtttctactataataccttatgaagctaccttgaatattagtaattgtggagcttgtaatctttataggaacatgtttgtttggataagttgaatgtatgttgcaatcagtgtattgttttcaatgttttgctattccttagcctttctttcttttgtcttgaaagggcattttctcatgcctaccaagatgattcaaatgattccttagagccc

SEQ ID NO: 60796 - DNA, 713 bp, Glycine max
  Clone ID: PAT_MRT3847_25911C.1
gcatggatggggctccctatctgaggaaggtagatctaccaaattatacaacgtaccgggaactgtcttctgcacttgagaaaatgttcagctgtttcactctaggtcaatgtggttcccatggagctccaggaagagaaatgttgagtgagagcaagctgaaggacctcctgcacggttcggaatatgtactcacttatgaagataaagatggtgactggatgcttgttggagatgtaccatgggatatgttcatcgacacatgcaaacgactgaaaatcatgaagggttctgatgctattggcttagctcccagggccatggaaaaatccaggagcaggtgctagttggtattggaactgttgacttcgttttgtttactaaggtgaagttgctggagatattatgagggtgtggaaagagaaattatgatataaatgactgaatgctgggttttgatggttaactgctattcaagatgttgtctatgattacaagtcccagaatagttcctggtcttttgcttgtgttacatttgtttctactataataccctatgaagctaccttgaatattagtaattgtggagtctgtaatctttataggaacctgtttgtttggataagttgaatgtatgttgcaatcagtgtattattgttctcagtgttttgctaaaaaaaaaaaaaaaaaaagcggccgctctagaggatcca

SEQ ID NO: 60797 - DNA, 262 bp, Glycine max
  Clone ID: PAT_MRT3847_25912C.1
ctcgagcgtgcctatcgggaaagcaaaattacacgcatgctgcaggattccttgaggggcgatagcaaaattttgttaatttcatgcttgaacccatcattttgccaagacactatttacatggttagcttggcatcacgatcgtgtcattggattcatcgggcatctttagattctaccaagataagtgcaagttcagcaaaacaaatggtgaattctcataagaaccagatacctaaaagtgtttcaggaacagcaaaga

SEQ ID NO: 60798 - DNA, 409 bp, Glycine max
  Clone ID: PAT_MRT3847_25913C.1
aaaaacaaaaggtcccacccattaattcccatggggggccgaaaacagaaaccaaaaatgcgggggggggaaatttcaaaaggcaaaaacaaggggggagggggtttaaggacaaacaaacaaggggggggggggggtacaaaggcttgggaaatttttaacacttaaaacccggggggcttgggggggaaaaaactgatgccctgcccttgggaaacgttgtcaaatccaatgatacggatgaacccgggggggtatgcaattttaacctttggaagctccttcaacccctgggaagcattggggcaaccaaacatggggggtttccaaaggggccagagggggccatgggagtatccgggggaccgggggggctcaggggacaaaaaaccgggctccaacttgaatt

SEQ ID NO: 60799 - DNA, 1436 bp, Glycine max
  Clone ID: PAT_MRT3847_25914C.1
aaaagaatggcgtccgatgtttggcacatcttcaattgccttcctctcttcacgataccactcttcccaatcccttgccaccaattctccctctctaaccacagtgcaggtatttgggcgcaagttttgcggaggaaatggatttcacggcgtcaaggttacaagtgttgttgccactcaacttaactctgcacaacaggctcagaagattgcttttaacgagagccagaggccggtgtacccattttctgctatagtgggacaggatgagatgaagctttgccttctcctaaatgtaattgatcccaagattggaggtgtaatgatcatgggggacagaggaacggggaaatctacaactgttagatcattggtagatttgcttcctgaaatcaaggttgttgctggtgacccatataattcagacccagaggatccagaattcatgggtgttgaagtgagagagcgtgtgataaaaggagagcagcttcaggttgtcttctccaaaattaacatggtggatttgccattgggagctacagaagatagagtctgcgggacaattgacattgagaaggccctcactgagggtgtaaaggcatttgagccaggtctactggctaaagctaataggggaattctgtatgttgatgaagttaaccttttggatgatcacttagttgatgtattgttggattctgctgcatcaggttggaacacggtggagagagagggtatttcgatctcacatcctgctaggtttatcctaattggttcaggcaaccctgaagaaggggagctcaggccacaactgctggataggtttggaatgcatgctcaagtagggactgtgagggatgctgagctaagagtgaagattgtggaggagagagctcgttttgacaaaaatccgaaggttttccgggattcttacaaggcagagcaagaaaagctccagcaacaaattgcctcagcaaggagttttctttcttctgttcaaattgatcgtgatctcaaggtaaagatatccaaggtatgtgcagagttgaatgtggacggattaagaggagacatagtaacaaacagagctgcaaaagctcttgctgccctcaagggaagagacaaagtaagtgcagaggatattgctactgtcatccctaactgcttgaggcaccgtcttcgaaaggatcccttggagtcaatagattcaggtttacttgtcctagagaaattttacgaggttttcagatgaacatggtataacatgttctgtctactactcttgtatttattcaatattttaccacttcatcttttacatttttgtctttttctgtggggattttcattttccttgaaattaacatgaggaagattcagaaatcccgtgtataaacgaaaatttctggccttttgcattatacggtttcaggatc

SEQ ID NO: 60800 - DNA, 184 bp, Glycine max
  Clone ID: PAT_MRT3847_25915C.1
tcaagaaaaatacatgaagaactccaggggagtgccactcttcacttgcatatggctgcctttctcttctccaaagggcctggttttactttgccatggttattggatggaatgcactgggttcatgaaagaatgtggtgtgccgcgtacgtgtgcccaatatgctgggcttggtatggattat

SEQ ID NO: 60801 - DNA, 246 bp, Glycine max
  Clone ID: PAT_MRT3847_25916C.1
acacggtttacttaagatcaaggagttgtgctgttgtattgactccatacaggtggtttcctgcacttgcagtggttaaattctgtaagacttggtatttaatcgtggggcttctcaacaagatgcttttactgagatatcacagttggtacaaagtgcgcttgatgggtacaaggcttatgctctaggatacccatcaaccgatgtgaagtggtttactcacaaaattagacttcaatttgatga

SEQ ID NO: 60802 - DNA, 585 bp, Glycine max
  unsure (1)..(585): unsure at all n locations
  Clone ID: PAT_MRT3847_25917C.1
ggcgcataagtgccataacaaataaaaagaatggcttccacgtttggcgcatcttcaattaccttcctctcttcacgatactactcttcccaatcccttgccaccgattctccctctctaaccacagtgcagatatttgggcgcaagttttgcggcggaggaaatggatttcacagcgtcaagggaaggtctctgttcccggttgcgagtgttcttgccactcaacttaactctgcacaacaggctcagaagattgcttttaccgagagccagaggccagtgtacccattttcggctatagttggacaggatgaaatgaagctttgccttctcctaaatgtgattgatcccaaaattggaggtgtaatgatcatgggggacaggggaacagggaaatctacaactgttagatcattggttgacttgcttcctgaaatcaaggttgttgctggtgacccatataattcagacccagaagatccagaattcatgggtgttgaagtgagagagcgtgtgatnaaaggagagcagcttcaggttgtctcctccaaaattaacatggtggatttgccattaggagctaca

SEQ ID NO: 60803 - DNA, 160 bp, Glycine max
  Clone ID: PAT_MRT3847_25918C.1
gtcgggggccgcctttttctttgggtttacaaacccaagcatcattgcctgggattatttattcgtagtagataaaaaataggtggagctcaaagttttaaaagttaccatgggcatatacattccaaccttaccgatgagctcttacaacatcacatta

SEQ ID NO: 60804 - DNA, 508 bp, Glycine max
  Clone ID: PAT_MRT3847_25919C.1
aaatataaaaatgaaattatttattagaatgtaataaaaaaaatgaatgaagagaaatttatttaataggtaaaaatgtatccatggtttccttagactgtatgagcggattggatgagattctggtcaaagtttttgagtctgagaacagattgaacatgtcctctgagactgtgtatttctcccagcctggctatttcagcacgtcttctggccttttcagctatcaaagaagacccccttccattctcctcctttgctgccctttcttcttttccgtagtctttcttatatgtaaacgctgtctttctttcaaatatcagtttccaggcttctccactcaagccataccgcactgtgaacttgattatgtccaacggcacatagaagattatactgtacagccatatcactccagcccatctccatccaattcctcttattttcccaaagctgatatatgcatacacagcaattatggtcgccaccagttgagctattctggtgc

SEQ ID NO: 60805 - DNA, 478 bp, Glycine max
  Clone ID: PAT_MRT3847_2591C.1
tcggcggccgccctttttttttttttttttatcctttattttttcttttttttttctttctttttttctccgggccctggttttttttttttttccttttggaacaaaaaaaaaaaaaccaaaataaaacccaaaatggcccttccaaacccaaatattgggggccccccgggccaccccacatattagacccaagcccccccccttttttttccttcccatttttaaacaaaccctttccccaaccgggacgggtttcccccactaaaggaccgttacccccataacaaaaactggaccccccccaaaaacttggggccccggttaaacccccaaacaaacgcctaaacaaccagaaaccccccccaaaagcccaaaacccaaatcccgggggaacctcacacgtagcctggaccccaattccccccccaaaccatttgcccccccccaagaaacacttaaaggaccaacttccccc

SEQ ID NO: 60806 - DNA, 186 bp, Glycine max
  Clone ID: PAT_MRT3847_25920C.1
gcattcaaagacgatgagatcagagcttaataaaacactgcgcagaaagatccatagagccccttgcctagaaatgacatttgaagcatactcgggaaattagttcataaagaaaaaggtatatatattagacttgatttgaaagatgattcacatctaaggggacaagacagttgaaaagtatat

SEQ ID NO: 60807 - DNA, 1195 bp, Glycine max
  Clone ID: PAT_MRT3847_25921C.1
gacggctgcgagagaacgccagaggacagcagtaaagtgagttaaaagaaccgataatagttgttccttcactctccgctctctctgccactgagccaagaagatggcctcacaggtttgcaaatctgcttccagagccgcgaggtcccttctatcctctcgttttcactctcaaggacgtgcgcttggggctgctgcggctgtttcattgagcagcaaagtgcctctttttttacggaaagaacggttctggaaatggatccgcttcttcatcatcatcatcatcatggatttcaggagctcttgctcttcctgccgcagcttacatgttccaagatcaggaggtgcaggcagctgagctggagcgcactttcattgccattaagcctgatggagtgcagagaggcctgatttctgagattatatctcgttttgagcggaaagggtacaagcttgtgggaattaaagtagtgattcctaaaaaggaatttgcccaaaggcactatcacgacctgaaagaaagacccttcttcgatgggctgtgtgattttctaagctctggccctgttattgcaatggtgtgggaaggacagggagttatttcctatggccgaaagctaattggagccacagatccacagaaatcagaacctggaaccattaggggtgatcttgctgttgttgttggaagaaacatcatccatgggagtgatggtccagaaactgccaaggatgagattaagttgtggtttaagccagaggagttggttagtttcactagcaatgcagagaagtggatttatggtgccaactgattctttccctcatgccttgggttttctataacaactgctcagtgagtttttggaataaattatttgtcagaatgaactctagaagccataaataagcgcgattgagaatttgagattggtacggttaatatattttaataggaattgcattgtttttatcttttatcagtcgggtgaagacaatgtgtgacaattgccaatacttcaaaatgggtcaattggctttttgaaaagagttgaggatcatttgttcatcctataatagaaaaggtgattcagaattatagggttttttggttttgtcgatgtctatgtgtcgtgttctccaccctctgagctggtgttatagaaaacccaaggcatgagggaaagatcagttg

SEQ ID NO: 60808 - DNA, 487 bp, Glycine max
  unsure (1)..(487): unsure at all n locations
  Clone ID: PAT_MRT3847_25922C.1
ccaggttctgatttctgaggatctggaaccattaggggtgatcttgctgttgttgttggaagaaatatcattcatgggagtgatggtcctgagactgccaaggatgagattaagttgtggtttaagccagaggagttggttagtttcactagcaatgcagaaaagtgggtttatggtgtcaactgattctttccctcatgccttgggttttctataacaactgctcagtgagtttttgaaataaattatttgtcagcggcaatactaatgaactctggaagccacaaataagcgcgattgagaatagtaccaataggaattgcattatttttatattttattagccgggtgaagacaatgtgtgacatttattatgccaatacttcaaaatgggttaattggccttttgaaaggagttgaggatgatttgttcatcctataatagaaaaggtgattgaaaattgnnnaaaaaaaaaaaaaaanaaaa

SEQ ID NO: 60809 - DNA, 181 bp, Glycine max
  Clone ID: PAT_MRT3847_25923C.1
ggctgacttaatgatcttttcctcagctgttaccactgtcaaccttgccggtgccggcttggtagctctattcactggcctcaagtccatggctggctttcccaccagcatgaccatcattgacatttcctccattgctagcatcggcggattagtgcgatgtgggcaggtgtggccacca

SEQ ID NO: 60810 - DNA, 253 bp, Glycine max
  Clone ID: PAT_MRT3847_25924C.1
tttttatgacgttaacttgcttgttttacagtgggaggggttaaagggtaacatttttttctcataacttggcaaatattgcgccttttatttggagacccaaaactaacatgtcttgggtgctatacaaacaaattattcaaccttctcacataatttcgggcgggacaacacttaaatcgttgaggtttttcatgaaaaacaagaacaacctttccaataacttgactatctttgatggcggaaaaggcaa

SEQ ID NO: 60811 - DNA, 280 bp, Glycine max
  Clone ID: PAT_MRT3847_25925C.1
ctggcatggcaactataggattggagtaggagtgacaaagcttcggcaaccccacagaccaaagtctaagtccttgtttcttggacacaggcttagaattagtcccttttggggggagcctcaatgcagtgaaagacgactattcggtgactcacacccaccaagagtggatcgagtttttgcactagggggtggtgaatgagcttgacacagatcataatctctttgtgggtgttgaggtggacttcactgcagtgtgatgcagtgtggtgctctgatc

SEQ ID NO: 60812 - DNA, 329 bp, Glycine max
  Clone ID: PAT_MRT3847_25926C.1
gcagaagcaggataaaacacaggggcaagcacagaggaagcacagaggccaaaaaggaccattaccaaaccatgttacctgcaggatttcgtggaatgagctggcagaaaaaggtgcccagcaacgtagcaatccacctttatttcatcttgtcggctgaggtggcacaattctgttaggattagattccatttgcgttttgtcttttcttccaaggctacatgccagaaaaatgaatcgttagagctcgtagtagaaaactctatataaacagaagagcaatgtatctaaggattcaagcaataatacagatttcctttcctcaaaaa

SEQ ID NO: 60813 - DNA, 264 bp, Glycine max
  unsure (1)..(264): unsure at all n locations
  Clone ID: PAT_MRT3847_25927C.1
agacggccncttttttttttttttttttttggcataaacgtaaaaacttcaattaactatggaaattaaaagtcgttgctatgtaacatgannttngtataataacacctattaatgaatggctatctctacacaaaccttcacgtacttatctaacaatttgcattacccaaattcctccaaataccggaatcataaactcttaaaccattttcaagaacaacccccttcataatcaaaaaacttgacctcttcttttcacac

SEQ ID NO: 60814 - DNA, 986 bp, Glycine max
  Clone ID: PAT_MRT3847_25928C.1
gtttaaaccgggggggaaatgctttagcaggctcttcaaacttagctttgatgacatcagctgtctctcttcggaggccacctggaacagttgtccctgcacatgtcagaggtgagttgaatacagccattattggtcttggtgatgatggaggatatgggggtggttggggtcctcttggtgctcttaggaaggttttgcgtggttggcgaaactagctcggagtgtgttgccttgctgcccagtggcctcagctggtgtctgcgcagtctcttcttcttttgttgcccttcgtaggcccgcttttggactcgctccccgggcagcctgcctttccttccttcggcggaggatatgtatttgctgttagtgtccacagagttcagcttcttcttcaggtattaagtgtaaaacgctttcaccaacagcaacagccacagcagcaaaattcaaatcccgcaccagtggaattaagtcaatctgaaataagtgaaatatgcgactacttcagccgtcgagtggcatcagaaccctatgatgcttctcgtgttgcataattcataacggtgctcactttacctgtggcagtactgagagaattcttgaaattaattgcttggaaaaagggattatcgcaggcacaagttggagatgttgtttcagctcaaaagccacggattgagttatgtcttgaaaatcattctgggttgaatatggatgagaactctgagagctcatctgcattcagaagcaacatccattatgatcgcctgcataattctgttgattttgcgcttactgatgttcttgattctgctcacatccctcatgtcaatgctgctggtggtgctgcatggttgccatactgtgtttcggtaagattgagatattcatttggtgaaagtcccaatgtatcatttattggcatgaatggtagccatggtggtagggcatgttggttacgtgttgatgattgggaaaaatgc

SEQ ID NO: 60815 - DNA, 520 bp, Glycine max
  unsure (1)..(520): unsure at all n locations
  Clone ID: PAT_MRT3847_25929C.1
gcaagactgatcaagtcgtcatcgtctttggagcgggtccggttgggctgttatgtatggccgttgccaaggctttgggagcgaggagggtcattgcggtggatatccagcaggagaggctggatttcgccaaggggtatgtggcgacggatatctttgtcccggaaccacgaggaaaggacgagacgcccgatgcgtactgctcgagaatgtctgaattgatcttgagctcgctcaacatccccgctcttggccctggcggtattgacttggctatcgaggcgaccggagcaccttcgtgtgtgcaaatgggtatccacgttctcaagccgaccggtacctacgttcaggtcggtatgggatccaacatgaccgtccccgtacctctctttgacgtcataaccaaacaactaaacgtaaccggttcattccgatacggcgctggggactaccccttggccatctctctcgtcgaaagaggatnggtagacctcaagccactcgtcacgcaacgatatga

SEQ ID NO: 60816 - DNA, 459 bp, Glycine max
  Clone ID: PAT_MRT3847_2592C.1
gttacaatgagtgtgcctacaacaaatataaatggacaataaacgcaccatggtgcaatcccaaccactaattgagcacactcgcacgagcgagaatattctcaccaggacatgaacggtggaaacgcttgcataatgatctgatttacacgcaccacatgaacatgatgttgcagtatagcaccaccagataaacatatctagagagcgcgtgggtacattctaacctaacctgtacacgagggcgggaaatatcctgtacaaaggcacgctgacattctcccttaaatgaatgcgcggttacaccaaccgactcgcactccaatttacgagcagcaatgatcaaccacaaaccgtcattgcgcttgacaatccagatcggagtgttgtactgcgcaataaattgaccacgcccgtgctgggactcaggccagggagacctactcaggctcgcggtga

SEQ ID NO: 60817 - DNA, 525 bp, Glycine max
  Clone ID: PAT_MRT3847_25930C.1
caaaaaaaaaataatccattcttccatttttaaattgatttaatttttcgttgaatcttaaattttgatttttcactataataataaataataaataaaaagattaagtaaatcatgatatataagataataatcatgatatatgatgcaatataaattcagcaaaaaaaaatgatgatgtataatcttaatattttcttttttgagtttgaattaaaagttcatactctatcaaaacttattaaaacaaaataataggcagatcattggactgttatattttgtcaatgtttattatttcaaattcatacaatggctttttgtttgccatcttttgttaatatatatatatttttttttgtgaaataatagtatttgtttaatatatatgattgcgtttgtttttctttgcttatcaaatagaagcttatgatcttcttatctatattgataatttgagttttcgatataaacgaccagaactttggataacttcataaaattggtggaaattaataaatatta

SEQ ID NO: 60818 - DNA, 326 bp, Glycine max
  Clone ID: PAT_MRT3847_25931C.1
gaataacaaaatttaaaaaatttactcgaaaagccacctaaaaatacagacagggacgacaaccaaaaacaccaattcctaaaaaaaacaatcctacggagaaagcataaaaggtaaaaaagacactcaaaatacaacctgcttaaataacaaaaagacaggcaaattacacataaaactacaaaaacagaaggattgatttaactgaaactccctaaacatgaaacggagactcacagtgagaggattcaactaaccatacaaaaaagcaatagctatatacacaactaacggaattaaatacttccctccgaaacaagcaaaac

SEQ ID NO: 60819 - DNA, 459 bp, Glycine max
  Clone ID: PAT_MRT3847_25932C.1
ggagagggaaaaaagacttttttttaataaatgggggaggttacataactctaaaagggaggcgtgaaatcaagtagtcttttaccaaaagaaaattttttattacccgtatgtccaaaggaccaaaagtagtatagtctttgataaaaccctaaaaaaaaaccaccttttaacgaatggaacaaggataccctaagccacagatccttgtcaaccagctcatgctggattttgtaaacctgaaggagcaaatgagggatgagggaaaccgccttgaaaccaaggttttttttttttttttgaacttctatctttgaaaaggcccctttgggaggggaagcaaacccttccttccttcttgtttggaaaacaaaaaggcatcattttccttttaaaaaagggtaactccatcaatcccttagggacaggcaaggaaccaggaattttccctacaaactt

SEQ ID NO: 60820 - DNA, 745 bp, Glycine max
  Clone ID: PAT_MRT3847_25933C.1
ggctcgagattgttcagtaccggggatgcaatgtggcgtttgctaatttgtgacatgaacgtgtcacttgcttgtgcaatggatggtgacccttcaagcagtttaggtagtgatggcattgctgatggctgttcttctgttcagactgaatcacagtcaaaattagaaacaaaaggtcctgaattgagtcttccaagtccttgtaaatcagtctcctcaggttctcaacctaagaaatcctctgtggaaggaaatactggtttggacaagtcaaagaattctcaaattcttgttggaccatcggagaaagaggctgcaaattctggacgtgattctattgataaatcatctagtacttctgggacatctcaatctcctttggtggaagaaaagtgtggaaatattagaaaggtccattccagtagcactaagagagactacattcttcgacaaaagtcattccacatggaaaaaggctatcgaacatatgggtctaaagggtcttcaagaggaggaagactgaatggtttaaatggattaatcttggataaaaaacttaaatctgtatgtgagcctactaccataaacttaaagagtgcatccataaacataagtaaggcactgggagttgatgtgacacaagacaatttaaatgctgattcttcatttaatgatggaccatcctccccccactgcatttagtctggatatcactgttcctgtttctggccatccaacactttat

SEQ ID NO: 60821 - DNA, 1014 bp, Glycine max
  Clone ID: PAT_MRT3847_25934C.1
cttgatgcctgcgctccagtttggttgtggacgcacccttgattccagttcatttggttccaattccgaggtgattttggcttgaatccatctaaacacttgcacacaggtgcctgaccagcgacacaaatcccaaatgcgccacaagtgttatagtggtcgcataaatcacccggcaactccgaagacaccctccaagtttgactatctgtattccatgttagacgctgacgaacataaagtgattgattcatcacgattcttgaaattattgacttatcagtcatgctatatgtagcataaaattcatccttgtttgacacaatcgtgtaatttactattgcattggatgggacagaggggttaccgctaaatttggtcccatcccacgggccacttctccagtactttgttgtgcccttccacataacctcttcaggataattggtacgtaaagtaatgtctgtgaagtcccctggagaagggtcatcccagtttttccaagcggttaggaccgtattgaggcctttcttcaagtcccatcccaatttcattccgggtagaaacgtgtctgtggggttgtcaaagctctgccacaagtagttttcaggattcgtgtctttctcgtctcttaggaccaagttgcctgagtctaacagttgtgccaccacaacgacaccttttgttgtagggtttgctgaccaaataacggccttgttctgattgagaagtacaaggctgccctctggggttatgtttaacttgctggagttgtctttaattggagtttcacggttggcaacccaaaccacggttctgattggtatgtttttgtaccagattccgagatagcggtttggggacgtactgcctgggatgaagaaacccaactcaaaggttccatcatttgaaaccaaggtcgtgttatcttcaagtgactcaaactggttaatggtatctgttgcggctgcaaatttagagaagaaaaaaattagcttgctgacaagaaggaaa

SEQ ID NO: 60822 - DNA, 245 bp, Glycine max
  Clone ID: PAT_MRT3847_25935C.1
gtcgattcttagtcgattgagttattttctaaacatgtgtttcttacgattctgtgttgaattaaattaatagttcttgtacgtagcataatgttggatttaaaatttcaattttagtgttctgcaagtattttagctcatggtcctccaaaccctagatcgtagcttttaactttgattgaatagtaattatgttttatttttattttttttaccatgtgtatgttatatgatatgatatgatg

SEQ ID NO: 60823 - DNA, 480 bp, Glycine max
  Clone ID: PAT_MRT3847_25936C.1
gctgtttttatttaaagggaattatttccttcgatacatgatagctcattacattttcctggagccttttctaggtgctctgtataagagaaagatccctgaacctgaagagatacacaaaagctgggcacctgaaaatgttcatgttggctattaagaccaacgcctatttcaagatggatgctaaacgcggttattgcttttaaaaaaaaatgctgtaggccttaaatgaaaggaaatcttataggggattcactcttcatggcagcaccatggcgagttcaaaacacgctaatctgcaaactatttttacaagttggtagaaaagcgcaaaaaacttctttataaccaacggctccgccggttttcattagatatcaacaccctcctacagagtggttaaaacaacctgtggcttttaattacctccacacctcgtggtccacaatctaaaggcttaactagaacctccagaagcag

SEQ ID NO: 60824 - DNA, 260 bp, Glycine max
  Clone ID: PAT_MRT3847_25937C.1
cccacgcgtccgacggataaaacaaacaacaaaagggcgaacacgatattcatactcaaattacaaatcttacgagcttgtagaccctaattagtgctaattaactaaacatactttaccttcttccacacaccataatgggaaacattcccgaatacataacggttttccgcttatccaaccttttctttaaacaccttatttaagaaaatccacaccaaattcttttaaacacccctctatattggttatttcacctt

SEQ ID NO: 60825 - DNA, 364 bp, Glycine max
  Clone ID: PAT_MRT3847_25938C.1
ccacgcgttttgtttgtgttgcttacgaggattcctttgaggatgtttcttgaggtgccccacttaatggtgttgagggttggtactatatggcaagaatatctcttgccacatctgagggatttcctcatatgctttgactcaaaagcggctaaaaaggcaaaaggtgattagctcctggagatggggaagagctgacattgattcccgttgccattgtcgtggaggcttacctcaagctcatggaatatcttgtgacatgcgttcctacattaggcgacatggtatgtcccaaggttgagaaactttctggtcccagaaatggtgacacacctaatacacgctggtcacctattctccctat

SEQ ID NO: 60826 - DNA, 255 bp, Glycine max
  Clone ID: PAT_MRT3847_25939C.1
cattcaatcattttgatgcattcaaaagacttgaagcatccaaacgctctgaagggaagtttgaggatagataaccagcattttttgctgttggcggctgctaaatccattagacacaacgaggtgtgaattcttttcaaggatacagagcttgttcatatttaacgcaaaggagcgattcccttcccctgcgtgacaacaattcttgaaggtggcagcttctgtgcatagaggggaatgatgctggggctggcc

SEQ ID NO: 60827 - DNA, 465 bp, Glycine max
  Clone ID: PAT_MRT3847_2593C.1
ggaatttgtcccccggatttaccaagatcaataaaaatagttaagtcagttagttataattaataatatcataaatatttattttattttaaaaatacccataaattaattgatttaagtagtgattatattttgtttttgataaataagtaatggttatatttagtaaggttacatctccacaaattagtataacttatatcattagtgttcttataaaggcatgagaaatgagtgagtgtctgcttaatatatttcacaaaataaattcccctgtacaagacttatgtatgttcttaacagttttgtttgaaatgtaagatgtttagttacttacttcaaagtttccgtattaagtttgaaaaacacctcaagttcaaaaggataaaatttagtttgcctggtattttctacctatgaaaaattagctcagattatttctaccttgatctttcttaatacttt

SEQ ID NO: 60828 - DNA, 672 bp, Glycine max
  Clone ID: PAT_MRT3847_25940C.1
cccggggggacccgacgagtgggaaaaaacagacccaagtctctaggaagtgagggtaatcgaaatggaaggtggaaaccctgcttcaagtggaagaagccaaaatcactttgctctgtgaagaagcttcccaaaatcttctttggcaagtttggagggctcttgagcccttgtttttgggaattgcaagctaagcagtagtagtagcaaggaggcccttcccctcaaccgatggaatgtgccatccaggccccaaagcggcaccaggaccagggcccgtgtcttcaccatctaatactgtagagtcagaaaagggtttaatggaagaagcatactcatatagagtgagcaaaatagggtcaagtccaccaagttgtgagcacaagtgttatggttgcactccatgtgaagcgattcaagtgccgagcaccagcagctggcgcagtcatttggggttgcagtacacaaattatgagcccgagagttggaaatgcaagtgtggcccttccctctatagcccgtgaacgtgaatcaatatactatgtaactatcttcttgttcatacccatttaatatagttgatgtataatcaatgatctcctatctgtctctcaccttcatatttatagttccctcgtgtacaaacatcaattcaaaggattttattatgtc

SEQ ID NO: 60829 - DNA, 463 bp, Glycine max
  Clone ID: PAT_MRT3847_25941C.1
ggcacttcttttttcacgcttgaactacggggcagactagcggaatggaagttacatccatacggggcctgtacgtaaaccctgttgtcttaggctgttatcgaatcccctgctatttcatatgagtaactatccaattccataacagaaagagatgggactagagcttttggctttcttccttcacttcaatcaaggattgctgctagaagggctcttgcccatgtctaatgccttattctattctatgaagacgaagagctggtgctataatcagatgtcggaatagcagctgcgaatggaatgtgggataaaggatgaattgtccaaagccattttttgccttgattaccctagtaaagatataccacgcaaggaagagaataggtaataggcagcagagaggggactgtggcactttcggatcaatgattagcattcatatccagtagatcaagggtag

SEQ ID NO: 60830 - DNA, 387 bp, Glycine max
  Clone ID: PAT_MRT3847_25942C.1
gatattgaagcttatgtataacattttgatttgattctctgtagtctttccaattcacgaaatgctaatatgttatgtatcagtgagatgacagaatgagcttgagtgcccgagaatattcgattcaattcaaataaaatttgttcacccacagcaaatggttaactaacatattttgtggtaatttttctcttctaataaaggtattttttcgaaaatgaacaaaacaatatataatctaaagattaatttttcatttaaaatctactaatgcttaatatttttttcttctattttctttgaatattagcaatgtttttaaaaatagaagtatactaagaagacaaacatgttcaactatacttaagagacaaacaaattataaaa

SEQ ID NO: 60831 - DNA, 404 bp, Glycine max
  Clone ID: PAT_MRT3847_25943C.1
cccacgcgtccgatatatatatatatatatatatatatatatatatatatatatatatatatatacatatatatacttttttccctttacatattatctctttcttatgtgtaaaactataataaaaaattaagtaaaaatacaattagtctatgaaaaaatagtgacgaaggtttattaatcattgccttctaataccaagttaatagtgactatttggaatctcaattgactattgaaaatgattagtgagcttttttttttttgttaatttctatcatcgtatttttttttttttgaaaaaatgagattgatagtgagaactttaattttggttggaaggtatttttaagtgcacaagataaagtcatttactggtataaattgaatttaattagaatgta

SEQ ID NO: 60832 - DNA, 121 bp, Glycine max
  Clone ID: PAT_MRT3847_25944C.1
attaaaaaattttttctgaggcgggttaaaactctaagggctaccaagcaattctatatatatgttcacaactataaataaaggggcaaatgttcctgatcaaggtaaggaccacaaaaag

SEQ ID NO: 60833 - DNA, 2689 bp, Glycine max
  Clone ID: PAT_MRT3847_25945C.1
gtatctcttcgaactccttctcttctttctttctctgacagctgttgtttttattcactttttcaatcttcatttctggttaaaccactactcactctctaaccgtttcctgataatccctaatttgatccaaatgactcacttgtaatttcttataaaaaaaaattcaattctaatcacttcaatcaaccccaatatcttgaacacgaatgtcagacatggatccgtccaaaaaagtggccgatagatatctgaagcgtgaagtccttggtgaaggtacctatggagttgtgtacaaagctattgatacccatacagggcagacggttgcaattagtaaaattcggcttggcaaacagaaagaaggggtaaattttacagctcttagagaaattaagctgctaaaagagctcaaagatccaaacattgttgaattgattgatgcattcccacataaagggaatctgcatcttgtttttgaattcatggagacggacctagaagccgtcatacgagaccgaaatatttttctttcaccatctgatacaaaatcctacctgcaaatgacactaaaaggtcttgcttattgccacaagaaatgggttttgcatagggacatgaagccaaataatttattgataggatctaatggacagctgaaacttgcagattttggtttagcacggatgtttggaagcccagatagaaggtacactcatcaagtttttgctcggttgtatagagctacggaggggttatttgttgcatagttatagaatcctggagttgatgtttgggctgcaggctgtatatttgctgaacttcttcttcgtcgaccttttttgcagggtacaagtgacattgatcaattaggaaagattttttcagcatttggcactccaacggcttctcagtggcctgatatggtatacctgcctgattatgtcgaataccaatatgttcctgccccccctctgcgttctttatttccgatggtaactgatgatgctttagatctgttgtcaaagatgtttacatatgatccaaaagctagaatttcagtgcagcaggcactagagcataggtacttttcttctgctcctctgccttcggatccagacaagctccctagacctgctcccaagagggaatctaggacttctgatttcaatttacaggagggtcctactgtattatcacctccaaggaagtctaggagagtgatgccaggacgtgatgggtttgaaggaagttctctgcaagcagataaggttgatgccagttttggtgatttcaactgatgataatacagtgctgacagatcatatttgaaacgaaaattagatctagaatttcaacagccagaatgaatattctgtggccgacacattcatacaaacttatggagggcaaaatacatttgaagaaaagtggtgaatcctcaaaggcttgctagcatgtcattctctatccctgtttctcagtgtgaagctacaacaaatatgtaactgaagaagtccctgaagattagttgcagttcagatacattaatgttaatttcaatgcaaaggagggtcctactatattatcacctcctaggaagtctacgagagtgatgccaggacgtgatgggtttgaaggaaattctctgcaagcagataaggttgatgccagttttggtgatttcagacagaccactgatgataatactggcaagaatgaatcagctccaatgtctgtagattattatatcttaggaataaaaccatccaaatagacctacaattaacagtgctgacagatcatatttgaaaagaaaattagatctagaatttcaatagccagaatgaatattctgtggccgacacattcatacaaacttatggagggcaaaatacatttgaagaaaagtggtgaatcctcaaaggcttgctagtatgtcattctctatccctgtttctcagtgtgaagctacaacaaatatgtaactgaagaagtcactgaagattagttgcagttcagataccttaaagtaacttctatagaaaaaaaaattaaaaacttatatcacacactcactctggtccccccttgtacatttttgttctgtacgttttcagagaactagtatactcgagttcatggaaaacatggagtgtgaggacattttctcgagccgttgctgtatatggcgcttgaaaaaaaaaactttaggggaacttaatttgaatacaaatttgttattgaacataagaaatttttttatatgcatatggacttgtagagtgtgtattgtatgtactttattgggaacttcagacatgtgaattccaattttaattggttgaaagatttttttcattcggggttttttaaaactcctgggtacaatagtattgcctgtctaatcaattcaaagtggcctaatagtttgtaattttaactgagtcgagacataaaattatcctactaagttcatcggtattgtattggaagaaaaataagccaggcttatatataaccatattaaactgatgttgttaggatatttttctagtgaagctgctgattagcaactatgacattgtaatatgctatagcgcaatatgctgtaatgtgctaacataatatgttgtaattcccaagtagtgcaagaatgtgccagttgtttgttaaaacagaaaacaaa

SEQ ID NO: 60834 - DNA, 862 bp, Glycine max
  unsure (1)..(862): unsure at all n locations
  Clone ID: PAT_MRT3847_25946C.1
caattcaaagaagaggcgcagatgtccctacgacagaggggcctgtgctgtgtctttgacatccgtaataatgtaaggtcactcaggctcccatcatgcagcaccagaatcagaaatttccatgccccaaacaactccaattctccactccaatcattgacacgtggtaaatcacggaggatgatttcgaaacctatatcagcggctcttcccgctccaccgccacttgacctcacagaaaacaacgtgaaacaggttttagaggacgctcgaaaggagctgggtcaaatctttgactcctctgttggtatcactggagtggtggaacttgctgacttggatgggccttttgtcaagattagcctcaagggtcggttttggcacaaacgttccactgttcttgccagagtcgctaattatctcaaacagaggatccctgagattttagaagttgacattgaagacgagaaacaattggatgacagtcctgagaatttttaagggtttgaggtcataaaatcattgtagatgaaaccatggtagatgaaatggaaatctcagtgtgagaggagaggatggagtcacacaacttcactagtctctgggaacacacagaaatcagtagtttatcgcctagtgttaataaagcttccctaatatgctttaccaaaaactgttagcgaaggttggacttaacaagaaaaggtaagcttcggctaggtactctcttgatgtattgcactanatgatttaccgcttggtaatggtgaatcctgggtgaagccatgtatcatgcattaacttaatttgtgtacgttgtaagcaatatctggctgaaaaatagtcaactacattatttaac

SEQ ID NO: 60835 - DNA, 484 bp, Glycine max
  unsure (1)..(484): unsure at all n locations
  Clone ID: PAT_MRT3847_25947C.1
tcccggggcgacccacgcctcccgatgcattcttgttgagggaggtgggagtgctgtcattttttaanagttnnaaagagggggagggggtgtgaaccattttnaaaagccaggggtgcgggggggggtgcacaccaggggtaggggaatggggtnggggggcttaaaatgcgagagtgtggggggggtacattttatttttatttttctaaggaggaggagtctaacatgtgtgagtgaggggagncattcttattgggcccgtcttttttttctattcatcgtttgtgttttcaaacattcactatacaaatttggggatcttttcctttgtgcaggtattttgtgagcgttataatcacattgtgccccaatcccaacagagggagttattcacaaggcaatcccattcatagtgatttgaggctaanaaaaaaaaaaaaaaaaaaaaaaaaaaaaaaaaaaaaaaagggggggggggcgg

SEQ ID NO: 60836 - DNA, 218 bp, Glycine max
  Clone ID: PAT_MRT3847_25948C.1
ttcacaattttcaacatctaatgtggcaccaatcgttcatactcgtcaattcggcactaactgtattcctactatgcctatcctgaatctaaacgatatgaaatctgcattcctcggggaactctaagtccacatcttcaagaggtaccgtcgcatgcatgttcaaatcctgattgacatcatttgtattcacatgtgggctaaccgtaagccaaacg

SEQ ID NO: 60837 - DNA, 180 bp, Glycine max
  Clone ID: PAT_MRT3847_25949C.1
gttattcgagcggatcaccaaggacccgaccgaggagctggactaaaaggtcgaccctttacactgctctttacattgagacatccagtgggacggcccggagtgggggtcagtggttcggggcatctacaggcgcccctacttgaggcatggatttaggcacggtctttgtcaagtgat

SEQ ID NO: 60838 - DNA, 481 bp, Glycine max
  unsure (1)..(481): unsure at all n locations
  Clone ID: PAT_MRT3847_2594C.1
tcgccccaagaacaggggnnccaacncggagcagacaaaagaatacctgaccggagaattccctggggactacggatgggacactgctggattatcagctgacccggaaaccttcgccaggaaccgggagctgtttgtgattcacagcagatgggcaatgcttggtgcccttggttgcaccttaccagagatccttgattttttttttgtcaaattcggcgaggccggggggnacaatgtttgcgcccagaacttcacagagggagggcgtgactacttggggaaaccaaaccagatccatgctcagagcatacttgatatctgggatggacaggttgagctcatggggcttgaagaaggtgacagagttggaggaggaccaattggtgaaggacttgaaccaaatgaccggggaggggcttatgaaactcttggtctgggtgatgacccagatgaattgacgaagtggaagtcaaggaac

SEQ ID NO: 60839 - DNA, 1302 bp, Glycine max
  Clone ID: PAT_MRT3847_25950C.1
ctaatttcgcctatttataaccccagcttgttcaatttcgcaacctgtattttttcgtttctcaattttccacttattttcgttccagccagagccagcttttccattttccctttattttttctcggaatccaaacggaaccgtaatcgtgtattccttttttttttttttctttttctctctctctctccccccggcaggttcagatacttttccgattccgtcgcgaatttccgattcatcgaagaagaagagaaaacctaaatcgcagatccgaacgcagtaaaaaaaccatggcggaagaacaccgatgcgaaactcccgaaggtcacctactctgcgccaacaactgcggcttcttcggtagcaccgccacgatgaacctctgctcgaaatgctacggcgcgatccgcttgaaggagcaagaagaagcgtcgacgaaatctacaatcgaaaccgcgctctcttcttcctcgttgaaaccgtcgttctccacgtcacctccaacgttggtggatgtcctcatcgaatcgccgccgccgtctttggcggaggttgcggtcacggtggcggtggaggcgtcgagttctatttccacaagctcaggttcggttgcgcaaccgaaccggtgtgccacgtgtcggaagcgcgtggggctgaccgggttcaagtgcaggtgcggattgacgttctgcggggcccacaggtactcggagaagcacgcgtgcgggttcgattttaagacggtggggagagaggagattgcacgtgccaaccccgtgatcaaagcggagaagctgcggaggatttgatgattcgttctcggccgttcgatgggaccggatttggtgatttgatctcgaccgtccacgtgtactgcgaaagatagagagagaaaatgtcgttattatctaaaattatgattatgatgatctgtgttttaattaagattaagatgaaagcttgaatagtcggtttgtctggtctagtagggcatgaaaatgaaataaatgagtaatttattttggctttgtaaaagcgagaaaaaaagaaaagaaaaaacaacgttggattaaaaaatttctaggtccaccgatgggggtggttgaaacttgaaatgatttgtgataagagtctccgggcaacgacgcagtgcggtggagcgttttattgtgctttcggtaatgaatgtgaaagtgaaattattgtactcgctgcgtcaatctatttattcttcctttactcaccaagatgtccatcctccttgatgatttatttatgaatacgagattaatagattt

SEQ ID NO: 60840 - DNA, 439 bp, Glycine max
  Clone ID: PAT_MRT3847_25951C.1
tggatattcgtaccttgacaccggaaacaaaagcaggttgtactaggttccaaggacgtcacaacatctagctagtggcaaaagcacgagatattacggtacaggaactgactcactgtgctgaccacagactgcgggaaaggtttatcaggacatactcagactgtttgctgcacactctagactaagaaataagactcaatgtcatgaggaaactgcttatgtggcaacataagatctgagatagaatctaggtgcaggctgaagaactaaaggattcatgctggcactttaactatactgaaataggacattggaggggaagacaaacactatatgggtgcaccattccactctgttgatctatacgtgaaacgtatagacggacaaagcggtcatatcaggaaaacacttggacggacggtgcacgtgttagcgg

SEQ ID NO: 60841 - DNA, 985 bp, Glycine max
  Clone ID: PAT_MRT3847_25952C.1
aattcggctcgaggaaacattttgagaaggcatgcagtttccaagaagtatgaagtttcctcatttactgaaaaaacattagtacacaagaaagataatggctaatgaccaaactagagacaatttaaaccacagactatgactcttctaccctaatgaagctacccaggaagatggtttcttttttgcatatgtatttgatttgatgatgctactatcactactatatcatgctttgaacataaagtcttcatctcttttccttgagcttccccaatttgaatggtatctgaaaatccacctccaacccttcatgcttttccttcccctcttgattcctctgtcattcacagtgattctacatgaccctccattggttaaaactccatctcctaccaaccctccataagaacctccaccaacatcatgtggcatgaaattcccatttctgaaagaagagaaagtatcaccccccatattgttgctcatctttgcagcagaaaactcgtgctttgattctgatgagtaatcaagcttcaagtcaataaagcttgactcatccatgcctttgaaatcactctctctgagtgaaaacacacgcctatttaccccaccgtagaatccaccaccatctccaccaccatccattagtccaccctttttcacaccacctttgagatcacttccactttcataattatgttcaaacaagaaatccctcctctctactccatcaaaaccactccttcttggatcagcttcgctgtatccatttctcctcccagattccaccatattaaccccagaactcctagctgcagaaattgagcttctagcacctgacagcattgaatcaccaccatcctcagatcgaaatatccctccacccctgaagctgcatagtgaccttgacctagacacacccccttgatgatccaccatccacatctcattgtttccccttctgtcgtcttctcgcagccgt

SEQ ID NO: 60842 - DNA, 760 bp, Glycine max
  Clone ID: PAT_MRT3847_25953C.1
ccggcgtgcggcctcagccagcccctgcttctcgctctgtgaaacctcaaaaccttctaaaaccccttttcctatttctatgcatcttctccttcttatctaatccgtacttcacctttaattgcttaagtcctattctcgctgaaggaggaaatggctggaaaatcgggcaaggggaggaacagaaaagggtcccataatgcgtccagtgcttcagaacctccagtccattccaatgttcctgtgaaggataatgtggaagtcactttggaatcagcaaaaactgatgcagctgatgctgcaggcaactctactgttgccaatcccgaggtgaaggagaatgaaacaacaactgaagggagccaacaaaagcagggtgatcttcaactttaccctgtttctgttaaaacccaaactggggagaagcttgagcttcagttgaatcctggagactctgtcatggatgttagacagttcctccttgatgctcctgagacatgttttattacatgctatgatttacttttgcatacgaaggatggatccactcatcacctggaagattataatgaaatttctgaagtagctgatattactactggtggctgctccttggaaatggttcctgcattttatgatgatcgatctataagggcccatgttcatcgtacaagggagttgctttccctttctacctccatgcttcactatcgacatcacttgccctacagaatgagatagcccaaaataaaggtgcaaa

SEQ ID NO: 60843 - DNA, 805 bp, Glycine max
  Clone ID: PAT_MRT3847_25954C.1
tttttttttttttttttttttttttttttttttttttttttttttttttttttttttttttttttttttttttttgcacctagtagtctagtaccttattgtgtgaaatatatgacaacacttgtttaaataaaaaaataaataatcatagtaatcatccgtctgatagcggaaacaaagtatcgatttagactaggatatttacaaattggtgcaagtcatgtaatgtaatgtaaggtgacaattatgtaaaaaatggatagagacctgaagtgtggtaactttagtagctgccattcaaatactaggcaagatgaattgcttgagaacgatggatttcatcagcatatgctgaaggaacatagattgcatgcaacagtgagctgtgactgcggccatagaacaagtatacaagtactcctatcaacatccataccgaaactcgcagccatgttccaactctgaaacaccatgatatgagtgattaggtgttggtactcatgtgtcatgcatgacacaaaaaaggaggcatggttgtcaagagatttctcacccaagatcaattaataagtaggtgtttataagaatacaggcagcaggtaagaatggaacaaatgggcaagcaaaacctgaaacccaaggtatcaaaaccattgtgtaagatgtttaccaaatcttgcatgaaattaagagaagaaacgcaatgaattagtattccaaatacactggatagaaagtttgtaatgatgataaacttaataaaataatttaatcattcttttggttgatccttgcacctttggta

SEQ ID NO: 60844 - DNA, 295 bp, Glycine max
  Clone ID: PAT_MRT3847_25955C.1
tttacgcgtacgcccacgcgatcgctcacactgagggattgcactctccggtcacatggaaaatcaaagagatcggcagtacaagactgtagtggaagcctacgactatctgaaatctacgatgaaatcattaaactttgtgccttcactcggacaatcgtcgccggtaattagacccaccgtctgtaacgtaagatcagaagcatcttaccaggggcaatggtctggattgcagctacttgcaagctcttaaaagagcttactttaacctgtgcttttgggaatggcaagtgaa

SEQ ID NO: 60845 - DNA, 1557 bp, Glycine max
  Clone ID: PAT_MRT3847_25956C.1
cactagttggcggcacgccctttggtttttttttttacggctcagataagacactcgagccgaatcggctcgagacataagtttgattgtcctagctttgagcaacatcatgaagatctccattctctttatcacaatcttttcttgtggttttcttggaaatgttgtttcaaatgctagtcctcttccatatgaagctatttttaactttggtgactctataagtgatactggaaatgctgctcataaccacccacctatgcctggcaatagtccttatggttcaacatactttaaacatccttctggacgtatgtcaaatggacgactaatcatagattttatagccgaggcatatgggatgccaatgttgccagcctatttgaatctcaccaaaggacaagacattaagaaaggagtgaattttgcatacgctggttcaactgcacttgataaggattttttagtacaaaaaagaatcaatatagaggaagctactttttcattgagtgctcaatttgattggtttaaaggactcaaatcctccctttgtacaagcaaagaagagtgcgataattacttcaaaaactcattgtttctagtaggagagattggtgggaatgacatcaatgcactcatcccatataaaaatattacagaacttcgagaaatggttccatcaattgttgaaacaattgccaataccacctctaaattaatagaagaaggagcggtagaactagtggtaccagggaacttcccaattgggtgtaattctgctgttttggcaatagtgaatagcgaaaagaaagaagactatgatcaatttgggtgtttgatagcttacaatactttcattgagtactacaatgagcaactcaaaaaggctatagagacattaagaaaaaacaacgcacatgttaagataacatattttgattactatggtgctaccaaacgtttatttcaagcaccacaacaatatggcttttcttccggtaagactgaaactttcagagcatgttgtggaaagggtgaaccttacaatctcagttttcaaatattatgtggtagtcctgctgcaatagtttgctcagatccttcaaaacaaataaattgggatgggcctcattttactgaagcagcgtataggctaatagctaagggactagttgagggccctttcgctaatccatctctcaaatcccctcctttcaagatagcttagaatttaagcatggatgaaaatgaacaagaataagcttttctccatatgtttcatgtgtatatttgtaacatggatgacataagcaaagtgttgctaaaacaaacatcttgtattccatgatggacaatatattattaactattgtgtattataatttgtatgttttggaataatattgaggataatgggaccaaaatgaaaatgaagtgaaacaaaggattatttttcaagattttcatcttgaatccattgtattgttatgttataaacatgaacaatatattgttgctttgaaatgataagaagtttgatggatttctttatgtatc

SEQ ID NO: 60846 - DNA, 495 bp, Glycine max
  Clone ID: PAT_MRT3847_25957C.1
ggtcaaactggcggaggcactggtatgcaagacatccctctatgctcttggtttctgttaatataaactatttactgttatgttgttgctacggtgttgcttaatcatcttttaagatgatccatcatacttgagttatatgaattataattttataaattggttgaacatctcagaatttaatggagatgatatttaggtaagcagggttttttttttccctgttttgcttaaaatgagaatgtaaaattgatcttcagttactttgatgacttccttcactcatattttaggtggttcataaatcacaaaaactgtgtgtgggtggcagaggacacttcctaaaatcctttcaaaaccaaatttaagccttttctgataaaatcctatgaggcaatgacccattaattcgtgggctaccattagaaggaccagatgcattaaaaaatcttttgggctgatggtatccctagtaatgaagggggtgggggatca

SEQ ID NO: 60847 - DNA, 289 bp, Glycine max
  Clone ID: PAT_MRT3847_25958C.1
caaaatattgtgtggattttttcctaattaagtgaaagggtagttccacctttttgtagggttttaccacttttgtgtgccagagttttctgagtttcataggagaaaaaaaatgacagaagaacaaaccaaaacggctgagtcagaatcagtgacaccaccacctgctgctgctccttcacaggctcctccagctgctgaggctgaacatgttcctgaggcttcaaaggatgtggctgaggagaaatctgtaattccagtgccttcttctgatgacaaacctgatgag

SEQ ID NO: 60848 - DNA, 725 bp, Glycine max
  Clone ID: PAT_MRT3847_25959C.1
atttaactaggttcactacatggaggcaaaaatttatgatagtcagaactgaaaggatgaacttgttgctcaaaaggccaagcaaagcctttttcacctccttcctcgtagaatgccttgtcaagcatctggctctctcccatatgatagcttagcaaaaatagattgataggggggattttttcccataacagcacgaacctacatgagtaaccagaataaagaaacgtaggaaccaaaaacaaatattaaaagaaatcaaccagaaatatgtagacaatactaatggcttcgatgattgaccatttcgggacagattccaacaaaaaaggataaagaacaactcaactacacaataccctccagaaattggtagccagaaccaagtaggcaattgcaaattacaaatgaaatgaaaagaaatcaaatcatataagctcgataatagaatagaaggtgaaggtgctcaaaaaaggagagcttgaaagtcacacctcagactgcaagtatacatcttttggtaaaaacaaccaacattaaaactagcagtatattttactaacttggctatcaataaacacagctaccctgagaaagacaactagcctaagaaacattcaaattgaatgaagcagaacaccttttatctaccaatttaacaaaataaaacttcacatgacttagatgtaaaccatacatacctgatcaatgtcctcgcagacagc

SEQ ID NO: 60849 - DNA, 586 bp, Glycine max
  unsure (1)..(586): unsure at all n locations
  Clone ID: PAT_MRT3847_2595C.1
tattaattctctcctcctctctttatgtccctttttcttcttttccccctacctatctccaccaattccaccttcatcttcctccccatcaaggactatctatatatacatctaggtttgatcatctatcatccttatcatgttaaccatatagctagctaggtctattccttgcactcatcacttgtatatatacatagttttaaaagtacatatcatatagtaatgcatcatacataacacttctataaccttaggattagttatagctaattagaatttagagagagagagagatggggcaaaaaagcttgattttgtatatgtgtatgtttaattacactcatgcatcttattagttaattgcatgtttaattgtgttacatcatgcatacatatgtgtatgtgcctggctccctgtatgccatttgtagagctcatcgaagcatcaatgacctttgtggatggcgtatgaggagccaagcatatttcatatacatacattgagtatatgatgatcaaatnttaattctatgtgggtaaattaaagagtatgtatatatgaataatattagcctttgatatt

SEQ ID NO: 60850 - DNA, 235 bp, Glycine max
  Clone ID: PAT_MRT3847_25960C.1
cacaacttcataaagtgtaacaattatcacaccacagatctgcacaacattgttcaagacacattcaatcttgggcattagtccctggttttatcaaccaacacaatttcaccgtccaaaacacaaaacactactcatcacatcttattcacatcacattcactttcattactacatcatttttcacttcacaatcttgacaccacacacacacactcccacaacacaacacaat

SEQ ID NO: 60851 - DNA, 667 bp, Glycine max
  Clone ID: PAT_MRT3847_25961C.1
aaaattggtattggcataacataccaagattagtttttggcagcattttatttaaatttctttctatatcagctgggggaccacatcaatccaatccagaatccgaattacaaacccatacgttgctgtctgtaggctcatttttttttgacaatgaaagtagtaagttacagttgttcaaggcttcaagttcagttattcttttaaaaaattgtataaaactttcctaaagggtaaaacgggggggaaaatcaccatagaaaaatagtttagtacctcccacatttttgcatatattattgagcatactatccttgcagacaccaattttgttaggtttgcctttcctttgaactaattccatctgcatatgaagattttgtctgccttgtgatctgtccacaattgttagtgttgtgagactaaaattactaatctacatgtcataattatcattttcgtatggccaagcatgacaatgcctaaaaagagtgtgaaggtctattaattcggccattttgacttcaacacgatgtcgttcaatgttcttcagagctgatgacggtatctttctttacatacgctaacttgcatttcctccccaacaattgcaaatatctcattcactttgggagtgtctatgttcgcctctgcaagccatgttgtt

SEQ ID NO: 60852 - DNA, 296 bp, Glycine max
  Clone ID: PAT_MRT3847_25962C.1
tccactcctaagcttaagtctatgaactcgacaacctcaatgctctccccaaagctattgttggtacatttccctaacacctagcaacaaccccaggtccattcgtggggtctttcgtagacaaacaactttaaccctgtgtccctgggttccaccccgattcgatgccagttgattcggcgcaggaggaggacacattagcagacggagactggcccgaatggtcacgataccttcccctctttggatggaatcttccgaacaaagccgaaaaagcgcacctcacggagcttttt

SEQ ID NO: 60853 - DNA, 1492 bp, Glycine max
  Clone ID: PAT_MRT3847_25963C.1
ccacgcgtccgcggacgcgtgggcggacgcgtgggctttcttctctataaataagattgtggaattattagttctccaatactagctagtagtagccatggttcatctttcttgctctgattttctccctagttttttgctgcttcgcttgacattattgatattactagtttcttccaaaacaaagggtttggtgaaactaccagcagatgtgtcggttccagcagtgtttgtgtttggagattcggtggtggatacaggcaacaacaacaacagaacaacatcatttgctcgctccaatttcccaccatatgggagagatttccagggtggcatcccaactggtcgatttagcaatggaaaggttccatcagaccttatagttgaagagttgggcattaaggagcttctgccagcatatttgaaacccaatctccaatctagtgatttgatcacaggggtctgttttgcttcaggtggctcaggctacgaccctttgacatcaatattagagtcatcgatgccattaactgggcaagtggatttgttgaaagaatacatagggaaactaaaagggctggttggagaggacagagcaaagtttatcttagccaacagtctattcattgtagtagcaggcagcagtgacatttctaatacctatcgcactagatccctcctctatgatcttcctgcttacactgatcttttggtcaactcagcttctaatttcttgacggaaataaatgagctgggtgcacggaggattgcagtattcagtgcacccccaattgggtgtttgccatttcagagaacagtgggaggaggattagaaaaaagatgtgcagaaaggcccaacaatttggcccaattatttaacaccaaattgtcaaaggagcttgattccctcaaccgcaactttcccaatagcaggaatgttttcatcaatgtttacgaccctctacttgacatcatcaccaatcaccaaaaatatggctataaagttggagacacaggatgctgtggcacaggcaggatagaggttgcaatactatgcaaccgtttcgattccagctgtcccaatgttcaggattatgtcttttgggacagttttcatcctacagaaagcgtttacaagaggctcataaaccctattcttcaaaaatatttgtaccaattcaagtgagctgtcatttaattttaagaaataaaagcttcaaacttgtgggtggcttctaggtttggttaattgggcacttggttggtagatccgaataactgtgttagtgagtatgattctgagtaatttgttacaattatatcgactgatataatttaattattagattaaatgttatattattaatattaattatgaaaataagttttatggtattttaattcatcaatattacttgaatttattaagtgagtgagtttatgatgggttcttggtatttaaataaagactcgttttcgtctgatgattgca

SEQ ID NO: 60854 - DNA, 490 bp, Glycine max
  Clone ID: PAT_MRT3847_25964C.1
ttttaagctgatgtctaatgatatgtgggcggctcctgaggacaaggccagtttctggccacacctgcattctggaatgtgtaataatctggctatgcaagaagctcatattgctaatctcaaaaatgtgttacgagaattgtattcgcacacttcagaagaagcttgccaattgatgaatgaaagctctgtctcacactgaatggatgcaaaaagctgctgcgcctaccatagcacagattgaagagtctcattcaatgcacaggataatgaatgctcctgactcaaaagataatatagatctactgccacgcatcgatttggtgtaggtacaaggagctggtcttgcttattcaaacaagatggttcacgatgataagcttgcggtggctaacacacaagaattgtttgatggaaagtaatcagcggattcttggttaccaatgtttggagttgacttatccttgagacactaccttcaaagccgcat

SEQ ID NO: 60855 - DNA, 143 bp, Glycine max
  Clone ID: PAT_MRT3847_25965C.1
gtcagaaaacaaaaggcaaaggcgaatggaaggccatagcgagatgggtctaatgggagaaagttttgatactagtaatttgctagggaggatgagggatgacgaatatgaaagccggtccggaagtgataattctgatggcg

SEQ ID NO: 60856 - DNA, 463 bp, Glycine max
  Clone ID: PAT_MRT3847_25966C.1
gtctttttgttaaaattaacgtaaaaatcaggctaatcgacttgttaccaaacacgtactagcttttatttcgttaccctcgaacccaaatatgaaccatgcaatgcatgccaacatttagttaaaaaaattaataaatacaaacaatatatatataagtgtgtgggtgtttgtgtctgcattttctttgacagaacgcaaaattaacactttaatttttgcattagaaaatcattttttccgtttaataatatggatttgaacgcattctcaaaactcaaacacactcatacgtgtcaatcaaagtcacagactcacagggacgcgatgacctgtgaatcatgctaggatcgaagctggctctagcatcagctatcaaacaagtgggaggaaaatatcaatcctttaatgaatacgataggatggttgacaggttattgggggaaaggaagtcaaatcaata

SEQ ID NO: 60857 - DNA, 224 bp, Glycine max
  Clone ID: PAT_MRT3847_25967C.1
gcaccttgtaggtgtaaaggattattgaggagcgggggtttttgaaaggcactgctagcatagtgaggaaacttgaggaatccagaattctaatcgtaatgtctaaagcatcagaggctactagcagtagttatagctgatgaggacaagctatcatatagggtgaccctcatagtagtagcatattaatggtgggaacaatgcatccgagaaagagttttttg

SEQ ID NO: 60858 - DNA, 570 bp, Glycine max
  Clone ID: PAT_MRT3847_25968C.1
gggttttttattatcgtactcatcaagtagatgtgtttacttgatggtctatgtagatgatatagtcatcacaggaaatgaccaaggaaaaattgctcaactgaagggacacttatttagtcattttcagactaaggatttgggaaaatttgaatattttcttggaattgaagttgctcagtcaaaagatgggattatcatctcacaaaggaagtatgcattagacatactggtatgtcagattgtagaccaattgatagtctcatggatccaaataaaaaattgctacctaatcaggggaagccttattctgattctgaaagatatcggatattggttggaaagcttatctacctcactattacaaggccaaatatttcctttgtagttggagtggtgagtcaattcatgcaatctcctcataatgatcatcgggatgcagtaattcgaattttgagatacattaaaaggaccccatgacaaggactactctatgaagacaaaggaaacactcaaatagttggattttgcgatgcaaattgggcagtatcacccattgataggggttcc

SEQ ID NO: 60859 - DNA, 311 bp, Glycine max
  Clone ID: PAT_MRT3847_25969C.1
catacatttaatgttcagcctaaaagttaataacagctggagatttggctgctgatcccatcaaccaatgaagcttttccccacaagcctgaagccgaatggagagattcacgaaagagtcaagttggaaagttcacacgaggaatttattaagacttggtcaactcacgtgcgtaccgcaacaactatgttagctgatgagtggacctatttttatgcaaaggagcatgatagttcaccgaatacaataccatgtgattttgtcattggtgtcaaggtgacaacactaaacaatatgcgtgcatatgggc

SEQ ID NO: 60860 - DNA, 230 bp, Glycine max
  Clone ID: PAT_MRT3847_2596C.1
tgataatgctaacataataactaaccacttaaaagattacagcttcgaacgtggggcaaactccagggataaaaagaaggaccctttttttcaaaacacacccactgttttttgggttgagaaaaggacccccttgggggatttttttgaaagcactttttagttaaatttttttgggtgccacctctggtggtttttttttttacaagggggtccggacaaaataattt

SEQ ID NO: 60861 - DNA, 544 bp, Glycine max
  Clone ID: PAT_MRT3847_25970C.1
ctcgtatcttctctcattccgaaacttccatcgtcccaaaacaaaaatccccagcatgtcagaatcagaggagcgagccacgctgacgtggcgcaaaatccccatcctcctcaaatcctcccccaacgacgtcgttctcgtcccccccaccagcccccgcaaaaacgacgccgtcaccggcttcttcgctccgaccagtggcacccgctgtaaattcgccagcgtctcggtggcagaaaggaaattcgacaaagaattcgcgcccacggcggcacagcttctgcagcaccccctcgccgtcgtcgcattggttcccaaagacgccgccctctttctcgccggcgcccttgccggcgccgccgcgaaatccttcactgcccccctcgaccgcatcaagctcctcatgcagactcacggcgtgcgagttggacacggaagcgcgaagaaggcgattggtttcattgaggccttaactgtaatagggaaggaagaaggcatcaaaggttattggaagggcagcctcccccaggtctctataattagg

SEQ ID NO: 60862 - DNA, 294 bp, Glycine max
  unsure (1)..(294): unsure at all n locations
  Clone ID: PAT_MRT3847_25971C.1
ttccattctctaacgctatcatcatcaacacagtttcacattcataacttctatggttggggttaggaacacctttgataattgtactancattattacattgcttctttagcaagttgaaaaaagctgtcgtgatcatcttcattgatttctttgtttttcatttgattattcatctttgtattttaatatctttattcatatttttataaaatatattttttatatatttattatttctaatttttatactttttaatttaatatttttattttattttttatttattttta

SEQ ID NO: 60863 - DNA, 502 bp, Glycine max
  Clone ID: PAT_MRT3847_25972C.1
gggactccctctattattatcattattcttgcggtcttcatctctccaatatctctgcacacacaaaaacagagtttaactaggaatcaaccaaaatggacaaagttaacaccaccaacaacagcaacagcaacagcaacagcaacagcaacaacaactgtgggttcatgtcgtgcgacaaactggaccgagtggccaactgggtcggcgccaacgttgcctctgctttctttgcatccttggagcggtgctcttgcatcaacctcagcatcaaagacaacgaagatgacaccaacaacgatgatcgccctctcttcctctctcaccccactactcctttttcctccaactccaacgttcactcttgatcctatgattcctgtgttcacttgttaaaaaaaaattactcttttctttttgtgttttgtgtaattcgtggatcctgaattaactttcctgtcatgaatatatgggaatttggtgacaaaaaaaaaaaaaagag

SEQ ID NO: 60864 - DNA, 234 bp, Glycine max
  Clone ID: PAT_MRT3847_25973C.1
aaatataatttaaacctcttctgtaaaatcaccataggtcacacttacaagtgcggaactcaaaaagtcacatttacaataatactttattttaattatattaaataactttaaaaactctgtcctaaatttaatttactattttctacactcccaataaaaaccatggataacttttcaattcttaaccttttattggccatattatacaatccatcaaatttaaaaccccaa

SEQ ID NO: 60865 - DNA, 642 bp, Glycine max
  Clone ID: PAT_MRT3847_25974C.1
agacttgagtcagataatctttatgtatgtacttgggagtcatattttttctctgaacattatcaccataatgtctacatattttgagttatccaggcacgtttaagttgactctccaatttactgaggattatccaaacaagccaccaactgtacgatttgtctctcgaatgtttcatccaaacatttatgcggattgatttatttgtttggatatattacaaaaccagtggagtcctatatatgatgtagctgctatactcacttctatccagacattgctttgtgatcccaacccaaattctcctgcaaactcagaagcagctcgaatgtttagtgagaacaagcgtgagtacaatcgaagagtgagagaaattgtggagcaaagttggacagctgactaagcttatcttcgcatgcttgtgggcctttgaagtcatgaattatattgctctgttggaataagaatcattgtgccaacttactgaatcttatgccgcattccctactcttctgaatgttaggaacatctcatctttaattcattgtaggttatgcataggccatgttaattcattgttttatagaatcctgtcaatttgcacccagttgttgtcaacacaatgttataagttgtaagtt

SEQ ID NO: 60866 - DNA, 356 bp, Glycine max
  Clone ID: PAT_MRT3847_25975C.1
atattttttctcttaacattatcacaataatgtctacatattttgagttatccaggcacgtttaagttgattcttcaatttactgaggattatccaaacaagccaccaactgtacgatttgtctctcgaatgtttcacccaaacagtaagttttaggtggaaaagattaatcttcatgtccataaattacctatgtagctactaatgccatttttctactctgggaagtttatgcggatggaagtatttgtttggatatattacaaaaccagtggagtcctatatatgatgtagctgctatactcacttctatccaggtattatcttgtatagtatagtctacaattctacatttc

SEQ ID NO: 60867 - DNA, 631 bp, Glycine max
  Clone ID: PAT_MRT3847_25976C.1
gattattgagttattgctttataactgccttggaatggggggacttgaagggggaaaatagggcatgcttgtctgtgtttgaatggaatggactgatgggacttgaagtatgggggctgacttattttaaattgctagcactactaaaaggtaatttttaataggatagatgtttcaatgataaaatttccattcagcaccttgggaaaatgtcttggattgtttggtatggaatatcaaaccttgcatcaatgttgttgtaggggctgtagtaactaaatggaaaatggctaaattatcgttcatctagggaaatttaccatacgattaatgttgattgcttggacaataatgattgggttcccaaaattatccggggcctgtacaatattttaaaccatcaatctgggtcaaaatattaataaggaagagagagatgcttctcaaaaaagctgaatgttgtaaaacaatgcttgattttatatgaaacttttgcaatatttgtactacaagatggcttaaatcgttgctatttcttatttctccactcctggaatttcttatcatctcatgaaaataattgcttggctgtataatctttcttggggttaaccttggtactttttcattc

SEQ ID NO: 60868 - DNA, 910 bp, Glycine max
  Clone ID: PAT_MRT3847_25977C.1
cgtttacgcgagatagggaataggcgacagtgcgtttggctgcccccagcaatcgaactccttgtgctcctcgcacctcattctctctctctctctctctctctctctctctctctctctcgtatctgcaacttcaactaactaacttttatgtgagcacccactatttcacctgcagtaccttcttccttcgaatcaaaacaatttaaacccttttttttcgaattaaaataaaataaaagttacgatcctcataagctttcagcatgacacgtaattgggtttgcttttcgcttgcttgctcgtttttcgcttgcttgtttgctttgagaaacataaggaagccgaaggcgtcagtgaatcgacccccaacaccagatgtggtcgaaaatgtccctgaaagagaacccacgcttcaagagttcagcaacaactaagaaatgttataagtagacattattgagcattgtattaggtgtttaaacattagaaagtgaccaattataccatggtgtgggctttcctttgcccaaaactgtccaactgacaagatagagaacttgtcaaacttgttttttgcagtctccattcctgattccgtaaaggctgagttgttgcagaggattcgaacatttctcgtgtctgctgctctttaagaatcttcatggcttggtcagtgttagcctcaccaatatgctgtaaagactatggttggaagtagtaagaactgcacgcatttgtactgggttttatttggtgggagggagatgactatttcatgtaaaaccatgattatttcactcctttcaatataaatttgagaaataattttttgtaccaaattgttaatatgtaacagcctcattcctcgcccttataaaaaaaaaaaaaaaaaaaaaaaaacccccaa

SEQ ID NO: 60869 - DNA, 1164 bp, Glycine max
  Clone ID: PAT_MRT3847_25978C.1
ggcgcccacgcgtccgtgcgagaagacgacagaagggggttgttctcatttccgaacacaatatccgttgtttaaggtgaaaaggaaaaaaagaaaaaagttgtgcagtgaggaacgcgaagacgcgagatagggaataggcgacagtgcgtttggctgcccccagcaatcgaactccttgtgctcctcgcacctcattctctctctctctcgtatctgcaacttcaactaactaacttttatgaagccgaaggcgtcagtgaatcgacccccaacaccagatgtggtcgaaaatgtccctgaaagagaacccacgcttcaagagctcatcaacatcaagttgatcgagactggagagaaggagcgcctcatggagctgttgagggaaaggcttgttgattgcggttggaaggatgaaatggaaactctctgcagagctgttgtgaagaagaaagggaggagtaatgttactgttgatgaacttgtacatgtgatcactccaaaggggcgaggtagttaattaattgtttcataatttgattacttttcgtttctgcgtatatgaaattaccgagcctttgacatcatgcaatctatgtatctgactttactttgtgggataagaccttttgatgatgttgtgcgaatagaaaattagtatttacttggttgaagcacctcattaggtcaaccccacacaaggaaaccttcagaatctattgagaaatgttataagtaaccattattgagcattgtattaggtgtttaaacattagaaagtgaacaattataccatggtgtgggctttcctttgcacaaaactgtccacctgacaagatagagaacttgtcaaacttgttttttgcagtctccattcctgattccgtaaaggctgagttgttgcagaggattcgaacatttctcgtgtctgctgctctttaagaatcttcatggcttggtcagtgttagcctccccaatatgctgtaaagactatggttggaagtagtaagaactgcacgcatttgtactgggttttatttggtgggagggagatgactatttcatgtaaacccatgattatttcactcctttcaatataaatttgagaaataattttttgtcccaaattgttaatatgtaacagcctcattcctcgcccttat

SEQ ID NO: 60870 - DNA, 472 bp, Glycine max
  Clone ID: PAT_MRT3847_25979C.1
attcggctcgaggttctgcaacatttatcattgactagtagtcttccatgttttgaagatccaaaaacaataggaaaaaaaaaatgatggctcactgtgttttccctgttaatgcacttcctactccttcaccatgtttccactccaaagttggaaagcaatggcctcagggatttgccttgagtgtgaggccaacgaatccgaagaggctttcaagtgcctgcaaagtgagagcaactttgggtgcttctgataaatcaattggaattcccaaccaatggtacaatgtaattgcagatcttccagtgaaaccacctccaccattgcatcccaagacttatgaaccaatcaaaccggatgacttgtcacccctttttcctgatgaagttaatcagacaaagagaatcgccagtgagaaattcagagacaaccagatgaagtcccagacggttacaagctatggcgcccgacc

SEQ ID NO: 60871 - DNA, 258 bp, Glycine max
  Clone ID: PAT_MRT3847_2597C.1
gagactctgtgggattcatgcaatggggtagtaaaatcttccatcatcccccatgagtgtcgtccaccatcttctctgctctctttctcatttgtgccttcaccacctcatacctagcttcagccatctctgatttcgtgctcgataatgacagtaaccctcttgaaaatggtggcacatattatatcatgtcagacataacagcatttggtggactaacaccagccccaacgggtaatgatagattccctctcactg

SEQ ID NO: 60872 - DNA, 1045 bp, Glycine max
  Clone ID: PAT_MRT3847_25980C.1
gcacgaggattgaatcgtaagcagcggctaccctaatcctctcctcttcctctctactaatttcagctatggccgacgaagctgtggttgttccagatcccacccagatcgatgtcaagctctttaaccgctggagcttcgacgatattgagattactgacatttctctggctgattatatcggagtggcgacatccaagcacgccacgtatgtgcctcacaccgccggcaggtactcggtgaagcggttcaggaaggcgcaatgccccattgttgagaggctgaccaactctctcatgatgcacggtagaaacaatggcaagaaactcttggctgttaggatcatcaaacatgctatggagattattcatttgttgactgaccagaaccccattcaggttattgttgtggaagcaatatttgcgatcgggaagattttgtttcggtcaatgtttgtcatttaatgatatttgatcttttgcttgcattagttactttttagctttttgctcgctggcttcgcaagttatgaaagattttgttgctgggacgaaaatttgtgttctaagatcgggagtttaagtactagcctgtttcataaattatacaatgataatttccatgaaaaaaaaaaaaaaaaaaaaaaaaaaaaaaaaaaaaaaaaaaaaaaaaaaaaaaaaaaaaaaaaaaaaaaaaaaaaaaaaaaaaaaaaaaaaaaaaaaaaaaaaaaaaaaaaaaaaaaaaaaaaaaaaaggggggggcccttttaaaggacccaattttacttcccggggcttgcaaggaaaaattttttttttggggcccccaaaataaattccccggcccgggttttaaaaacgtgggaatggaaaaaaccttgggttacccaaattaaatcccttggaaaaaaatccccttttcccaagtggggtaaaaacgaaaaagcccccccccattcccctttccaaacatttccccaccttaaagggaaaatggacccccccttgtaccggccattaaaccccggggggtgggggggttcccc

SEQ ID NO: 60873 - DNA, 357 bp, Glycine max
  Clone ID: PAT_MRT3847_25981C.1
tttagcttcgagcccgccttcaatgacactggtgctaatatggaatgtgcaaaggctagtactggtgcctttgacgatgaaaatggcatccctgagggctgagaatagaccctgctaaaaggatactgatatctatgcctacggtccaaataataagggctagaaaacaaacactccagttgcaaagatcgattaaggacagtggaacatgaccaagcctataggataccttaacacgtatccgtccaggcttgataagatctggtgccgtgagaaatatcacccatgaccaatgtcaccgatgctgaggtatgtgacagaacaaacaagcttaatgtcgaataccaacagattgtc

SEQ ID NO: 60874 - DNA, 1599 bp, Glycine max
  Clone ID: PAT_MRT3847_25982C.1
gcggtgactgtgacagcggagttcgcggagactccccctcacccggaatcctgtgaaaaggaaaataaaggaaaaaaaaaaaatttgagcaactagggtttttacttgtccttctttgcgagattgaatcgtaagcagcggctaccctaatcctctcctcttcctctctactaatttcagctatggccgacgaagctgtggttgttccagatcccacccagatcgatgtcaagctctttaaccgctggagcttcgacgatattgagattactgacatttctctggctgattatatcggagtggcgacatccaagcacgccacgtatgtgcctcacaccgccggcaggtactcggtgaagcggttcaggaaggcgcaatgccccattgttgagaggctgaccaactctctcatgatgcacggtagaaacaatggcaagaaactcttggctgttaggatcatcaaacatgctatggagattattcatttgttgactgaccagaaccccattcaggttattgttgaagctgttgtcaacagtggtccacgtgaagatgcaacaagaattggttcagctggagttgttaggagacaggctgtggatatctcaccccttaggcgtgttaaccaggctatctatcttctaacaactggagcacgggaagctgctttcagaaatattaagacaattgcagaatgcttggctgatgaacttattaatgcagcaaaagggtcatccaacagctatgctatcaagaaaaaggatgaaattgagagagttgcaaaggccaatcgttgagcagttgtggaagcaatatttgcgatcgggaagattttgtttcggtcaatgtttgtcatttaatgatatttgatcttttgcttgcattagttactttttagctttttgctcgctggcttcgcaagttatgaaagattttgttgctgggacgaaaatttgtgttctaagatcgggagtttaagtactagcctgtttcataaattatacaatgataatttccatgatagtgttggggagttttgaccacaaatgtttttttttttgctaagtataacttgtgaagttatttgcatagagtgatccaaaatcaaacgtgcctgctctggatgttatttgcacgtttcacctgtattttgtcgcttttgacttattaaactacaggtgaacgtgcatacaattatttttgaactatcatctaaggaataactctatattgtaatttatttctgtaacgacgttaacttgggagcttaagcttcctgcctgaaactataaggtggaccgagaaaggaacaagttgattaaccttgacggagttacgagtggtggcttgggaatatcagttgagattcttaatcatcaagaacaagttgatttcacggataacgtcattgtacctttctgccccaaatctaggaattgtgtcgctcaatatctaggaattgtgtcatcatcttgcaaatttaacagtttttcattatcttgagtttgtttatgacattatcatcacccttataggagtaaactttcggtattggtgaattgccttacattagttgagataataaattttttacctagg

SEQ ID NO: 60875 - DNA, 412 bp, Glycine max
  unsure (1)..(412): unsure at all n locations
  Clone ID: PAT_MRT3847_25983C.1
aaaaagagactgtggtggnggttccttttgttngccatacatgcagaaactgaaagtgtctgctaagaatgatcctgctggcagcagtgatcaggcagattcatttccaatattcgaactgtgggagagtgaaaatgttggacagaagagcagtagaagagacgaagatgatacaaaagctgtaagattggatggagattctgtaattgctccctctaattctgcaaacaacagtaaggaacctgtcaacaagtggatggcatttgctaagaagcctggtttcacagttgatggcaactcagcaacanaggataaaagtaaaaccgaagacaattactcgaggaatcatctaaaagagaagccgtcttctggtcaaaattttttaagcgaagcaaccatagccgagagaact

SEQ ID NO: 60876 - DNA, 1267 bp, Glycine max
  Clone ID: PAT_MRT3847_25984C.1
tacggctgcgagaagacgacagaagggggtggttcttgtttgcgagatagaagcgtaagcagcggctaccctaacctcgtcttcctctctactaatttcagctatggccgacgaagctgtggttgttccagatcccacccagatcgatgtcaagctctttaaccgctggagcttcgaggatattgaggttactgacatttcactggctgattacattggagttgcggcatccaagcacgccacatatgttcctcacaccgccggaaggtactccgtgaagcggttcaggaaggcgcagtgccccattgttgagaggctcaccaactctctcatgatgcacggtagaaacaatggcaagaaactcttggctgttaggatcatcaagcatgctatggagattattcatttgttgactgaccagaaccccattcaggttattgttgatgctgtcatcaacagtggtcctcgtgaagatgcaacaagaattggttctgctggagttgtaaggaggcaggctgtggatatttcaccccttcggcgtgtgaatcaggctatatatcttctaacaactggtgcacgcgaagctgctttcagaaatattaagacaattgctgaatgcttggctgatgaacttattaatgcagcaaaagggtcgtccaacagctatgctatcaagaaaaaggatgaaattgagagagttgccaaggcaaaccgttgagcagcttgtggaagcaatatttgcgattgtgaagattttgttttggtctatgttattcatttaatgatattttaatcttttgcttgcattagttactttttagttttttgcctgctggcttctcaagttacgaatgaatgattttgttgcttggacgaaaatctaaggtgagttttagtagtagtctgtttcataaagtaatccaaaatcaaacgtgtctatctggatgtgatttctggaaaattaaccaagaactagagatgacccagtaatatgtagtttgtcgcttttgactgattacacgaggtgaacgtgcgtacattattgttgaactatcatcaaaggaaaatctcttaattgtaatttattttggcaacggcattaacccgggaggtccgagaaaagagcattctcataatgactacaatatctttgatcggaaaattttctatgcataaaattgggattaaccttcaccaacatgagaggaacaagattgatgaaaatatcagttgagattcttcaccaccaataacaagttgtttttac

SEQ ID NO: 60877 - DNA, 467 bp, Glycine max
  Clone ID: PAT_MRT3847_25985C.1
tcgttcatattacacgccccgtgaaagatgattacagagccaatccaattctaacggatcctgccgacattatgcttaatatgacaatcctacatacttgattggaacttgttttatcttctaatgaatatgaggctcacaattgatcatcatcatcatcaacaagagaaaaatatccaatacacgatgccctttattggttgtatatatatagagctacttatcaaaggattctggcttgtgaaatggatgtaaatttcctcaagcagctcttgctcgaattagtagaatggccactggtttaagctgacactttgcccttgcttgcttggtactacctactcttgcacttgaaattcaaccatgtaaacatcttacctgcctctgccattataagttccttgatgttgattggagtacagaatacgtacaaaaatgatgttggttgataaaaaaaaaaataaaaa

SEQ ID NO: 60878 - DNA, 422 bp, Glycine max
  Clone ID: PAT_MRT3847_25986C.1
aagtgatcattgaaaattgtcctcctcttgcttttttcccgtaattaacgaaatgtccgaacccgtcgccgacattgccgtcattgggttggctgtaatgggtcaaaatctgattctgaatatgaatgaccatggctttgtggtttgtgctttcaatcgcacagtgcaaaaagtgactgaatttctggagaatgaggcgaaagggtcccgaattgttggagcgaaatcaatggaggaaatgattaaattgctgaagaagccgcgacgagtgatgcttttggtgaaggcgggcaaagccgtgcaggagatgatcgaccgattggtgcctctgctggaggagggagacattgtcatcgacgggggcaacagcgaataccacgactcaaatcttcgttgcagagaattggcctcaaaggcattca

SEQ ID NO: 60879 - DNA, 774 bp, Glycine max
  unsure (1)..(774): unsure at all n locations
  Clone ID: PAT_MRT3847_25987C.1
cttgcatacctcttggatcgctctggccttggncccgacataaacaaaacaggtttctaagttttacacacttaatcttgcttttcactgtcaaaagaaaagattgaacagaagttagtgtttttatacattcgatagccactgcttctccattctctgaacatttccaattgtactcccaaaataaataaatgaaagacgttagatggggtttgtaacactttaagtacttcactaatcctgctatttgcagcaaaaaaaagaaaaaagaataaacaaaactcatcctagttaggcgagcgagacttaaggaaggatgatcaacaatctccattccaaatgcctgtgtagcctccaatggactaaacagaatacttctggcatttttcatgctgctttcttcatttcttgtagtgtaggttaggtgaacagagaagagagagaagatgatgacttccgaattgaatttcatgagccatgcagctgagttgtctttatcaaaacttcaaagaacctgagaaaaatcctattatatcacatcttccaactgtaatttccaacacttggggtccaattcagcctgaaactctttatctctccattcaaatacacagccacgtgcttccacatgtctgataagtagctcaggtaacagagatcttagtgaaagatggagcttcacttttgttagccctccacaagctaataaggctgccgccagtcctcctggaacaagccttgcaggtgaagcaagtaaagctttgaaggcaactg

SEQ ID NO: 60880 - DNA, 597 bp, Glycine max
  Clone ID: PAT_MRT3847_25988C.1
cttttttttttttttttttttttttttttttttttttttttttttttttttttttttttttttttttttttttttttttaaagccacaacaaaaacctttaaagaaaaagggggaagggggaaaaaaaacaaaccccgaaaaacatttaaagaaaaagggggaaaggggaaaaaaaacaaaccccgaaaaaaaagactttggaccttttaaaagggcccccccggtttttaactacaaaaaaggggggggcaaaaaacaaaaggggtagttttggtggggggcaatttaaaaaacggaaactgggggggaaaactttttaattctcaaaaaaaaaacccccctaaacaaaaacccacccccgggaaaaaggggggaccaaatttgaaattttttaaagccagaggggggaacaacagcaaccccaaaaggggttccaaaaaaggtttttggcaaaaccggggggggacccccaatagcggggggaaaaaaaaaacccaaagggaccctaacctcgggggccgctaagggatagttaaaaacaaaaaagggcccaggggaaaagcgggcaaaaaaaacaaatttccaaccatttggct

SEQ ID NO: 60881 - DNA, 249 bp, Glycine max
  Clone ID: PAT_MRT3847_25989C.1
gaaaaacgcttaattttgtaattattaaattaataaaaaggggattgacgagccccctgatggggcagcaacactgaaggcagggcaaaatcccctgcccatgttcaaaataccagggccaagtttttcacaaaaagaaaggttaggtcccgtaaagggcctagtgtaccgtaaatattgaggaaaaggccatggttccaaagtcctaacattgctgcccagaattttcccggtgggcaggtcctagaa

SEQ ID NO: 60882 - DNA, 270 bp, Glycine max
  Clone ID: PAT_MRT3847_2598C.1
gcgttcgccacgcgttttaccaacggatcagaaaaaattctctgcagcaaccttgggggctggggtatactgtcggggcatcgaaaacgtgtaggtgaacggagcctgccttgattcatgttctagcatgatagggaagggaagagtgctagaaataagaggcactgaacgaacagtgacaatgtcaacatcgcagctgatgatcatactgatcattgcaaatctaaaccaggtggtttcaaagacactcttgctgatgatctactggct

SEQ ID NO: 60883 - DNA, 270 bp, Glycine max
  unsure (1)..(270): unsure at all n locations
  Clone ID: PAT_MRT3847_25990C.1
aaaaaaaaatgattgagttcatgaacccagcctctaatggcagcagcaggantccagttattntacattcttagaagttagaactacagggncttaaaagttacacattcttaaggtcccactcatgttacaatagagacacttatttgaacaccccccaaagtacaaggatctagaaatttaatcagccatanttttacnagagatacctatttgaagatactcactgatagtgtattggtatgtgtctgcttccctgaagaaattttg

SEQ ID NO: 60884 - DNA, 1435 bp, Glycine max
  Clone ID: PAT_MRT3847_25991C.1
ctcgagccgcggctcgagcggctcgagacggctgcgagaagacgacagaagggggttcttagaccgggcatttctccaacttgggagagaacatcctttctcttaggaagtaaaagttattaataaaaagaaaaaataattaatatgaaaattaaaagttaaaacaatcaaaagcagcaatatacttactaacaggagtggattgaggagaagtgagcctgtggagtgttttcttctgatttcatctggatctgcgagagatgacggtctttcatttcttcaattgcgcgattctcaccttcggcccccacgccgtctactattctgccacgcccttatctgagtatgatacactcggcacctctatcaaagccgctgttgtttatcttgcaacggcattagtgaagcttatttgtctagctacttttctcaaggtatcagagagcgatagctttgatccgtatcaggtatgtctttgaattacttatgtatatgtttgaattgatgtgtatactgtttatggagggatgctatataacaatttaagttttaagccttaaaggaagacctccatatttatagccaaagtttttattccattgctgaaagctattgcaaatggttagcatgctaagaagcagaaaacttccaagggcctgtttcaatacaaggagtttttgaaggcgttaataggttttatagatgttgctgggctttattttgccttgacccagttgactcacaggaacatctctcagaatcataaatttcaagcagttggacttggctgggcatttgctgactctgtgctgcatcggttggctccactttgggttggtgccagaggattagaatttacttgggattacattcttcagggccttgaggctaatgcaaatttggtgttgagcatatcccttgctgcacttggatctttgatgtggcttcgaaaaaataaacccaagaccctcatccctattatatatttgagtgcagggattgtagcaactatgccatctatcacaagctatctgaggcgtggattggggtggcactttcccaaagtggtaggttttgagctcttcacatccctggtgatggcttttataagctggcaactgtttgctgcatgtcagagaccttcagtgtgagaaacctcattacataatgatcgaatcctgcttaactattttctggctagagttttgatccagggtcatctgtttctttttgctgctgcaatgctgtttctttaaatttcaagaatgttttcttgcggtagaatgttggctgcaattcattagaaatttttgtttattcagaaaattagagatattttaccccgaacatctgggattgataggttgcaaacactttctctttgaaaccccgttggatatctcattaatccacgtcccttccattattaaccact

SEQ ID NO: 60885 - DNA, 420 bp, Glycine max
  Clone ID: PAT_MRT3847_25992C.1
gtaacaacactcttcctctttctcagcctttttacacacctccatgcgtacactcgcgtggacaactttaccataagctactccttcccagtctcccctggccccaaattcctccgcctcttcttctaccctgctgagtacgcttcctttcctagctccaatgcatccttcaccgatcaatccaaccaattcacccttctccacgttttcaatgcctctctaaaagcggaaaacactaaaaccatcttcagagaatatgtcgtcaatgtggacggcgacagtgagaggttgaacctcaccttcactccgtcacaaccaaactcctacgctttcatcaacggaatcgaggtactctcatgccaagcaatctgtattacacctcagcaaatgacaacggtttgaagctcgtgggaactgaca

SEQ ID NO: 60886 - DNA, 143 bp, Glycine max
  unsure (1)..(143): unsure at all n locations
  Clone ID: PAT_MRT3847_25993C.1
tnnnaangtgttgtcttgntcggaggatnntgccttagcaatggcctttgcagttgnangacnaacagctgtggnagcttgaactgcttgtcaatggaacctacngaaaganagttcgtanatntnttgattcttctattcta

SEQ ID NO: 60887 - DNA, 2755 bp, Glycine max
  Clone ID: PAT_MRT3847_25994C.1
ccaatacaatcaaccaaccccttcactctctctctctctctcttgcaatggctgccattgttttcatccacattgcatcattggtctctctttttgttgcaacaagtgcaagaatccctggagtttacaccggtggcccctggcagagtgctcatgccaccttctacggtggcagtgatgcttctggaacaatgggtggtgcttgtgggtacggaaacctgtacagccagggctacggagttaacaccgcggcgctgagcactgctctgttcaacaacggtttaagctgcggcgcgtgcttcgagataaagtgcgaccaggatccacggtggtgcaaccccgggaacccttcgatcctaatcactgcgaccaacttctgccctccgaacttcgcccttccgaacgacaatggcggatggtgcaaccctccccgcccgcacttcgacctcgccatgcccatgttcctcaagatcgcccagtatcgcgccggaatcgtccccgtcgcataccgccgggtgccatgcaggaaggcaggggggatcagattcacaatcaacggtttccgttacttcaacctggtgctgatcaccaacgtcgcaggtgcaggggatatcgtgcgcgtgagcgtgaaaggaagcaaaaccgcgtggatgagcatgagccgcaactgggggcaaaattggcaatccaacgcggttctggtgggccaggccctttcctttagggttaccggcagtgaccgacgcacctcaacctcctggaacgtggcaccacctaattggcagttcggacaaaccttcaccggaaagaatttccgtgtctaaatccaagaagaagaagaagaagaaaagagagaagaaaataacaatactcttaaattaatggctcctggtatttttgagtttgtttgcttcagtttccctgcttctaacttccctctattttcctgggaaagctttggagtgggtggtagggggttaaaagaaaattaagagaaaggtagttttaggaaaagtaaaagtgaaagtaaggttaataattaatataaatgtaagtcgggggggtgtttgcattaaatgttaaagtgttttatgtatgggtgatgctggaatattaattacccagcattagcaacccgtttttcttttctttgtttattcaaagtgtgagggggctgaggaggttgcaaggaggaacatgtagcccgcagctctggctttaatattgacataaatgtactatcatatcaacaaatataaataaaagaatagcatttcagttgctatgttaattaaaaaaaaaatactaggggatttggactaaaatactagtaggagtggattgaggagagaacgagaagaaggtgaagtcgaagaagtgaaggtgttgagtgtttcatcattggtctcctttttgttgcaacaagtgcaagattccccggagtttacaccgggggcccctggcggattgctcatgccacctttcgtggcatgaacttcggaccactaggtggtgcatgaggacggaaccctgtcagcaggtacgatgtgcacggcgcgtgtactcttcttgtttcatctggattctgcgagagatgacggtctttcatttcttcaattgcgcgattctcaccttcggcccccacgccgtctactattctgccacgcccttatctgagtatgatacactcggcacctctatcaaagccgctgttgtttatcttgcaacggcattagtgaagcttatttgtctagctacttttctcaaggtatcagagagtgatagctttgatccgtatcagtagtttttgaaggcgttaataggctttatagatgttgctgggctatatttattttgccttgacccagttgacaagcacatgcctctctcataaatgcaaatgaggggatttggctggccttgcgcaacgttgataaccggtggcaccacgtgcgagctggcgcggaataggtttcttgggacactgttggggaggtgtgcctcacaggaacatctctcagaatcataaatttcaagcagttggacttggctgggcgtttgctgattctgtactgcatcgattggctcctctttgggttggtgccagaggattagaatttacttgggattacattcttcagggccttgaagctaatgcaaatttggtgttgagcatatccctcgctgcacttggatctttgatgtggcttcgaaaaaataaacccaagaccctcatccctattatatatttgagtgcagggattgtagcaaccatgccatctatcacaagctatctgaggcgtggattggggtggcactttcccaaagtggtcggttttgagctcttcacatccctggtgatggcttttataagctggcaactgttttctgtatgtcagagaccttcagtgtgagaaagctcattacatactgatcgaatcctgcttaactattttctggctagagttttgatccagggtcatctgcttttttggcagctgcaatgctgtttctttaaattccataaatgtttttatcaattttagtttctttttcttaccagtttgatttaattaatttaacacgctttcttgcggtagaatgttggctgcaattcattagaaatttggtttattcagaaaattagagacatcgttaaccccatacatctgggattgataggttgcaaacactttctcttttttgaaaccccgttggatatctcgttaatccatgtcccttccattattaaccc

SEQ ID NO: 60888 - DNA, 524 bp, Glycine max
  Clone ID: PAT_MRT3847_25995C.1
tgagtgaccatggttgtgctccggattctattacttatggtgctcttataagtgggctgtgcaaacagtcaaaattggatgaggctggtcggttgcatgatgccatgatagaaaagggacttactccatgtgaagttactcaagtaactttggcttatgaatattgcaagatagatgatggttgccctgctatggttgttcttgaaaggctggaaaagaaaccctgggtctggacagttaatattaataccctggtcaggaagctatgtagtgagaggaaagtaggtatggcagcgccgttctttcataagttactagacatggaccctaatgtcaatcatgtaacaatagtggcatttatgactggatgctatgaaagctataagtatgctcttatttctgatttgtccgcaagaatatacaaggaaaaccattgagcaatcaaagtcactaagtaacaaaattaatgatgtgatttgacgctttctaaggctggttacatctggatcagtaactagttggat

SEQ ID NO: 60889 - DNA, 170 bp, Glycine max
  Clone ID: PAT_MRT3847_25996C.1
ggctcgagattcttttaagatgtagctagttactctagtctaagtcttgtacacacaaaaaaagaaagttactcaagtctaaattttatcttttcctgggattttttggcttttaagggaagggaaattatcctttaattaaaaaaaaatatcaaaatttataatatttt

SEQ ID NO: 60890 - DNA, 470 bp, Glycine max
  unsure (1)..(470): unsure at all n locations
  Clone ID: PAT_MRT3847_25997C.1
cggacgcgtgggcggacgcgtgggaaaagattcatcacctgaaaactgaggctgagaggatatcaggggatgttgtctccatgctcctcaagcatgtaacaagtgtgaagaattagagaaatattggtgctggggaactcttaagttatgcagaacagtatatctcatttatattgtgtttattgttgactctagatcctggcgctgatagattcttgcttttttgttggctataatacgtggtaccttgctgccatgtattaaaaataatttctgagttttttaaaataaacagttaagaattcataggcatgcctatatgtatcaccgtttcaatagaggtctgaggatcactttgtcagtgtatattgagtaaagccgggacgaatggtttattcttttgtaaacaccatcttattctcctaccataatgnngaantgtggggtgtggggtctaaacaaacacccct

SEQ ID NO: 60891 - DNA, 356 bp, Glycine max
  Clone ID: PAT_MRT3847_25998C.1
gtggtctgaggacttaggaattacaagcagatgcattgaagctgttgctgcaaaagttctaagtcacccttctaaggtgagtttgtcacatagccattcacgaagagtgagggatgatgtgtcttgcaatggcaaccaaagtgtgaggcataacaagtcaggaaacaaaggatggtgggctgaagatttggcagaacttagcatagacttgtattggagaaccatgatagctatcaaatctgggtggaagattccctcaaatcttattggagatgcattgaagatctatgcatctaggtggctaccaaatgagtacaagaatggaggacatatcaagaagcaagctgttgctgact

SEQ ID NO: 60892 - DNA, 107 bp, Glycine max
  unsure (1)..(107): unsure at all n locations
  Clone ID: PAT_MRT3847_25999C.1
ctttcgcatacgattttgcatttttggaacaagnccgaggtgaaattctgggatttgggtaagactaacaactgcgaaagcctttgcccaggatgttttcattaatc

SEQ ID NO: 60893 - DNA, 439 bp, Glycine max
  Clone ID: PAT_MRT3847_2599C.1
ggctcgagctcgcgaaagcgccaaatcccaacaatacccacacctcactcaccctaatgcccaaattccgttattcaactttccccctcaccacctccttcacacctcactcaccacggtggtgcgttaaaatcactggtcgcaattttcctctttcttaaccgcaccatgtcgaataggaagttcggattcgaagggttcggcataaaccgccaatccacctacagcttcgagcgatcccagccccctcagcgactctacgtacctccctccgcgcgccacggccacgaccactacgaagacaccgacatcgacaacatcgacttcgacgacaacaacaacgacgacgggagcaagaataacaacggtggcggcaacgacgacgacgacgaaatcgaccccttggatgccttcatggaggggattcaacgaagagatg

SEQ ID NO: 60894 - DNA, 283 bp, Glycine max
  unsure (1)..(283): unsure at all n locations
  Clone ID: PAT_MRT3847_259C.1
attttccttcaataactctcccaacaaaaaagctaactaatcctcacaccactcnnnnnnnnnnnnnnnnnacttctcacactcattcattctcnattattactatccacaccctttcgttcgttttgtntggttctcatgggtngancttgacccccttgcnactgcnacgccgntnccgnnaaatggagtgggacagcaattccgatctcagcgatgacgacgccgtttcgtatgtcctaaacgacgacnatgatgacgccgtnggacccctccccttccc

SEQ ID NO: 60895 - DNA, 341 bp, Glycine max
  Clone ID: PAT_MRT3847_25C.1
atgagcgaacagcaatttttttttttaacctcatgaatgaattttacaaaagaatctcaaccaattttgtttatgggcccgtcttacattaaaagaattttatatacggaaccccaaaatgggcaccttggtttttaaacccaaaatttccgtccaaaaagtccacaaaaatggggaaaaggcaagggtaaaggaacccttattacaatttgggaaaagaaacattccttacctgtcaaggttaaaggtttattggagccttctgggcccccgggtcaacatgcgaaaaaaattgcacctaaccccttttctcgcgcaaggaaccccaccttatggggggg

SEQ ID NO: 60896 - DNA, 436 bp, Glycine max
  Clone ID: PAT_MRT3847_26000C.1
gaaaacaaaatcagcaaaaataaaaggccccaaaatccgtttctcttatcttccaattaattgagtaactgattaagcgcttcatcttcaacaacaccaaaaaaaacatacaccaaaaaggagttacatttgttcatcttcttcttcttcttcaactccaatttgggtcaccaaaatatcctccacctttatcaaactgaagcatttaaaaaacccagaagggtcaattatttccttgcatttcctagcttaaaatattcagtaggtgcacttggtccatttgcttctttctctccattagcaattattattaccatccccttttaccccctcccttttcttattttcccatttgcaattttaatcaacctttcttcttgatacccccaccccatcaaatccatgatgaaatgtttcaaatctcttcctataagga

SEQ ID NO: 60897 - DNA, 190 bp, Glycine max
  Clone ID: PAT_MRT3847_26001C.1
tttgcttaggtgcaatacagagctattgagggcgcattacacgctcaacctcatactcaacaactcgcgtaaccttctcacccttgacgagaatatccccccccgaaatttcaatataaaatctctcccccaaaaaatctcactttactgtctcctatatgatacacaaaacatttttaatcaccctctt

SEQ ID NO: 60898 - DNA, 448 bp, Glycine max
  Clone ID: PAT_MRT3847_26002C.1
aggatgcttatagaattggtgaatttccctattggtttcaccagacttggacaacaagcttacagctatgtatctcattagttatactttttcgtgctgttggatgggcaacaattgcctccttggtggtgatagtaatcactgtgctttgcaatactccacttgcgaagttgcagcacaagtttcaaagcaagcttatggtgacacaagatgagagattgaaggcttgttctgaggctcttgtgaatatgaaggtgttgaagctgtatgcgtgggaaaccaattttagaagttctatagagcgattaaggaatgaggagctcaaatggttgtctgcagtgcaattaagaaaggcatacaacacctttctcttttggtcctcccctgtcttggtctctgctgcttcctttggggcatgttactttctgaatgttccattgcatgcaaa

SEQ ID NO: 60899 - DNA, 1707 bp, Glycine max
  Clone ID: PAT_MRT3847_26003C.1
ggctcgagtctgcatccatattctatataagtgagaagtgagaagtgagaagaatgagcaatacaagatcttaatttctttcacaaatcacaatggttacttgtcctggttccataataatccatttcttcctcttctcagcgcctctcctttcagtcttatggtcttgttcatcagtttctgcattgaaaccccgtgccttcatcctccccatcgagaaagacccaaccacccttcagtactcaacttccatcgacatgggtacccctccactcacactagatctagtcatcgacatcagagaacgcttcctatggttcgagtgcggcaacgactacaactcctcaacctactaccctgtccgatgtgggactaagaaatgcaagaactcgagccgcacggcttgcattacatgcaccaaccaccctcttaaaacaggatgcaccaacaacacgtgtggtgtagatccattcaaccccttcggcgagttcttcgtgagtggagacgtgggtgaagacatcttgtcctcgctgcactcaacaagcggtgcacgagcaccttccactttgcacgtgccacgcttcgtttctacatgtgtgtacccagataaatttggggttgagggctttctccagggcctggctaagggcaagaaaggagttttaggccttgcaaggactgctatttccttaccaacacaactcgcagccaaatacaaccttgaacctaagtttgcactttgtttaccttcaacttcaaagtataataagcttggtgatctctttgttggtggtgggccttactatttgccacctcatgatgcttccaaatttctttcctacactccaattctcaccaacccccaaagcacaggtccaatctttgatgctgatccttccagcgagtactttattgacgtgaagtcaatcaagcttgacggtaaaattgttaacgttaacacctccctgctttctattgacagacagggaaatgggggctgcaaacttagtaccgtagttccttacaccaaattccacacttcaatataccagccacttgtgaatgactttgtaaagcaagcagcgcttaggaaaataaagagagtgacttcggtggcaccatttggggcgtgctttgattcaagaaccattggcaagaccgttactggacccaatgtgccgacaattgatctggttctcaaggggggagttcaatggagaatctatggtgccaattcaatggtcaaggtttctaagaatgtgctgtgccttggatttgtggatggaggtttggagccaggaagtcccattgcaacttcgattgtgattggtgggtatcagatggaggacaatcttttggagtttgatcttgtttcctcaaaacttggttttagctcctcccttttactccacatggctagctgttcccacttcagacttgtttgacttttcactttcgatcatttcagcaaagtttggttcatttggtgatgactgatgaataaattttatttgccattgtaatcgtatggaatatatgctcatttcactctcggtgtgttgggataaaccaaacattctaagtttgttgtgtatttatttcattataagcactagtcagtaagcattttcatttttgttccatcctacttttatatttctcattgtttacccatactataataaatcaataataaaagttacttag

SEQ ID NO: 60900 - DNA, 360 bp, Glycine max
  Clone ID: PAT_MRT3847_26004C.1
acaaattcaaattccctcctgggtggatggaaagatcaagattggcattgataaacatggtaatgatccaatccaactaatcatgattttgaaggggcaatatgaaattctcattgagacgcgatttgtttaatatggacttgcaccccgaaccgaatcctttacatagaacccggtcatcattgacaagacattcgatgaccttgcctagtcttgaaccctgcacatgacaaggatgccgtggtcaggctcaagtctcatcatctagcgagtgaaaaacagatctgattaatgtagaggtgctgctttcttgaacttgatgaattgtggctttaacatggaccaaaaccttgagagaat

SEQ ID NO: 60901 - DNA, 310 bp, Glycine max
  Clone ID: PAT_MRT3847_26005C.1
gcttgccgtatcttaaaaccggaaacaaaagcatgcgctattcgaacgcaagaacttctcagatcttagctactggtttgggaacgaaggcttaagggaaagaaaatcactgtatgtgctggtgacagactttgggaatgaaaggctttaccactatgagtttattaggtgaacacactcctatttgaaataggaattcacgtgagatgtaaacagagtatgtttctttctcagaaaaatgtacaaactcaagattcagctggtgaaattgtggaatagcgcgaccactctcctatctggtataggactt

SEQ ID NO: 60902 - DNA, 198 bp, Glycine max
  unsure (1)..(198): unsure at all n locations
  Clone ID: PAT_MRT3847_26006C.1
tnnntangntaagtaagntcggaattcggctnnaggtttctgaggntnnnntcantttntnctnnnnnngncgnnattgagtntggatnntagaanccctanngcatgttngatttgangatatagnnatttngaatcaagggtgagtgnntncggttnttacaantaangatggtacnagcgagtatggggtcgatn

SEQ ID NO: 60903 - DNA, 430 bp, Glycine max
  Clone ID: PAT_MRT3847_26007C.1
acgaggtaagacgcgcgactggattgtggccctcaaggcgctgatgctcgtgcacaggctcatgaacgatggtccgccgctcttccaggaggagatcctctacgccacccgcaggggaaccaggctcctcaacatgtctgatttcagagacgaggctcactctagctcctgggatcactccgcttttgtcaggacctatgctttgtatctcgatcagaggcttgaattgatgctgttcgatagaaaaggcacagtctccgccgccaatggtggcggtgatgataggtttggcggaagagacaatttccagtcaccgccgtatgagtacggcggtggtgaatttagaggggaaggcgcttatgggaatgggatggggaagacaagatcgtatggggacatgactggtataaaattcggaagggaagaaaag

SEQ ID NO: 60904 - DNA, 444 bp, Glycine max
  Clone ID: PAT_MRT3847_26008C.1
tcggaattcggctcgagcatcctcctcgttggcctcctcgcctctgggaccttcctctacctcttccgtccctcggatcaacctctcgtcattctcggccgaacattctctgacttcgaaaccctagccctcctctccgccttcaccgtcttcgtcgttttcctcaccagcgtcggatctgtcctcgtttcggctctgatgctcggtgtcgccgtcgtttgcctccacggcgcgttccgcgtgccggaggatctgttcctcgacgatcaggagaattctcaggctaccggattcctctccttcctccgcggcggaggaggaggaggatacaatcgtggtggcggtggatatggtggtcgtagtggcggtggcggtggcggtggtggataccgtagccgtgacggtggttatggcggtggctatggtggtggtggtggtggtggt

SEQ ID NO: 60905 - DNA, 263 bp, Glycine max
  Clone ID: PAT_MRT3847_26009C.1
ggtgattttgtcattggtgtcaagttgacaaccataggcactgtgtgtgcatatgggcactatcctggtatttcagggtctcttctttcgggcaccattgcacagtccatttgacagattactgttgggaatcaaatggcaactgatcgaactccattgaatgtttattctatcaagctaagcttttgtcgcttttcttttgaccgtctccgtagaggaatcgttattgacgtaagtggtgagtgcatcacacttaatcaaaa

SEQ ID NO: 60906 - DNA, 736 bp, Glycine max
  Clone ID: PAT_MRT3847_2600C.1
gccgagggtctctacacgccccagttcatctactgcggcaagaaggccaccctcgttgtcggcaatgtgttgcctcttcgatccattcctgaaggagctgtcatctgcaacgtcgagcaccatgtcggcgaccgcggcgtcttcgctagggcgtctggagactacgccattgttatcagtcacaaccctgataatgacacctctaggattaagctcccatctggttcaaagaagattgttccaactgctgccaaggctgataaggcttaaagagaacgttgttagggttattatatttgattgcaagtttttcagttttgtttttcttttttctgatagtttgtttgttaaactatttgggcaccttcttcagaaccattttcttcccaacatatggagttttcaatagacggtcttctaaaaaaaaaaaaaaaaaaaaaaaaaaaaaaaaaaaaaaaaaaaaaaaaaaaaaaaaaaaaaaaaaaaaaaaaaaaaaaaaaaaaaaaaaaaaaaaaaaaaaaaaaaaaaaaaaaaaaaaaaaaaaaaaaaaaaaaaaaaaaggggggggcccctttttaaagaaccaaattttcctccccctgcttggaaaagaaaaattttttttttggggcccccaaaataaatttacgggcccgggttttaaaaccgtggggccgggaaaaccccggggttccccaaattaatagccttggaaaaaaacccccttttcccaagt

SEQ ID NO: 60907 - DNA, 257 bp, Glycine max
  Clone ID: PAT_MRT3847_26010C.1
atagaagcaggatggacatattatgcattacattagaatacagggggtataccctgatagtatggcgatcaccaatacattaaaatcatagtgataatgtaactgattgaactcccaacatgggctgaattgtatggctgatttaaagggcagaatggactagggcagcagtaataacacatatcagtaggaaaggctttcttccatccattgttgcaggctaagaccaagaacaatccaatcttagattagctata

SEQ ID NO: 60908 - DNA, 271 bp, Glycine max
  unsure (1)..(271): unsure at all n locations
  Clone ID: PAT_MRT3847_26011C.1
ananatnggagcgtggaacctctctctntctctctntctctctnaggaaaccggaatatcncanttctctgannagatccatccgnngncgnntcagngataatggctccgtncancngcnatnanacggcaccgttttcggnttccttgganccgcagcngcnctcgtcttctcctgtatgggagctgcctatggnacagcgaagagtggcgtttagcgtggcttcgatgggtgnnatganaccagagctggtgatgangtctattgtcc

SEQ ID NO: 60909 - DNA, 1283 bp, Glycine max
  unsure (1)..(1283): unsure at all n locations
  Clone ID: PAT_MRT3847_26012C.1
gctgcttgattctctcatcctgttaatcagcatggntggattgacagagcctcaagctaggtaggaagtggttatattggccttgaattcagtgatgtatatacggcccttggaagtgaggttacttttattgaagctttagaccagctcatgcctggatttgatcctgaaattagcaagttggctcagagggttctcataaatccccggaatattgactatcatactggagtttttgcatccaagatcactcctgcaagagacggaaaacctgtcacaattgagctcattgatgcaaagaccaaggaacagaaggacactttagaggtggatgctgcactaatagcaacgagaagacgacagaagggggaatttcagtggttgaacaagtcactggaagagatctcgtgctcaatcatcctagcatcccagctgcttgtttcactcatcctgaaatcagcatggttggattgacagagcctcaagcaagggagaaaggtgaaaaagaggggtttgaagtaagtgttgccaaaacaagttttaaagctaacacaaaggctctagcagaaaacgaaggggagggacttgccaagttgatatatagacctgacactggagagatactgggagttcatatatttgggttgcatgctgctgatctcatccacgaggcatccaatgcaatagcattaggaacacgtattcaggatataaaatttgcagtacatgctcatccaactttgtctgaggtgcttgatgagctatttaagtcagcaaaggttaaagcagaagcttctgagccaataaaggaagctgttgcagtttaatcttccttaagtatctgctttacaagagagtttcctgtacaatggagtttcaatgcatttcacatcttctggcggaatacttcaacacattcagtatcctacaaaagaagggaactgttgaaggagtctcgccaatggtatcagaatgggatgagtatcgatatattattttcttggcatatagttagtgtccagcaaatatcatattcgttatttttgcactttagaaactcgtttcctccaagttgtggtctagatgcttcttgttcgaaggcctgtgagactgtagtcaatttcttagtgtttcggttttgattgaacctgtacatgaactgtcaatttttctcgtgtaaggtttctcatgaaataaccctgttgacacaataacgcagttatttgcatcgatctttccaatcattgtatggcaagaagaagctcaagggacacgagatctaa

SEQ ID NO: 60910 - DNA, 576 bp, Glycine max
  Clone ID: PAT_MRT3847_26013C.1
gggaaaagaaaagaaaaagaaaaaagttgctagggttttcactgcacttgaggttcgtagaggagagaaattcaaattcagtgcaaagaaattagatttttgaacgaaagcgacgaactttaagttcatggaccgcttgcgtcctaggaatcgagcggtcttttctggatttacaaatgccgagattgagaaaatggagaaattgttaagggaacctacagggggatcattgggcagggaattttaccaaaaactggctcgaagtttcaactattcctctggtcgtgctgggaagcctatcataaaatggacagaggttaatcttctttcttactaactcatgtattttattttcttaattttgtgtacacgatccttcaaatactgttgctttcttttttccgatattggagagtttgtttgtctttgtgcgttattttaaagtagattttaatatattcttttattctgggggaaatttagattgaaagttggtttcagactaggctccaagactcaccacaagtccctagcagtgagttgatggttcctaaatgtaagggaggtgagactttt

SEQ ID NO: 60911 - DNA, 254 bp, Glycine max
  Clone ID: PAT_MRT3847_26014C.1
gaaatggttaaccatgctgattaatctttaaagcattcataaaacagtcgcagtttatcatatgcaatgtgtgcagcaagaataccacagctagaggccaacattaatgaaagcactctggatagcaacagctggcagaaacattctactgcacaaactgtaaatggagatagcaccggaagcttaaaaccacagatcttacagggcacaggattactacgtcaatgctacataaaacgtgctcccacaaaccc

SEQ ID NO: 60912 - DNA, 173 bp, Glycine max
  Clone ID: PAT_MRT3847_26015C.1
agatgggagaaaaaaacagaagggaagggggggaatgacggagaaatcatggacgaccggacgagcgtaggcgtgtggatggcgttctacgatgtcgacaaggttagagagtaggacaagcgaagcagggaattgcggaggaataggaaaacctgtaagagtggaagagaggg

SEQ ID NO: 60913 - DNA, 539 bp, Glycine max
  unsure (1)..(539): unsure at all n locations
  Clone ID: PAT_MRT3847_26016C.1
gccggaattcccggctcgacccacgcgtccgtaggtttttggggtgttttgcttggctttttgggtacctttttggtaaattttataaaaaaaaataatgttttttgttttattcttgcatgggtttctacgagttcaattctgttcactttgaggttcactttgaggatctgttttacttgtgtaaagatggccatgcttcgttccttatttggttttagggtaccctttttgttaacctgtgcttctttagaagcaccccgaggtttttattctcgggggaaaatgtttcttctgagagcactggcgtgtgttgaatatgaattcacttgatcatgtttggatataaatcatataaaatttcgtacacttttaagaagagagagacacaattttcacatgagatgttcatgtgaaaatttatcataagaatcttcttttgcttttgtgtaantgggntatgtaaatttcactaatccgggntttctttattctacttggtatgcagctgcaagatgtacccacacttgagctacacc

SEQ ID NO: 60914 - DNA, 603 bp, Glycine max
  Clone ID: PAT_MRT3847_26017C.1
agtggcaacagaaataactattccttaacaaaggcttgttcaagtcatgtgcatttggcacaaaaagaggatactcaaactaaaatcaaattatatcctaggtcctagccatgccccgtttaacatcttcaaatccacaaccaaagcgtgtaatatgaatgatggagcctaaaacattcaaccatgtactaagatgtgtcagcatagaaacaaaatttctatgctacatttgatttgagtacaaaacagaaccaaaacaggatgcaaaacatgacccttagttggtttctctctctatagattagatgtcactatccttcattcctaacacggtctttatttctctctttcttttggggtctggtgcagtgcagtgccgtgccaacaaggtctaaccacggctttggctaagaacttatgaatttatcaaatgccctggtatgagttgttatgttgcagtgtggtcattgataaattacctccaaagtcgtcatattatgcagctagccagctactttctttgagtgatcaagcagtaaagaattttcaagccgttttttctcatataattttaaaagcgatcgtgtcctttgatagcccatt

SEQ ID NO: 60915 - DNA, 123 bp, Glycine max
  Clone ID: PAT_MRT3847_26018C.1
atgttcacgtgatgaatgaacgacctggacacatcccaattgagaagattcctgaagacatgcatggacagtcgggatggtgtagtgaagtcgcctcttacactcttggtcctttgacaactg

SEQ ID NO: 60916 - DNA, 381 bp, Glycine max
  Clone ID: PAT_MRT3847_26019C.1
cttcgttcttttttttttttttttttttgatgggagaccctaccaaatatgctttttggcgtgttatgagagtacactcgcctagataccatggatacggtgacacaggccggcacatatcgcccaggcaaacttttttgatggaagataggcacccacggaacctggattatgtgtccctcgatatatgtttttatcgaacaataggctgctaatcgccggggcatttattgattctataacctgtctggagctcccaaactgtggcaatgtttgcccaccctagattcactagagcctaggaatgaaccttatgcgcctggggcctcacaaaaaggggaactgagcggcgtgccatggtatgggtggtggattatttga

SEQ ID NO: 60917 - DNA, 1335 bp, Glycine max
  unsure (1)..(1335): unsure at all n locations
  Clone ID: PAT_MRT3847_2601C.1
gtctctcggcaacggatatctcggctcttgcatcgatgaagaacgtagcgaaatgcgatacttggtgtgaattgcagaatcccgtgaaccatcgagtctttgaacgcaagttgcgcccgaagccattaggccgagggcacgcctgcctgggtgtcacacctagaatccccattccagagccaaggtaggttaaacactcttcttcatcgtcgtcgcaatgggacgtgtgatccgtgcgcagcgtaagggagcaggctcggtcttcaagtcccacacgcaccaccgcaagggccctgcccgcttccggagcctggatttcggagagcgcaacggctacctgaagggtgtcgtcactgacgtcatccacgatcctggccgtggcgcgcctctcgctaaggtcgccttccgccacccgttccgctacaagaagcagaacgagctcttcatcgccgccgagggtctctacaccggccagttcatctactgcggcaagaaggccaccctcgttgtcggcaatgtgttgcctcttcgatccattcctgaaggagctgtcatctgcaacgtcgagcaccatgtcggcgaccgcggcgtcttcgctagggcgtctggagactacgccattgttatcagtcacaaccctgataatgacacctctaggattaagctcccatctggttcaaagaagattgttccaagtgactgtagggccatgattggtcaagttgcaggtggagggagaactgagaagcctcttctcaaggctggaaatgcttaccacaagttcagagtgaagaggaattgctggcccaaggttcgtggtgttgctatgaaccctgttgagcatccccacggaggaggtaatcaccagcatattggtcacgcaagtactgtcaggcgtgatgctcctcctggacagaaggttggtctcattgctgctaggaggactggtcgtcttagaggacaagctgctgcaactgctgccaaggctgataaggcttaaagagaacgttgttagggttattatatttgattgcaagtttttcagttttgtttttcttttttctgatagtttgtttgttaaactatttgggcaccttcttcagaaccattttcttcccaacatatggagttttcaatagacggtcttctatatttgtttggttgcatgttcaatgctgcagattattgctattttatctagttcctactggttaaattagttcttttgacaaattgaattatatcataccatttattgattaaatttannaaacaaaaaaaaaagaaactcaaataaacaaaatcaagatccattttaaagacaaaaaagatgaa

SEQ ID NO: 60918 - DNA, 399 bp, Glycine max
  unsure (1)..(399): unsure at all n locations
  Clone ID: PAT_MRT3847_26020C.1
tatttcttcctatctctgtctcattaccccttcattgagtccactttactcacgaatcttctaaacttcaacaacaccctccaaccatatttaatgatgatttttcatatntacctcccattttatttatataaaatataattttatatataattttttttttcatatatcctctcctatatttaaatacatactaccccaattcctctatttttaaaatctcttttttcttaaatatattaaaatcacctaaatttaatttttctttatatcttttcattccatacctatcacactcctcaatttttccccattccacccattttttttttcacaataaacccaaatcttaatattattccaaactatctttattatctccatattatatacaaattt

SEQ ID NO: 60919 - DNA, 386 bp, Glycine max
  Clone ID: PAT_MRT3847_26021C.1
agactacactgagcatcgtctagctatctcgatcgaactgtccaaggtcctgtcacagaccgatttgcagctaaaagtaatagccaggccggtgcgcgatttaaagggtaaacaaagcacgtgggcccatacagagcgtatgcttagcgaggccgttaggcgtatatggattattatgcgtgagccccgatgggtagctgcaaaatataacacacacgtgcgggcatagaggtgatagcggcggtaatggcccaggaattgtagatagtaggccaaataggataaattgccgccgttatgccatgagttctattacaaaggggacacatatacgaagacgtaatggtacaaggggtagtaacaaagtagtgcttgtagtatagata

SEQ ID NO: 60920 - DNA, 239 bp, Glycine max
  Clone ID: PAT_MRT3847_26022C.1
cacgagcgaaatatctatacatcctctttgcgatatcggttgctgatctgaccctacctttgacgtatcgaatccgtatatccagatcaggtctgagcaatctggttggtagaacctttggtcttagagagtcaagttttatgtctgaattagacgatcaaattcctactgccttcgatccttttgctgatgcaaatgctgatgactcgggtgctgggtcaaaggactctgtccgtatc

SEQ ID NO: 60921 - DNA, 243 bp, Glycine max
  Clone ID: PAT_MRT3847_26023C.1
cccacgcgtacggtcttacgagcgtagggcttttctcatccatattctatctccacgccgctgagtctgtttcacactcattctatgcgtctatctctcggtcacaccctatactttactctctgtgtctgacagctaatatgcaaggtggaatgagatcactcttggcacatgggaatgtcattagaattgctgttctacaacgcgtgcgcatgttgaaccctctggtacagacaattgctt

SEQ ID NO: 60922 - DNA, 927 bp, Glycine max
  unsure (1)..(927): unsure at all n locations
  Clone ID: PAT_MRT3847_26024C.1
atctctaaatactgagcgcacggccgtgacaatccaaaacccttacccgcctacactccgcacgggctggtgtcacacccctcatgcaggagcaattgcaacaattagcaaggcaaaaactaagtgatcaccagggttcaggactcggcaaaaaggggaagttggtagtgattggtcaagattgtgtggatgcacttcaggcacttcgaagtgctggtgaagaggtgcgaattggatgccaaggatttggctggaaaacagagaaatatgcagaatttaaaaagaaagcgtaaagaggagaaaaagcgtttgcgtgatcagcgtagaaagcagaagaaaaagctaaaatacggggatgaatagaattgtatacataactgagccattagttaaaattttgcatcaaccaaagttttcattagttgctgaattttttaaggcagcgtctgtagtttctccttcctagttttagagcttcgaatttgagtttgaatatatatatatatatatatatatactgtatcgagcagtggatgtgatcatgtgattgagtttatattaattatatcatgggaaacccattgtcctctttgatagttatcccaaaacagtcatatgcttgaagattgcattgtttctagatgcaaatcgaccagattgctgtcacagggactcttggacaaattttgcctagtcttcttacttttcatccagcaaatgttgaattgaatgttttgaataacaaatctggataagtaatttttgctgggaagaaagaccagcagggagtatgtatttcgtttctttttcttttccaatcaaatagtcaatgatgtcatgttcacattcaaattaagattcatggaaatgtgagacagctgacaagtaaagacaatatnnnnttgaaataattagttatagaatcac

SEQ ID NO: 60923 - DNA, 865 bp, Glycine max
  Clone ID: PAT_MRT3847_26025C.1
gctggggtcaaaggtgatgagagaaatggaaactacaatataatatcaggcacctcaatggcatgccctcatgttactgcagcagctgcctatatcaaatcatttcatcctgattggtctcctgcaacaatcaaatcagcattaatgactactgctaccccaatgagcattgcacttaatcctgaagctgaatttgcttatggtgctggacaaatcaaccccatcaaagcattgaatcctggcttagtatatgatgccaatgaaattgattatgtcaagtttttgtgtggacaaggttatgatactaaaaagctaaggagtattacagctgataatagcagttgtacacaagccaataatggaacagtttgggatctaaatctcccatcctttgcactctccatgaacaccccaacattttttagtcgcgttttccatagaactgttaccaatgttggatctgctacatcaaaatataaagctagagtaattgcacctccatctttgttaaacattatagtggagccagaagttttgtccttctcatttgtgggtcaaaagaagtccttcactcttaggattgaagggagaattaatgtgggtatagtttcttcttctttggtttgggatgatggcacttcacaagtaaggagtcctattgtagtgtactctgaataaaaataattttcatgtaaagagtctacctattgttgtgtatgctgaataaaaatgatttgatgttagtaaaactttgaagtattcataaaatcttttggggtgattagtgtgtgtaagttatttaaagtaaagattaaatatgttttcaattttcataaatataaatacaagttttaatttctgtctc

SEQ ID NO: 60924 - DNA, 781 bp, Glycine max
  unsure (1)..(781): unsure at all n locations
  Clone ID: PAT_MRT3847_26026C.1
taaatgatnnngttgcatcaaagccaagaggccattatgtttgtaaggcatagcatgtgcaagttacgtataaactttaaaaccaaagggaaaataaacaccatggtttttccctttagtttcttcctatagagttcaaaatgctatgcacaccaaaacaccacaatggaactactcccctatagaaatggagcgtaacctcaagggcaattcctttgccatggagaaaaagaacaacctcttttgatttacagtcaccaaagggaccatgctgccaagaaaacatctcccaaaaattcaaccatggatggcctttgtatggaaccaagggtgaaaagttaccccaccacaccaattcatcaccttttatactgtatgaccaaatgtctattttgcagcataccagttttgagcacaattggcatcgacagagaggccgactctaagaaaattctcaccattgaaaggtttcgtcatgcactcaacaactatagcctttgcaacctcggcagactctgttggcccttccaatatgacttcatcatgaacctgtagaagtaacttccatccaagctccttcaacttcatattgttggatatttctaacatggcgcacatggcaacatctgctgcactaccctgcactggtgtattaatagcagctcgctcaatatgacctttgtggtagnnnntagctaggtctattttnnnnanncgccgggctcgcncnnnnnatgtgtgaacacgttgagattcacaagcttctttttnacgttctttt

SEQ ID NO: 60925 - DNA, 415 bp, Glycine max
  unsure (1)..(415): unsure at all n locations
  Clone ID: PAT_MRT3847_26027C.1
ggaattcggcacgaggtccaagagaggcacattagccgataaaagaaagcagtgaatgtgggagtggatgaatttaaagactgtagtgagcttagtaggaggctttatcgtctgaaacgaatcagacacgcacagcttctgcttatagagagagagaaagaaacaacagacaaaagtcatcatttaccaataatacaccctctcattaccaccttatcaaacatcaacctcgtgattaatgaggaaaccacagacaatccagaggctataacatagaagagggagagagagagagacaatgttgaattgaaggggatctaaatgggaatcaccatctattttattnctttttctttataatttatttcatgaaaaagaataactatattatatattacatgtgtgagtgtacttg

SEQ ID NO: 60926 - DNA, 442 bp, Glycine max
  Clone ID: PAT_MRT3847_26028C.1
aaccaagcacagggggtggatcccttgacaaaacctaaaagtttccatttaattttttttgattttggaaagaataaggaataaaaaagtttgggcaattacaattttctaaagcaatttggccaaattaaattacttgaaacaaaatgttcccaaaccctttttgaatgagtaaacttacgggaaaaacaggtaaaaaggggaacaaactgtttttcgcataaaaacataaaattgggggggaattttttactggaatcaggaggggttttttttcaccactcaaaatgctggaaattaagctccaaaaaaaattaagcaaaagttcccctttttaaaaaaaattttttttccaacatgccttttgtttttgctggggagaaatagcaaagcaaactttttttttttttttctggggaaaacaagtggggcccaaagtaaa

SEQ ID NO: 60927 - DNA, 421 bp, Glycine max
  Clone ID: PAT_MRT3847_26029C.1
gtgttaaaatttaactttttttaatgatgtgtaacatttaaacctgattgtattcgatgaatatcttaaatcgaatttagaatgatataaaaaatcaatatagtttctgaatatataaaaatatgcaataggaaataggaaatgtaagttattgtcaaatttatttttgaatattataacttgataaaatagactcggaggatcaaatttgttatatttttttatatttaaaaattaaatttaaatttttttattttttaagattaatttgttaccattttagggactgttattattttatcgactaaaataaatatttatcctatattaaaagatgtaacttcatggtaagacaaaaaaaaatacaattcttttagtagataatgtctgaacgaaattgtcattgaaaaaagttttgtaa

SEQ ID NO: 60928 - DNA, 1073 bp, Glycine max
  Clone ID: PAT_MRT3847_2602C.1
gctagaatcccagttcaaaggtaaggtaggttaaacaatcttcttcatcgtcgtcgcaatgggacgtgtgatccgtgcgcagcgtaagggagcaggctcggtcttcaagtcccacacgcaccaccgcaagggccctgcacgcttccggagcctggatttcggagagcgcaacggctacctgaagggcgtggtcaccgacgtcatccacgatcctggccgcggcgcgccgctcgccaaggtcgccttccgccaccctttcagatacaagaagcagaacgagctcttcattgccgccgagggcctctacaccggtcagttcatctactgcggcaagaaggccacccttgttgtcgggaacgttctacccctgaggtccatccccgaaggagccgtcatctgcaacgtcgagcatcacgtcggcgaccgcggcgtctttgcccgggcgtctggcgactacgccattgttatcagtcacaaccctgataatgacacctctaggattaaactcccatctggttcaaaaaagattgttcctagtgactgtagggccatgattgggcaagttgcaggtggagggagaactgagaagcctcttctcaaggctggaaatgcttaccacaagtttagagtgaagaggaactgctggcccaaggttcgtggtgttgctatgaaccctgttgagcatccccacggaggaggtaaccaccagcatatcggtcatgctagtactgtcaggcgtgatgctcctcctggacagaaggttggtctcattgccgcaaggaggactggtcgtcttaggggacaagctgctgcaactgctgccaaggctgataaggcttaaagagaacgttgttagggttattttatttgattgcatgtttttcagttttgtttttattttttctgatagtttgtttgttaaactatttggggcacccttttgagaaccattttcttcccaacatatggagttttcaatagacggtcttctattatttgtttaagttgcatgttcaatcctgcatattgttgctattttatctcgttctaatggataaattagttcctttgac

SEQ ID NO: 60929 - DNA, 221 bp, Glycine max
  Clone ID: PAT_MRT3847_26030C.1
tttttcacccgtatttgcctccttgcgtttgcatttccccaaggcccagaaattttggatgtgagaagaacacagacgatgactaatacgatggtagggttgagaccctcactctcactttcaattcctctttcttattcctttccatcctcttctcccctttctctcaaaccccaccctctccttctctccccaaaaccacacccacttctcacattcgc

SEQ ID NO: 60930 - DNA, 340 bp, Glycine max
  unsure (1)..(340): unsure at all n locations
  Clone ID: PAT_MRT3847_26031C.1
acaagtttgaggctaatgttgtcatttcatggagggattactttttgagagttgtaccaactgcttgtggaactgcaatggatgttaacttgagcaatgtatctctagttttcatctctgtcacatttgctacaatgtgtaaatctgctgctccaatttttctccttctgtttgcttttgctttcaggttggagacaccaagtgttaaactattaagcatcatcttaatcatctctgttggcatattattaacagttgcaaaagagacagagtttgacttttggggatttgtactttgtatgcttgctgcntgtatgtctgggtttcgttggtgtatgac

SEQ ID NO: 60931 - DNA, 389 bp, Glycine max
  Clone ID: PAT_MRT3847_26032C.1
acccaaaagttttttttaaaactaatttaatttttttataccaatacattattattttaactttaaattaaaaaattgcaagggccctgaggggcccccgccatacaaatagctataacttttatgggaatcttttaatcccacagtttattggacaaattttgctttggggagtactataaattttaaaattttaaaaattcaatttcctttctttaattgactaaacccattgggcattgtaacaaagccatttgggcatgtaaatcaaaaactggttaaatttcactccataaataacagcgatgagggtcacaggctggtgtaacccctaattggagaaaattgttgggaaatgaagaacattaccagaatttgaagccggaatt

SEQ ID NO: 60932 - DNA, 250 bp, Glycine max
  Clone ID: PAT_MRT3847_26033C.1
tgaaacgagcaatgaattttttttacatattttaattgtttcacaacggagttttttttttttttttaaaccaattgccatttatatgttcatgaaccgagcaaggggtaaagtccatttaaaaaaaaaataaagttatatcccaactgcaaaacatttttcaaggaggggtttttttcaatatttaaaagggggttggccaatacaaaaaaacacgcatgtaacagggtctttttaaccccctccataa

SEQ ID NO: 60933 - DNA, 1734 bp, Glycine max
  Clone ID: PAT_MRT3847_26034C.1
gtgaggccattttggtcatggtgtgatcattttctctgctcttattcttaatgaggcttatatccaagtttggccggttgcatattgcacaaggcgtctataaaagtaacatcactgaaatcattgtcaaattgacactgctttggtctaaaaggacttcaaagttctgttagatatacagtgttattctgctttcgatcgctctattattcatttgctaagaccttagagaagacagaggatgggtaccctgcttccagatgaaaaatcagagaatccaaatgctttggaacaacttcaacaccaaaaagatgtggatgcaggcgctctctttgtcctcaaatccaaaggttcttggatgcattgtgggtaccacttgacaacttcgatcgtggcaccacctcttctaagtcttccttatgcattcaccttccttggatggacggctgggatcttaagcttagtgattggagctttggtcactttctattcatacaatttaatatctagggttcttgaacaccacgctcagatgggtatgcgtcagctacgctttagagacatggctcgcgatattttaggtccagggtggggtcgttattttgtcggcccaattcaattcgcagtctgttatggtgctgtagtagcttgtactctcttgggaggacaatgcatgaaggcaatttacttgctgtcaaatccaaacgggaccatgaagctttacgagtttgtaattatatttggatgcttcatgctgattttggctcaaatcccatctttccactctttgaggcacattaatctagtgtccttggttctgtgcttagcctatagtgccggtgctactattggttccatttacattggagactcatcaaaaggaccagaaaaggattattctttgaaaggtgattcagtgaatcgcttatttggaatcttcaatgcaattgctatcattgccacgacttatggaaatggaatcattccagaaattcaggcaacattagcaccacccgtaaaagggaagatgctcaagggactatgtgtttgttatcttgttcttatagttaccttctttagtgtatctgtatccggttattgggcatttggtaatgaatcagaaggcctcatcttaagcaacttcgtggacaatgggaagcctctggtgcccaagtggttcatttacatgaccaacattttcactataacacaattatctgcggttggtgtggtttatttgcaaccaacaaatgaagtgctagagcaaacatttggagacccaaaaagccccgagttctccaaacgcaatgtaatccctagagtgatatctcggtcattagctattgctatttcaaccactatagcagccatgcttccattttttggagacataaactctcttataggagcttttggctttatcccacttgacttcatcttgccaatggttttctacaatttgacatttaagccatctaagcgaagccctgttttctggttgaatgtgataattgttgtggctttctccgcattgggagctatagcagcagttgcagcagttaggcagatagttcttgatgctaaaaattaccaattatttgctaatgtatgatcatgttggaccatccaatgaagttttgttgttctatgtatcatggttcatactctagtagtttaaaaccaatcattgagttatttcaattaatataattatataaagactattgcagaacg

SEQ ID NO: 60934 - DNA, 342 bp, Glycine max
  Clone ID: PAT_MRT3847_26035C.1
acgcgcgtttttgcgtccgcccacgcgtccgcctcactttggcttaacggctaagccatggctccaaagggcacaccacgcacatgccactcctccagaccgccaacaaactgatgcattgttcgatgccaggaaaaaggagaggactcgagactggcccgttctcatcggacagggaaaaacagtaaccgagatggtactcctgggtagcagggtgactcgagagagcccgagaccagaggtgcacatctacttttggaggactgtgtctatgtctgctctaaactggatgtatgtcagagacgacatactgcattagttgactagacttggacagacaac

SEQ ID NO: 60935 - DNA, 240 bp, Glycine max
  unsure (1)..(240): unsure at all n locations
  Clone ID: PAT_MRT3847_26036C.1
aattcatagttttgnttcctctcctggaaggtcacaattgtggggggactaatcacatttaccgccaatttcccacaatattaatgaaacaagatgaattcacaatcataatttataaacatttgctcaaaccaatttattctgagaaaagaaaagggcacattccttttcactatattcacaaatttcatcttacaattttattctacaaaaatattggtcaaagaataattgtaatca

SEQ ID NO: 60936 - DNA, 187 bp, Glycine max
  Clone ID: PAT_MRT3847_26037C.1
gtggctgtccaagtgattggcctatgtctaccaaaaggccgatgcttaaattcgctggaagtgaattctctggggttctattctaattttaattatttaaaaactttggttaatggttttgttccattagcgttaagaccgtctgggctttgattaaacctttatgaatactcgttcgctttggatt

SEQ ID NO: 60937 - DNA, 271 bp, Glycine max
  Clone ID: PAT_MRT3847_26038C.1
acggctgcgagaagacgacagaaggggatgacagaatagtaaacagtatcgacttgaatttgagtgatgaatccgttcctgaagccctactctggaaattttgaacgtcacgagacacaagtttcttcaacttgctgggtcccacacagtcgctttctctgtctattttcctcgcagatctcaccccactcctatatatacactcccttcgagatctgcttcaagctctgtctttttcttttccttccacccctcactcttacgcttttgt

SEQ ID NO: 60938 - DNA, 715 bp, Glycine max
  Clone ID: PAT_MRT3847_26039C.1
aacaaatcacaaatgtgagactgatacataattattttatttgaatcccgagctgaacagtcttctacttcatcctcattcacgcctccaaactttccttttcatacctatgatacgacgtgtccagttgcggtgattttcagggagtatgcgtttcatgttccgttgccgtgctttctccactgaaattcctcactgccaaacaatcttttgaggccattctctcgccaactgtgagcaagaaaccctctgttcataaacaatgtggaacattgctcggacactaacaggagataatgaagatcaagaagagggtttgttgggtgaggattcaggtggcctctgctccctctctacaacgcagtcaatgattgtttttgcaaaacccatcaaatttgcagcattgttcacctttggcaacctgttagcagttggaagtacagcctttcttcttggacctgcacaacaattgggaatgatggttgaccctgttcgtgtttttgcaacagccatataccttggatgtgtggttatagcacttatctgtgctctctggattcatagcaaagtgttgaccataattgctatcataatcgagatcggtgcccttatttggtatagcctcagttatataccctttgctcgaagatggtttctgagttgatgataagatatgtgatacagaacttgaaaaaaaaaaaaaagcaatcaaggt

SEQ ID NO: 60939 - DNA, 233 bp, Glycine max
  Clone ID: PAT_MRT3847_2603C.1
atccaaaaccagactttattagattgaaaagcgtaactgtgcattgagagaaacacataaatgctaatttaatgaacaaagatacacccctattatcccccaagagcagtgttcgctccccatgccctttgaatacattggacgtgatggaagcctaagacagtcttcttaattaatgattatatgggtttgcaccaggagggaggacaatcaacagtgcggctgcaacatct

SEQ ID NO: 60940 - DNA, 461 bp, Glycine max
  Clone ID: PAT_MRT3847_26040C.1
caacgcgtcttgcatacctatgatacgacgtgtccagttgcggtgattttcagggagtgtgcgtttcatgttccgttgccgttttctccactgaaattcctcactgccaaacaatcttttgaggccattctctcgccaactgtgagcaagaaaccctctgttcataaacaatgtggaacattgctcggacactaacaggagataatgaagatcaagaagagggtttgttgggtgaggattcaggtggcctctgctccctctctacaacgcagagaatttatggatttgcttcttgtttggttgctggtctggcttgcatgttactgtcaatgattgattttgcaaaacccatcaaatttgcagcattgttcacctttggcaacctgttagcagttggaagtacagcctttcttcttggacctgcacaacaattgggaatgatggttgaccctgttcgggtt

SEQ ID NO: 60941 - DNA, 311 bp, Glycine max
  Clone ID: PAT_MRT3847_26041C.1
ccacgcgtccgttttgctttcatcaacgctttctcttggaaattttaattgttgcattgattttgagttcaggaacaacgactggacaagcttttaagtgtataggaaaatgctaccgtcctttagattgtagggattattgcagtagcctaggttttaagaagttttacggatgtattttaattgcgagactttgctgttgtagtgattgagttatattgtacccatagttattttataaaatttcaataaaatgggtgtttaaaaaaaaaaaaaaataaaacaaaaaaaaaaaaaataaaaaaaaaaaa

SEQ ID NO: 60942 - DNA, 253 bp, Glycine max
  unsure (1)..(253): unsure at all n locations
  Clone ID: PAT_MRT3847_26042C.1
ggacacatgtaattatatcaacatgccttcctcgcatcatgaacttngagcctttgaaactttcatacttatctggagttgaagcaatgtnctttaatgctaggtagtggcaaggactatccagttgccgaggttgatgccctgagaattattgaggagaaagttggaaggttaactcttggccttgccattatcagtgcaattttgtctgaactacccataacaccaagcaggctcctagataccataaata

SEQ ID NO: 60943 - DNA, 177 bp, Glycine max
  Clone ID: PAT_MRT3847_26043C.1
gccccttcctccaccaccacagcaccccaccacacggggggattatcagccagaacacgccctccggaacccgaagccgtcggagagaataagcacccggcaaagaagcccgcgcagaaggccccgccggagaccacgaaagccgcgacgaagaggccctacgaacccacctagggc

SEQ ID NO: 60944 - DNA, 1067 bp, Glycine max
  Clone ID: PAT_MRT3847_26044C.1
tggctgatggaaaccctgatccatcagacatactctctcctgtggatgctgatggccatggcactcacactgcatcaactgttgcaggcaatctggtcccaaatgcaaatctcttcgggttggccaacggaactgctcgtggcgccgtgccatcggctaggttggcaatttacaaagtttgctggtcatctagtggatgtgcagacatggacatacttgctgcatttgatgctgctatacatgatggtgtggatgtaatatctatttccataggtggagggaatcctagttatgttgaaggctctatatcaattggtgcattccatgccatgaggaaaggtataatcacagtggcctcagctggaaattctggtccaagcctgggaactgtaaccaatactgcaccatggattgtaactgtagcagctagtggcattgacaggacctttaggagcactgtacagttgggaaatggaaaaaatgtttctggggtaggtgtgaattgtttcgatccaaaaggaaaacaataccctcttataatgggggttgatgctgccaaagactcaaaagacaaggaggatgctggattctgctacgaaggcacattacagccaaataaagtgaagggaaagcttgtttattgcaaattaggaacatggggcactgaatcggttgtgaaaggaattgggggaattggtactttaatagaaagtgaccaatatcctgatgttgctcaaattttcatggcacctgctaccattgtgactagtggcacaggtgacactattaccaaatatatacaatccacaagatcaccatcagcagtgatatacaagagccgtgaaatgcaaatgcaagctccatttactgcttcattttcatctagaggcccaaatccaggatcccaaaatgttcttaagcctgatgttgcaactcctgccctgacatctgggcttttatactctcaggaagtccttactggtttgaaaggggacactccaatttcaaaatttattctaatgtctgggacttccatggcatgtcctcatgttgctggagtagcatct

SEQ ID NO: 60945 - DNA, 517 bp, Glycine max
  Clone ID: PAT_MRT3847_26045C.1
ggaaaccaagatctgcacctttcatgtcgtgcctgagcaaagttttctcgtcttgttccaccggttgaaactacccgagtgagccatggttgatggtaccctaatcctgtctaatttacttatcatctgatgcgaggaagaacatgaaggattctgatactagcgtgttgagattactgttacctttttttttgagtggtagttttacccaacaggcaggcacttgatattttattagcccttctatgagttcattttttgttgttccttttaccaatctctttgctatctgtcatcttgtgtatataaatttggctgaccaacaaaatagtgtgataggaactctgaaagtaccataagggatcttttttgtgaatattgtggtttatggctgtgtgcttcctttcttgtttggacttctcgtttgtggaagtcccactagtctgcatgtatgaaagggagcatttactaattaaatttgatgataaagaacttcagacctgtgttattttatccc

SEQ ID NO: 60946 - DNA, 268 bp, Glycine max
  Clone ID: PAT_MRT3847_26046C.1
agctgaatacattgcaccttatctcttattgtaccaacggggtgctaaagactggcgactccggtggttggagcattcaaaatcattcaccaatcgttgttgccctcctggtgcgggcggctgctctatctattggacggacatgctttcatgaaaagaacgaaacactgttccctaccgaagacactgtcacacaggggccaaacctctactgtcgacgtagcggcccgaactgaacatgctacgatcgcgggacgaaagatctatc

SEQ ID NO: 60947 - DNA, 356 bp, Glycine max
  Clone ID: PAT_MRT3847_26047C.1
gtggggcccacaagaaaacacacatgggaaaaccccctccagaaccaaatccccgacccacctacaaggggaaccaaaaaaaaagggcaaaaaaaaacaacaaaggggaaaaacaatacaaagccaaaaaaaacaacagattcttcacataaccgatcaaaaaccaactaaaagggggccttccttgcaattgttgggacccttccaccaatacgttcaccacaaaaaacctcgggaaaaacggttaaaaccccccggccactcaaaaaccacgaaagagctgctaaaccccacccaaattctccgtcgggtaaaaaaagactgccaattgcccccaatgccacccccaaactttt

SEQ ID NO: 60948 - DNA, 255 bp, Glycine max
  Clone ID: PAT_MRT3847_26048C.1
cgcggccgcgggcgcgtgggcaaccaattttatttccaatacgtactgtgtattaattcaggtcttttttattgatgtaaataagatttagcttctatttggccaaaggattctccacacctgagaatgaggatcatggtatggtatagatcgtgttactgttcccaccattcttgccgatgattgtattcaaagcgagatacattattgaataaattattgccattttttttttaataacctacaggatgcaat

SEQ ID NO: 60949 - DNA, 718 bp, Glycine max
  unsure (1)..(718): unsure at all n locations
  Clone ID: PAT_MRT3847_26049C.1
ttgtacggctgcgagaagacgacagaaggggagagaggatggagtatttaagctcacaccgtaacacataataaccatactaaattcgtaaacccttttctcaaagcacaggcttagttatataccttcttcttcttcgaccttcgatttgggcccaacacaaacgcaccattggctccgatcactgcgcgacccaattccatggcggctggccctacaacaacatcaccctccgatcgacccaccatggtccctcccccaatgctcgtctccgactccttcgccaaggacgccatcctcgcctggttccgcggcgagttcgctgccgccaacgccatcatcgacgccctctgcgcccacctctccgcctcctccgcccacgattacgacgccgtcttcaccgccatccaccgccgcaggctcaactggatccccgtcctccagatgcagaagtaccactccatcgccgacgtcacgctcgagctcgccagactcgccgacagaaaccacaactctgccgccgacgaacacgaaaccgacgacaaaacgacgccgtcggagagtgtcggaaatggtggtggcggtgacacacgaggagtatgagtgagagcgagattactgattcgtctaatgcgtatgaccgtaatatatcggtgatgaacacnaggagtatgagtcacccgagagcgagattactgattcaggatctcaagaaatg

SEQ ID NO: 60950 - DNA, 155 bp, Glycine max
  Clone ID: PAT_MRT3847_2604C.1
gcacaacatgattgctgacacattagatctgtgtcattagtccttggtttatcaaaccaccacaattacaccgatcgaaaacacgaaacactactcatcacatcttattcacgtcacatccacttgcatggctacatcattttgcacttcacaat

SEQ ID NO: 60951 - DNA, 307 bp, Glycine max
  unsure (1)..(307): unsure at all n locations
  Clone ID: PAT_MRT3847_26050C.1
gcccaacaacaatttaaacatcttttctttaacccctcatcataaaaacatggtgggtttcacaagagggtggggccactaactaaaaaaaaacttctttgatcaatgcaagatccatgctaatcatcacaatatcgaatgcaacatgtatttctttcactctataaatgatcctctcttctatttatgactcgacaaccaaaaatatcaccttactattcacattctaatttcctcataccatcattttatcaacgncaacaacatactaaacatgtcacttcatcactgatgtccaaacctacat

SEQ ID NO: 60952 - DNA, 136 bp, Glycine max
  Clone ID: PAT_MRT3847_26051C.1
gacgaagaatgctttccgtgtcttctgatcatgacacacaggggatttcgatgttgggaactgaaggagggtagggtcaacctattgtgggttgcactgatccatgtaatccataagctgtagcagaccttagtca

SEQ ID NO: 60953 - DNA, 411 bp, Glycine max
  Clone ID: PAT_MRT3847_26052C.1
ttttaaaatggatgtttgaaaggacacacccgttgctggcttgttgttcaaggatggcactttgttaaaatgatgcttggagagttgaatgcggaataccttctggatttccgctcacagccatttgcaatatcatttttaatgagatgctcattatatatagctctgaaaaattactgctccaggctaaagctccaagtatgtttctacaatccttcaaaaattttgtttctttgcgtgtgtatggtgatgataacttaattagtggccatgaatctgtcaagccttactttcgtgggtctaaaatgaaaagctttgtagctggtcataatatcaccattactgctggtattgacaaaactagagcgactttgcagtataaagagttagcccattgtgatgctctcaaga

SEQ ID NO: 60954 - DNA, 470 bp, Glycine max
  Clone ID: PAT_MRT3847_26053C.1
gatcctaaagttgcccacgaagaaggcaaaagaaggacagcacttcctcaaagggttggcacataaaaccggttctgcagccattgctttgtgtgcaaaccaatggtatccttacacggttggatcgttcgggagtgccctaggtgagttgaaagaaagtcctgatactgctaattatgatgcaaaagttgctggtgatggacctgtatactgtgatgaagccattgccaaagcacatattgttaaccctgccatttttgctcttaaccacaaaacttcgttgcttagctttattgcattcctagccacaaattgtctttcagaagagtaagggaatgcatgcatatgtgctaggtcaacctaaggtgtgacaattattactatgttttagtgtctcctttggtgtggagaaagagtaattaataaaatcaaatggtagtttactgctatttgttcttggagttttccct

SEQ ID NO: 60955 - DNA, 451 bp, Glycine max
  unsure (1)..(451): unsure at all n locations
  Clone ID: PAT_MRT3847_26054C.1
ccggaanttcctcgggtcgactccacgtcgtctcgtcccacgtcgtctcagtgcgcctcgtgagggtggggttctcgagtgtaccgggagagaggaggccatacgntgtccggttttgacgnnngcgtcgggaggtggnngattctcgtggcaccaaaccctcttcttctctttgcacccgttcagttgcgcccgaagcagcgtcaggggctctgtcaaatgnntcaatggtggnnatttgtgagggcaaagaagagttaccagggccttcctacggagtaccgtgtgaagaccagcaaccgaatacaccttcatnntaacttgtactgacttcannaccgagcttttggtttcttaaagttggccttcttcccaatgagttttttattctgacanttacatgtggcagaaattggtttctcactttcttcataatgatgggtaaactagc

SEQ ID NO: 60956 - DNA, 516 bp, Glycine max
  Clone ID: PAT_MRT3847_26055C.1
gagagaactagtctcgagttttttttttttttttttttataagaacaaccatgtaagcagggcacagaaacttcgtttggaaagtgaaaggttgcaatttggacgcgttagttgctgcataacctagcttatctatcgagttaccatcttgaatgttttacgaatttcgacttttctgtgattgaagtgtgctgctgctgcttttttttttcctccctgtaatgaattgtactgaggggaacaatgattgacattttgtcaccccacagaatcgccaccgttctcaagtgttgtcggcagctttacaagggacgaaaatataaataagaaattactttaatttcggccgtgatcaatcacaatcgcgaaaacaaaccaccctcctagtacttgagtgatatatttttcttgcattttgtttacaataaattagatgtgttgctacactaatttattcattcatttttataattttatttaatttgaccgaatgcattttatgtatggcaaccactt

SEQ ID NO: 60957 - DNA, 535 bp, Glycine max
  Clone ID: PAT_MRT3847_26056C.1
cccacgcgtccgcccacgcgtccggcaaatatggtgactcatgttagcaagggaatcatccattgactatgctattcccactttgtttaatcctatgcctacctgtattttgcagtttattattaatgatatgagttaagtttgtcttaaaaaaaaaaaacatcttatgcatagtacaattcacatgtctccctatatccacattgatcttggctatattaattaacacagtgcaacgaggaagcacaagaatcaaggtgctaaggttgaacaaacttgttctcgtcatgtatatgattattgtgccaatgccccctaattagtagttccacaattttatgcttcgactaaggacctatattagctgtcaagtaactagacctagctcgcgtataaaaaaaactagacctagctccaaatcattagaaaagaacgtagctctccaattgaaaataacaagatgactaatccacacaatagaaactacaagatgtcaagcatgcaatttcttcgacatccctatatataatgatga

SEQ ID NO: 60958 - DNA, 327 bp, Glycine max
  Clone ID: PAT_MRT3847_26057C.1
ggcttgtgctgatgtagagttccaatgctttggttgagggcttgcttgggccaccgaccaccatgctctatacaaagccttctgtcaatttgtcgatatggtgaaatcgaaggttatcaacgattgtgcaactggaagatccagaggatttggatttgtgaccttcgccacatagcaggcaatgagagacgcaatagaatgaatgaacgggcagaacctccacagcctcaatataaccgagatagacgctaactcccggtggaaaggtggaagaggcgggcggcggcgggctacggaggaaggtggtggtgggtacagggggtggcg

SEQ ID NO: 60959 - DNA, 477 bp, Glycine max
  Clone ID: PAT_MRT3847_26058C.1
cattgatctctactattggaacgcgacggagacctgttcttataaatatgctgtcttggagtatgatattatggaatcacgtgccataagagggaactacttctgggagaatcacagtttttttttttgatagcgtgctagagagcgtaattaagagcttgggaattaagggtcgttgttaactgataggttcttgtactagtgaatgtaaatacatgcatgagcgctaacatatttgagcagctttgcagtggtcatggaaaaccattcttctgtgattgggttatttggtgttcgagctgacacctagacacagtagcttgtggaaaccatctctattttgggttcaagcagatgccccatagccctcagctattctcgcgaccattttactctttcttctgagaaatacgactcatcagattttggttattgagctcttgccagagggagttaattcaccagtgtccaacgtgc

SEQ ID NO: 60960 - DNA, 745 bp, Glycine max
  Clone ID: PAT_MRT3847_26059C.1
gactccgtctcgtgtcagctccgccgtcgttctctctcttctcctgccgcgccaccgcatccaccgccctccctccgccgacaccgacgccgacgccgacgccggcgccgacgcttatttcttcaattccacagtccccgccgctaacatgcgcacttcactgtccgcacttccaatcgtgttcggggtgcacgcacgagttcaatctccaccgtccggtgatattggacgacgccaccaatttctttcggaaacacggcgtctccgacttcacatttgacacgtgcaaactgtggggttggaggtgccgtgcgaaattggccgtgcgtggctcttcgactaagcttctcattgggctctatgaggagggtactcataacgtagttgacattccacaatgccaagctcatcatcctaatattaatgctgctgtggagctgcttagacggggtattattgaaataggtgttgagccatatattgaagatgaaggtactggtgatttgcgatatgtccagatggctgtgacaacatataacacatctctttctgcggctcaaagatataagaatggaaaggttcaggttacattggtttggaattcaagaaatgaaaactcacccggttcagacaaactgaatgcattagcaaattttctgtggaaaaatggtggtcaaaggagcaggcttcatttaattcactctgtgtgggccaactttcagacttctactaacaatataatttt

SEQ ID NO: 60961 - DNA, 1101 bp, Glycine max
  Clone ID: PAT_MRT3847_2605C.1
aatggttgtatagggaatatataagattcatggttgaaagggacgggtctgccaaagggattgtttttgggcaattcacatcattcttggatcttataaactactctttgcacaagtctggagtatcttgtgttcagttgaatggaagcatgtcattggctgctcgggatgctgccattaagagattcactgaagatccagactgcaaaatttttctcatgagcttgaaggctgggggtgttgcactcaatttgacagtagcttcacatgtcttccttatggacccttggtggaaccccgctgtggagcgccaggctcaagacagaattcaccgaatagggcaatataagcctataaggttttagttcttgttctctagcactttcaaattagaacaattaggaaatgaaaaagtagagttaaaaatacaggttggtcctttcttcatgatctgacacttcttatatgcacagaattgtgaggtttgtcatcgagaacacaatcgaggagagaattctgaaactgcaagagaagaaggaactagtgtttgaagggactataggtggctcttctgatgctctggggaaattgacagaggcagacttgagatttttatttgttacctaagcaggctttgttatctcgaccagaaatttctcgatgcttctggtcattcatttctcgatttttttttttatatatatagaaaaaagcattagctgtaaattattggcccaccgtagttgcctcagccaaagaaacccagcactgtgctgttgaatagcgggattttgaagcttcaggttttctatttcaatcgtggaatgtcaactattaattttttgacaatatagtaaacttcatgcgagataaaaaaaaaaaaaaaaaaaaaaaaaaaaaaaaaaaaacttaaaaaaaaaaaaaaaaacctaagcaggctttgatatatcgaccagaaatttctcgatgcttctggtcattcatttctcgatttttttttttatatatatagaaaaaagcattagctgtaaattattggcccaccgtagttgcctcagccaaagaaacccagcactgtgctgttgaatagcgggattttga

SEQ ID NO: 60962 - DNA, 350 bp, Glycine max
  Clone ID: PAT_MRT3847_26060C.1
gggaaactaaaaaagcattcattttttataaaaatttttggcctccaagaaggggaaattgaccccactcctaaaatacctttgggtaaaacaaacggggggtcaaaaaaggatccactcggagctggatgacccaaacaattggccaagaaaaaacttaatgaaaaaattcatcctgggggtcgatgttggggggggggacctttatcctagattttaaaaggagggcctaatgcccctaattgccttgcaattaaaaaattgaaccccccccttaattaaattggggggtgattttgggcaaacttatcatgggctagggatttcccagtgcccaagccttggggata

SEQ ID NO: 60963 - DNA, 297 bp, Glycine max
  Clone ID: PAT_MRT3847_26061C.1
ctatataaaacaaatattccattcatatacaacattttttccccttattactgaaaatgtggaattgggatcctcttgaatatcaactcattctctagatatcagatatgcctaacatgaaatcaaataatcccaaattatataagaacattttgcctccttatttctgaaatagtggaattggaatcccccatgaaatctcacctcattttcattggttaaaggattccccttctttgaaaacaatattatttcaatttcttctattaacattttcgcctctcatatttcctgaaa

SEQ ID NO: 60964 - DNA, 318 bp, Glycine max
  Clone ID: PAT_MRT3847_26062C.1
cagcgtggttgtttattttgatagctctatcatatgataaaaattcatatgagaaagctcccaaaataaacaaattgatattctatacctgcccggagcagagcctcaagtgaatttacggttatatgagatcatgggtcatactcaatagacccttttgttcaaaacaagctatttgagcggctaaaccactaataataggcaatggccccgagtctcgatcatataccaaatgacgatagattcaagagtctgaagtctaccatgctgctactgcagttagtgaaccaagccatacaccactaaatacgcttgtaa

SEQ ID NO: 60965 - DNA, 454 bp, Glycine max
  Clone ID: PAT_MRT3847_26063C.1
agctataaatttagcatccaatctcgataacaagattaacaaagccgaagttctctctaccggtcagaattatgagaagtatcatatttactatagaagtcaacaaaaagagagaaaatctaattataccaatatgattaatgaatactataatcttgttaccagcttttataactgttactaaaaaaaatctttccattgtgcaccgagataaaaagaagaatctcttggagagagcatcaaaagacataaacacttgcttacttcacaacttagactgaatccaggacagaagagtgttaatatgagatagtaaattagaggaccatgaagagaaatttctggatgcaacttaacttcggttaccgaatggaataacaatgagtaccagataacaagaagagaagaactcaatctcattgcgtaagtggacaatacttacaatggtatcaaa

SEQ ID NO: 60966 - DNA, 434 bp, Glycine max
  unsure (1)..(434): unsure at all n locations
  Clone ID: PAT_MRT3847_26064C.1
cnccccccccccccccccccccccccccccccccccccccccccccccnnnnnnaaaaaggcccaagggtcgtttcttttataaatttaaagtatttttggggggcccagctgccaaaaatttacagagcttgcccccccttttttttcgtctgactgctccaattgaacttttttttaatccctgaatcccaaaatcaatggctggaaaattcgaatggcctaaagtacatttgcccaacattttttggggggtggaactcaaataggatgtttctggaagtcaaaggaggggaccaccccccctccctggtatcattttgaggggcattaccattttccctccaactgcccaaattaacaatgtccccaacaaaaattttcccctctttttttttggaaaaactgctgaagaatttttggataccccccttt

SEQ ID NO: 60967 - DNA, 1360 bp, Glycine max
  Clone ID: PAT_MRT3847_26065C.1
gcccctgctgaaaactctgtcaccatgagagtgagagccaaactcctgttttcgccaccaccaccctcctaattaaatcgctgcatcacaaacaaacacacatacacaaagtagtgtaagaaaagagaaagagaagagtgagtcttcaattttcattagtgagcgaccctccaaaaaccttgcatgaatgaatgataacatcatcttcactactactaccaaaagtccacaagaataactccctcttcttcttcctttccttctaccatggctttccctccttctcacactttcatgttccaaacccatgaagatcatgacccccaccagctccatctgcgttcaacttcaacatccctcaacgccttcccctctttcccacctcatcactttcaaggtggtggggcaggtgcaggaggttttatgatgaagcgttcaatgtcgttttccagcatagagaagaacaaccacaagaacaagtgcgatgaggtgcacggagacgacgcgttatcggacgagggatctcagctcctaggggagaagaagaagaggctgagtcaggagcaggtgaagggtctcgagaagagcttcgagctcgggaacaagctcgagtcccgagaggaaaatgccagcttggccaaggctcctctgggatcttcagccaaagttagatctccatataggttcaagaagcagaagagctaggtggaagaccaagcagcttgagaaggagtatgaagttctcgggaaactgtttgaagctgttaaggctgataatgactccctcaaggctcagaaccagaaactacatgcagagttacaaactctaaaaagtagggactgcagtgaaaccggaacagtaattagcctcaagaaagaaactgagggttcttggagcaatggcagcaacaacagttcagaaatcaatttggatctctcaagaacaccagtgatgaatagtcctgtgtcttcttctctgaatggaaaaacccttttaccaacttcccttaagcccacaagcataactcaactcctccaatgctcatcaagatcagatctccaagatgagagcttctgcaacatgttccacaacattgatgagcagcagaatttttggccctggcctgatcatcagcaacaccagtttcattaatcaataaaaaaaaacccaaaattgttgattttggacactataaaatgatttgaggttgaagaaaagttatgaaaagtaattaaaaagttcattgattaggcttatagctcaaccttctcttttttcttcttttttccctaccagtttttccaaatttatgtttatgatgtagattgatgtataaaaagtttgaacacatttacttaa

SEQ ID NO: 60968 - DNA, 975 bp, Glycine max
  Clone ID: PAT_MRT3847_26066C.1
cctggttggttgaaagtggagcgaagaaaactaacggagacttgtttggaagctagtctctggtgagagtgaaggcgcaccatcttcaccttgaagtcaacgatcatggcaaccattaacctttcttccgctactacgtctctcttccaatccaaacaccgaacgaaacgcattccacgcctccctacaatcgccagaataacaaaccacatcgaaggaactcatcttaactcccccaacggctctcccatccttggcaacgcaaacaattcccttgaggttccctccaataactatatctcgctacactcttcagacgtgcgtaggaaaactaagatcgtgtgcacgataggtccttctacgagctcacgtgatatgatatggaacctggctcaagctggaatgaacgtggcgcgtttgaacatgtcgcatggggaccacgcctcgcacctccaaaccattgatttggtgaaagaatacaattctcagtttcaagataaggttgtagccatcatgctcgacaccaagggtcctgaagtagaagggggatgtagctcaacctattttacttaaagagggacaagaactctgtttcaccactatgagaggggttagcacacatgacacggttagcgtgaactacgatggctttgtgaatgatgtggagttcggagatgtgttgctggttgatggaggaatgatgtctcttgctgttaagtcaaagacaaaagacttggttaaatgtgaagttattgatggtggtgaactgaaatctaggcgtcatttaaatgtccgtggaaaaagtgcaacacttccttccataactgacaaggactgggaagatatcaagtttggggtggacaatcaagtagacttctttgctgtctcatttgtcaaggatgctagagtggtgcacgagttaaaacactacctcaaaagtcataatgccgatatacacgtgattgtaaaaattgg

SEQ ID NO: 60969 - DNA, 625 bp, Glycine max
  unsure (1)..(625): unsure at all n locations
  Clone ID: PAT_MRT3847_26067C.1
ttttgaggctnngtcagataactattattacatgatgaatttttacaaatgaaaaatattgtgtttgagtgtgtgcgaatatcactctaatgtacgtaaatgtaaaggcagaactaactgcttactataaatataatgttgcttcaatcacgccttgcaatagaaacgaaaactctggtaacatgcatggggaagcaacctaaggtcgaaggccttctatatacctttctgatagtagtagtaggacttttcatgaatgacatagacgaccaagaagagaaactagaaccacgaggtgatgccattgagttagactcagaatcagagttgcaatctaatatgtccaaaccaataacatcatcatcttcatgaaaacaatcatgggatgaagaggatgactttttgctttttccccgttttacccttttcttccaaaaccttagccttgaccttgttgaaggtttggtgtctggaatacatggcttgggtagccccaggctgagaagtgctggtggaggactcagtggaggaagatcttctcttggttgttgttcctttgcaatccctggttgcatttcccatttgaatggaaccccttccccactactcctataataagaaacgt

SEQ ID NO: 60970 - DNA, 172 bp, Glycine max
  Clone ID: PAT_MRT3847_26068C.1
atttttcctctcagactctctctctcctacactagcataagcgcaaagcttccactatgctctctcatcgctctcaataggtagtatgctctcgtgaagttattactactctctgtctgatacttgaggtatatcttgaatctattcgatgtttgatcacttagcatctggc

SEQ ID NO: 60971 - DNA, 312 bp, Glycine max
  Clone ID: PAT_MRT3847_26069C.1
tactattgcatgtttctgtgagcattttcctaccttgctctcaaactagcatatcttcccttataccctcgcacctatcaccatcagcgttgagggggagagatatcacaccatttacaccgtataggacccaacccgcgaccggggatgaattcttacctaccagacacttgttatttcaacaggaatgaaacctgtggacggacgtacctttggtgactacatcgttacaaaagatagtgctacaaaacttacactaacttgtgctagcggaccgcgcagcctactttaaacactcacaggctataccat

SEQ ID NO: 60972 - DNA, 282 bp, Glycine max
  Clone ID: PAT_MRT3847_2606C.1
attgattataaattttttaatttttggtagggggtcttatttatgtcatttaaatattttttgtttttacataataagttttattaaatggacaaactatttatgcatataatatttagctatatggtaacaacttacataataaagccaaggaaagtacataaaaaaaccctatttcgaaaaaaaaaaaaataatcaaaactgatttcatgctatacaaaaaaaaaaaattaaactgtggtggggggtctaataataaatataaagggcagcatgatcttt

SEQ ID NO: 60973 - DNA, 377 bp, Glycine max
  Clone ID: PAT_MRT3847_26070C.1
gaaggtgcgagagtttgttgtgagctataaactagtttatcgtgaggagaatatgaacttgtctgttttcgttgttgctgcagtacttttggtaacatggccatgccatggcacatgctagtacaggttccctctccgagtgaaaattggctatggtgagcgttcttcggaggtaatgatgcacatgttttaagcttgctgtggcagcatacaacatctgagcctttaacaccattcctgaacagtgcgttgaatcatcattggactatattaatggcgaccactttaaatcagacgcgaacacagtttaccaacgagctttcgtttatgctagtgaacgcgaagtctatcacatcgacatatttatattcggcata

SEQ ID NO: 60974 - DNA, 214 bp, Glycine max
  Clone ID: PAT_MRT3847_26071C.1
gtaatatattactcgatgatctattacctagctttcaggctcccttcgcgcaactcttgatcttccagacaaaagacaaaaggacaaaagagattgatacagagtatcgagtatatggatgctcatcgtcattgtagctcacatgtgtccgctggttactcttctccgccgtattcacgaccacggactacattgtgggtgcgaatccaggctg

SEQ ID NO: 60975 - DNA, 274 bp, Glycine max
  unsure (1)..(274): unsure at all n locations
  Clone ID: PAT_MRT3847_26072C.1
gcagagncagaatncacgattggccgcagaggacttcctgccaaagcctgccaaagggcaaactgacaaggagggatggaacccccccggaaagggcgaagccccccaaacacaaacgaacagcggcaaaagcgacgnaacaccgcgacagggnaaagagcatgcgagcgacgccaacacggacaactttttagcaaaagaagacaagaaaagcccgaaaacaacgatctagaacaagaacgaagaccgcacggaggcgaaccccaaaaacgtg

SEQ ID NO: 60976 - DNA, 418 bp, Glycine max
  Clone ID: PAT_MRT3847_26073C.1
gctataagtaatccgagcatgaatgagggtataacaatctctcaccacataaattgattcatgatttcaaaggaacaatttggaattaccagagacattatacctttttatcgcgtgcacacaagacaattcccaaattctacatgcagactcctggaccttgtcttgatatccccataattatgccattgtggcaaatgctctgaaggaactatctgttgatgcctcactggggttttcgttagaggactggcgagcaaattgcccactaattcaaggtcgttgttcagttaatatctttctgccctgatatcgaaccttttcatgaaagcaccggtgccctctctctcttgtattttggcgaaatttagttaaggccgctcaccttcgagaagtggtgcattgatccactctgttg

SEQ ID NO: 60977 - DNA, 456 bp, Glycine max
  Clone ID: PAT_MRT3847_26074C.1
acagaactcccatttgaagtagatgctctactttgtacaataaggcgtgtgctttttgccacctcttgtctgaaggagttacaccccctagcaccttaaggctgcttttcacctttggctaccccgggaaaaagtatattctttcttgagctgtgcatcaaacactgaaataattttccatgaaatctatggagtctcttgaattatcttggagccttatatacagataatgtgtatataacttatctggctgcctataccctttttgtactggtacctttaccttccttaaggtaacttatctcacaaatctaggacatacacataagctttcaattcctagtgcatgaggctccaacattggtgtggtctggcaggcttgatgtaggcaatgaattgaatccttagccctgtgcgtgtaaagggaacttcctctgccactagaaacaatgacat

SEQ ID NO: 60978 - DNA, 375 bp, Glycine max
  Clone ID: PAT_MRT3847_26075C.1
tcacaaggatcctatttcagtaaaacagtgttttgaattgcaatagtgctacagaaaggaaaccatgtataaattacttagaataattcagatttctattagcataaagctatagtgaaaaattcaaaactttaatgtaagaataattcagatttcttggctcagctacttaagcatggttccttgctctgttggtaggaaggaaaccatgtataaattacttaagcagggagtaacaggaattctgtctgctgttcttgcatatccataagatataatatgcactttatgcatgttttctttattttcttgtttatcttgtgtggattctgagtactttcttgggttttgtctgacaaataacctaacaaagca

SEQ ID NO: 60979 - DNA, 497 bp, Glycine max
  Clone ID: PAT_MRT3847_26076C.1
aaactactcatcactcactccaaacccaccacaccaccattattcatatctcattctctaacctttcactattccctctcattcactctctagctagtttcctcatcatcgtagaagaaccaatacttgtactctctcttactttttaaccatgtagaatgattcacctaaggaaaaattagtagcttcttgttgtgctttttattttgttttgttttgtgtagagataaatctgtttggtattgttttgtgttttatgaattatttgatgggtgaagagggagaagaagtggtgagaaagcaaggacaaaggggtgttgatggagataaatgctttctttggagagatcttaaagacgacattgactgctaacaacaataaagtggatcaatcattaaaggcttacttcttcttcttcttcttcttcttcttcttcttctaacaacaataagatcccatctttcccactcatgaagagacttaacagctcagattc

SEQ ID NO: 60980 - DNA, 122 bp, Glycine max
  Clone ID: PAT_MRT3847_26077C.1
accggaaccgagaatcccgggatggacccacgcgtgccaaccacaccaatggcctgctgagcaccggggtgcgttcctcttctccgcaaacccaacacaccggtgtgtcttgcaaacccgct

SEQ ID NO: 60981 - DNA, 1934 bp, Glycine max
  Clone ID: PAT_MRT3847_26078C.1
accacactaccattattcatatctcattctctaacctttcactctgccttactcactctctactttgctcatcatcgtagatgaaccaacacttctagtctctcttactttataaccatgtaaaaatgagtcacctaatgaaaaattagtagcttcttgttgtgctttttattttgtttgtgttgagataaatttgtttgtttgtttggtattgttttgtgttttatgaattatttgatgggtgaagaaggagaagtggtgagaaagcaaggacaaaggggtgttggtggagataagtggtacttgtatagctgcttacaagactgtaaatattggtgctgtttaatacacgagactagttctctttcgatggtcccttttgagtgaaaaaccttgtcttctcagctttctttcgagagatcttaaagacattgactaacaacaataaagtggatcaatcaaaagacttacttcttcttctaacaacaataagatcacatctttcccactcatgaagagacttagcagctcagattcttccagtgccctcatgacaatttgtccatcaacagaggaacatagtccgaggaacagccaacacatgtatggtagggagttccaatcgatgttggacggactcgacgaggaagggtgtgttgaagaaccggggtatcaatctgagaagaagcgtcgtctaagtgtggatcaagtgaaggctttggagaagaactttgaggttgaaaacaagcttgaacctgagaggaaggtgaagcttgcccaagaacttgggttgcaacctagacaggtagccgtatggttccaaaaccgtcgagccagatggaaaaccaaacaattggagagagattatggtgtactcaaagccaattatgatgctcttaagcttaactttgacaccctcgatcaggacaacgaagccttacgaaagcaggttaaggaattgaaatcgaggctgctgcaagaagagaacacaggaggaagcggtgtttcggtgaaggaagagataataacgaggcctgcagactcagaagacaaaacgatggaacaaagtaagagtgacccatcttctgaaacctcaaatattaatcctagttcggagtcggaggaggatcacttgaactacgagtgtttcaacaacaacgacgactgcgtcggaggaaccgccgcatcgctcttgcaagtggacttcaaagacggttcttccgacagcgacggatcaagcgcgattttgaacgaagacaacatgtactctcccttgaaattcaacaattgctccatatcaacctcgccgtcatcgtcttcgatgatgaactgttttcagttccagaaaccgtatcatcaccacgcgcagtacgtgaagatggaggagcacaatttcctcagcgcggatgaggcctgcaatttcttctcggatgaacaagcaccgacccttcaatggtactgtccagaacagtggagctgagaaaagaaacatggaaattaaaccgcttttagaaatttttgtttgaaggtagaaaatgaaatactgtgcaaaagaaaaagagagaacagagatcaatggctgcatggcgtggggtcggagatggaaggttgattattactactctcgaccgtgcggcagggggtaatattaataattattcaatcgtaaagcaaaccatgctgtaaaaacaaatttccattcaagtatggaataacggtgtagtacttttttaataaataaaaaaaacaacaacaacggtgtactacttttaggaaagagaaaacaaaaaaaaaaataattaaatcggttaaacaatatccccttcgcctcattgaactcaattttctagtatttatgatttgattattcttcggtgttcttctttttggaaaaaaaaaaaaaaaaaaaaaaaaaaaaaaaaaaaaaaggaaaa

SEQ ID NO: 60982 - DNA, 1227 bp, Glycine max
  unsure (1)..(1227): unsure at all n locations
  Clone ID: PAT_MRT3847_26079C.1
nagaactactcatcactcactccaaacccaacaaaacaccattattcatatcccaattcccaaactttcactattccctctcattcactctctagctagtttcctcatcatcgtagaagaaccaatacttgtactctctcttactttttaaccatgtagaatgattcacctaaggaaaaattagtagcttcttgttgtgctttttattttgttttgttttgtgtagagataaatctgtttggtattgttttgtgttttatgaattatttgatgggtgaagaaggagaagtggtgagaaagcaaggacaaaggggtgttgaggaacatagtccgaggaacagccaacacatgtatggtagggagttccaatcgatgttggacggactcgacgaggaagggtgtgttgaagaaccggggtatcaatctgagaagaagcgtcgtctaagtgtggatcaagtgaaggctttggagaagaactttgaggttgaaaacaagcttgaacctgagaggaaggtgaagcttgcccaagaacttgggttgcaacctagacaggtagccgtatggttccaaaaccgtcgagccagatggaaaaccaaacaattggagagagattatggtgtactcaaagccaattatgatgctcttaagcttaactttgacaccctcgatcaggacaacgaagccttacgaaagcaggttaaggaattgaaatcgaggctgctgcaagaagagaacacaggaggaagcggtgtttcggtgaaggaagagataataacgaggcctgcagactcagaagacaaaacgatggaacaaagtaagagtgacccatcttctgaaacctcaaatattaatcctagttcggagtcggaggaggatcacttgaactacgagtgtttcaacaacaacgacgactgcgtcggaggaaccgccgcatcgctcttgcaagtggacttcaaagacggttcttccgacagcgacggatcaagcgcgattttgaacgaagacaacatgtactctcccttgaaattcaacaattgctccatatcaacctcgccgtcatcgtcttcgatgatgaactgttttcagttccagaaaccgtatcatcaccacgcgcagtacgtgaagatggaggagcacaatttcctcagcgcggatgaggcctgcaatttcttctcggatgaacaagcaccgacccttcaatggtactgtccagaacagtggagctga

SEQ ID NO: 60983 - DNA, 338 bp, Glycine max
  Clone ID: PAT_MRT3847_2607C.1
tgtcaacaaaggcgatagccacagggggggctacttttttagctacgtggtcgacacaagacaggagtgcattacaaaaagcgcctgccggacactgctgtactctgagctaaacaatctaccatccggtgccgacgactactacgaccacgacacgccggccactgctctgtgcatgtgatgaagaataatagcaacaaaaataacaacctatggtaagcataacaatcatattatcagtgccgtggctaacgttgacgatgttgctcaccatctctgcattaatggatgcatgtagagtgctgagatagtgtttcggtgctgtcgagttataggat

SEQ ID NO: 60984 - DNA, 172 bp, Glycine max
  Clone ID: PAT_MRT3847_26080C.1
tttttttttttttttttggccaccacccttgattatttttccccaaggggagaggcttggtcttaaccaacaaccattaattcagggtttaaccgagaccggccccacaccttatggacctttaaaaaaaaattaaggaaaatggttcttcaggtcacgagttaactaaccc

SEQ ID NO: 60985 - DNA, 923 bp, Glycine max
  Clone ID: PAT_MRT3847_26081C.1
cttgtactctctcttactttttaaccatgtagaatgattcaccgaaggaaaaattagtagcttcttgttgtgctttttattttgttttgttttgtgtagagataaatctgtttggtattgttttgtgttttatgaattatttgatgggtgaagagggagaagaagtggtgagaaagcaaggacaaaggggtgttgatggagataaatggtacttgtatagctgcttacaagactgtaaatattggtgctgtaatttaatacacgagactagcagttctttttcgatggttccttttgagtgaaaaaaaccttgtcttctcatcagctttctttggagagatcttaaagacgacattgactgctaacaacaataaactggatcaatcattaaaggcttacttcttcttcttcttcttcttcttcttcttctaacaacaataagatcccatctttcccactcatgaagagacttaacagctcagattcttccactgccctcatgacaatttttccatcatcatcaacagaggaacatagtccgaggaacagccaccacatgtatggcagggagttccgatcgatgttggacggactcgacgaggaagggtgtgttgaagaaccggggcatcaatctgagaagaagcgtcgactaagtgtggaacaagtgaaggctttggagaagaactttgaggttgaaaacaagcttgaacctgagaggaaggtcaagcttgcccaagaacttgggttgcaacctagacaagtagccgtttggttccaaaaccgccgagccagatggaaaaccaaacaattggagagagattatggtgtcctcaaagccaattatgatgctcttaagcttaactttggcaccctcaatcaggacaacgaagccttacgaaagcagataaaggaattgaaatcga

SEQ ID NO: 60986 - DNA, 2166 bp, Glycine max
  Clone ID: PAT_MRT3847_26082C.1
gtaagaacatccctaccagataacaatcccctttacagcaaacacccacgcgatgtgggggctctgaagctacttcaccactccaaacccaccacaccaccattattcatatctcattctctaacctttcactctgccttactcactctctactttgctcatcatcgtagatgaaccaacacttctagtctctcttactttataaccatgtaaaaatgagtcacctaatgaaaaattagtagcttcttgttgtgctttttattttgtttgtgttgagataaatttgtttgtttgtttggtattgttttgtgttttatgaattatttgatgggtgaagaaggagaagtggtgagaaagcaaggacaaaggggtgttggtggagataagtggtacttgtatagctgcttacaagactgtaaatattggtgctgtttaatacacgagactagttctctttcgatggtcccttttgagtgaaaaaccttgtcttctcagctttctttcgagagatcttaaagacattgactaacaacaataaagtggatcaatcaaaagacttacttcttcttctaacaacaataagatcacatctttcccactcatgaagagacttagcagctcagattcttccagtgccctcatgacaatttgtccatcaacagaggaacatagtccgaggaacagccaacacatgtatggtagggagttccaatcgatgttggacggactcgacgaggaagggtgtgttgaagaaccggggtatcaatctgagaagaagcgtcgtctaagtgtggatcaagtgaaggctttggagaagaactttgaggttgaaaacaagcttgaacctgagaggaaggtgaagcttgcccaagaacttgggttgcaacctagacaggtagccgtatggttccaaaaccgtcgagccagatggaaaaccaaacaattggagagagattatggtgtactcaaagccaattatgatgctcttaagcttaactttgacaccctcgatcaggacaacgaagccttacgaaagcaggttaaggaattgaaatcgaggctgctgcaagaagagaacacaggaggaagcggtgtttcggtgaaggaagagataataacgaggcctgcagactcagaagacaaaacgatggaacaaagtaagagtgacccatcttctgaaacctcaaatattaatcctagttcggagtcggaggaggatcacttgaactacgagtgtttcaacaacaacgacgactgcgtcggaggaaccgccgcatcgctcttgcaagtggacttcaaagacggttcttccgacagcgacggatcaagcgcgattttgaacgaagacaacatgtactctcccttgaaattcaacaattgctccatatcaacctcgccgtcatcgtcttcgatgatgaactgttttcagttccagaaaccgtatcatcaccacgcgcagtacgtgaagatggaggagcacaatttcctcagcgcggatgaggcctgcaatttcttctcggatgaacaagcaccgacccttcaatggtactgtccagaacagtggagctgagataagaaacatggaaattaaaccgctttcagaaatttttgtttaatatgttgggttgtgttgaacactcattgaggtaaaagttgtaaaaaaaggtttgccggaaggtagaaaatgaaacactgtgcagaagatagagtgaaagagagaacagagatcaatggctgcatggcgtggggtcggagatgaaggatgacgattaaggttaattattactctcgatcgtgggtaatatcaataattattcaatcgtaaagcaaaccatgctgtaaaaaacaaatttcaattcaagtatagaataacgatgtagtactttatcaaacagaaaacgaaaaaaaaaattataaatctgttaaacaatatccttttgcctcactgaactcagtttactagtgtttatgattgattatccttttcctgtaaaagtatttttttttcaccaacaattgctactaaactgaatttgagttggaggcaacatatgagttgttttttaatgttcatttccattgacattgtttattcattagtcgtgtcaagtaaaaatatttttgttattagtatatcattcaaataaaatttattttatcaaaaaa

SEQ ID NO: 60987 - DNA, 504 bp, Glycine max
  Clone ID: PAT_MRT3847_26083C.1
cggtatgaccctacgccgttgatgcctaacgcccgaatccagggaaacgatattcttcatcatcatggaaaacgttgcgttataatggccaaatgcactgagaagtcgattctcctactgcctgctcccatggctggacctgggacacatatacctttacttcgaacgcccccagatccccgctcaaaagcggccactttgttcccttcataaacaggccctaacacattgaccgtttgcccaaatgacggagacacttacaaccatttataaaaatcgcgaagcttccctttccaagaatcgatcacctcccataaggcgcactgagcgcaatggacattccgtccaagagaaactgtgtcctgaagagagcttacgagggcctacaatacgaccgtttgcaagttgctgaacacgacaaaccctgactgggttctgcatgagtgctcacctgcccgagttataccaatagccgagagctacatccttacttgtgctcactac

SEQ ID NO: 60988 - DNA, 227 bp, Glycine max
  unsure (1)..(227): unsure at all n locations
  Clone ID: PAT_MRT3847_26084C.1
gggagggaagcgcgagagcctccgccggccgggaggagaggctcgcggccgaagaagcgcatgaggcgggcgaagaggaagcgccgaccggagagaccncgacccacgcaggcgcccggacccggagcggngangaggggccnnnccctctggggggggggggctgacctttttttctgtnctggctcttttggtgctcctgcggcctcctggcgcggggggcttcc

SEQ ID NO: 60989 - DNA, 1100 bp, Glycine max
  Clone ID: PAT_MRT3847_26085C.1
gagtttgacgccatccattctgacaaagcaaggagattgctcgaagattttcgaattggcgagctcatgaccacagactacacctcagactcagagcctgacaactctatgcatggcgattctgaatccacccatttggcccctatcaaggagatcaccacaccaagaccacaacgcaaggttgcacttaactcacgtgagaaaatctcatgcaagcttgtgtcgaagacctacatttcccataacacgaggctctttcgttttgcgttgccctcggaggaccagctcttgggtttacccgtgggaaagcacattttcttgtacgccaccattggtgacaagctatgcatacgagcctacactccaacaagtagtgtggacgaagtggggttctttgaccttcttatcaaggtgtacttcaaaggcgtgcaccccaagtacccaaatggaggactcatgtcccaacatttggattctctctccattgggtctatgttggacgtgaagggcccgttgggccacatagagtacaccggaagaggcaacttcatggttcatggtaaacaaaaatttgcaaagagactagctatgttggctggtgggaccgggatcacacccatttaccaagtggcacaagcaattttgaaggacccagaagaccacactgaaatgcatctagtgtatgctaaccacgccgaggatgatatattgttgatggaggagttggatgcgtgggcaaagacacattgtgatcggttcaaagtgtggtacgtggtgggaattgcaaaggaagggtggcaatacagtgtgggacgcatcacagagagtattatgagggagcaccttccaaaatcatcgagcgatgccttggctttaacgtgtgggccaccacccatgattgagtttgcggtgcaacctaacttggagaagatggggtacgatatcaagaacgacctgcttgtgttttagggcacaaagaagtagattactatattatgttgactatctatgcatgtgtatttttattgttgtttgtgtatcaccaattgttagagcattgcttgtttcattatttgtaatggtgaaagaaagaacaactg

SEQ ID NO: 60990 - DNA, 380 bp, Glycine max
  Clone ID: PAT_MRT3847_26086C.1
aaccgcgggctcggaattgaggtagagcgcactaaaccataacacttttccttttttgacacagggcaagattcaagggggggggtgccggtgactgaattggcactgatcttatctcaaacaccagatctgggcctttgcctgtaccgaccatgactcttgcttctttaattgcacctagactggcgcgtagaggtcgagtacacgaacttttagtatgttaaacaagtgagtatcataggactcctgtgctaaggaatgatgagatctttcaaagcggacatacaacggtgccgaccataactaggtaacatttgaaccagtctctgtctgggaacacaaagctaccctgccagttgtttatcactgatgggaaaagg

SEQ ID NO: 60991 - DNA, 296 bp, Glycine max
  Clone ID: PAT_MRT3847_26087C.1
ttctggacccacccttccttacggttgcaaaaaaacaacaaaaggggatccaaaccaaaacaaaaacccattgaacttggactttaatattcagaggtcaaatactcactttaatctttaaagttttaattttgggtttaaagttcttaaagaaaaaaaaaatataaaagttggtccaatttttgtcttgttttccctttcacctacccctttaatattcgaatcccaaataaatttaattccaccctattcctcttaaacctttttttttggatatatttaaaataaaaactcaa

SEQ ID NO: 60992 - DNA, 152 bp, Glycine max
  Clone ID: PAT_MRT3847_26088C.1
tggctgtgagatgacgacagaagggggggaagagagaatgcttcctcccgctggtgacatctttcatttgaaagcgctcctgtctattgaggatacggctcagggctccaaatctcaagcaggcggcctctctgagaccctctgcaagagct

SEQ ID NO: 60993 - DNA, 191 bp, Glycine max
  Clone ID: PAT_MRT3847_26089C.1
tctggcactaggatgttttgaggatgggatgcttggagaatcttgactcgatcttgtttcatctggtcatttatcggtacgagttagtggtactaacaatacttttatgtaacttgtgatgaaccatattgacttgccgtctggtcctttaccaatgctgcagtgcatgcgtatcataaaggtacatgctt

SEQ ID NO: 60994 - DNA, 434 bp, Glycine max
  Clone ID: PAT_MRT3847_2608C.1
agacattttcggctctggggatgttaagacttaagttatattctttattatattcagcctaaggctacaagtctatgactgcacattggtttgtctggtaacaatttttggctgacttaatgtaattgacatggggtaatttatttgttgcttcctgaatggttgcatcatatagaagtgccaatggctgcatgacaccacatactgctgtgaaaatcaaagcaccttacttagctgggctgataacctttgacagtaaatcataattaatcttacacgatggaataactttttatttgatgcctttctcacaaaatccagttttggtaatggatagtaagttccatcccatagaaatatctgtaaaatttcttaatccaaattttatgcttatatcgaaaattccaaaatatgaggatcaatcaattgactgc

SEQ ID NO: 60995 - DNA, 271 bp, Glycine max
  unsure (1)..(271): unsure at all n locations
  Clone ID: PAT_MRT3847_26090C.1
aaaagagaaaaaaacaaaaangcngaggggcgcngcnagcgcgaagacaagggggcgaacggggacgnnggaggcgccaccanngggganaagggnncngccnnggcgcaaccacaagagggnggnggaccacgacgaggaccaaggaagacggggggcacccaacggggaggaccacccccgcggaacgaggcgaagcggaacggcagggngnggngacggcangaaaccccagaaaaagggggaagacaaaacggggaagaacgcagaa

SEQ ID NO: 60996 - DNA, 162 bp, Glycine max
  Clone ID: PAT_MRT3847_26091C.1
cggccgccctttcattgtgtacaataccagttgattttaaaatacgcgccctgtacacaaccttaaaaaatttaagagaagaggggcaaaatccagatatgcaaagctttcccctcaagagcaccatgcctaattccctttctcggattactgtttggaacc

SEQ ID NO: 60997 - DNA, 1273 bp, Glycine max
  Clone ID: PAT_MRT3847_26092C.1
caggaagaaaggtccttgtttggccacttgagtcgtcgcagtcgtcttccactggcaattaacaaattttctctgaactttcctctctctctttcccgtgctttctttcctagcaactactccaggataacctatgaccatgataaataataagtcttcatactttcactgactattagagttgtagtttttcaccataagccatgaggctccttagcatcatcaccacctccttaacactattcttccttcttctctttctctccatagagctccaagcgtacaccccagaagacaacttcaccatcagttgtggcaccaccgggatagtcttcgacggccaaaggacatggacgggggacgcagacacaaagtacttatctggtggtcaaggcagcaccgttttaacccaagcagcaacacaagatccttctgtcaatcaagttccctacaccacagcacggttatccccttctcagttcaattactccttccccgtttctgcgggccccaaattcgttcgcctcttcttctacccggctgattacccttcctttccccgcactgatgcctctttctccgttcaatctaacggattcaccttcttaaaaggtttcaacgcctctctaaacgctgacgcggaagccaccaaaaccatcttcagggaatatgtggtcaacgtcaacgacggtgagaatctcatcctcagcttcactccctcgcaaccaaactcctacgctttcatcaatggaatcgaggtgctttccatgccaagtgatttgtattacacgtcagcaactgactcaacaggattcaagttcttgggaagtaccacgctgtacagcgtagaaaccagatttgcgctgcaggcggagtatagaatcaaaatgggagggcaagaaatatcaccactaaacgacaccggtttgttcaggaaatgggccggtgacgaagaagattatttaatcaaacaaaatccacagaataatgatctttcaagcaacacggatggtaagatgaacataaccgtgaatcctgattacgtggcacccaaggaactctacagaacagcgcgtaacatgggcacaaacgccactctgaacaaaatcagcaacctgacttgggagttcccggttgattctggcttcacttacgttctcaggctccacttttgcgagcttgaccccaatattaataaagatggtgacagggtgttcttcatttacatagcgagccagttggctgagaaccacgctgatgttatgcaatggag

SEQ ID NO: 60998 - DNA, 276 bp, Glycine max
  Clone ID: PAT_MRT3847_26093C.1
ctcctatgcagatgggactcctcgctacctacgtccactcgcagccgtacgctctgaaagcttccgtcgtcgccgctatctcagcgacgagccgtgcgatgtgtcaaaccaaatggacagcagagttcaaattggtagcagcatttcagccctcattgctaggattgcatacgatgagaatgtagttgggtttgtgttggatggagtgggaaatggtgacatacgtaggaatacaatgtacctcattgtggattcaaacagcactgtcatgcaaat

SEQ ID NO: 60999 - DNA, 402 bp, Glycine max
  unsure (1)..(402): unsure at all n locations
  Clone ID: PAT_MRT3847_26094C.1
tacatttttacataccattcttagccgccacttttttatatttatttgtaggaataacttttcatctgtatcaattttccccgtctaataaaaagggtttgactttttcttataatagagtttttttttttttgctttaagttattgtaaaataattattttattttttttgcctttgnaaattatgtatatttaatgtttaataagaaaaaaatgtttcaaaagcccttaaagactaaaattaaaccaccattatttgcaaagatgaaaataaaaaaattattttgttaagataaaaaatgaaataaaatagtttaattataggaatttaaaagctttttaaatcaacaaaagttaaaggttctgtaaaaaaaaagttcaattttttttttattattgaaa

SEQ ID NO: 61000 - DNA, 266 bp, Glycine max
  Clone ID: PAT_MRT3847_26095C.1
tgaatacgaacttggcatgcatttatttatttttgggtcaaattagactttggactttctttggaggacccaaatatcgagaagtgggccaagcttctagtctttactttagaattgggtcctcggtccaatccactgtgggggaaccaaattaaaattgaaagcaaaagcacttgctagtccatactatattagcactgggaaataaaccacctccaatggaatgtggggcaagggggtctaccgcaaacccatatcgtataaac

SEQ ID NO: 61001 - DNA, 174 bp, Glycine max
  unsure (1)..(174): unsure at all n locations
  Clone ID: PAT_MRT3847_26096C.1
cttgtttttatttnttttaggaatatcaaatctttcattgaatattatggtggcacataagggtacacaataatttccatgggcgaaggtaaattccataccacattgggaaacgaatccttacaaaccatcattccaaaatctcgaaaagttaaaacccaaacattttataag

SEQ ID NO: 61002 - DNA, 459 bp, Glycine max
  Clone ID: PAT_MRT3847_26097C.1
gccgcgctttcgtttggataatactaaggctaatatgatggcccaaatactgagcgttagacaaagtgttgaaggtgatactgaactgaagactgatggggagaagcatgagggtgagtatatcactggatctaacattagtgcaggggaaaataatctcgtacagacacacgtagaggcacaggaggatattgcgtgtgatatcgcaagtgatatgagaactgcaaaggggaggcaaaatagcacggctaaggctgctggagcgcttgagagagctatagatagtatcataggtagctactgaagcacagactgcgccatacttggggcagagacttaggatgccacttatgataccgctcctggaaatgcagttggtgggcttttcgtagcgcctatgacaagtcgaagggccacactggcggatacatttgcgcataccagtgcacacattgaacc

SEQ ID NO: 61003 - DNA, 528 bp, Glycine max
  Clone ID: PAT_MRT3847_26098C.1
cccctttaaaggttcaaacaatgaagaaccattggccaacgtagtgttgcagggtcttcgattccccgagcacccaaatgttagtttccaagcaaaggatctgattagagggttgttggttaaagagcccgaaacccgtttgggttcagagaaaggggctgccgagattaaccagcatcccttcttcgagggccttaactgggccttaattcgttgcgctgtccctccagaacttccagacttttatgattttggagtttcagacatggtgaacccgcagggcaagggtgctaagtacttggagtgtaaagtaggagagcatgtagaattcgagttgttttaaagacattgctttctatcaagaatggcattcatgttatggattcccatatttatggctccatatcggtgtcgagatgtatcttataagttatatgtaagcctaaagccgaatagtctatgttgcaaataagttttgtatcatggtatcttgcattaggaagcccaggtattaggaggcttcatgtt

SEQ ID NO: 61004 - DNA, 203 bp, Glycine max
  unsure (1)..(203): unsure at all n locations
  Clone ID: PAT_MRT3847_26099C.1
gacaaggtaataatactattattaatacatgctagttttagttaatactataggtttatgttgtgagagaggggttgtgtctaacgtgcgccggggagggtagaagcgtaaaccgggtccacgagatctggtcctgagtgtgagacggtccactcaatgtgaccggnataaatgggagtaaaagaatgtggttcaaatcccaa

SEQ ID NO: 61005 - DNA, 495 bp, Glycine max
  Clone ID: PAT_MRT3847_2609C.1
acagcgcgccgcccttttttttttggttttacgtttgagagagaacccactcaattagaattacgttcgggcccgctggaacttataatgtttcaaaccaggggtaaacacgacccaccctttactatgaacatatactctacaataaattgaagggcgcgaataacttaaaaaagatggcaaccggaaaaaatatacgctccattaaaattttcccgaaaccacaatggtgaagaaggcggattcaaccccacccaaatacctatttgtagaaaattagagctcattggcgcaaccctatttaacaaaattctagccaaatatcttaaattaatggtacaagagctgaaagacaaggcaatttcttgatgcctgaaccgctaccacacataacttcttctcttgagtgtcctgcaaccaatacagaaaggtttaaaggctttttaaatgggaatgtctggaccggattctatttatcagcatgaagtagcataa

SEQ ID NO: 61006 - DNA, 270 bp, Glycine max
  unsure (1)..(270): unsure at all n locations
  Clone ID: PAT_MRT3847_260C.1
ggcagaagcatatcccagtactagctagtagtttcacatctctcaatagcagtgaattgttatcaagaacagctaccaaaccatctaccagtgttggtggcaaggaaaaacttagtgataagaaaagtttgcctcttcagcatcatcaagtcatcttatagggaatcccttcctgaaagtgccaagcttcctttttacgatgtcaaacgatttgaatcttccaaaagtgtaatacgcccntggagatgagaagagctgacacccaggcgt

SEQ ID NO: 61007 - DNA, 453 bp, Glycine max
  Clone ID: PAT_MRT3847_26100C.1
aattcggctcgagacgacagaaggggacattgacttaaatcactaagctctgtgatgacaacgcaaagaggcattcttttatggggaggtgaaaagagatcctgaacataatgtgaaggataggtaaaagtgattttgtattattttgttagggatatactatatggtaagaaaataataagcgaccagttataagttattagctagccaaagatataaatcatgtcaagtacactcttaattacaactacaagaattaaatcccacatagaaaattgcaattaacaaaaaaaggttagagggtaaaccaaatagttaaaaaaatattaagagtgtgaagtgaaagttagactccaagtgaagtaaaaaaaaaatgaataaatgcttacagtgcggcgatatattactacaatcaaaagagttacaaaagaagtgaagaaaatttagatttta

SEQ ID NO: 61008 - DNA, 476 bp, Glycine max
  unsure (1)..(476): unsure at all n locations
  Clone ID: PAT_MRT3847_26101C.1
atgagttgatgcaggaaaagcaaaggcgacgcttcctgtagtggaaagtgtgtttaatggccacaacagcacgagaatcagaaccttgactttaggaaaatattgaatatattgcaagagattatttatttagtgtagtgttgaaagggacgaataactaagtagtggcaagtggagcagtcactaatgctaatgcgtgggattgaatgattcgcatttcacagatgacacaactatgacgcacggcaccagaagaagaagaagaagaagaagaagaggtgaaaattttactggtacctttcttggttctgctcagtgaaatcacacanaggaactgagaaacctatcaataattgcatagctaacccacccagcgcgtatgctaaattttattcatagcnntttgtctcacgctacgctgatgtatctatctcaatttttatttcattaaatctctctataaattacctagagtt

SEQ ID NO: 61009 - DNA, 696 bp, Glycine max
  Clone ID: PAT_MRT3847_26102C.1
atgattcaatttgatcatgtagattattcatatcatcgaaaacagcctgttttaaaagatattaatataagtattcaacgtggtgaaaaaataggggttttaggggaaagcggtgctggaaaaagtactattggttctttaatattaggtcaattaaagccaacaaaaggaaaaataagtatcgattcaggaaaggttctacctatttttcaacatgcgacagaaagttttgatcgtcaattcacgattgaacagtctttgagagagccacttttattttatcgacaattaatacgacaaaatatcaaaaatatcattcttaactatttaattgaatttaatttgtctacagatctaataacaaagtttcctcaagaggtaagtggtgggcaactacaaagattaaatattatacgttctctcttagcacaaccagatatattggtttgtgatgaaataacttcgaacttagacgtcatggccgaacaaaatgtaatcaatattttacttaacgaaaaaaacattcaaaataaaacactaatcgtcatctcgcatgatttatctgttttacaaaggttaacgaataggataatagttatcaaagacggtcaaatagtagatgattttaaaagtaaagatttatttagccataaaagacatccatatacaaaactattaattcaaacgtatgaatat

SEQ ID NO: 61010 - DNA, 612 bp, Glycine max
  unsure (1)..(612): unsure at all n locations
  Clone ID: PAT_MRT3847_26103C.1
ggctcgagttggaggacaaaacaaagtagtgtacaattacttggtgctatggcatactgtgctcctcaacagttgtctcagtgtctccctaagattgttcccaaattgactgaggttttgactgatacacatcctaaagtccagtcagctgggcaaatggcccttcaacaggttgggagtgtgataaagaatccagaaatatctgctcttgtccctactctacttaagggacttagtgatcctaatgagcatacaaaatactcccttgatattcttcttcaaacaacctttgttaattcaattgatgccccttcacttgcattattggtaccgatagtacatagaggtttgagggaaaggagtgctgacactaaaaagagggcagcacaaatagttggaaacatgtgttccttggttacagagccaaaggatatgattccatatataggattgttgcttcctgaagtaaaaaaggttcttgtggatcctatccctgaagttcggtcagttgctgctagagccatcggatcccttataggaggaatgggcgaagaanatttccctgatcttgtnccatggttgttngacacacttgaatctgataatagaatg

SEQ ID NO: 61011 - DNA, 427 bp, Glycine max
  Clone ID: PAT_MRT3847_26104C.1
gctaagttacccctactgataaaactagcttggggccgtattatagaccaggctctattggaatctaaggagtacgctactgaagacgatgtggatttcgacagaaaggctgctcgagcaattggccgttgcgccatcaaattggagagagcagactgaacgatgcattagtgctcgaggatgagttgatacagataaaagtaaacaacgtggatcaagaggcaatcattgttatcaaagatatacttagaagagaccccaacacattagagtccataattgtaacactttgcgagagcatagaaaccttggatgagccacgagccaaagcataaatgatctggataattggtgactctgcggaaagaattgaccatgcttatgaacctcttgaaagtttcttggaaaattttccggaagaaccctg

SEQ ID NO: 61012 - DNA, 667 bp, Glycine max
  unsure (1)..(667): unsure at all n locations
  Clone ID: PAT_MRT3847_26105C.1
cccggggggaccgacgccgggcncccacgcctcgccagaagacgacagaagggggggtcagaggatggaggctgccgtgcgtacatttnaggcgctttccgagagttctgagtgtgcagggggatggggtccattctgcgagaggtgctgcgttgagccacgggctcctgagtggggttttgcgcagaagggggagtacttgagggggaaagtgggggcgacatttataagagaacgtgntgccattaagaggggaggtgaggaggtcaaagtgaggagtaatgcgattggggggttggggcaaaaggtgcctgaggagggggnngcaatgcgngagggggctccagtggctgggaacaatgtganagatcatcccggagtgagacaaggtttccttnggcaaaatggggtgcgtgacatcgaaggagatgagttacctcgtcttgtgtatgtgtgtcgtgagagaagagctggatatgagcaccacaaaaaagcgtgggctatnagtgcgttggtgagagtgtcnnggataatcaccaatgcgccttatgtactgagtgtggagttggatcactacataaataacaataaggggccttcntgagncgcatggcttcatgagtggtcctacatcaggggaaaaaatatgcgacgtacaggttcctca

SEQ ID NO: 61013 - DNA, 472 bp, Glycine max
  Clone ID: PAT_MRT3847_26106C.1
tgcacccaaaagtctgtcgagtgcaaaaaagcagacttggcggagctaggctatgcggccccttcggcaaatgtcggggcagccagtgaaatacccgcggagtcgcttgtgcgtagatagcgcttcacaggagagccatggcggccaagtgcacggccaacgcatagacggggtaggcgtaaaacgcaaactggtaaactgtagaacggcagatggctacgttcagtgttgcgcatgacagtctacagaagcccctggcgaccacgagttgattggacaccaactgacacccacatcagagtcaccttgggagtgcaacctaagctgcagagcaagggatgtgcataaatgcatgcctagagagcaaccgagccatgacagcttttgctctgtagatatgcgtagccgctactagagtggcctgctgctgcagtgagagaagtgtcagtccagtacatgctgagctcaagta

SEQ ID NO: 61014 - DNA, 433 bp, Glycine max
  Clone ID: PAT_MRT3847_26107C.1
ctcctgagtacgttcacgaggaagaagctcaacaaatagcacctgaagtacatgatgtgggcgaaaactatacttattctgagccacaacagcaagtagtgtcggacaacctggggagaggagcctcttcctgaagaaccgccttctttctcaaatgaaatggcagtcgctcctgaggagccagtgcaagctccacctgtgccacttcctcacgtggatgagcctgtttgtgaaccagtaaagaagacttatgcttccatcctaaaaaccgaaaggctgctcctggcatcccagtagcccagcatgtacctgtgagtaagacttctcaccctacaacagagtcaaaccaaacccagcattcagttatggcttcatcaatgggaaccgagaaaccgaggtctgatgtctttggtgagggtgcttcccatgatga

SEQ ID NO: 61015 - DNA, 578 bp, Glycine max
  unsure (1)..(578): unsure at all n locations
  Clone ID: PAT_MRT3847_26108C.1
gacaggtttggctctctatgctgctgtcaatgggtggacactactccatgagggtgggtcgttaaggnctagaataccgtctcaactagtgagccagcaaggtttatctccattgagggaaccccagactatgactagagggtgaagaatcctcagaaggctcatgtgagaacaatcacacccaagttggataccctgattgatcttttagtgatacacatattgtctaggcatgcttgtgatgagatataccttggagagagggagactccaaatagcactactgataagactgcgttaaaagcttataaaaagactggaagcaaactgactggacttgaatgaataatcactgcatggaacagtgatacatgtctgataaaccggactgcaccagatcagctgccatacactgtgttacatcgatcaagatgagacgggttgacttgaaaaggaattaccaacagtatgtatatttaattgacacgagccagtggttcccgtagctacgttgcactcacgaataacatagactttatgcatgcttatgcatcaatatggcctgcacttatgcacta

SEQ ID NO: 61016 - DNA, 388 bp, Glycine max
  unsure (1)..(388): unsure at all n locations
  Clone ID: PAT_MRT3847_26109C.1
aatacctctcgaggagacactcaccttggaggggaggattttgataatagaatggtgaaccactttgtacaagagttcaagaggaagaacaagaaggatattactggaaacccaagagccttgaaaggttaagaacctcttgtgagagagcaaagaggacactctcatccactgctcagaccaccattgagattgattctctgtttgagggcattgacttctattcaaccatcactcgtgccaggtttgaggagctcaacatggacctcttcaggaaatgtatggagcctgtgaaaagtgtttnggatcaaagatggacaaactctgttatgatttgccttgtggtggcttacaggattctaaattcaacactgtgcagacttttaat

SEQ ID NO: 61017 - DNA, 417 bp, Glycine max
  Clone ID: PAT_MRT3847_2610C.1
gtgttaggggttctttatctaatatttctcttattaacatggggtggggagcgtccctttttttaagtttttttagggggagaaataaaaaaaaagaaaagccaaagccgctggggggtccttttccccataaacaaaagccggggagcctctttaagtggggggggccaaacgggggttatattccatccctaaaaaagaggggcttgaataaaaagaagggggttcaataaaaccccaccccgtttctttttcccctggaaaaaaaaaaaaattgggaaatgaaaaagggggggtaaaaaaaaaaaaatgagccccccccttgccccgggagttttttttggtgaacaaaaaaaagctcccccgccaaagaaaccaagtcccaaaaaaaggtctggacccccctttctccccttg

SEQ ID NO: 61018 - DNA, 279 bp, Glycine max
  Clone ID: PAT_MRT3847_26110C.1
tacggctgcgagaagacgacagaaggggatgccacaatggttgtcccgcgtaggcactttcttgttttctctctcaccctcatatccatcatcttccagacccatggagcgctctctgaggaatcaattatcaaggtaaccaggggtctagcaacgggagaggaactgatccacttgcaccttttctaccacgacgtgctttagggcaatagaactccaggggtgtgaaaatcagcgagatatcagcgagcgaggtccgtgacgcaactgggtttggaa

SEQ ID NO: 61019 - DNA, 552 bp, Glycine max
  Clone ID: PAT_MRT3847_26111C.1
ggctcgagctcgagcgccgcgagctgcagctcgacgtcgaggccacggcgctcgagcaggagaaggacgaggcgtcgaaagtgcggttgcagctggtccgcgaggagctgaccaagctgcgcgagcagctcaagccgctgcgcatgcagcacgacgcagaaaagggccgcgtcgacgagctgcgctcgctcaagaacaagatcgaatcgctgcgcaccaaggcggccctggccgagcgcgacaagaacctggcgctggccgccgacctcaagtacggcgccatcccggagctcgagaagaagatcgcgcaaatggaggcggctctggaggagaagaagagcgaggagaaggagggcgacaagctgctgtccgaggtggtcgggccggagaagatcgccgagatcgtcgcgcgctggactggcatcccggtctccaagctcacgcagacggagaaggagcgcctgctgaagctgagcgaccagctgcaccggcgcgtggtgggccagagcgaggcggtcgacgccgtggccgaggccgtgctgcgctcgcgcg

SEQ ID NO: 61020 - DNA, 585 bp, Glycine max
  Clone ID: PAT_MRT3847_26112C.1
ggtcgacccagcgtttcccacgcgtccgcttgtttataatgtggttattatattatttttaacccaatttttttgtgattatttgaaattgaccaacaactcaagttctattttgtcttgatccttcactcttctctcacgctcagagaatgtgtagagaaattgcagcttttgaaaacacctgaagaacgtcaacgcaggttggaggaaattccagaaatacacgtggatccaaacatggatccaagttatgagtctgaagaagatgcaaatgaagtggatgataaaagacaagaaaactacatgagaccaagagggtctactgcatttggaaggagggggagagatattgtttctcctagaagtggttctatttcaaatgattcttggagtggaacaaggaattattctaatgtgaatcatgaactcggcagaaatttgtctaataagggattttcaatcaaaggtgataatgcttctaatgctaacgaggcactaaatgatgctcaattgcatcggggaagagatcgggaatcacaactatctaatagctgggagaggcaaaagctatcttcaaccttggaa

SEQ ID NO: 61021 - DNA, 539 bp, Glycine max
  Clone ID: PAT_MRT3847_26113C.1
attgcattcgcccgtcggcctgggacccgtcgtgtcgaagaagaagaaccttgccatggctggagttgtcccggatcgcacgctaccgcgcaccctaggcggcgtcactctgagtggcgatgagatagacgagatatttaatatgtaaggcgctgttgactctacctataccagctctgactgtcggtttatagtttctatcgccaatatgttgtgttcatgccatgccttgacaccgaaagctcccctaacctcacctatgaacagtcagacttcctcttctggactataatcggcactgcctctaggacatgcgccaagaatccgacaatctttccagcccttgccaagcatataatcagcatggcatttctctcgccgctgtcggagagtggagcctggaacatcgtgcaggggttgctcctggtactgaactggccattccccaaggccgacggtggagtcgacatcatcttcccactaactggtctactcctgcacgtggcgatgatgtacggtatgcacaacccagtctctag

SEQ ID NO: 61022 - DNA, 190 bp, Glycine max
  unsure (1)..(190): unsure at all n locations
  Clone ID: PAT_MRT3847_26114C.1
gcgccgcgggngcaccggagacgcgggtgcaccgtctccctcacgaaggaaacagcagatgtgcgagagtcagagtgagagcgaacgcgagtgttagaggaggaaaaggagatgggcgaaacggcggcggaaatgggacatgtggaagaaggcggaggagagagaggaggaagagcgcgacttcaacgca

SEQ ID NO: 61023 - DNA, 1934 bp, Glycine max
  Clone ID: PAT_MRT3847_26115C.1
ctggctcgagccaatagcaggctttctttctacttattattagcagaaagatggctcctactcttgcccttcagtttctttctcttttccttttgttcattatgaatggctatgtcattggagctagagatatgaaggtagaactgcgagatcagaagcaagtggaatggtacaaagccacatcagtgtccaatgacgagtctaatggcaaagggtacataaccacttcagaatccgctgaacctaattacatagcttcatatactgctgctaaacacaaccaaaaccatgaaaaactccatcaaccttacatagctgggtacacaagtgatgctgccaacaaagccaatcaatacatagcagggtataggaccaaaactcatgattccaatacaccttacatagctgggtacacaacaaccagtgcttcccacaaagccaatcaacctaattaccttgcagggtataggaccaaaaccgatgattccaatacaccctacatagctgggtatacaacaactaatgcccatgtggcaaataatcaacctaattacattgcagggtataggactagcaccacccaagaatccaatacaccttcttacattgcagggtataggactagcaccacccaagaatccaatacaccttcttacattgcagggtataggactagcaccacccaagaatccaatacaccttacattgcagggtataggactagcaccacccaagaatccaatacaccttacattgcagggtataggactagcaccacccaagaatccaatacaccttacattgcagggtataggacttagaattaccatgatcctaatgcaccttacatagcttgggtacacaacaactagtgccaagaaagctccaaaagggtcatctcatgatgataccactggaccttacataacccaatatggtggacccggtcccaaaaatgacccaaaagaatcttccaacttggaccatacagaggctttcaagacaggatttttcgccttggatgatctatatgttgggaatgtgatgaccctccaatttccaattcaagatgtttctcaattcttaccaagaaaagaggctgagtccattcctttctcaatctcacaactccccagtgttcttcaactcttctcaatctctgaagattctcctgaggccaatgccatgagagacacacttgaacaatgtgaagcagaacccatcacaggggagaccaagatttgtgccacctctttagagtccatgcttgaattcattggcacaatcattggttcagagaccaagcataatattctcacaaccacacttcccacagcctcaggtgtccctctacaaaagttcaccattttggaagtgtctgaagatatcaacgctgctaaatgggtagcttgtcatcccctaccatatccctatgccatttactattgccacttcatagcaacagggagcaaggtgttcaaggtctcactaggtagcgagaatggagatgacaaaattgaagctcttggcatttgccatttggacacatctgattggagcccaaatcatattatatttaggcagcttggaatcaagcctgggaaggatgcagtgtgccacttcttccctataaaacatcttatgtgggttcccaagcctttacaagccaccatgtgaatggaatgagttccctgggtttctgtaataaaggtcaatctcaacaatgatgaccatgtaccctttgtggacttcctctttgtttgtatgtcttgtgccttgttttatgttaaaaaatgtgtttggcagaaaagacttcatgtatgcttgattttcaggtaagaaaatatttctattggcagagctgcacaaatctacaggaatggaaacatggacttatgtaacgttaaatttataatgaacatttgatctggtcg

SEQ ID NO: 61024 - DNA, 201 bp, Glycine max
  Clone ID: PAT_MRT3847_26116C.1
tgaatgcggctcgaggtgagagctgagggtatagggagaaggaattttctgtgaggatgacagattttcagccgctagagcagaatcctgagcctgttgatgcccatgctgagttttgagttggactgaaggagtttatgcgtgtgcacttggatgagtgtatgtcgtttggttcgtgtagcgcgtctcgtggctccggat

SEQ ID NO: 61025 - DNA, 268 bp, Glycine max
  unsure (1)..(268): unsure at all n locations
  Clone ID: PAT_MRT3847_26117C.1
gaaaaagaacacaagaacngangnnncnnccangaccagganccccnngncnnngnnnnncaanaccangngcgcncaaagannaanangaannaccccagagggcaanggggcnngaanggggcagnggggcgaggggggggaacgaaagaaaaanaacanacggaacggaagaancnaccnnncnananagcaaaaagaaacgggagcgcaaggggcagnncnnnnnngnnnagccanggggnancacacngcgacgcnnagaaag

SEQ ID NO: 61026 - DNA, 521 bp, Glycine max
  Clone ID: PAT_MRT3847_26118C.1
gtccgccccctcaattcgggcaaacggaaggttcaacgcgcaaatgacggcggaattgctgcgcaaagcgatgaaaggctttggctgtgacaaaagcaaagtgatccaagcgttggtcaactgcaacaatgcacaacgccaagaggtcatccgcacgttcaagcaaatgtatggcaaggaactgatcccggagttgaaaagcgaactaacaggcgacttcgaacacttaattattgcacttatggaactgccggcagtgtacgacgccgcacaattgcgccgttcgatggagggacttggcaccaaagagcatattctgatcgagattatgacgacgcgaccaaatgcgcaaatttatgccgtcaaaatggcttatcgccaaatgtacaactcggatttggagcgtgacatcatcggcgaaacttccggctatttccagcgtctgctcatttcgctgtgttccggcgcgcgtgatgagcaaatgcacaccgacccaattaaggccaatcaggatgcccagc

SEQ ID NO: 61027 - DNA, 182 bp, Glycine max
  Clone ID: PAT_MRT3847_26119C.1
gccaatactaagtcacaaatggcgatcaccatgcacagtgttactgggatcgctgttatccagtaatggaacaccaacctatggaaactattacgtgagcgatcgataacaaacattcgtttggggcacgcgaagaatcctttaaagggatataacatttcggtttacgataggatgcttat

SEQ ID NO: 61028 - DNA, 437 bp, Glycine max
  Clone ID: PAT_MRT3847_2611C.1
tgtaatgacctcacttgttgacatgtatgctaagtgtgggaatatagaagacgcacgtggtttgtttaaaagaacaaacacgagtaggattgcctcatggaatgccatgatagtaggattagctcaacatggaaatgctgaggaagcccttcagtttttcgaagagatgaaatctaggggagtaacaccagatagagttacttttataggggttctttctgcgtgcagtcactctggtttggtatctgaagcctatgagaatttttattccatgcagaaaatctatggtattgaacctgagattgagcactattcttgtcttgttgatgcccttagccgtgcagggcggatacgagaagctgaaaaggtgatatcatcaatgccttttgaagcttctgcttcaatgtatagaacactgcttaatgcttgtagggttc

SEQ ID NO: 61029 - DNA, 194 bp, Glycine max
  Clone ID: PAT_MRT3847_26120C.1
aaaaaaaaaaaagagggcaattggaattgaaatgaaactcaggggtgatttgccggggcattttattgaactcatccttattttcatgggggacatataaaaaaatccctttgttaaatagaaaaccaaggaggggagagaaagatggtaataatattggggtctgagtcggactctcaggggggggtttgggg

SEQ ID NO: 61030 - DNA, 363 bp, Glycine max
  Clone ID: PAT_MRT3847_26121C.1
ggctcgagctctaatcctagctagtacggaatttgcattatacaacaaagaccactccacatgacaggacggggtataatccagacccaccgcacagcagacaggtgcacgaccctcatgaaacggctcaacaacagctaggaaggcaccgaccctcgtgaccgattgcaacgagccagctccaatggtccgccagcctccgatgcgatgaggccgatcaaaagaacagctgacgtcaatcaaaacgatgcgggcaccatctggaccgtcttaattgcccgttccagtggttacacgtgcttcaggctcaagaccagcgctcggcatgcatctcatctactgtaacgagctatgccgacagag

SEQ ID NO: 61031 - DNA, 318 bp, Glycine max
  Clone ID: PAT_MRT3847_26122C.1
tcgtccggttccaaaaaaacaacttaaggggcacttcatcttgacacgtttccttcacagcggtgtaatttacagggtcacattttctctttttaattatccagatttgaagtgtgtgatggctgccaacgtaacagaatctaatatttccacacagagattatcctgggacgttacgctacgtcaacattagcattcctctgttcgttacatccaaattctctataaccaccatctttattgaaaggaattcattccctccacgtggttttacttttatcacatacttcataccgtatggtaattgatgatgcaacc

SEQ ID NO: 61032 - DNA, 999 bp, Glycine max
  Clone ID: PAT_MRT3847_26123C.1
ccacgcgtccgcacagggcaaaatatatgtaacccaccagaaagcatattaacttcagaaggtaagttatctaaattatctccattggagaattcttctgcttctgccaccaccaagggcaaaagagatcaacttggacttggatctgacaagacactttataagaaagataaagcaccaacagaagttgttaatgagaaaaaccccagatccacagataatcttaggaggcaaatgccactgcctgaaaaagataaggagaaaaggagttctgctccaggaaagtctttgaatgcttggaaggagaaaaggaactgggaggacatactttcatctccatttcgtatctcttcccgcctgccatattcaccaagcctgagccgaaaaagtgctgaacgtgtacgtactctgcatgataaactaatgtctcctgacaaaaagaagaaaacaacttcagacttaaaaagggaagcagaagaaaagcatgctcgtgctatgagaatcagaagtgagttagagaatgagagagtccaaaagcttcaacgtacatcacaaaagttaaatcgtgttaacgaatggcatgctgatcgtcatatgaagttacgagagggcatgtatgcccgccatcaacgcagtgaatctcgtcatgaagcttttctagctcaagtggtgaagagagctggtgatgaaagtagcaaggtaaatgaggttcggtttattacttccttaaatgaagaaaataaaaaattgatgttgcgtcagaaacttcacgaatcagagttgaggagagccgaaaagcttcaagtgctaaaatctaagcaaaaggaggatttggcaagagaagaagctgttctagagcgtcgaaaacttcattgaggctgaaaagttacagcgtcttgctgagattcagcggagaaaggaggaggctcaagtcagacgggaagaggaaagaaaagcgtcaagtgcagcacgggaagcaagagctattgaacagcttcg

SEQ ID NO: 61033 - DNA, 325 bp, Glycine max
  Clone ID: PAT_MRT3847_26124C.1
ggaacttcaacagcttttttggttgaaggggttatccaatccccgggcaattttttacccaagggtgtcaggaaaacacagggaaattttgttttgcaaggaaaactttccctaccaaataagttcctacattggaaaaacatggcaaccaattgggaacattttccaaaagtagcatccctgggaaaggcaatggacttttggcccacccaaacaggttcatttaaaactgggtaacaggacatttttttaaaaacattctttgttaggaaaacaaggaaaaaaattgcctaaaaatttcaatttgctcattggttgccccaac

SEQ ID NO: 61034 - DNA, 143 bp, Glycine max
  Clone ID: PAT_MRT3847_26126C.1
gcaataaaatccctgtggaaatgatactcatacttgcgaggtttactacccaagagcgatttggtgcacttgccaaagtctcttcatttgataacccgtaagatgacaattggatctatttatcccataactttctaattcat

SEQ ID NO: 61035 - DNA, 238 bp, Glycine max
  Clone ID: PAT_MRT3847_26128C.1
cattattgcatgacatactcggatatgtctaccacggcctcctctctgcttcacccacgtggatctacttgaggcagaagtacctctttcactcctcaaaccattacggacgataaactctaaacataagctagttaacctcaaatcctcatagactatgcaacgcaccactactactgataatgctcaattcacgtacagactttattgggaacctttaacagtctacagtggtcta

SEQ ID NO: 61036 - DNA, 245 bp, Glycine max
  Clone ID: PAT_MRT3847_26129C.1
cggcccctattaattttctaggccctcagactaacccgtgcgtgcgtcggcgtggccctagattagaccgtgatctcgacagagcatcattcaaagaagaagatcccgtaaggcggtatgaggtatggcaactaaagtgacgccatggctaataaatgtaacgaacagcgcctaacggctcgtaagcctcaattgcgataaaatttaacacagggaccgtccgttgatgataaatattatgacaa

SEQ ID NO: 61037 - DNA, 395 bp, Glycine max
  Clone ID: PAT_MRT3847_2612C.1
cgttcatagggggaacatatctaacattcatagtgagctgtcatttgatccagttaagtcattaattcgagaggatcttttgccgacatttaattttgatacactatgtactactggtgtcaactgatgtcccataaccattgaataccccggcatactccacgtttacttatttttcaaagggctacagtactttgaaacattgtgggtgagccattctattcttaaccaggagcatgaactgtacgttacatattgtgagtaccggtgcctgataaggtagaattactaaaagcattacaccttaggagcccatacagcaataaccatattgtactttggagcccatgtatattcaaaagactctcgggagaacagctatttattgcaatagg

SEQ ID NO: 61038 - DNA, 388 bp, Glycine max
  Clone ID: PAT_MRT3847_26130C.1
tctttcacgcgtgcgataatagggttcgtagtgattgctgatttccggaagagagcttttataagaactagaagctgctcaaatggacagcttagacctctgcgacctatgtatagctgctcatagactccaacataatgccatcacacgtggagggccttgctgcattacctaaatatggagacaccatgctgcaattgatggtatgaatctgttgaatgtggatcgatcataactgctaacctgctttctgacaatgcttcttatcccatgcaactgacatatgtcacgtaaattgatattctacaacattatgggtgagctactacactccatagcaataacatgtactaggttacactgctaccatacaagacacttactttat

SEQ ID NO: 61039 - DNA, 463 bp, Glycine max
  Clone ID: PAT_MRT3847_26131C.1
cggacgcgcgggctcacggggagggtttttaccgaattgttcaattatttcctcttcctatagggggaggagctggtgcaaagaatgctaatctcatgaatatgccaaatgctgttctttcaacgtggagatattttgctggagatctcgcttatgaagcttctaagaagacttctccctacattaaatgtacagcctcttactccatagcatttggaaatttggctgatgacaccatcaatcttgaggctttttcccacaagctggctgcagcctgtagagattcaggaaaaagtttgattgaaattttcacacgaggaacttcttacagcttgttcaactcaggtgcgttctgcacaactctgtctgctgatgggtgaccatatctgtatgcaatggtgcatgatagctcatgttcacaatacccagtgattttgtcattggggtaagctgacaccataac

SEQ ID NO: 61040 - DNA, 285 bp, Glycine max
  Clone ID: PAT_MRT3847_26132C.1
aacaaaagaaaatgacaccattaagtacttgggagtcataattatgcatgccacaaacataaacaggaaggaggtaaaggccttgggaagaacctaactttacaatgatcttacatagcatcacccttaaccacaaaatatcttggatatacgccagaagaaggttaccataaatgttaaaatgagcttgccaaccaccctggctgggaacaaaagcacttatttagtaactaattgctgctaaactcactattggacaacaaacattttgttattaagaatctg

SEQ ID NO: 61041 - DNA, 224 bp, Glycine max
  Clone ID: PAT_MRT3847_26133C.1
ttttgggtttgtttttttttttcttttttagagaagagggaccaacatttgctaaaatcttattactggccattgagctataattacacgttgcattagggtcccctatcattgcagacaaagcctaacggggctttgtccatttgagagaaccattttttttgctagggatatcaggacttgcaaagcttgtagatcaacaaaatttttgcaaaacactcaca

SEQ ID NO: 61042 - DNA, 1509 bp, Glycine max
  Clone ID: PAT_MRT3847_26134C.1
cttctctttgcaatacccaagttaaccctcgtcttcacaaaaacagcttctgtgggggccatgcttggatatgtcacttacattgatttcatgaacaacatgggtcattgtaactttgaggtggttccaaagtggctctttgacatctttcctcctctcaaatatctcatgtacacctcatcggcccattctttgcaccatactcagtttagaacaaactactccttgtttatgcctctttatgactacatctatggcaccacagacaaagcttccgataaattacacgagtcagcattaaaacaagaggaagaaatccctaatgttgtacacctaacacatctcacgacccctgaatccatatatcatctcaggcttggatttgcttacttggcttctaagccttacacgtcaaaatggtacctttgtttgatgtggccagtaacagcttggtccatgatcctcacatgggtttatggccgtacatttattgtggaggggaatcgttttgacaaactgaagttgcaaacttgggcaatacccaagtacagtctccaatacttcatgcaatcacaaaaagtggctatcaacacaatgatagaggaagcaatactcgatgctgacagaaaaggcataaaagttttgagcttaggcctaaggaatcaaggagaggaccttaacatctatggaggactatatgttagtaggcatccaaagctaaaagttagggttgtagatggaagcagtcttgtagttgctgttgttcttaatagcattcccaagggaacaactcaagttttacttaggggcaaactcaccaagattgcttatgctcttgcctacacattgtgtcaacaaggtgttcaggttgctgcattgtatgaggatgattatgtgaggctcaaaaagtcgttcaatagctctgaaaccaatttggcctttaccaaaagcagcacacagacgacttggttagtaggagatggattaactgaagaggaacaactgaaggcacccaaaggaacattatttattccatacacacaatttccaccaagaaaatatcgtaaggattgcttctaccattgcacccctgcaatgttagctccttgtagtgttgaaaatatccattcttgtgaggattggttgccaaggaggataatgagtgcatggcgcatagctgggatagtgcactctctagaaggatggactgaacatgagtgtggccacacaatgcataacatagacaatgtttggcattcaactcttcaacatggattccaacctcttccggtgccaattaatgagtaactagctaggggaataatatatatgaataatatgtttggctgcttaatttgttttagctctttggagggtattaatccatcctacttatggttatctttaccttaaataagattgttaagtaataccttaagacaaagcaaatggatatcatctacatatatttccatagagctacaacattttaagaagtagctatataag

SEQ ID NO: 61043 - DNA, 345 bp, Glycine max
  Clone ID: PAT_MRT3847_26135C.1
cacgcttacgttctctgaggagttggcattcttggcggtgcttggacctttggaggcatgaccttcattccggggtactgcactgctgtaatctcatggggaccacactaacccagcagcgacattggggctcttattggctctcagggcgtctctcattatagcaataacgttcatggtggctcacctgcttgagagccatatcaggagccgggttggttaaggacttccagacggattactacatcatgtgtggcggtgtgacccctccgcctaattagcagtccaagccggtggaccgctggataagtgctcccactctaatattctggtataggactcccc

SEQ ID NO: 61044 - DNA, 285 bp, Glycine max
  Clone ID: PAT_MRT3847_26136C.1
aaaaaatatttataaaaaaagttactggcgacccctcacaaaaatataattataggtcaaaagtgtttgggaacaaaaagtgctaacagcacacttttaactcaaaaagtgtttgggggtttttttcccaaaaaaagaatttttaaattaccgggtaaaaaacactcattttctggtaatgggtctggtgctaggatctttactcgacaactaaaaaattatttttggttaacccttccccaaaaaagggaggtggcaccagaggttgggcccaattccggagtt

SEQ ID NO: 61045 - DNA, 198 bp, Glycine max
  unsure (1)..(198): unsure at all n locations
  Clone ID: PAT_MRT3847_26137C.1
ctttttcctctcacggttcacttattcatcacgaacccggtctttgacactgtctcgtgaccgagctcatccaagtactaccgcccgaactgttatgcacctcttgagtgccccgggccattacagagtnttgtcctttcacatggtacggtgacctcaccacgcagatgctcttcgngggggggggggggtaattac

SEQ ID NO: 61046 - DNA, 328 bp, Glycine max
  Clone ID: PAT_MRT3847_26138C.1
gaacttgataacttgggatgtttgcattcctttccaaaatttctaaacagcagtttttgactgaacatttggcaccgggggaagaaaatgaaacaatggaactggggctcgaaaaatcacaaactttaagaactcttttttttcgaacaatttccatagggatcaaaaataatgccctaaaaaaaaaacaaatccgttaccattctggtaatatgcattgacccgctgccccacgtgttatattgatttttgcaacactcaaaaacttgtgccatacttcaattcaaaataaatcactctttggttggattcccccgctttttttaac

SEQ ID NO: 61047 - DNA, 420 bp, Glycine max
  Clone ID: PAT_MRT3847_26139C.1
atataatcatttaaaggtgctttacattatataagaacttcttgttttttatcacaccaagttgcaaccaccccaaagaggatccagttttcaaactacatatgcaggaccacatcaggaacatgagagcacataaaaattataataccctcccacaaaaaaatttttggggtcttatatattgagacaatcatacaaaaagccgactgcatataaagatcattacgcctcaacacactgatggtaaaaaaaattatgatcaacatggccgctttagaaccaaataatatccatgccaaacatgccttaagttgcgcttgcaaaccattatggccttgaattggtgctccacacagccaaaaatgtatttgaactcctcagacagttcaacggatcaatagttgagagaagggggttaat

SEQ ID NO: 61048 - DNA, 276 bp, Glycine max
  Clone ID: PAT_MRT3847_2613C.1
gtttcgttttgggtttgacgttggtcacaatcactttctgcgcttgactcactttcttagcgcggatatttatatttgtgcaactcgtgcgaaaatgcctgagattgtacacatacagggagggcaatactgaaaccagagcggtgataaaaaagaacaggacgttaaacacgaggtcacaacaaacctcacaaacatgagcaccctgcaaaacactactacactgttataagacttatcttcctgaggttttttctcatcttcatactcatagcc

SEQ ID NO: 61049 - DNA, 189 bp, Glycine max
  Clone ID: PAT_MRT3847_26140C.1
ttctcaccgtgctctatgctatacagtacattcactctacgtttaatggcttgcatactatactaattgtcatcactctctctttcgagttctttgctattcttcttatccgactcagttactcctatatcaccaatataccgtgttcttctaatcgttcaaaatgatcagttccacagggctccattg

SEQ ID NO: 61050 - DNA, 325 bp, Glycine max
  Clone ID: PAT_MRT3847_26141C.1
ggcttcctcaatgatctcttccccagctgttaccactgtcaaccttgccggtgccggcatggttgctccattcactggccttaaatccttggctggcttacccaccaaaaagacctactatgacattacctccttagcatacaccggtggatgattgcattgcatgcatgtgtggcccccagttggtcgtaagaagtttgatactcttttctacctgccagaccttgattatgcacaattggcatatgtattaaaatatcttctagcgaatggatggattccttgctatgaattcgaataggagcactgttacttgtaccatgat

SEQ ID NO: 61051 - DNA, 364 bp, Glycine max
  Clone ID: PAT_MRT3847_26142C.1
gcctgcgccgccgaattccggtcgacacgcgtcgttttaaatcaaatcaaagtacctacagagagaaccgtaaagcatatgtatggggcgtggaccaaaggatgagcatcgttgtggatgctgaatgtatgagttgagtacagtagggatctacctgaggtgctgcttgtgcgatcatagggtgacacgtataaaggagaggtacttctcaagaacagctaagacgttgctaagactgtgtatgagcttcaagaataatacggctctacagatctcagactactgtaaagatcgaaccactgagtctgaatctgtatcagaacattttggcctaatcatgaaaagaggtttatttaattgatac

SEQ ID NO: 61052 - DNA, 523 bp, Glycine max
  Clone ID: PAT_MRT3847_26143C.1
tttttccttgtgtttctctcccatgtgtctccttctttgctgagaattgttgtggcagacaagatcaaaacatgtcatgaagtctgggcttaaatttttggttttgctgtgagaatgggatttcagattcagaatcggttttgccttagagaaaaacatgtcctttttttatctatgaaaattgaagacagtgtcagtgtcagggagaaaaacatgtcctttggatgctgcattttagaagcggattatggtttgaccactgagagataataggaaaagggctaattagtacttccttctttacttgattatgacttcactttgtgagaaattttgggaggaagataaaagaaaactcagtttgactatgacttttcagcctctcccccttcacaattttatttttaattattatggttactgtttttgtttatatgatcacaagaaaaacagtttttcatcagttctcaatttcaaatagacgttaacccttcatcctcatgtattatctgcttgcttctac

SEQ ID NO: 61053 - DNA, 1244 bp, Glycine max
  Clone ID: PAT_MRT3847_26144C.1
cccacgcgacccattccaatgggatcagtttgtgaagagcgatggataacagttaccatcacaacggtggcattggtgatagcttcttcagcaccattattattggcggcatgcccttacacctccatcttcagcttcggtgattcacttgcagacactggcaacttgtatttcagcccctacccacccaccaaccactgccttttccctccctacggcgaaaccttctttcaccatgtcactggacgctgctccgatggccgcctcatcatcgatttcatcgctgagtcactggggattccacgggtgaagccgtatttgggaatcaagaatattgggagatggagtgtggaagaagggggagcaaattttgctgttattggagccacggcgttagatttcagtttctttgaagagaggggcatttctattaaaaccaattattctttgacaattcaattgaattggttcaaggaattgcttcctactctatgcaattcttccacagactgccatgaagtagttggaaactcgttatttcttatgggtgaaattggaggaaacgatttcaattatcctttcacaataggagcgtagcagaggttaaaacatatgtgccgtatgtaatcagggcaataacttcagctgtcaacgagttgattggtttaggggctcgcacactcatagttcctgggaatttaccattgggatgtagtataaattatttaacaatctatgaaaccatggataagaaccaatatgatcaatatgggtgtttaaagtggttaaatgagttcgctgaatattacaaccaaaagctccaaagtgaattagataagcttcggagacttcattctcatgctaatatcatttatgctgattattacaatgccacattgcctttatatcgtgatcccacaaagtttggttttactggtcttaaagtctgttgtggaatgggaggtccatacaattacaacacatcagcagattgtggcaatccaggcgtgagtgcttgtgatgatccttcaaagcatattgggtgggatagtgttcacttgactgaggctgcatacagaatagttgctgaaggtttaataaaaggaccatattgtctcccccaaattaatactttgtgcttgatgaatgtaagctcgggctatttcaatagctaaaatgtttcttatgatgaaatgaagtgaaataaattcaatgtaccaaaaaaaaaaaggacggcggcggcc

SEQ ID NO: 61054 - DNA, 446 bp, Glycine max
  Clone ID: PAT_MRT3847_26145C.1
gaaccacaataatcatggacttaacactaggattagcacgccaacatgatggttgcaagtgtgataccacgaagggaaaccaagggcatagacttaagactttcaactgtgcagcttgctgaacctaagtagagaaccttggtaaatgcaccactacagaccgttacctaaatccatactactaacaggggcatgcaaagctgtatatgctgaacatcctttgcacaaggaaacccagttaaccacgaagatatcacaccgaattgatctactgaattcatcttacacacctatcagaacaccaccaaacttactcactatatccctgtcaacgagcacatcaaatagacctatgagaccataggtcagatactgatggagacagtcaccgacctaatgcctagtagagaccttagccacacacgttacaacacatagaactaagc

SEQ ID NO: 61055 - DNA, 363 bp, Glycine max
  unsure (1)..(363): unsure at all n locations
  Clone ID: PAT_MRT3847_26146C.1
gtcttccttcntcttccactctcacacatctcccaacttccaattcacaaaaccttgactatttaccaacccacttcacttcccccactcaacaacagtcgattccattccacaatgcattttcccccactttcccagcaaccaaacagcacataattccttccaactcgagcctctttctctgtcatgtaccgcttgtcgcagctttcatcgtacaccgcctctatagtcggaagcaccgttcgactcatcgcgaaccgctccctgcaccaccagtgctgctcgttaccggcgaaaccagagtatcgcggaattaggtctttccgttcagaattcgcggtgaccactcggtgctactccgcc

SEQ ID NO: 61056 - DNA, 716 bp, Glycine max
  unsure (1)..(716): unsure at all n locations
  Clone ID: PAT_MRT3847_26147C.1
gaattctgtgcttcttggtaaagaggagagtccttgaatagtgggggagacaaaaagaaacccccaaatctacatggggtgctgggaaccccaaaatccagtgaagacacatcaggcaaaaactttagaaagaggttctgagtggaatccttgcactgagtcacagccattggagataaaacagctctccaaattagaactatccccaaacccaagaggagaccaaattatggagaaagcaggagacctcagtttttggggtccctcaaatttcccagggtatgggatagggaatcctgaggcagtatcaaggcagaggcagaacagttattggctggtaggtcggtgtgccttggcatggtatgctgaaattggctccctggtgggctgggagtgaggtctaaggcacaagacgggctgcgctgagaaggcaagcaggcaactcatcagcctgggtgcggtgcaaggagggttcggaggcactccgctcaatcttggggagtgaccgctgcagtagctcgatcgtggccagaatctggggaaataggggccgctcctcccgctggaacttgaggcagtcagtcagcaggcgcctcatggctttggggcaattactgaagattntgctgaggtccggagacagatagccacggcccaccataaagatgatctggtcacggctgccaatgtggctgtagggcagtgagcccgtcatg

SEQ ID NO: 61057 - DNA, 357 bp, Glycine max
  Clone ID: PAT_MRT3847_26148C.1
cgaagattaacatcaaacgtgccgcagacacaacaggcttcttataactcacagattggtaatattaggttaccatgaaacattgataccatatttgacgaggataaacagcatagctagtgcaaaagcttatgccacaaggacaaatctgttcttgaaagatgatggtacttagaagccaatagctatagcattaagcaaaccacatacagatggatataatttgaagcctgagagtatagtcatattggctacaactaaaggcgtcaatagaacaatttggatatcgatcacagctcatattattgccaatgactatggctatcatcaggtcatgagccataggttatatactaa

SEQ ID NO: 61058 - DNA, 229 bp, Glycine max
  Clone ID: PAT_MRT3847_26149C.1
aattcataacttctaatccaatatatataatacccatccaaacaatggcttgggattcttaaaaaaaccaacctaactacactttccaatatcttataaaaaaaaacacccttttcaccttaaattgaatactttattaaaccctctccacaccatttaaaactctctctcattcaccttccccttcttttaccacctaccaactttatacatttatcaaatcatcaaa

SEQ ID NO: 61059 - DNA, 358 bp, Glycine max
  Clone ID: PAT_MRT3847_2614C.1
ccgggggaaaaaccaggggggtcaattctatgcccaccccccggagtctttccgggtctgtcgcggccccccactgtagtttttttttaaaaagccctgacacacacaatctcgcccctccgtattacccaaaaaaaaactccccaaaaactgagtgaaggggggcccctcccacaattaaaaaaacgaaggggcccaaaacctgctaagggtccctctacaagccacaacgtgttcatttaaaaggggaacataattctagaactggggcggcgcatcacgaccaccggggtggggcaaaaccggcggtagcccagtttgaagccttggaaaaaaagctccctattggggttgggga

SEQ ID NO: 61060 - DNA, 195 bp, Glycine max
  Clone ID: PAT_MRT3847_26150C.1
gtggagaagtcctctcagtcgctctctggcttatttaatgataaagaaatggggagtttgctactctgaaagtaactaagaaaaaagcagtgtacaaaaggagcttgtaaaagaaagtcaggctgatactcctaacacttatttaaaaaagaaggaatgttggtttcggacttgggtaacaccttagccaaaaac

SEQ ID NO: 61061 - DNA, 1683 bp, Glycine max
  unsure (1)..(1683): unsure at all n locations
  Clone ID: PAT_MRT3847_26151C.1
cggaaaacccgggncgacccacgaggtcgacggagaaaagaagagaatagagaatggtcaaagtaaaaataaaatgaaggaattaaaaatggaaggcgtgcttctcccacaactccgcgtacgcgcagccttttcaccaaattgtcgaccaaccatcttcgttatttgcaaatttcgtttcctttgaattacaatttacaagacaaggaaggcagcctcggatgttgttgttgtcgtcgtcgtgttcttaggttttgttctgagacgcagtttttcattcttctaatggcccagtccttcggtcagaccgagatcaactgggacaagctagataaaactagattctatgtcgtaggagctggactctttacaggtgtttcggtggcactttatcccgtttctgttgtgaaaactaggctgcaggttgccacaaaggatgctgtagagagaaatgtgttttctgttgcaaaaggactacttaaaacagacggcatccctggtttgtatagagggtttggcacagttatcactggtgcaattcctgccagaatcatattcctctccactctagagaccacaaaggtgactgccttcagaatgcttgaaccatttagactatctgaaacttctcaggctgccattgcaaatggagttgcaggcatgacatcatcgctttttgcatctgtgtttgtaccaattgatgtggttagccaaaagttgatggtgcaaggatactcaggccatgcccaatatagtgggggtctggatgttgttcgccaggttttaaggactgatggcatacggggattgtatcgagggtttggtctgtctgttattacttatgcccctgccagtgcagtatggtgggcaagttatggttcaagccaacgcttcatttggagattcctggatcatggtgccaaatatgatgaagtcgcacctagtatgcagaaaattatgttagttcaggctactggagggattattgctggtgcaacttcatcctgcattacaaccccattggataccatcaagacacgattacaggtaatgggacatgaaaatagaagttctataaaacaagttgccaaagatttaatcaatgaagatggttggagaggcttttatagagggtttggtccaagattttttagcatgtcagcatggggcacttcaatgatattgacttatgagtatctgaaacgtgtatgctcaaaagatgaatagatgcaattagtctgaaagcttgtatttaactgatcgatttaccaagattaggatgatgatgttgggtttgcacctttagcattggagttgctgttcaacatttatcactctgacttgagggttaaacttttagcagtacagctatgctgacagattatatgaaaacactcggctggatatgaatatggcaaacttcctactagaaaataaattgcatcattatttttttataattctattggatttggcgcattcttttgtagcattgctatggatactgtattatcatgtaagggaagggaatagattgctattaaatgcattgtaaagagatgtgaagaataaatttgaaattctaaatcttatctcttttgttccaaaaagggaaagttattgcagatatttttgtttacatattgttaaattttacatttctcaaatgataataattttatt

SEQ ID NO: 61062 - DNA, 492 bp, Glycine max
  unsure (1)..(492): unsure at all n locations
  Clone ID: PAT_MRT3847_26152C.1
tttcgcgttattcggggattgtatcgagggtttggtctgtctgttattacttatgcacctgccagtgcagtatggtgggcaagttatggttcaagccaacgcttcatttggagattaatataacagattgatctctaagcatggaattatgtatgatgctgtaactgcatctgcatgctggcagtggattatattaagttgggagagctataatttcttcttgactgagaaaccatgctgaaagaataaactgaatttgcagtaaactagtgatttcaatttttttatggtggtgaattttgtaataataggataattcacttttagtacatgtgcttgctgttatttttatttctatgttatcatgcaaacccaatattaaaaacaattagcacatggttgcatgaacagattcctggatcatggtgccaaatatgatgaagtcgcacctagtatgcagaaaattatgttagttcaggctacntggaggga

SEQ ID NO: 61063 - DNA, 226 bp, Glycine max
  unsure (1)..(226): unsure at all n locations
  Clone ID: PAT_MRT3847_26153C.1
ttccatggcctccaagnggattctgaaggagcttaaggacctccagaaanaccctccaacctcttgcagcgccggtcctgtaacgcaaaatatgtttcctcgcccacccactataatgcgcccccctgatagcccttatgctggcgccgctcctcctcggactactcatgttcctctctaatatccatgtaagacacccaaggttgcatttaaacaccacattttt

SEQ ID NO: 61064 - DNA, 416 bp, Glycine max
  Clone ID: PAT_MRT3847_26154C.1
aaaaagacctcacaattaagagactccccgattcttggagatatacacaagaatggaagttgcaaaaccgagagcaagttgttctaggagagaccagccttgactgctgagactctcaaggcaagctagtcagatccactttggcccttgaagccatttacagcgtctttggacaccccacctgtgactccaggacttacggcccaaggttgtttgccgtcttggtggggcagatgccccggcccagccgttttcactgttgcaatcacaggtttgcccctggatgcctgcgtgcgcaacatagcgccagaggctttttgcccaagtcctgcaacctttccggggactccatcagtctagggttctagacccctgcagccatgggtttcgaggataccatccatggccttggactt

SEQ ID NO: 61065 - DNA, 569 bp, Glycine max
  Clone ID: PAT_MRT3847_26155C.1
ggggtgggggtttttttttttttttttttttttttttttttttttttttttttttttttttggaggataaaacggggcaaggaaaaagaaaccgcccaatctttcactaaaaacgggaagagaaaataaaaaccctcgcaaaacattgatatcggtacggggggggacccaattccctccttttttaaaaaacaggtccccccccaagggcccaacacaagaccatggggaaaaacataaaggggaggaacaaggggccaaagcaaggggaaaacaataatattaaccccccccccacttggaacagggccctcagttcctctgggggggcaaaaaaattaaacatagccccggcttttaaaactctccacgggatccttgaggattggcccaacaggggggaattctaaacctaaatcaatcagcttttttgaggcatcctttccattgggtctaaaaaaccctgggggggtatccttgggcaacttacccacatgggattcaggggaaaacccaaaaaccttgcccacaagatcactaaggggacgaatagatccccacacaagggc

SEQ ID NO: 61066 - DNA, 139 bp, Glycine max
  Clone ID: PAT_MRT3847_26156C.1
cacgcgtccgcacaacaggaactcactatatggacaacgttactctcggtgtctttaatgtcttcgagagggggagatgttcacatataggatgaaaattcgcagggatatgcgcgctgacacagctgaatttacggaa

SEQ ID NO: 61067 - DNA, 335 bp, Glycine max
  Clone ID: PAT_MRT3847_26157C.1
aaaaaggaaaatgagggaatccccttaaaaaggggctaaaaaaaaaaattcccccccccaaaattttaaggggggccccttagtggaaaaaacacccccccttggaaccaggaatgggaggggaaaaaccccccttttttttatcccaaatttaccccgaccttttgggaaaaaaaaaaacccggaacctctaaagcccggaaatctttccttttttttaaaaaggaattccctctttacccccccaatattcccaaaaacaatttcccaaagggggaaacccttttaaaagaaacccccaagggggtagggggccctttttttaaaacaaaatg

SEQ ID NO: 61068 - DNA, 914 bp, Glycine max
  unsure (1)..(914): unsure at all n locations
  Clone ID: PAT_MRT3847_26158C.1
gataataatcacaaccaggcaccgtgaggttgcagagtcttgtaggacatcttctcttgttcaagtgcatgagttgcaacctttaactgatgacaaatctttcgaagcgttttgtaaaacggcatttggatctgaattagatgggcattgtccaaacaatcttaagggcatatcaactgaaattgttaaaaagtgtgaaggtttaccactagctattgtggccaccggtggccttttatcttgcaaaagtagagatgcacgtgaatggcaaagatttagtgagaatctaagttcagaattaggaaagcatcccaaattaactcccgtgacaaagattttgggtttaagttattatgatttgccttaccatctcaaaccatgcttcttgtatttcggaatattgccggaatattatgaagttgggtgtgggagattgattctacaatgggtagctgaggggtttgtcaaatctgatgaagcggcacaaactttagaagaagtggcagaaaaatatttgaatgagttgatccaaagaagtttggttcaagtatcttcatttacaaagtgtggcaaaattaaaaggtgtcgtgttcatgacgtggtacgtgaaatgatccgtgagaagaatcaagatttaagcttttgccattctgctagtgagcgtgggaacttgtctaaaagtgggatgattcgtcgcctaacaatagcatctggttccaacaatttgacggggaggtgtntgaaagctcgaacattcgatcacttcatgttttcagtgatgacgaattgtcagaatccttggtgaagagtatgcctacaaagtacaggttattaagggtacttcaatttgaacctnnctccatatgcatgaatatgttccgcgcattgaaagtttgggggacttatcatttttg

SEQ ID NO: 61069 - DNA, 312 bp, Glycine max
  Clone ID: PAT_MRT3847_26159C.1
ggctcgagcgaaacttgagtttcaattttttaatctagtgatcgacacataactattggactgctagtgtcagcaatcataccgctaacaataaaaggattgccattaacgggtttttgttaatgcacagagacgctcgaatcgttgagcgcatcctcattaacaggaccgcctacaccatatagccgaaaatcgacagcgctcaattgatctacagaacgaggttcgatcgaatcaaaagatccgaatcttaatgttgaagatctgatgaacttggccccacgcggcttcatcaggcccatgacctttggc

SEQ ID NO: 61070 - DNA, 381 bp, Glycine max
  Clone ID: PAT_MRT3847_2615C.1
gccttgtctcttcttcgcctcaaagccagaattatttatctttagatcacaatgaatagcattggcaagctgggtgctatgcaaaaactgataaaaggtggaagagccatgcctgcagctgcaatatctgatgacagcgttttggtgaagaaaatagtggcagagcatagccctgaggggatagaatatgatgtcaggccacttctccatagttgaggatgttcttatttattccaccttgagttctgatagggctacaacggctgcccttacacgtgctgatcatgtcaaaaacaaaacccaccgtcctggccaaacaaacatgctgaaggctctatctgctaaaatggatagaatttcctgtaaaattccctacaaaac

SEQ ID NO: 61071 - DNA, 767 bp, Glycine max
  Clone ID: PAT_MRT3847_26160C.1
cccacgcgtccgcccacgcgtccgcttaagggagccgattaaaaagttggggttctttcatcacttcattccacatcctagcgaactatccatcgctcccgctcccaaagttcacattggcgcccgacgcagctgagttcgtaacaacgttgttaatgacttcattcccaaccccagtgaactatcaaccgctcccaaagttcacattggcgcccggggcaggctcagtttgtcaccgcgttaccaccgttgcgtagggctcgggaagctcggcatttggccattctcgctctgtacacatggatgattcattagacatcactccttcacaagctgagtcaaattctcagtctacaaaaaaaagggttagaggtcccacatgcttgaagaagttaagactcaaacgtgttagagatcatatgatacctggtgagtttgatcaatcgactggcaatgctaaagggccaaacaggagagagttcaacaattatgaggctttccttgctcgaagcaagctaagtattctacatgaggatttgggatcatgtagagggagagcgagaagaatatgatttggcaaactatcatgcacaattatgacgttccaaatttccaagttcctcaagaagaaactaatttcatatgctggtcaacgttggaggggatttaagacacagctctctagcttttacatatatgggaagtacaaagacaaatctccttgtgataagtatacattcctcaagaaggatacgtggcaaagattt

SEQ ID NO: 61072 - DNA, 177 bp, Glycine max
  unsure (1)..(177): unsure at all n locations
  Clone ID: PAT_MRT3847_26161C.1
gaaaatattggcatgctcattttgggtcgggtgctacttggctttgggggcgggtgcactaatcaagccgcaccgnngnatctctctgaaaccgcaccaccgcaacggcgcggagcatgcagcacaggctcgcaactcgtcttaggagggggagcgctccccggtggcggcataaac

SEQ ID NO: 61073 - DNA, 305 bp, Glycine max
  Clone ID: PAT_MRT3847_26162C.1
aactttcctctctctttttctctctctctctctctccttgacgtgcttgtatcaatggctaaagcctttttgacatcagtgccgcttttcctgctcctagcagtgagtagtagtgtggttgctgaagagcttgaaactcttccaccttcttaccctcaccctcactcttccacacaagctccttttcacccaccagtaagtgcttcttaccctcaccaccaccaccaccaccacccttcatcacaagctcctgcacctgtacatacacctatttcttctacctatcataattaccctttttaccc

SEQ ID NO: 61074 - DNA, 202 bp, Glycine max
  Clone ID: PAT_MRT3847_26163C.1
ccaagcatgtgtaaacataagcatttcgagtgggcaccggccttaaaactgctattgcaacccacgcgtacgcggtcccgtggcctaacccatgtgcctactgtaggcttgacatcaagttacactccaactacactgttggaatttgtgatgctaaagacagagggctttttgaggtattttttggaaggatggcttacga

SEQ ID NO: 61075 - DNA, 636 bp, Glycine max
  Clone ID: PAT_MRT3847_26164C.1
tacggctgcgagaagacgacagaagggtacggctgcgagaagacgacagaaggggacacaataaacaaagagaaactccatacaaaagtcttctcttctgtcaccagctactcaaacaacaaccgttgatcatggaccctcatgttcttttcatgcgattgtgtctgtttcaactttgaaacaacaaagttacttaaccacgttggttcctagtactgtgttgattgcttggaatgctgttgttacaataacaataatattaataatggttgagagaaccgtgtctgctggctccaccatcaaggttgtttccaagaagtccttgtgtggattcttcacaatgacaacgttgttgttcatgttgtcatggctgtccgttcttcgttccactcgctccgaggcttcgcctaactcaaatcttttctcttccttacagcaactcagattttgatcagtcagtgcagcagcaaaaacacatggaagacgaagacgcaccatctaattatggcggtatagtattacttgtaaacaatatagaggcaacaacaacacatgatgagaaacaacaacaactagcaacatcacctaggtgtgaaatgcaaacccacatgacaaggctgttctaagagttttcat

SEQ ID NO: 61076 - DNA, 196 bp, Glycine max
  Clone ID: PAT_MRT3847_26165C.1
gattgttttaatgtaaaaaaatcagattcactttactaaaagaaaacgagctagtttccaattttttaagtgcagccagtttttgctataaacaacattcaagcctatcaacggtagaaccacaggacaaaacctagaagaaaattggaaactagctcgttttcttttagtaaagtgaatctgattgttttaatgt

SEQ ID NO: 61077 - DNA, 370 bp, Glycine max
  Clone ID: PAT_MRT3847_26166C.1
tactgagcatcgtctagctatctcgatcgaactgtccaaggtcctgtcaccgttggccggcagcggccaccgcctaggccacccgtgtgggtccacaggcggaccctggagttgtagagtaagcttagtaatgggcatggctggtagcgccggcttatgctgttgaacggatcagcccagtatttagcgccgaccgcatagcggtcgcgttaggttgacgctgcagctgagggatagcaacgccaggtggtagcatgccactcatcagtatgctagtaccagtggcaacaatgctaccaccgtaagattacacaacataccaaaacgtagaagtcgccagtatcggtggtcatttcaacataatcaatgt

SEQ ID NO: 61078 - DNA, 342 bp, Glycine max
  Clone ID: PAT_MRT3847_26167C.1
gaatgatgagttctagggaagtagttgctctgatatgaaatcttgctctagatcgggaatacgctcctctatataagctcacttacgaagtgggtatatccttacaagtgtgatatatttggcgctggttcacagtctgcaggatatgttactgcaagggaagatcaagagaatctccattgagattgatactctgagttgagacatagaatgtatctcttagttcagggagggtgaggctcagatggaaactcattcttgaaggatctcagttctgtagaagatgaaggacatgcctgaaggcaatatttagtatcataaaaggattcaagcttgcttagg

SEQ ID NO: 61079 - DNA, 599 bp, Glycine max
  unsure (1)..(599): unsure at all n locations
  Clone ID: PAT_MRT3847_26168C.1
ggctcgagtgccatggcactgcatttcaaaacgtgcattttttctttcaaacctcatcaaattatgacaacaaaggctcagctttctcaaagcttcaatcctgctaaacttgattctcttcacattgccaacaaatggaacattgttcaagaagaaagatctagcgcattattcacaaaaactggagatctcatcagcattaatcactcagacaaactggaggtggtcaagaatgaatttatgaacactgtgggtgaaaattcattaagaggtttgtacatgattgatgccatgcagcgcctaaatattgattaccacttccaagaggaaattgaagaattcctaaggaggcaatatgtgaattctactactattgcgggtggttattatggtgatgatattcatgagattgcacttcgcttcaggctattgagacaacaaggtttctttgtgcccgaagaggtgtttcacaagttcacaaacaaggagggaaagttcaaccaanaacttggtgaaaatataaagggaatggtagagttatatgaagcctcaccgttaggcatagcaggngaagacacacttgcttgaagctgtgaatt

SEQ ID NO: 61080 - DNA, 184 bp, Glycine max
  Clone ID: PAT_MRT3847_26169C.1
tgggaaacaggatcgataaatagagatataactcggttagaaagggtactaatacgtacttgcaggctgcatcaacctcgtatgctagttcaggctactgggacgttgtgtgcatacaagcacaggcaaattacagaaaaagtcatcatcatactcacaattagtacaaattaggcattgatct

SEQ ID NO: 61081 - DNA, 399 bp, Glycine max
  Clone ID: PAT_MRT3847_2616C.1
gggacgcgtgggtcgtgtatgtagacatgaacctagccgagatgtggggctcgagccacagtgcgggccgctaaactaggctaacacaaggggaggagctgagaagtattactgattgcgacgcgacagagcaagttaactcctaacagcgcgcggagggaaacaagccgtgctcaagcacgaagcttcaaagctgatacatacaacacgccacggatgtgaggaccaaagccctgaacgactaggctgagctggagtctctcattatgaaacctcccgagagacgcaattcgtgaacttagctgagccactcggtgacgagcctgatgacgtgacactgttccttcacaccttgaggcaccacgagccgtaccaagggagtgccgatgactcagtaca

SEQ ID NO: 61082 - DNA, 758 bp, Glycine max
  unsure (1)..(758): unsure at all n locations
  Clone ID: PAT_MRT3847_26170C.1
ggaactagtctcgagttttttttttttttttttacatgattaactacgangtttacttcgtctcacacaggcattgactggagagagagaaagagacgggaggagagagaaagctagttagctaaacatggagctctaaattacatttgaagatcgctgtagggtttttagccttatcgcatcacatatctagaggtgtacgacttgtcatcgattgtgcaacgttcgtgtttctaggatcaatatttaacttatttttattttcttgtccaattatggaagaggatgagcaatagggctcgaggcatatgaaaagatttctcaaaatcctcactccccaattattcctttcttcaattagtgaattttatttcactaattgacctttaatttatccacacaacactgtttatattttcttttgtcttgctccaaaatttcaagaaaacagtagcataaagttgaaaaattaaggtacacaagaagatgggagaaagcagtggctcacaatgttccaagacaagtccttctaacattgatgaagatgacgagggtgaaagtgaggccaatgaagatcaaagtaagcaaaacaacaacggaggaagctcaagtaacagcacagtggaagagaatgagaagaagataaggccttatgttagatccaagatgccaaggcttcggtggacacctgatcttcatcttcgctttattcatgcggttcaacgacttggaggacaagagagagcaacaccaaaatt

SEQ ID NO: 61083 - DNA, 424 bp, Glycine max
  Clone ID: PAT_MRT3847_26171C.1
gacgcagaagcatatccagaagcatcaaagagtgtgctgcaaattttgtgggatgtagttacctatggtcagggtagacagtggggaaaagcaagaatttcagccctggaggcacttgctcaatatgaagtgccacagcttgagaatagtattccagatttcaagaaaatgaatttggagctgttcttttctgagacaaatcccaaagtactcaaggctatggaggagtttcatgtcaagttaataacatatgagcacataaatcgtcggagagtagtcaaggaaaaaagagttacaggaagcaagatcgaaaaattgatggatgtatttccacaggttatattctcttcaggagtgataaataaagctagaagagtacctgggggcttcttatatgtttttcttccctcctaagatatgaatg

SEQ ID NO: 61084 - DNA, 624 bp, Glycine max
  Clone ID: PAT_MRT3847_26172C.1
ccaaaaaaagtggttcaaatgataatgaaggtatggatcaaattccttaacatattgatgagaacgtacatatttcttctgtttgttatatatgtttcaatatcatcttacaaacatattgatttgcgaaacaagtttcaagtcttatgaaataagatccatgtcgtctctaaccatatatattttcttgctgtttgaactctattactggtatggtttctgggtggtgttctaggtgtgtaagaagcctggtgaagagggagcaagggatatttatactggagaggatgttttgtcactatttgaactctgttaccagtatggtttctgggtggtattctagatgtgtaagaagcctggtgaagagggagcaagggatatttatactggagagattgctattccggccacgggaaaaaaagccaaaaaacaaggtgctttcagattctgaaacagtccaggtgctatacttgctgtgaaactaagaaaaaggttgggctttggaatgtggggaaaactgcacatcataggaatgcatgttgaaggaaaggtatgacaatggaattttgattttacagtgacacatttgttgaatatttatcagaataattgtgaccttttgtt

SEQ ID NO: 61085 - DNA, 1790 bp, Glycine max
  Clone ID: PAT_MRT3847_26173C.1
ggcgttttcgtcacatatatcgtggtcagcccaaacgacacttgcttactagcggttggagcttattcgtgaatgcaaagaaacttgttgctggagattcatgcattttcgttagaggggaatctggagaacttcgtgttgggattcgtcgcgcagcagaaaatctcagcaatatatcgcaatcttcatctctgatatcgggtcatagcatgcaacttggaattttgactaatgcttccaatgctgttggcaacagaaccatgtttcttgtctattaccgcccgtggacaaatccctttgaatttattgtccatctccaaacctatttgaagtcaactttacaagactatccaattggaacgagggtacaaatgcagcatgaagttgaagaatctttaagaagacttgcaggtacgataattggtaatgaagatatcgatagtattaggtggcctggttctgcatggagacgtctcaaggtgcaatgggacgccatagtagaagacaaaatgcatcctgaaagggtttgtccttggtggattgagcccttggaatctgccaaggagaagaagcaagttcctgctctccccaccaagaaaaaggggcatgcacttcttaaccagcgctctttgcctggaataagtggctttggcaagaatgatgttcatcagaattcagccggcccttcgtctcagactcggagggcagacggagacctgcaaggtcaagattacagcggcctatctcctccacagcctttgcaaagagcaccatcaactgatataatccgcccatcaaaggtcccaatccgtggctcgcggttcgggaaggagaatcggaatcagcatccctttctcaagcaagatcctcttcataaatctcttggcagatcaatgtcacttacacatgaagacttgtcaattacaagctcaaacctaacttccattggttctgaatcccttggaatgccttctactgaatctagaggtgaaaatgatgctccttttgggcagcctggcagttctagtacattcaaactttttggagttaacttaattgacagctcccctgagatcccatcggttaattttgttgatctcaacaagacttcaagtcttccttctagtcctccaatgggtgttgccccaggaaaaacatgcaagaagtgtcgctgtgttaataatcggagctgcacaaaggtgcttaagctgggaaatgctcttggaagagcagttgaccttgcacgctttaatgggtataccgaacttattgctgaattggactccatgttcgattttcaaggaaccttgataagcggaggtagtgggtggcacgttacctgcttggatgatgaaggagatatgatgcaacttggagattatccctggcaggatttcctgggcgtggtgcaaaagatgatcatatgtccaaaggaaggtactgacaatctcaagccaggctcctcagctaatccttgaaacctttagtcgcctaccttttctccccttttccaccattgcatgcatgcacagtttgcagtactgtgtcgtttctagttcgaataaatttctcttttcctgagaatctaggagatcaataagtttctgctataaaaatatagcaatcatagtgaaataaatttacagagtggaaaaacaaaaactgctttttcttgttttaagaacctgtttttcatgatacttgtggaaagtactcatgagtcatgaccgtgatatgaataattgacataataaatgcatggttattccgtcctcatgaacgggcgttcg

SEQ ID NO: 61086 - DNA, 594 bp, Glycine max
  Clone ID: PAT_MRT3847_26174C.1
cagaacataaccttaacccaaccctagatcttcatccttcaacagcgcgaaccttcttccttctcttcaactcaacaacattacatcacacttcattctcagatcttcccggacaagtctcattccttaacaattttccacctttgagcctcaaaccctcttaattttgcattccatcttgtgggatccacttgaattacactggatttgaagccccactaaaaaaagtcacattttttttcaactgggtatgctttgcatgcggcattagtgagtagtgtattgttaggtagtgagttacaatggcaatgccatcgggaaatgcagtaatgccggaaaaattgcagtttccgggtggcggtggtggtagtgagatccactaccgccagcagtggtttgtggatgagagggacgggtttatcggttggcttcgcagcgaattcgcggctgcaaatgccatcatagactctctgtgccaccatttgcgttgtgttggggagcctggggagtatgacatggttgttggggcaattcagcagaggaggtgtaattggactcaggtgctgcttatgcagcagtccttttctgtgtctg

SEQ ID NO: 61087 - DNA, 1212 bp, Glycine max
  Clone ID: PAT_MRT3847_26175C.1
gatagaaactcatgagttacatcatcccatatataattggaagagggattctccctcaataaggaaatacagtagtaggagagaaaacttcagtcaagtgcaagttaacgaaaatattaccccttcagttcatcaaaacggttactcagttttaacaaacaacacataatagttgttatggtgtcataaaatatgtttctgaatcaaacgggggaatatttttgttaacttgcacccaagtacaatttatgccgaaggaaaagaaacacctatacaacaaaggcaacaacactacagctactgaaatctgttataagaatagttagccgcattgatgtattgtctccaagaactcactggcgtagcaactgaaaataggggcgattttgttataaagcaatacacaatgtgttaacattgtcagttccaagatcagacttgtgttggtccttgtaccagggaaaccctccatcagaattgttctcaattggactaccttgatgcaaaccaaaacctaggccatcggatgcattagatgtcttgtgtgaattcccctcagatacactattaccattagtattggcagagctagtgtttgaactcttttgctcagtctgaatgagttttccaaataacaagatgtgaggtgcttttgtttcattggattccttgaaattctggccaggatttcccactgtcaacaagcaagaaatgccaacattggccttagtagtggtgttgttcttataggttccacaaggtggcctaataggctgtgctgctgcatggtcaagccttgagaaaccacctagaagcatgtctgctgggagcttgttgaagggaaaatcagatggagatagtccaaattgagcatgcctggctccctgtatgcctccagaactattactatcttgaatggtgcaaagagagttggtgtaattgagaaggttgctagagaatgatggcattgggagttggttgatgacttgaaaataaggatcctgaagaaaacgttgtttcattctaggaggtgagtatgcagagagattgaatgtaggcatgtttgagactagttcaaccagccacgggtttacacacttcacattttgaagtaaatctggctcatcccacaccacctgcagaagacgccatggagaatcaggccaaaggatgggatctgcaacttgaacagaagaaatggttcccatgaac

SEQ ID NO: 61088 - DNA, 300 bp, Glycine max
  unsure (1)..(300): unsure at all n locations
  Clone ID: PAT_MRT3847_26176C.1
agcnnggaattcggctcgagggaagagatcgacaagggcataaagaggcgtgaacgatcggatgtggtatattcacctacggaccctgggatgccgcatgaccaaacgcttgactggcacaacactggtggaagatcatgtgatgcatttactaataactgacatggggaagccagtttgcataacatgattcttgaagatggcatatgagattctcatgattgtgtgcaccatcatcatcacgacatgatagcttacgttacgaaccaaaaccctatacgatggaatcagaagcccatt

SEQ ID NO: 61089 - DNA, 352 bp, Glycine max
  Clone ID: PAT_MRT3847_26177C.1
ggaaaaaaaccaaacaattatgggataaaaacccaattatcgaacattggacaaccgacccttaaattaattaagctggggaaaaaaactaaagctgggtttccgggaataaaggggtttaaacaagggctggaaaaaaaaaaactgggcggggagaaaaaattttattcaggaatggggtaaagcatcaggagcaatcacccttaattaggttttgcaccaaatggacgggtaaggaggtaaaacaacccccaagaaaaaattttccctcccgggaggcggcaaaagaaaacccattaaaaggaaggtaagcaatctaccgaaatcccccaccaaaagcgggaccccaaaa

SEQ ID NO: 61090 - DNA, 437 bp, Glycine max
  Clone ID: PAT_MRT3847_26178C.1
cccacgcgtccgcccacgcgttcgaaaccttgtctacctacgtagcttctctcgcactgcgaacccttactcttcgaactggacaacctctctgaacttcccaatgcttcttctagtccctctacctcacccctaacttcaaacccatttccattttcgccgtttttctcaaaacaaccctgtcttcgtcttcggcgttgtcgctgtcgactcgcttcgttccccatgtctatgtgtttgaacacgaggaggacactctttgcgacagagtactgccccagcttctaccgcgaccttaagctctttgtcaggaatctccccttcagtgtcgacagatcgcggctcgcttagctctttgagagtgctatgaatgtgtacgtcgttgaggttatttattataagactactgtgatgagcacaagcgcttggttttttac

SEQ ID NO: 61091 - DNA, 247 bp, Glycine max
  Clone ID: PAT_MRT3847_26179C.1
ctgtctttctaaatgcagatcaaaacgaactagactgactcatccacctataactaaaaccaacattctttttgcatacaccgactcatgctcacctataattaaaatcaatatggtgtataactcttaaacaatgttggccaatgcatgcgtcaacaaatatcctgtttttataaattacaatcttctgtaccatacatgtagggtaggaatccttttcttgattcttctaagttaatgattatga

SEQ ID NO: 61092 - DNA, 249 bp, Glycine max
  Clone ID: PAT_MRT3847_2617C.1
tacattttttaaatcgcattattcaccattacagctcctatcataacctggccaacttgcaccaatcatacggcagtagctacccatagtacattactcctagtgagtcctgccaaagctgaatgtgaaaacgtcagttattacaacaatgatagcaattgaaggaggaacttgattttctttgatgcagatgctgctgttttctatgatgcttgtatttcaatttcatataagcctaaaccatgaacc

SEQ ID NO: 61093 - DNA, 689 bp, Glycine max
  Clone ID: PAT_MRT3847_26180C.1
aattcggcgtcggactcttgctacgagttgaattgtcactcttggttcgcattctgtggatgctcccgggtcgacccacgcgtccgaaaaccctagattttctttttccaatcacttaattctctgagttcttcacccaataggcaaaaaatactcaaaatcccccctttttatttttcctttcaatcacttccccttctaaattctctgattacctgatttattcaactgcttctgccgtttccccttcgcataaacaaaccccaatttcttcacgtgggtctctgaaattttttcaccttatcctctctgatcacgaatggtttgcagttatagcaacaatgtcagatgacatgctcattcatttctcatccaactcatccaaccaatcagatcagtctctgcctacaaagattgcaaagttggaagctcgcatggttggtaagggttcctccacgactgctcagcaatcaggttggtcctctgtgtccgttccttctgctgggaaattaggtggagctgctgaaaatttggctgaaccatccacttccagtgattctgatgatgataatggtggggaattcttaatacaagccaacactcagaaacgccaaaaatttcaagaagatggcagcgcaagtgtttttgaacgtgttgaggttgttactgatgcagggcaaatgagtttg

SEQ ID NO: 61094 - DNA, 298 bp, Glycine max
  Clone ID: PAT_MRT3847_26181C.1
atgattaggaatgcttggatttttattcatttctatgaccatgaacattatgactcttattaagatgacgaggaacagattcatatatactatcatacattcctcaatttgtaaacaatctgtcacaaggacgatacatcttaacaatttatgttctaaatatttatttcttgaagaattctgttcaataagactttcttaaatattaattctatgaatcctatttcatttagattggatttttagcattattgctttttgcaattgttgctgctcaatattagaaccatatctctct

SEQ ID NO: 61095 - DNA, 330 bp, Glycine max
  Clone ID: PAT_MRT3847_26182C.1
ttgcattttttttttttttttttgccacatatcatacttaatttcaaacttaacaattgaacttacaaatcagaaagaaaggaggtttctagagaccctaaaacagtcattgtctcgtctaagtttagttttacacaactgggcttcaagaacatatttaagccataaaaacagtaagtcaagttgtaacagaggcagaaactcgtgtaaaaagggcttcattctgcaatcctgcaaactatttctttcaacagcaactgtaaccaagattattttgactaattgctcccttctttcttttattaaaatatgctggaaccattggctttg

SEQ ID NO: 61096 - DNA, 398 bp, Glycine max
  Clone ID: PAT_MRT3847_26183C.1
tcttttttttttttttgattttttttttttttcttgtttttgtgtccctggcgccgaacaaaggggaccactcgtggagatacaaaaagggtttttgctttgggggctggcacctggatcctacgctggtgcagtttcccttgtctttacaacaccctggggggaaaaaattaactggcgtgcctccttccccgagggggggattgatatgagcctataaaaaaggggctcttcaggatgcaatattcctttcggatggatcaaaccctcaatctggacaaggtaagggggtctaacccaaatttgagaggctgttatccttaggctgatccagtaatgaagctatgggtccttttactacaatgatggactgcataaacttaaataaaacgagagcc

SEQ ID NO: 61097 - DNA, 136 bp, Glycine max
  Clone ID: PAT_MRT3847_26184C.1
tatggctgtgacagacgacagaaaggggttctagtgtgtgattgtccgttgttacgactctttcatcttgcgtcggtgttctgtgtgcatgtttgttcaatcactcagctgaaaacgacttgctgctgtcgcaact

SEQ ID NO: 61098 - DNA, 328 bp, Glycine max
  Clone ID: PAT_MRT3847_26185C.1
ctcatccttcatcaccatgtctcttacgcggttctctgcagtcaccctccgaaaaggcgcgtgcctacggacattacattcaacgctcagcgtgagtaaagatctcgttcaagatttgtatatgaaagagattcgagcttacaaagcgccggctgttgccgccgatgctcatgaaagcgttgtccgcaagttctccgagccttcgaagccctcgatgccgagccttgtcagcgaactacaagctacgctgcctgcgtatattgcgcacgaaccctcatatgtgaccccgactgctaagagtgtggagggctccgacactgaaggacaa

SEQ ID NO: 61099 - DNA, 440 bp, Glycine max
  unsure (1)..(440): unsure at all n locations
  Clone ID: PAT_MRT3847_26186C.1
gacccacgcccgtcccgtacggtctggcgagnaagaacgtacagaaggggggcatgctcaagagaaaagaaagaatcctgcagattttctgtagcatgccagaacactgctctgctctgctctctcgaaaaatgtctcagtgttgcgagagagaagatctgacatcagtgtccgtggcagagccggtatgctcgacgactcacccttgctgtggtgagcatcgcaacggtagaccacgctcagctcacgtctcgctatcatgcgggccaaggacggcatgcgtcttggggctcacgagtacctgacttgcccgtcagtgtcaaacgctcgaggagtagtaactgccatgcatgatgtgcactttaatggacgccctagatctacttgtctccaacctggatgtgtgatctgcggccggcccccatgtactcttggtcagt

SEQ ID NO: 61100 - DNA, 342 bp, Glycine max
  Clone ID: PAT_MRT3847_26187C.1
caacttccttctatattttttttttttcacacaaaacacccacggaaagggggtctcttttattaataaactttccatccctaaacagcagggtttgattcacaaaaacccaacattgggtctccatttccctctttagggccccctggccacttgtttgctcccaaactggccaaacctaccacttttgggctgaacccccatatattggaaacccaagaacccacttcaaccattttatatcccatgaccatattgaaggaggattcattattgccggaaacatcagacccccgtgagtcgtctaacccaagtggaacatcacacacgtgcaatacacct

SEQ ID NO: 61101 - DNA, 158 bp, Glycine max
  Clone ID: PAT_MRT3847_26188C.1
aggcggcaatcatataacatctattatatggggcaagagtggataattctgctttggggcgcttatcagatttctcgtaacagtactctgatgcaccatggacaatactgaattccgtaggtgtgttcttgtttgggaattattatgtaactaggatt

SEQ ID NO: 61102 - DNA, 452 bp, Glycine max
  Clone ID: PAT_MRT3847_26189C.1
atgaaaggaactccttaggccttagaggcatataagacttccacttcatcctcaacatcatccacccataacctagataccaaattcatatactgtttgataggaccagtccaaagattcgcataagaatttacggccgattttagggaggttcttttagcaacaggggagagttcttgttgttgaaagtcctctctgactgcgctacctccagggattctccaacaaagttgttcgagcttgcgtcacaatctaggtcctcaagaatggggttattaactttttgggtgttagtcttagagttagcagtagttgtgctttgtcctttaccctttagacatgggtccaattgagcatatggtttcagggactatgatcaagcaatttgggggctgttcaaggtgtaggaacattaccttgcatccagctggacgacgacgataggggcacag

SEQ ID NO: 61103 - DNA, 737 bp, Glycine max
  Clone ID: PAT_MRT3847_2618C.1
aagcggtactgcaaatctttggctgggaagcccggaaggcctaaatctgcacacatacttctctatatacgcaagttcacgtgtactgcagttaatgaatatgtagagtgatggaggctcagtagattgccaacgaccttcattgtcatcttcgaagtcaaaatcaagggtgttcctgacagatctgaaaaatgaagtcacaggtccagcagggagacatcatctaaggaacctatggtaatgccatcaatagaatgtagagctgctttgaacaactaagaggctctgccttctggtttatcaggtaatacctacaaaggagcacaaatgtagtaacatttttgaaaacagttaagatagcaaaatatatacatgaaaataagtgtgtatttccttttgaaggctccgcgttctggtttctttctttagcttttgtacaacagccaaggcaagttgaacgttggcatcaatgaactcatctgaagatcccttataagaagaaatgttactgggcaaaggcctggggaaatcgatttcgaggcgaattttgccgtcttgaagagcataagagagggaattcgtaggatttaggtttgtaaagggagacaccggccatgggatcagaggctgaaccttctctttcaactccaacgctctgaatgaagatgatggcggagtcaaagaaagaggttcaagttggcgaggacgaaggaatcggctcgagctcgagccgaatt

SEQ ID NO: 61104 - DNA, 231 bp, Glycine max
  unsure (1)..(231): unsure at all n locations
  Clone ID: PAT_MRT3847_26190C.1
gaaagccggcacgcccggggccccggtccggggacgcggacgccccagcttcccgctcgaggcaacacaaacaaacaggggggcagcaagggggacgacgcagaagacgcccgggcacaccgcgaanggggccaaaggccggcggcagaganggagccgcaacggccgacaggcacagccagacaggacggagagccggcgcgaggcgaccaggaaaggccgccagggcgg

SEQ ID NO: 61105 - DNA, 253 bp, Glycine max
  Clone ID: PAT_MRT3847_26191C.1
gcgtatgatgattgctcctgattcaaaagataatattgatctactgctgagcattgatttgtatgggtttacaacgagcatgtaatgcttttccactcaagatggtttttgatagataaacttgcgctgcctaacacacactaattaatagatggaaattttccagtggattcttggttaccaagtattgtgaatatggtttatcctggaagtcacctccttgagaagctgtttttgtgcatgctacatgtgg

SEQ ID NO: 61106 - DNA, 525 bp, Glycine max
  unsure (1)..(525): unsure at all n locations
  Clone ID: PAT_MRT3847_26192C.1
gcctcggtgacggaggttacaagccctgaggatctacctctcgggtcaaaaaggcctacaaggtctcgtcctgtagaacaaagatgccctgagcttaaacctcttctgctgtttcttggggatcgaggctggctcctctgcttgggatattcatggcatattttttactgacctttttttttgggctggggggctaggacttctggcgggtgtgttggattccaaactggcattttttttgccctgaatctcaaggttcatattggattgcgcctgaaaaccatcccattccccaagctggaccacctttttgaccttttttggcccaataggcgcgggcaggccacgcatggccaccccaattatcgctattacgccgttgaggagcctcatgagccccataatggtgtcccttttggagcgagattcatactctcttccatactcccctgtatggggcacgctcctcaacatctttaacatgtntgtcatcaaagccccctacccccacaaagcgaatgaggg

SEQ ID NO: 61107 - DNA, 694 bp, Glycine max
  unsure (1)..(694): unsure at all n locations
  Clone ID: PAT_MRT3847_26193C.1
ccacgcgtccgtaaaaatatatttttaattttgaaaaatcactactattattattagacttagtaaataagagtgagactatctcttctattcacagttctcttgatttcactcagtcactcatgaaattagagttttaactcccaattggttgtagaacatctatttttctttttaatttgttttaaactattttagatttagttgaagtttcaacaacactacttaggtggtggaatatttttaggcatgggtgtggcatccgcacccatcattctcctcaatctacattattgaaacaagaataaaggtccgtgttaaaattaatgtctcatgtgagaggcatgcgacttatatagggactaataaataaataattaataatgaaagattaaattgtaattggattaaataagagaagtttctagagatagttgttacttgatgggagtagtggttatanaagtggtgaatactcactaatataaaacagggttcccttcctgacagaaaagtgttctctttgatctctaaccatcacaaatgtagagagagaaaaagaatagtcaaggaagtgaaatcttgtttctcttctcttccaagaaatcaaagtgcaccagagagaagtctcactttggagaaagaatgcattgtttatcgattaagtgggagaatcatatatttcaagatccta

SEQ ID NO: 61108 - DNA, 460 bp, Glycine max
  Clone ID: PAT_MRT3847_26194C.1
ctttgtcttttgtgcctgcaccacctcatacctacctttatccattgctgatttcgtgctcgataatgaagggagcgctgttgaaaaaggtggcacatattatatcctgtcacacataacaatatacggtggagtcagagcagccccaacgtgaaatgaaagatgcccttctagtgtggtgtaccctcgtaatgagctccaccaagggatcgcgacagtcatctcgtactcacatccaatcggctttatcgccgaaggccatgctttgagccttaagttcgatgtatttgctcttataatgctgtgtggtggaatgtctaccgagagctctgccgcggaggatctatcagaaggacctgctgacaaaatcgccgagaacaacgatgtactcgaaggctgactcagacttgacagagtgtctgatgatgaacgtcactactatagcctagtgtcatgtgcc

SEQ ID NO: 61109 - DNA, 533 bp, Glycine max
  Clone ID: PAT_MRT3847_26195C.1
aaacccgaatcaccactaaaaccttaacttttccacttaagggctttacaaggacgggggaaattttttaaaacaggcaaaataggcttaaaaaaaaaaactagaaatggcaaaatcttaggacaggggagtaaaaaactggcccctcaaaacaaaaacaaaaaatacccacccctgaatctacgggaaaaaccttcaagccctcattccaatgggggggaaagggaaatctttatcttggcacaggggtttgtttttggcacccttcttaaatatcaaacggacaggaaaacccctcttaagttttgaaaaaagcgcccgtttctgaatacttggggcaaaaccaacccccttccacttggaatgggggaagaagcgggggaaaaacaccaacatcaggggtttaaccagggtcttccctagggacgtccttcctcccatcccaaaaggtaaaaagctggaggggtttgaccctgcgggaaatcttggaggagtgaacacatccggatccttgggcacagggggatcatggg

SEQ ID NO: 61110 - DNA, 531 bp, Glycine max
  Clone ID: PAT_MRT3847_26196C.1
aacaaaaagaaatgttatataatatagtcataaatcacgatgatagatttattattttttacaaaaattactttaaaatctatcttcaagcatactttaaaagtaattttagtttattatcggactaagattactttttctaaaatcatttgaatcataaattaaccttttcaacctcaatttttttcggaatcaatatgactaaaattaatgctaaaactcagaagcatccaacctccaacaagatagatttggataagtgccctcctcatatcctgtgattcaaacattgtaaatatgaattctcggctcttacgatcaagatatttgagaatgggatccagcactctggctagaagactataactctggtttggcaccctgtaatacatgcgaaagaaaatcattgatattagtttctgatgacccaccacttgcaattgcaccatgacataactgcttcagctcttctgctctttttctcatatgtctcacttcatcactacccaaatgcatgaattttctaataag

SEQ ID NO: 61111 - DNA, 606 bp, Glycine max
  Clone ID: PAT_MRT3847_26197C.1
cccgcgtccgccccgcccaaagcccactttacacaacgggggggactcgctcttccttcgcttacgtgaagacccaacgcgccccttatggaaaccatcgacatcaaactgaaagaagatggggttgtccctcaccaagctgaccggcagtggtgctttgccattgaaggccgatgagtgagtatctgatagggatgtctttgttgcgtgctggcaaagacgcgcatcttgcacaaacgcactctagagaaaatacgaaccgctatccccaccatctttataaatggagagactgtgtgaggctataacatcaggttcactgggtgggatggaagaggacatgacaagatcctatcactgcggaggctgtatttacagaacactcagggtctcatttctgcggttgatctctctcatagaaagcgagatgcttgatagctacgataagctctacagaacgttgaatgacgatgaacttatagatgctgatatggtggtcatcgccatcaagcaggatcttcctaatgcaccgaatgctgcacatataaccgacaacctgggacttcattcactccgtcaacgccactggtatatccagagcacttg

SEQ ID NO: 61112 - DNA, 344 bp, Glycine max
  Clone ID: PAT_MRT3847_26198C.1
tatatgaataataaatacacctctagttgtctgattaaagttgtcaacacaactgatacatcttaaaattacagggggaacagactcttaccaccaggatccgaaacaatcatataactgaatccacaagaatatgctaaagattagagctatagcactaatatcctacgaatccaaacaaatactttcatctccatcatgaatgatctacaacccttccagactacctaatataggatattgctgatatgaaccttgccatggaaacgtgtcgttacctccattggtccttggcgcaatctgacttataaatgccatggactcacgtgatttacgtggagttt

SEQ ID NO: 61113 - DNA, 786 bp, Glycine max
  Clone ID: PAT_MRT3847_26199C.1
ccggtccggattccgggtcgacccagacgtccgaaggggggattccattcgagaaattcgacgttttcaaagaattggaaactggaaacttcacttattcagttcattcgatcaatcatgagaactcgaaacgccgattccgcctccaaatccgcaacccctaagaagacgccgccgaagaaatcccctgcggccaagcgcaccaccgccaccaaaaccagagccaccaagaagaacgagctctcgcccgcacccgattccaaccccgatcaatctcctctggaacagaaatcgttaggcagtgctagcagcgcaaaatctgtgaaaaagaagactccggggagatcgagaagtaaagcaatcaatactccgaattcggaagaacaatgtgaggcagtagctgatgaaactccaattgaagatgataccgaggtagcagagaaagtggaagatgttggagtggttgatgcagataatgttgagggtgagaaggaggggggaaaaggtgttggttctgttggattgtctgatgagacggatcgtaagtcgatggaagtggatgaacttgttcaaaaggtttgtgaatctgtgggaaagggaaatgatgtaatggaagttgaagtagctgcttgccaggatgcttctgtttcttttaagcgactggggcgacctattgtgggtctcaatatatctgcggataatgaagattgtactggtgaaaaggagggagagaaatggaaggaagagttgaaagatcaagagggggacaaagggaaggaagagttg

SEQ ID NO: 61114 - DNA, 360 bp, Glycine max
  Clone ID: PAT_MRT3847_2619C.1
cccacgcgtacggatgatctcataatcactatccctaatgatagtatcgttaaaccacaagttcaatatattatacacatcacatctatctctctatcttctatctcttatctatcttcgagcgactgcacaaccatgacaatctccttaaagaccgcaacatacctagaacttaacacgctgactacaccatgatctgtgacctaattatgccttgctcgacaagacactacttatcacttctcctgcgattctcaaattaaccatactgtctctgtaggaccgttacaagtacatcttgtaaccattgctgaccgactcaagatggaattgaaggtggaagctatcgatagtgctacc

SEQ ID NO: 61115 - DNA, 279 bp, Glycine max
  Clone ID: PAT_MRT3847_261C.1
ggggctgtctggttatgtttcaaattttacgtaaacaagacagaaatgttgccatacacgtatcaggggcgggttgaaatatttacaacattatttattagtattctcatattaaactaattagaagaattccatcatgcatcagcacgaaggttctttggctttcttttaaaatcgatgggactgggagctaatcaaaccaatctacaaattgaaactttcaagagaatagggaaagacctgaaattgaattaaaaatttctgatcgcatattaaatt

SEQ ID NO: 61116 - DNA, 651 bp, Glycine max
  unsure (1)..(651): unsure at all n locations
  Clone ID: PAT_MRT3847_26200C.1
gagaaattcgacgttttcaaagaattggaaactggaaacttcactttcattcgatcaatcatgagaactcgaaacgccgattccgcctccaaatccgcaacccctaagaagacgccgccgaagaaatcccctgcggccaagcgcaccaccgccaccaaaaccagagccaccaagaagaacgagctctcgcccgcacccgattccaaccccgatcaatctcctcgatttcaagtttctttcatccatgacgatgttgtaattgtggaacagaaatcgttaggcagtgctagcagcgcaaaatctgtgaaaaagaagactccggggagatcgagaagtaaagcaatcaatactccgaattcggaagaacaatgtgaggcagtagctgatgaaactccaattgaagatgataccgaggtagcagagaaagtggaagatgttggagtggttgatgcagataatgttgagggtgagaaggaggggggaaaaggtgttggttctgttggattgtctgatgagacggatcgtaagtcgatggaagtggatgaacttgttcanaaggtttgtgaatctgtgggaaaggaaaatgatgtaatggaaagttgaagtagctgcttgctgggatgcnttctgttctttaggcgaccagggcga

SEQ ID NO: 61117 - DNA, 1509 bp, Glycine max
  Clone ID: PAT_MRT3847_26201C.1
attcatggctagagagattcttattctgcgccatctggatcatcccaatgttgtcaaactggaaggtttggtgacttcaaggatgtcatgcagtttgtaccttgtctttgaatacatggatcatgatttggctggacttgctacaagccccacaattaagttcacagagtctcaggttaaatgttacatgcatcagctactttctggattggaacactgtcacaaccgtcatgtgctgcatcgtgatataaaggggtcaaatcttctcattgacagtgaaggaattcttaggattgctgattttggattagcttccttcttcgatcctaatcacaagcaccctatgacaagcagggtggttactttatggtatcgacctccagaacttctccttggagccactgactatggtgtaggagtggacctctggagtgctggctgcattcttgctgaattgttggctgggaagcctattatgcctggtcgaaccgaggtggagcagctacataagatatttaagctttgtggttctccttctgacgagtattggaaaaaattaaagttgccacatgctaccatttttaagccccgaatatcatacaagcggtgcatagcagagacatttaagaatttcccagcatcatccctgccactaattgagatccttctcgcaatcgatccagctgaacgtcaaactgccacagatgctttgcatagtgaattctttacatcaaaaccttatgcctgtgaaccctctagccttccaaaatatcctcccagcaaggagatggatacaaagctacgggatgaagaagctagaagattgagagctgctggcaaagctaatgctgctggtgtcaagaaatcacgtccacgtgatcgaggtggaaggggaatttcagttccagattccaatgctgagttgcaagcaaatattgatagatggcgactggtaacgcatgcaaatgctaagagcaagagtgagaagtttcctcctcctcacgaagatggaactcttggctatcctttgggttcttcacatcacatggatccaattttcgatcctcctgatgttccatttagttccacaaacttgtcatatcctaaagcaaatttccagacctggtctggcccattggtggaacctagtgtggatgcaccaaggagaaagaagaacatggcagggaatgggcacagacaatcaaagaaggattcttatagatagaatgtgtcaaagagtattagaaaataactaaagaattgcaatataacaccaattatttatcacaagcattggtgaagctacaaaaatgctgctgatttctttctcaattgtcaaaggtttattttctatcttgtataacaatcacccataattttcctcccttcaacctctgctttaatcatgggaattgtgtagaattttacagactttattttttattttttaaactttggaatatcatgtcttgttcattattcaacttctagtcggttatgtttatcaaa

SEQ ID NO: 61118 - DNA, 326 bp, Glycine max
  Clone ID: PAT_MRT3847_26202C.1
cgacagagaccgattttttccttattgatgatccatctgacattgcatcatttgaaacctcttgtgctactccacttggataaattcctaacgcatagtattcaaaaatccttgttcttcatgaacttattgactatcaatcctacgatagtaggcaattcaccaacactatagatatatcttacgataagagaatccttagcagcaactcaaatacaaaatgtgaagcctttcttcttgatattagtccatctccaccaatggaagagaatatgaagtgtgaacaagttcgccttatttgtgagtcaatgatgaatatagatctc

SEQ ID NO: 61119 - DNA, 365 bp, Glycine max
  Clone ID: PAT_MRT3847_26203C.1
gctattcatttaggttggtatttttgtattacatatttacattccgccaaaagaaaaaatatgacctaataaaaaaaggttctttataaaagggccaaagaaaggattgtgatctaatatcgatgagaaaaaaaaggaaagccttttaatgaaaaaataccatcccaaaaagggatacaaacaaaaaaaaccacgccccctaacattaacggggaaaaaatataaacatcttccatggtaatcggctaaatgaacataaacaactcttgcgtcaacaaatctttgggtcggatgttactgcgcctctgctcattcaacatcatgatggctcctttagccggacttagctttggaaccaatatact

SEQ ID NO: 61120 - DNA, 535 bp, Glycine max
  Clone ID: PAT_MRT3847_26204C.1
aaagaatttggagctcaaaaacttccatcttctttacaagtcttatttgacactctcaagtttgaacacaaaaaacaatgggttttcgcttatctggaatcaggaagacatcattttctgcaaacaaatttgcatcttcaaaagtcatggatgtgccgaagggcaaccttgcagtctatgttggagacaaaatgaggcggtttgtgattccagtatcatacttgaaccaaccattattccaggacttgttaagccaagctgaggaagattttggatatcatcatccaatgggcggcctcacaattccttgcagtgaagatgtattccaacatataacttcttgcttgaattgacaacacagctcagactaggagactgacaaagattaattaagacattttgtacaatagagtgttgtcaacttgtaaagatattcctttctcgagaaggagggaaaagaaacattatagaatgacaaaagttacagtatttcttaatttttttgtgtagtgacaatgaattcaactactcaagc

SEQ ID NO: 61121 - DNA, 145 bp, Glycine max
  Clone ID: PAT_MRT3847_26205C.1
gagaaaaacgccttttgaatctttataccggctatataaaaaccaaggttgaataaagaaaatctcggtacccgaagaataccaaacgcttatgataagaagattgtccgacatgcctaatcgcaaataacacacacacctttat

SEQ ID NO: 61122 - DNA, 388 bp, Glycine max
  Clone ID: PAT_MRT3847_26206C.1
attcttgaacagatatttatttaattttagggtacatagggtactactctgtcgttactcgtagtagtttttgtaaaggtatgattcttatttttagacacatgatcatgatagggacctaattaagcgggtctcctactatttttgtgtcttcaattctgcatctctaagcattctactaacccgacaatcaatacctaaaattctgccccatttctccaagtaactctgttccaatatcacataccaataaataaccacttaattcaaagttgaaacagagcagagtagttgtttccttcattttatttcatttctgaaactcaaggacagtgtaaaaatggtcaacatggaaggctctgaaacgagggaagcctgcatcaatggc

SEQ ID NO: 61123 - DNA, 183 bp, Glycine max
  Clone ID: PAT_MRT3847_26207C.1
ggggggggggcaaaatttcaattttgaaattaacccaaaaaagatatccctctatttttaaaataggggggaaaaaaaaaaggcctggttggataccctattggaaatgaatttgggccccaaaaacggggcataatataaaaagggtaaggtattccagccttttaaccggaaccacctccc

SEQ ID NO: 61124 - DNA, 409 bp, Glycine max
  Clone ID: PAT_MRT3847_26208C.1
acgaaaaacaaacaatttttttttctgccttcttggaggggggaaaaaagacagtgttgatttttttaattggggtgatgatgtacaaccaacgaagcaattaattactcctacaacagtgggggactacctgcgggaaaagaggccatgttttttgttgagcggtgatttattaagaagttgaaaaaaaagaaccaacagcgggttgttataaaacaccaaaaaacgggtggcttcatcatgatgaataataataacaccaatcccccaacattggtcctcatcaggttgtggggagaacaaaacattataattattgaagaaatcatcagaaaaaattttatgaagaaaaaaaccacccatcgttgctttgttgttaccaacaataacaacaggagcttcttggtgg

SEQ ID NO: 61125 - DNA, 436 bp, Glycine max
  Clone ID: PAT_MRT3847_26209C.1
attccaaccaacggaaactgcccccatagatgctccatttggaccaatcttaaaagcctgaatgaaaaaaccaaaaaatttttttccagccttctgttttttttgggaagggatttttaaggggcccaatataaacgatcacaaacctcgcccgggaaaaattaacaggtcttcttcaggggcaaaggctggttaaaaaagataaccctgataaatcccagtttttgtaaagttaaaatattgagcccgaaccgccccccgggtagcataagcctttgctggttttcagttcggccagaaaaatgaaaaggaagcctcagttgaccttcgaaatctgacaacttatgtacctttttagaggagccttttccgaaacgattcctagcagcggggttcccctcagaattgctctctttcgttcggggccataccccat

SEQ ID NO: 61126 - DNA, 359 bp, Glycine max
  Clone ID: PAT_MRT3847_2620C.1
cgcaagaacctgatttcgcattaaatgttttaaaacaaggtgtcctgattgtcagccagatccagatgattatcataatcctaacaacccaacccactggcgaaaagaaaaaaaggatttctacacttaattgacagaaccccttttacctaacctgagctactggtgcagattgttgactgattcctctttagcagaacggaattgtttgtgcaagagttaaccatactggaataagaaacagcatggctatcgcgactatttgtatgattgaaagttaatctttgttgaaagaacaatttttatgttgggaaatttgagcaaatgtcttgcagcacctcatgtggaacgcggatagg

SEQ ID NO: 61127 - DNA, 540 bp, Glycine max
  Clone ID: PAT_MRT3847_26210C.1
gtcaaaggaataacagaatatgtctcttatgctgcaattgagaatttggtgcttggtcaagcctccaggcatggctttattagattcaagtcaagtacgccaagcaacatattaaagggggcgccagatttctgtactgtgtatgtgatttctaagggcagaatctcttcagttcggagtgctgctcgaacagccccacatgcctccccattgctgaggcacatacagattctacatgacgagaatgcacgtgagtctgagatatcgtctaaatataacagggcatcaatcaaaccttccagctggcagagtgaatccatgaaacaatcacaacttggcagaagaataaacttgagtggaaggtcatgcatggacttccccgaatccgactctgacatatcatttgtaagctctgagaagcccaacagtgtgcgttcatcctctgttttctatgactattttgatcttcatgcccgaaatccacgaacttcaaccagcttaaatcatagcttgggatcaacccgtatgagacccaagttc

SEQ ID NO: 61128 - DNA, 354 bp, Glycine max
  Clone ID: PAT_MRT3847_26211C.1
gtagtttcgttttcatcatccattgaagagaagctgaatgcatttagagaaccatgtctgcaactagcacatcgactactttgtcaccgtcattctcttgcagtaaaacatcagcactctctctgccgtcgaaatacagattctggaatttggttccaatgacacaagcttcatctccggagcacttggccttagcctgacacgatccatgtagaggacttgacgtgtcctgtggcccaacagcaccacatgcttcacaaacatcatcaattcaggggggtgaatctatgttcaggggtgtgttggaaagtatgcaatccgtttacttgcacagaaatcgtactgccaaggcca

SEQ ID NO: 61129 - DNA, 230 bp, Glycine max
  Clone ID: PAT_MRT3847_26212C.1
gtgactccatggaaacctcctggccccaatgcggtcctcactgagggagcgctacatcaagcagatttcgctgatctcacggttgcattcttacgcctggcataacgagtcagcaactttgccaaaggccttgctcggggctaatgctgggggaccgtactgagcattgtccctatcatgtggatcttgggaagaagctaccgtgtatgcttcagaatgaactttggaac

SEQ ID NO: 61130 - DNA, 735 bp, Glycine max
  unsure (1)..(735): unsure at all n locations
  Clone ID: PAT_MRT3847_26213C.1
ccacgcgtccggtggccgtggaggccgtggacaaggccgcgaccgtggaggctgtggacgtggccgtgatagtggaggttgtggacgtggatttggccatagatctggctctcgtgattattttaatggtgatgacaatgatggaagtagttttccaagttcaaattggggctctggttctagagattcccctgatgattcctttggtgcaggtaagagttgggaagtgaggggttctggagaaggcaatggcgggagacaaggtaggggaaggggaagaggaagaggaagtagaggaagccaaggtgatggccaaggacgtgttccttggggtggaaatagccacgagagaggtggttatagtgatggcaatagtgatagtggttggggacaaggtcaggatcagggaagaggaagcgatggtaatggccaaggacgtggtcgatggggtggaaacaactcaaatgaagaaaggaacaaggacgaagagagcagaggaaatggcagttggggattcggtaatgctgggtcaggaaatgagaactcaggatgggggaagaatgcaactccctctgntgatggcagtggatggggagggacagggggtagtagttggtaactattttaactgccagtgattcctaatgggttgntattttcctctctagaaatgaatgatatcttgtttagggtacctcttattatatatttggcctggttactggttagaattta

SEQ ID NO: 61131 - DNA, 421 bp, Glycine max
  Clone ID: PAT_MRT3847_26214C.1
gagggatcaggtggacgattaggcaggtgtggtggtctaacatgcaatatatgttgtccactgaataatgggatggggaaggacaaagtgggaaaggaaaatgaaaaaaaaaagagaaaagaaaaaaaaatcctcagctattaattttcttaaatgagtatatctaatagttataatttgtttttcaatgtggaaaaaatgtttcacttctttacagtagaattggtcgataattattaagacaaaaatagaggaaatttgggatcccaaaattcattttgatttttcaatgttattctatttctttcctattgtgtttcgttgctaagcggggtatcatctcttgttggtttgtttatcttcttcttgatgttgacgaaattcgagacgaagagcaaccgtgtgaagggcctgagcttcc

SEQ ID NO: 61132 - DNA, 200 bp, Glycine max
  Clone ID: PAT_MRT3847_26215C.1
cggcataaattaattagatagatgatggcttcgaggagaaagctaaagagcggaaaaaacagatgctgaaagtgctataagagaaaggattgtttactaaaagaagttaaaaagagaatacgaaatatagaatttgctgaggaagggaaagaacttaagaaagtggtttgaactgttaggaatgtggatgttacgaatat

SEQ ID NO: 61133 - DNA, 152 bp, Glycine max
  Clone ID: PAT_MRT3847_26216C.1
gcgtacgtaagctcggaattcggctcgagcactgggtttcctgcttggtgtcacattcagtaactgaatgtgacactgggtttcctgcttggtgtttctgttataactttatgatggtgggaatgctatactgttgatttgcagaatttaaa

SEQ ID NO: 61134 - DNA, 1430 bp, Glycine max
  Clone ID: PAT_MRT3847_26217C.1
cttgttcggtggtggcagtggtgcatggagaggttacaaaaaagagaaagaagagcttgcaaaaatgatgtcatttttaattatttttttaaaaaaattttcttatgtaatctcatttaggcaaaaaatacacatgatattacacttcacatgcctcggagtctaagccacgcaagtagataatcgactaataaagtttttaaaatattagaaatccgattaaaaataaatttattaggaattaagtgacaaaatatatatatatatatatatatatatatatatatatatatatatatatatatatatatatgatgaaacacaaatatatttaagttattttaaattttatggagatgtttagggtttttatgaaccccgtcgctcagtaattgtacccggataggcggctaaggtaggttcgctttggcactcttactatctttcaacgacaccgtcgctcagtaattgtacccggataggcggctaagaataataatctgagacgaccaacctcagcctcttaccatgagtaagctacaaagtgatgcactgagagaggcaatttcccaggtggtgagtaattcaaaggagaaaaatcgtaaattcaccgagactattgagctgcaaattggattgaagaactatgatcctcagaaagataagcgtttcagtggttctgttaagcttccgcatattcctcgccctaagatgaaaatctgcatgctcggtgatgctcagcacgttgaagaggcggaaaaaattgggctggactacatggatgtggaagcactgaagaaactcaataaaaacaaaaaacttgtgaagaagcttgccaagaaatatcatgtttttctagcttctgaagcagtcatcaagcaaattcctcgtcttttggggcctggtttaaataaggcaggtaaatttccaacattagtgactcatcaggagtccttggagtcaaaagttaatgaaacaaaggcaatggtgaagtttcaacttaagaaagttctttgtatgggtgttgccgttggaaattgcacaatggaggagaaacagatattccagaatgtacaactcagtgtcaatttccttgtttcattattgaagaaaaactggcaaaacgtgaggtgcttatacctgaagagtactatggggagcgcaatccgcgtattttaaattcatatatatcttccatttaaatataatcatgggcgaagcctcttatgttatggacatgtaagcgagacattattggtgactgtcgatgccttttctttggcttttttcatattcttttgacgtcaattttgatgtcttgaaaaaaattaccagtaccttgttcatttggtttttatttggtgtgcttgctttgctattaacatttgataggacacgtgggtggctttatgaattgctttgcaatgttg

SEQ ID NO: 61135 - DNA, 493 bp, Glycine max
  Clone ID: PAT_MRT3847_26218C.1
tgattattatgaaaacattcttaagaatacatgctattaaaacaatgtggaggattataatgtaatttttaagtgctgtttattggtactaccctgggtcaacttttgagggagtggtttgaatttaaactgagttgcaggagatggcttttagtgtaaaatttatttttccaactattctcacctcccagaattttctttaaatgacagcaattgctggctttggaagagaggatgggtactgtgagcacagctctaacagaggaaacactatcagaatgcctaaagaaaagtgtctaccagtcctcaccctctgacaatgaagctgagagttgcaatgaacctaaggatgatacaaaatgcagcatttgccaggtatctctctctcgttttgaaccttttaaggcactcaggttgtcattaagcaccatcatggctctaacttattttccatgatggattgatggtctacctgcgtcttgtaacatttttt

SEQ ID NO: 61136 - DNA, 451 bp, Glycine max
  Clone ID: PAT_MRT3847_26219C.1
ggcattaccaaaaaaaaaaggcaaggggaaataacaaaaattttacaattttaaaaaaaatcaggagggggggagcccccccacattgcaggggcaaaaaggctattcaaacaacaaccggggagggagttgaaggagggcccccattttcaacaggaatttcaacaaacccggacaggaaaacccggaaatcacccccaaacattggccccctccccaaaaaaacccccacaattttggcaaatgccccacgggggccccttattgggcccaaggccatttcaaaagccccaacggaaaagctcttgacagcaacaaaaagggcttcaacaagcttttctgacaatgaggttcttgcccacattcccaaaaaaacaccactttgagccggggagtcttgagggccccaggccccaaatcaaacattccaaaggggggtaccaactgcttg

SEQ ID NO: 61137 - DNA, 250 bp, Glycine max
  unsure (1)..(250): unsure at all n locations
  Clone ID: PAT_MRT3847_2621C.1
gttcattggtganggggacctgttgagggtggaagtgaacaaattatcttcnacaaaaacanagctnacatactnctcctagttttngngncttattgtnatacangtcanattnngganagngctnagaatcntggggaactnctnaggggtgaccgcatagaaaacngtcacgtgtttgaaatgagagnnccgccagatgtnaaatgnngtttgtcggctangtctnanngcaaagnaagggtggggt

SEQ ID NO: 61138 - DNA, 158 bp, Glycine max
  Clone ID: PAT_MRT3847_26220C.1
acgcgtcggcaactggtttggtgagatgaatggtgttctttccaacagcgtcatgtattcttgcgtgctgctacctatggattcctcagtttcacttcctctaagcattgattcagaggcagccttaaccgtgaagcacatacgtggcttttgtacgt

SEQ ID NO: 61139 - DNA, 1840 bp, Glycine max
  Clone ID: PAT_MRT3847_26221C.1
cggacgcgtgggttcgttccttatcgagccgaatcggctcgagaaatattcttcatatacttctctcggaaagaacagaacagaagaaaacgccctaaaaccctaatctcccaaaaccctacgtatggcgtcgtcgtcgttaattcgcctccgccgcaccatcagagcactctccggcgtctcccagtctttctctgcgactcatgcggcatcgttttcctcccccattcggtgcggtgtttcatggagtttgcagtcaccgaagggtgtggttcagccccgttcattcaggtcaagctcaatttcacttctctcttttcgatcctcgcagcggcagagcaacatccccgatgagattggtcccgataccattctcttcgagggctgcgactacaaccactggctcatcgtcatggaattcaaagacaaggacaacaaaccctctcccgaagacatggttcgcgtttacgaagagacttgtgccaagggtctcaacatcagtttggaagaggccaagaagaaaatgtatgcgtgcagcacaacaacttacataggctttcaggcagtcatgactgaagaagagtccaagaaatttgaaggtcttcccggagtcgtcttcgtgctaccagattcctatattgatccggtgaacaaacaatatggaggagatcagtacattaatggaacaattatccctcgacctccaccagtacagtatgggaggaatcagggaagacgagactggaataagagtcctggtcaatacaaccggcatgagaatccaatgccaaggcctcaagggaatccctctttcaatagtcagggacccatgccagggggtggaaggaactatgggccttcacaaaattatccaccccaacagaactatggtcaagcaacccagaattatccgccccaacagaactatgcccaagcatcgcagaattatccaccccaacagaattatggccaagcatcgcagaattatccaccccaacagaattatggccaagcatcacagaattatccaccccaacagaactatggcatgacatcacaaaattatccaccccaacagaactttggccaagcatcgcaaaattatccaccccaacagaagtatggtcaggcaccacaaaattatccaccccaacagaactttgatcaagcaccacagaattatccccaacagcaaagatatgggccatcttcaccacaatatgcacaacagcagagctttggaccaccaggacaaggagaaagaagaaattatatgccacagcagaacattggacgaccgggacaaggagaaagaagagatcctgtgcctaggcatggtgcttcagaggcgaggggtgatacttttaccccatcatatgtgcaggatttcaaatcagcatacaaggaggaatttgaacaggctgagctggggaaccatcctgccaaagaacagacaggatcgcaacaaagatatccaccttctggcccaggcttttactggagagggaagatactgatagtaatctgggacatgtgggcggcttgtattaaagtactaatcacattctaagctgattccatgtccttgccgtttggtggaatattgatatattgagctttcgttgtgtatccatcaattttagctgcactgttctgtgacaaagttggatctggtatgtaaagttagtactggctgcagtcttgttttttgaacatggttgaactaagaatttcacgtggattcttgtgctagtgactgagaatcgttggcaataaaacacgttcaaagaatggtcttacttgtttccttctcgctctagaggatagaacaatgaataat

SEQ ID NO: 61140 - DNA, 487 bp, Glycine max
  Clone ID: PAT_MRT3847_26222C.1
ggtagcatttcatttcgttccttaaatattcttcacttacgtccctcaaagtaaagaacagaagagaagaaaacgccctacctaaaaccctaatctctcaaaaccctacatatggcgtcgtcgtcgttaattcgcctccgccgcaccatcagaacactctcgggcatctcccactccttgtccgcgactcatgcggcgtcgttttcctcccccatcgggtgcggcgtttcatggagtttgcagtcaccgaagaagggtgtggttcagtcccgttcattcaggtcaagctcaatttcacttctatcttttcgatcctcgcagcggcagaacaacatccccgatgagattggtcccgataccattctcttcgagggctgcgattacaaccattggctcatcgtcatggaattcaaagacaacaacaaaccctctcccgaagacatggttcgcgtttacgaagagacttgtgccaagggtcttaacatca

SEQ ID NO: 61141 - DNA, 2096 bp, Glycine max
  Clone ID: PAT_MRT3847_26223C.1
taattaaataaaagttcacagaacaagctggggtggggcgacgcgctgcctggaacgggacagagacagagagggttccttccggtcgctgtaattggtttggcgttcaattgaggaagaacaatgtcggtgacagcgggtgttagtgatactgtaatagccattagggataagctcagaggtaaaattggccaaactaaagttaagcgttattggcccggtaaagttcctgaatgggctgatgatgagaacgaagaagatgctgcccctgccgatattagaccctccagggaagctgccttggagaaagcctttcctcgtcacgaagaagacgctgctattgtcagaaaagacgatcgtaggctccgccgtttggccgagagccggatagataaccgtgaggaggtccgggctgatcatcgccgcattcgccaggctgagattgtttccaccattgaagaggaggccaggaggcaggaatggttggagttcgaagaagaagatgagaatgctttggcagaaagaaggaggctgattaaagagaagttgcttcagagagagcaggaagaggcacttcctcaggaagaggaagaggaggaagaagaagaggaggaggaggaggaatctgagtatgagactgactctgatgaggaatatacgggagtggctatggtgaagcctgtgtttgttcccaagtctgagagagataccattgcggagcgtgagcgtcttgaggctgaggagctggcttttgaggagaaaaggaaaaggagattggaggaaaggaggattgagacgaagcagattgttgttgaggagatccggaaggatgaagaaatccagaaaaacttggaaatggaggccaacattgctgatgtcgatacagatgatgaagttaatgaggcagatgaatatgaagcttggaaagtgagagagattggtaggatcaagagggatagggaggatcgggaggcaatgttgaaggaaaaggaagagattgagaaggtgagaaacatgacagaggaagagaggagggagtgggaaaggaggaatcccaaacctgctccaccaccaaagcagaaatggagatttatgcagaaatactatcacaaaggtgctttcttccagaatgaatctgatgaccgagctgccactgttggatctgatggtatttttgctcgtgatttctctgctccaactggggaggataaaatggacaagacaatattacctaaggttatgcaagtcaagcactttggtcgtagtggaagaaccaagtggacccatcttgtcaacgaggatactactgattggaataacccgtggacttacaatgatccacttcgtgcaaagtataatgacaaaatggcagcaatgaacgcacctatagtgaaacctaaaggaagcaggaaattaaaggattgggaatctcgatgaacttgaagttacaaaagtatgcatgaagatatcatcctttcagttattagactttggagaaataccagagtagatatgtccttgtcctatgtatgattgtgttctgtcttaaacagaacgtaaagtagttcatcacggttggagcgtgtatgttgtggaccatggaaggcaattgtgacgagaattcagcactactttatctggatattcttccccagttaatgaatcatagctgatttagagtcctgccagcccagcctaatgactatgtcttcctttctttgttttgtcatcattttgacttaattactgcctggctatgaggatttaattgagtttgctgcctatgttgatgctttaggagccactctttttcaaactaagatcatttatatgtgcaacttcgatactgactggaactcccaagagtgacactgaattgatggtgtcaattggcgtaccagtacactagtaaatgtagcataaacttccatgtttggataatcttctagctgaacaaaggggcatattgaaagttatttattcaaacccgctgcttgtttgttttaaaaaaaaaaaaaaaaaaaaaaaaaaaaaaaaaaaaaaaaaaaaaaaaaaaaaaaaaaaaaaaaaaaaaaaaaaaaaaaaaaaaaaaaaaa

SEQ ID NO: 61142 - DNA, 337 bp, Glycine max
  Clone ID: PAT_MRT3847_26224C.1
gccccggaaattcgcaaaataaaaaacgggctttcccccagggacaaatcgtaaataaggcgcctggaaacgtggaggggggagcagattccccggggcaaagggcccaaaaactgggtcccggggggcgaaaccccccaggggtccccaaccatgggttgaaaggcagcctatccattccccagttaaaagggggggacaaccagctttaggggagccctccaaggaaaggtccagggcgggaccaactaggaaattagaacaagttcgggagggccaagaatagcttggccggcccgaataaacaagcccttataggttgccgagaagtgccggg

SEQ ID NO: 61143 - DNA, 1312 bp, Glycine max
  Clone ID: PAT_MRT3847_26225C.1
gtccctcttgcttgggactttgctaaccgatgagatcagtgacttcaaatctcatgaatacctgcgtcttgcaggagccactcaaatggcactcgatgttctcaggcttggtttcttgattgactttttgtcccatgcttccattgtgggattcatggatagagctgccattactattgcactacaacaacttaagggttttcttggcataaaaacattcaccaagaaaactgatattgtttctgtcatgcgctcggttttcaatgcagcacatcatgggtggaattgcaagacaatagtcattgcagtagcattcttggctttccttcttataaccaagtatattgctaaaaagattacgaagctctttgggtgcgctgcaatttctcctatgatctctgctataatgtctaccttttgtgttggaaccttgtgcatgtagcattgtacactccatatactaactagaagtgactaatatgacaatttaagaaccttgcgtcctcgtttgcagcccggattcgggtagttctatgacttcggagaattttgagatggctggctgatgatgaagcccaaaggacaagtggattgtcaggaatagagtatctcacggttgaaatgtcacctgttattgatattgacactagtggcatccatgcttttgaagagttatacaagacccttcagaaaatacaggttgaaatgtcaaagacctggccacctagctgaagattgtatgccaaaggatctttttcaaatgtatagaagaaatcaaatatttctacatcgttgctaaggcaagaaacgatgttgaaaacacaggttactacatcggtgctggcaagaaacgatgttgaaagcaccggttactacatcagtgctgactagaaacgatgttgaaagcgccggttattatatcgatgctggcgagaaacgatgttgaaagtgtagtttactacatcggtgttggcgtaggcaccgatgtagaaataaatgtaattctacaacgggtcaattatggactgttgttgaaaatttgtagtttcaacaacgttacatacaacaacggttagtcaatgttgttgaatcccatttttgatcgatgttgaaaacacgatttctagtagtgagtggtttcgctaggttgagtctcaacatgctccgtaattctacttcaaccgacaactcacctcctgagtgtttgtattttatctctttaatgtgttttgtttaattatcttcatttatgtcaaattttatatttcgtattgttatttgatcgatatcaattttagttcattgattgctt

SEQ ID NO: 61144 - DNA, 586 bp, Glycine max
  Clone ID: PAT_MRT3847_26226C.1
ataaaagtcatttacattgtacttgaaccaagtattttcattttgcttaagaacaaacataaagcctgaaaattcttcctgtaaagtgattagtgctaaagatccttttccatcatctcttggctgaattaaagggagaggacgcacagagaaaggtgaaggtcattggttgaaactgtgaagacttgttgagcataaagaatgttgttgaagcttgtttggattatattacttcacgagtcaaatgctaaagtcaagctgaaatagaaaatgtaccacaataaggtgtgaaccccaaccacatacatgtcagtgtcatgcataattaataaaaaaagaaaataaattaaaatagatcaatgtttatttttaaccagacaatccatgaatgttaaattcaggtgcgcatgtaatgtaacaatcagtaatttgtttcataagaagaatggaagggaaataaatatatagcttgagaaggtgttgactaacatgcagtagctagcagctgctacaaattagtatgatataataaattacttgaccacttgcaatgtctgtgcttattaaaaaactagggagtccaaaa

SEQ ID NO: 61145 - DNA, 266 bp, Glycine max
  Clone ID: PAT_MRT3847_26227C.1
ggctcgagctccttcgaaccaaatgaaatggttactgaattggtggaaagcattggtgtcacctatgatgcatggagtattagctgggcagtggccagctccatatggagtgagactgggtccattattggacaatctcttctccgaagatatgctttgttagtgaacagctccataaagagtcgtattgtcacttaagcaactttgggatcattctccttcgctgtgcatgcttgtgcctgccttgtgtatatcaagactgttgc

SEQ ID NO: 61146 - DNA, 306 bp, Glycine max
  unsure (1)..(306): unsure at all n locations
  Clone ID: PAT_MRT3847_26228C.1
ananacnngcgtacgtannancnnaattcggctngnagatntngaganacgccaaagnccnntnggnngcngangcaagagcngaatccntttccgttaatngtgnntnctcagatttggnngcgatntggaaacagcntntctntnctgcagtaccgntgtggnncagnatcgagngcgnggtnctgtttcgtttgcaactgaatttnggattggaggatctcanttctnggagcattcnagcaganatttctagcatcctattactgttttccccaacaatgtggcgctttaagccantcntcn

SEQ ID NO: 61147 - DNA, 235 bp, Glycine max
  unsure (1)..(235): unsure at all n locations
  Clone ID: PAT_MRT3847_26229C.1
gtcncgctcttcttcggcgatatctacttcgtgtgatgtttgagagcttgatatttctctcacatgaaaatgtctagcatgcggaggtaactgtggttgcggaagcgcctgcacgtgcggatacggctgcacgaggctgcaagatgtacccagacttgcgctacaccgagtcatccaccaccgagaccttggtcatgggaccggcaccagttattgctcaatgcaagagtgctct

SEQ ID NO: 61148 - DNA, 396 bp, Glycine max
  Clone ID: PAT_MRT3847_2622C.1
ccggccggacgcacgcgtccggccgcgcgttcgcgcgtcgctgctccttattagattcactgcataaatttgagagggaacgtctgcttacatgttggtttatcaggacctccttacaggtgatgagcttctctcggactccttccgttacaatgaaattgagaatggaatgctgtgggaagctgacgggaagtgggttgttaaaggagctgttgatgttgacattggtgcatacccttctgctgatggtggagaacatgacggagtcgatgactcagctgttaatgatgctgacattgctgatacatgcagacttcatgatcaacccgcttttgataacaaacagcatgttaccttcatgaagaggtttatcaagaatttgactcccaagctcga

SEQ ID NO: 61149 - DNA, 738 bp, Glycine max
  Clone ID: PAT_MRT3847_26230C.1
gggccacaaatgatgtaatgtaactaacagcatgttcattatcctatgatgtcttatgttaacattaacaaccggttgaactacacaaagataaaccagtcaaacgagtgttggcacatcaagagtttgtttctcaccatactccataatcttctgacctctgaccatccttccattccatgttggttggagttgcctaaccactataaaactttacaaaatgcaaaaatgagaaaagaacgaaggattgattgactgacttcaacagaaatctcaaataccaatcattccccccccccccatagtatcattaacaccacaaacacaagaacaaagccaagaatgatttgccgcttggcatatatattgccaagagtgtttacagataaccaaggtattcaccaaatatgtcacttggatacaaaccaacctcggcctctaaccccccatcaattgtggttcagttgctgacccgaacaatccctttcctccagtctttcacctgaggatgaatggtacactgaagattgcaatccattatgattatggtaggagccactgccattttggtaacagggtgctttgaacctgttgtgcacttttgatgctcttgcatcttgttgcatgttaggagaattccaggtttcggcagagtcagaatgtaaaggttcagaaccagatgaactaattgattgtgatgataggacagaatcagtaccattatccttttccttgcct

SEQ ID NO: 61150 - DNA, 334 bp, Glycine max
  Clone ID: PAT_MRT3847_26231C.1
atccgttcaagctacatcccaccttaaacgggctcactagtcatgaagcaattcaatacacgagattgttcctactagatcatcattacccaagcatgctataggtgaggctagtagttgcaacctccataaacgcttatgctatgagaaccatccgtttcctgaaacatgtcggaacgttaatgacacctgccatagacttgactatgccatatcctcatggagatcaatctggtgcgttcagtcacattattctgcctgcagacgaatgtgttgcacgttcaaattcggtgatatcataggcttatgtaggtgtcaatgactcatgctagca

SEQ ID NO: 61151 - DNA, 513 bp, Glycine max
  Clone ID: PAT_MRT3847_26232C.1
gtttttccttttgattgatctctttcttttttttgcttatttttttgttgaatggaccagatcctttcttattgacaacttccgaacattaaacctgggtcagatttgcttattgtttctcaaatcaaaggcctacccaaaaggcctttttccatataaaaccgaccggcaaaaccaaaaaataatctgtgttggagttggttttaaaattaggacatttctactattataaacccgaaagggaggcttctagctttgccaaataaattccctaaccattggaaaaaaacctggttaaacttgccgcccccctttgtgctgcctgttttggaaacagccctcctcacgacggaggtacattaatactaatgaaccctcaagagcgtgacacacctatcgtgacttaaaaggctcaccacttttggggggatggcccttccccccccctgagggaggggccctgttctaccactttggacgtttgaccaaaagactcttaaacactaaggaccg

SEQ ID NO: 61152 - DNA, 266 bp, Glycine max
  Clone ID: PAT_MRT3847_26233C.1
taattcccgtatcgacccactcatactaccacaccttcaccaaccagacattcccaattcacgaatagcaattcatacacggcatttctcaatctatactatagccataccagtattcacattctatcactaccttctctaaaacatccacaatatataaacaaccctttctgctctttaccaatttcaatttaacccactaaacttctttttaaaccacatctaacactctcaaaccctatacttccatctctctctatataatt

SEQ ID NO: 61153 - DNA, 251 bp, Glycine max
  unsure (1)..(251): unsure at all n locations
  Clone ID: PAT_MRT3847_26234C.1
ccctcgcagtccttggacgcgngggcngccacaacacgacactagcaagcacacacccgnagcacaaccaccaanggcngcnnccgacagcaagcnccccccgaaacccanccctggaagcnacgggcnnccnnncnnnggacccangagngacagacangacnatnncnacaaccaaggacgcgacaaggncnnngccgaacgaannaaaaagnacaacnctacggnganacgaaccaacangccaccgg

SEQ ID NO: 61154 - DNA, 145 bp, Glycine max
  Clone ID: PAT_MRT3847_26235C.1
gatgaatctgacaaaggaattttttcacagcttgctcaaggagtatctggagtagcacatgggtccccaacggttaccatccgggggtttaccaccaacaccttggggaaaaccttcggaacaaaggtttcctccaaaacaatgg

SEQ ID NO: 61155 - DNA, 381 bp, Glycine max
  Clone ID: PAT_MRT3847_26236C.1
tttttcaaaattagtaaaatcactgttttataaaccaacaatgtttgatcttatgtatagtccagatattaaataacggaaatgcatgatttaaacaaacacaaaaatagcattcattatttccctgacaggaagctaccaggtaaggtgcgatgaactggccttccagcagttgctgtatcatcatcagatacattcctaggtgagttacgcatagatgacaaattctgatcctccggaggggaggatgcatcgctgtttgcaactccagaggtggaagaaacagtattgtttgtgatggagtttgtcactgccatagatgcaaggccttcttcccttgcaggagcatcttccacatatgacatatctagtttcctctga

SEQ ID NO: 61156 - DNA, 476 bp, Glycine max
  Clone ID: PAT_MRT3847_26237C.1
gcagggaagtctagctcccggatgaaccagatttgtccactagaaatagtgtaaaattaatgtacatgtccaggtgcacaaaccaatcaaattcagctgtcaaacagcttgaaaattacattctcactgctataatagcctattaggtacgtcatttcgaaaaaccacgtcagagtgaattggacaatatacaatagcaagcatgcatttaactgattgaagtatccttattcttgtgtctctctccttcttgatgattgctgactctattgcaattttgagttagtagtcccccatttttcgatgttgttcttttggttaatttgtgtttcatcattcttacaattttgaagaaccagaatgcacttaccagctgcaaacccaatcccatagcctttatgagaagtggatagttggcagataaagttacgtaagtgatacatggtccgaccaccatcctagcaaatgtaaatatg

SEQ ID NO: 61157 - DNA, 450 bp, Glycine max
  Clone ID: PAT_MRT3847_26238C.1
aattcggctcgaggttttaagtgtcctaggatcttaacctgctaggagtttaagagctaactcgagaattttacaagcatgctcttgtgttgaatttttaggtgggatttttttattatttatatcatttcattttaatgatttgggctgatcatgttattttcattgagatatatttgactgagactttatgtgttcaataaagttgtgataaactcatttttattaattcttgtattaatgggttgaatactctgaacctattacggattgagcccaatccatatagcgaccacactaggctaaaatgtcacgatagctgaaaatcacaagtgttgattgaggttaacacctagtgaacactagtaagaggaaaactaaaatacattcataaacagtgacttacacttaattaggaataatgttacatgttgctacaccaaaacaaaa

SEQ ID NO: 61158 - DNA, 225 bp, Glycine max
  Clone ID: PAT_MRT3847_26239C.1
tttcttatcgctgtggatatcatgtggtacttcctatgtcttagatctcttccatctatacgccgcacgccgaaaccatggacggaaaaggagagggtcctgctatctgaatcgaactcggaaccacctactcttgcgttggtgagaggtaacaggaccgtcgagaaattatcgacaacgaccagttgaactgaaccacgccggcttacgaacgatttacttgac

SEQ ID NO: 61159 - DNA, 386 bp, Glycine max
  Clone ID: PAT_MRT3847_2623C.1
ggcgtcgctccgcaccagtttcaccgcacgactatcttgttgtttggagcgatccgagaaaaactctgtagacatgttgcgtattatcatgacctccttacacgtgatgagcttcactctgagtcgttccgttacaaggaaagtgagaatggaatgctgtgggaagttgaggggaagtgggttgttaaacgagcagttgatgtagacattggtgcaaacccttctgctgagggttgaggacaagatgacggacttgatgatgcagctatgaacgttgtagacatatgttgacacattgagacttcacgagcatatcgcattcggtaagaaccactttgtcacgttcagtaatatgtttatcaagaatttgactcccaagctctatg

SEQ ID NO: 61160 - DNA, 117 bp, Glycine max
  Clone ID: PAT_MRT3847_26240C.1
ggtatggtgataatgttatgcggcagtgaatagttccacctgattgcagacttggtggttcacttggtggtcacaggaggacaatagttgttgcctaaatcttgcacgatcctatgt

SEQ ID NO: 61161 - DNA, 318 bp, Glycine max
  Clone ID: PAT_MRT3847_26241C.1
ctctgtttctctttctcactacactatgatattcctatattttggtgctccgtgggtgttcaatctggatccggcggtccaacatgttccgggcttgtgctgcttaatttcccaggctttatagctccaaaccttcaaatccacctcattcggctgcagaacttccttccttgataacgacttagggttcaagaaggcacttgtttgtttgccgcacgatatggagacttaaccgtgttctgtgctggatactctcaattacggcgcgttgacactcaccgacagagttctcgcgacttttctatcttctgctgaagt

SEQ ID NO: 61162 - DNA, 162 bp, Glycine max
  Clone ID: PAT_MRT3847_26242C.1
agcagacaacacatatattttcaatttatatacaaacaatttggcctacttatggcttacggtgtggaattggaatgacccatgaaataccgatcttattatcctaggctcatacatggggcaacttaggaaacaaagggctcccacttatatctgaacata

SEQ ID NO: 61163 - DNA, 523 bp, Glycine max
  unsure (1)..(523): unsure at all n locations
  Clone ID: PAT_MRT3847_26243C.1
tccagccgcgaaacgaaaccgctccgctatagaggtgtctgtcacggatgggggacgctccgctctgctccgccgctatagcgaccgctacggccgctattgacaactatggctggaacatcatcaagcatcaagccttccacgagaatgatctccctgtcttttaaaaaaacaaggtgagatggaatcaagtaatcataagaagcaacagataggtaatcaattcctacctacaagtttgatatctgtgttatccactagccacttagctccatcaactatgaatcccacatagcttgtgtcccattccttctaaaacataagccgccgtagcaatcgggtgtgtgttagattcaaagaaaacaggagatagtgtgtctaacgaaaactggaaggactgcttcggtgattgggntttcgtcttcccccaatcaaatcaatgtcatctctccctggtcttcgatttttaccagactgcaagcatccaatacatccattgcatcagttctacggatgctcattt

SEQ ID NO: 61164 - DNA, 309 bp, Glycine max
  unsure (1)..(309): unsure at all n locations
  Clone ID: PAT_MRT3847_26244C.1
acgntnngcgcangcgtacgtaagctcnntaattcggctcgagggcttganatcncagttanantnnaantccattgtnggaatctggtntgcaaaaagacatnccggttaantgtggaggatnntngaatcatgtctnacgttgcncagaacgttaancagncccaagagaaaganttgtnanaggganatntttccgtngatantaaatcncgcnctagattggaaanagtgtcctcnagaaaagcaaancntgttagtggnaaaacctnnaaanntgatataatgggtgctgggttccattcttca

SEQ ID NO: 61165 - DNA, 3009 bp, Glycine max
  Clone ID: PAT_MRT3847_26245C.1
tccaagctcaagccgctcaagccggctttaaaccgcccctgacccgacccagacagtgaacttgttttgggtggttcaggcccgcgtccggtatttcgccacaaattatgtttcgcacaaattatgttttttcattttgttctctctgatgacgacgacaacaacaaaaacaccaacctttttatcgtttcacttgtttcccatatttcttagcttcagatctattcgattcactcttttttttctttaaattatttttactctcaactagttatcattgtttcgcacgctttttgttacctccaaaagcatgattttttccaaggattgcgcgctccgtttcgcgttcgtctcgcgctagaaattttttgcacggtgatgggagattgggaacccatgtcggattgccacggacgaatgcgtgttctgaaggagccgaaggggtattagggtttgttaggggctacgtatcttctgccagagctcgcagtaatggcctcgtttccaatttgcctgattttaaatctgttgcagcaaaccctaggattcgccgattgttttgcagcaaagctccaaagaagaagaattatgagaacttctatcccaaggaaaagaaggaagttccgaaaggaaacgacaaaaaatacgagtccaaagataactcgaacgcaaacacagaggatagtggaaattttcaggaagctttcatgaagcaagttcaaaatctagtcaccccattattgttgatggggctatttcttacatccttttcgtttggtcctcgtgaacagaagcagattagctttcaggagtttaaaaacaagcttttggaaccaggattagtagaccatattgttgtctcaaataaatcagttgccaaagtatatgtaaggaacactcccctcaaccaaacagataatgaagtagcccaagggacccaacctgcaattggatctggaggccagtataaatattatttcaatattggaagtgttgagtcttttgaggagaagctagaggaagcgcaagaagctctgggcatttactctcatgattttgtgcctgtcacatattcttctgaagtggtttggtaccaggaattgatgaggtttgctccaacactgttgcttttgggatctctcttgtatatgggaaggagaatgcaaggtggaattggtgttggtggcagtggtggcggcaagggtgcccgtggaatattcaacataggaaaagcaccagttactaaagtagacaaaaatgccaaaaacaagatctattttaaagatgttgctggctgtgatgaggcaaagcaagaaattatggagtttgtccacttcctcaagaacccaaagaaatatgaagaacttggtgcaaaaattccaaaaggtgctctcttggttggtcctccaggcacaggaaaaacccttttagcaaaagctacagcaggggagtctggtgtgccctttctttctatatctggttctgatttcatggaaatgtttgttggtgttggaccatctagggtgagaaacttgtttcaggaagcaaggcagtgttcacctagtatagtatttattgatgagattgatgcaattggtcgagcaaggaggcgtggtttttctggtgcaaatgatgaacgtgaaagtactttaaatcaactgttggtcgagatggatggttttggaaccacttctggagttgttgtgttggcaggaacaaataggcctgaaatcttagacaaagctcttcttaggcctgggcgatttgaccgccagataacaattgacaaacctgatattaaaggtcgtgaccagatatttcagatctacttgaagaaaatcaaacttgatcatgagccttcatattattctccaaggcttgcagcccttacacctggatttgctggagcagacattgctaatgtctgcaatgaagctgctctgattgctgcaagaggtgaaggaacacaagtcacaatggaacattttgaggcagccattgataggatcattggtggtttggaaaagaggaacaaggtaataagcaagctggaaaggcggactgttgcctaccatgaagcaggccatgctgtttcaggttggttcttggagcatgttgagcccttgttgaaagtaactattgttccacgtggcactgctgctcttgggtttgcccaatatgttcccaatgagaaccttctcatgacaaaggagcagctttttgatatgacttgtatgacacttggcggtcgggctgctgagcaggttcttatagggagaatctcaacaggagcacaaaatgacttggaaaaagtgaccaagctgacgtatgcccaagtagcagtttatggttttagcgacaaagtaggcctcctctccttccctccaactgagggctcatatgagttttccaaaccatacagcagcaaaactgctgcaatcattgatagcgaagtgcgtgattgggtggacaaagcatacaaacatacgattcagcttatcgaggaacacaaggagcaagttactcaaattgcagagttgctgcttgaaaaagaagtacttcaccaggacgacttgcttcgagttttgggcgagcggccgttcaaggctactgaactcaccaattatgatagatttaagcagggttttatagaggaagaggaaaaggtcgtggaaagcaccgtagatacgcctgaggaaggtggtgggtcttcacctctagaaccccaggttgttcccacatagacagttatttaatttgtgtttgttattgtacatggctttcttgttttttcaatttgctgacagaggaacgaacaaaacgcttatggtaactgctgaataaaaattattcgtttctgatttttcttatatgaatataccatagactggccaatcccaatactattttcagttggtcgagccttgttactctgttacattcaaatttttattgatttttaagattgtacctgtgtaatttttgactggagcatcaactgttgggagc

SEQ ID NO: 61166 - DNA, 585 bp, Glycine max
  unsure (1)..(585): unsure at all n locations
  Clone ID: PAT_MRT3847_26246C.1
tgcctgtgcaccttccggattacgtacacaggctatcggtccgcggggcgggagcgttgtgccccgcccttttagccacgttcacctgccgtcacgttcgtcttggcccggcctcgcttacggcgtagactccatccgaggtccggcttcgggcgtgttctccgcaacgccgtccacagagtccgcatccgcctccacaaacatcgccccacctgcctgcacagatgccactctcgcctcctcataaattgcactataaggtaaaccaattgcgcccatttactaatcaccaccctttgatggggtaatacttaccgttaccgaccccagcttatcgcctaccgttgcaacctgggcacgcaaaactggcagacagttggtacaactgtcacccgggtatcttaaggccaggngcatatcgaacaaccgggaaacggaaatgtcatcataacggcgcgggagggtggtatgtatttcgccgaagcaacagcatagggtaaaaatatatctgctagccattnagagaaaagaancaagacgcagcagnnagagaagaggccgccagcatactgccaagggtggcac

SEQ ID NO: 61167 - DNA, 273 bp, Glycine max
  Clone ID: PAT_MRT3847_26247C.1
agccgtcagtacagcagcgaaaggaggacagaagggggatgtgatgctttcacatccatcacaccaccatggaaaacatgtaactgttggtctacatggtgcagctgtccgtgttgtggatctaagaacattaagattaaatcaaattccagtgtgaataagaagataaataataaggataatttaaagcatatgcatgcactagaaaatattgatgacggaattgaacgaattgataatgataactcatcattaacgtctcaatctaagttt

SEQ ID NO: 61168 - DNA, 389 bp, Glycine max
  Clone ID: PAT_MRT3847_26248C.1
attggggataacgaaactgtcggccattttgttgtaatccatggttgtacagttgaggacgaggtatggagccggtatcagtgcaaaaatactggacggagcaggagacgagaaaaatgccatgggtgctgctggagaccttgtgagacagaatacacgaaatgcttctggcgagggatgacgcaggcaattctgcaaagttcctgataaagctaactgacgaatagatagctgtcatttaccaatcagctaccaatgatactaaccttgcacaggtccatgcagtcgaaaatggcaaagtcctatgatgaaattgagtaagggaatgtgctacaaaagaagttagcacgcaaagatgaggaatatgactatatgctgagtgtagcgcg

SEQ ID NO: 61169 - DNA, 491 bp, Glycine max
  Clone ID: PAT_MRT3847_26249C.1
cggctgcgagaagacgacagaagggaatcatcttaattcttaactacaagagagagagagagagagagagagagagagagagagagaggaagtgagtgagcatcatggattcagagacgagtagaggtgcttctttgacggtgaagtatttgcaaatggggatatggtggttctcagtgatgatctttgttgggtatttaatggtttggattgtgatgcccaccaacatcttctttccacattggtttccagatattcaagctaaggcagattcaatatacttcggcagacaagggacaaccatactcatttacacgtttccaattttattaatagccactttagctaggctatatttacacttggagcaaaaacgttctaatcacaataccgaaagcaaggtgggattcttaggatttgcatcatggaaaagtaccattgcttggaactggtcctcttgggataatcactatgacagagctctctttcat

SEQ ID NO: 61170 - DNA, 586 bp, Glycine max
  Clone ID: PAT_MRT3847_2624C.1
ccacgcgtccgcttgttgttaaggagcgatccgagaaaaactctgtaaacatgttggtttaccaggacctccttacaggtgatgagcttctctctgactccttccgatacaaggaaatcgagaatggaatgctgtgggaagtctgaggggaagtgggttgcttaaggagcaggtgatgtagacattggggcacacccttctgctgagggtggaggagaagatgagggagctgatgatgcacttgttaaggttgttgacattgttcgcacattccgactctatgagctacccgcattcgataggaagcacatttgttaccttcatgaagaggcttatcatgactttgactcccacgctcgatgcatagcaacatgagttgtttaagaagcacatcgagggagccactagctacctgctctctaagattaaagatttccaattttttgttgctgacagcatgggtgatgatgcttgcttggtctttgcctactacaaggacggcgctgctgatccaacattcctgtactttgcctatgccttacaggaggtcaagtgctaagtgacttaatgtaccgagctatctact

SEQ ID NO: 61171 - DNA, 578 bp, Glycine max
  unsure (1)..(578): unsure at all n locations
  Clone ID: PAT_MRT3847_26250C.1
ggttcattttagtagcaggtagcgcacaatgagtatatnttatgtgttggaaagtcacattaattgtggtcactcttagaccacattagttgtggcaggtagacgtgggcaaaaagaaatgtgttgaagtcccccatcatggcaggtagccttgggcaaaataggggcatattaaagtctcacatggctatagatagagccagaacaaagtatatatgtggggagcaatcaattcttctccttacaaatcagtttcttagggttgagttagatccaaacccacattgtgacatgggatcacaatctgtgttagattcattaaggcattaagtgggagaaatcatcaccttaaaaaccgattttgtaggattgagttaggccgaaacccaaattgtaacattaagcacacaattctttggataaaagaagacatctttctaaatcaatttaaatagtcaacagcatgttgataagtaaacactactgcaattatcaatattattttaacaacaaatagagccccacttccaaagctacatgctctctacaagcaaaataccattttttcagcacatgca

SEQ ID NO: 61172 - DNA, 418 bp, Glycine max
  Clone ID: PAT_MRT3847_26251C.1
tctcgacaggtattcctcctaagcttggtactggatttccaccctggataacctaaggcctccgaattccaaggtaattttggagaaggcttaaggaaagggtccaaaccaccttggggggggtgggcatggggaacctggagaaggaaccccccttaaccaactgaaaaaacctggtggggaaaaaaaaacttccggggatggcctaagaagggatggaccgaccggccccgaagggaacccaaaaattatggttaccaaattatccggaaacctaatggattcatggcctcctccagggggaagttaagctaactttggtaagggtaacgtccttgaaaagaaaagcttggtggaccggaaccatctggaggattggtttccctggaaggtaatggctggctcctaacctctggtt

SEQ ID NO: 61173 - DNA, 571 bp, Glycine max
  unsure (1)..(571): unsure at all n locations
  Clone ID: PAT_MRT3847_26252C.1
aagggaaacatcttgcctcgccacatactctagaaaacctgccacggcgattgactatgatgacccaaatgctaacggtgccgctctcaacggaccgcctcctataccataccatggtcacaccaggactgcaggtgctaagagccaaacatccttgggtgccagatctagcgaatcaccctgcaagcgtgaatagcgtaacacgtatatcatgtgcggttagagaatgagatgccgcttatgtgctctgaagagaaccggctcgcgagaattaataatgatacatcctaaagtgccaagaaccgagggtcggaggtgaacataagagaattcatgcactcgaagnatgaccatgttcgtctagtgcagcaccacatcaccggtatacataggtgagaaaggttgctgactcctatagaaacaaattaccacccgtgccctatgaagctcgccaatgacgctcccttaagtgatgagtaatgtgctacgcgtgggatagtcagggtcataactgttttgtgtgtgagaattgtgatcccttttcacggtttgacacagcaacattacgtta

SEQ ID NO: 61174 - DNA, 469 bp, Glycine max
  Clone ID: PAT_MRT3847_26253C.1
atcgagaacatcccatagacctaaaattctacaatatatatatataacttccccgttctctcatactcaacataaaattgaatgccatacataaccatgtctgagattccaagtttcttcggacccgagcgaagaaccaacgacttctaccccttatacctcaacgtgtgggacccattccatggattccccggtaccaccgtcctctccgatacgcactccggtacgggggcctttgacaacacgcgcatcaactggaatgataccgctgaggcgcacgtgttcatagcacacctgccaaggctgaagaaggaagatgtgaaggtgaacatcgaggatgagggaacggtgctgcatataatcgaccagagtacactggatatggaggacaatatctacacgtggcaccgcctcaaacgcttcattggcagctatctccgccgattccgtctgacggagacgcgaaact

SEQ ID NO: 61175 - DNA, 276 bp, Glycine max
  unsure (1)..(276): unsure at all n locations
  Clone ID: PAT_MRT3847_26254C.1
ccaccggcaaagcattccgatccaagcaggtcctacgacgangatgaacnantcctctctcncanctccgacggccggattattcccattcccgaagccgacgaggacgaggatgaagaccccggngagttccagggctttttcgtcaatnnaaagaactcatcctcttncaaatccnantccgattncgtngtacaagcagngacggagattcnagaacagttcaggtgnaactgatgccgggagtgcgtgtcatctcagtttcacgannacacg

SEQ ID NO: 61176 - DNA, 290 bp, Glycine max
  Clone ID: PAT_MRT3847_26255C.1
tttgatcccttttcctaatctctctaccgctctaactccaaaaaccggctactttctttcatcgtgggcagagatccgagatgaacgaactcgatggatgccgtatccggcttgcgaaggaacaaggggctttcaatgcgatcgcatcacacacagacaatctatgtctagccggatgttcggttaacctaaacaggaaaccgatgctgttgccactttggacaggtctagccagacactagaaccgctggcgaaaaaggagaaggcgctgcttaaaaaggtggctacga

SEQ ID NO: 61177 - DNA, 1732 bp, Glycine max
  Clone ID: PAT_MRT3847_26256C.1
tttcgagccgcagcggctcgagaaaggatttcaactttaggctccatctaaaaaaaatggctggtttggctagcaatcttcctctaattgttagtgtcaaaacacttcaactttaggctccatctcaaaaaaatgggtggtttagctagcaatcttcctctaattgttatggtgggtctgcaaattcattatgcagcacttgctatattcacaagagccgctttgttagatggattgagtacgacggtctttgtagtgtacaggcaaggcatagccactttggctttggcgcctatgtttttctctcctaagcggagacaatcagtgaaagattctttgggattcaggagcttctttttgatgtttgtgaccgctcttgttggagtcacagcaaatcagaatgcatactttaaaggtttattttatgcatcctctactgcagctaccgctatgagtaatctgataccagcattaacgtttgtaattgcggcaattgcgggatttgagaaagttgacataagcttaagaagcacggccaagatattagggacagtttgttgcgtcgctggagccttaaccatggctttggtcaaaggacagaagctgttacacacagagttccttccttctatacatcttactggcagtgaaggtgacgattggctgctgggttgtctattgctcttagcaagcagtgttttctggtcatgttggatgatcctgcaggtaccgatcgcttcgtgctgcccagaccatttattatcaaccttttggatgtgtctgttttcaacaatacaagctgccctatttgcccttctttcagagtcggatcttcaagcatggattctacaatcacctttacagatatcatgttctttatatgcaggaatcggaatagcggttagcttcttcattcaatcatggtgcatctcagaaagaggtcccctgtactgtgcaatgttcaaccctttggcaacagtcataactgctttgataagtgcaacattcctacaggaagaggtgtacgttggaagtttggtaggtgctgttggagttattgctggtttatatattgtgctttggggtaaagccaaagagtttgctgagattaaaccagaggcggcaccacaatcatcaaacttacaagatgatcatgatataagtagtaggatagatttggaacaaccccttctgtcagagaaattgtccgaacatgtaacagaagcagatagcaaggtgtagccatgcatgatgattgaaccaatatatatatatagaagttttggtgaagttttgatcattgcagaattgaagaaactgaaacatggaacaagttgcagcttaaacaaacttggcttagttcctttcaccaaaatttctaactatagagtgtgaaaataaattcaagctcatggcctggacttggagtaatggtaattatgtaaaagtgataatatgtcttaggagaaaaaatatatgaattaaattttgtttccttccatctcgttttcttacctagctccgttcttcctattatgctaggaaaattaggaattctgcgctgcacccgtagttttcatgtttttttttttcttcattagtaaattacttccatcaaaaaaaaaaaaaaaaaaaaaaaaaaaaaaaaaaaaaaaaaaaaaaaaaaaaagggcggccaaaaaaaaaaaaaaaaaaccccaaattacggacgggggcatcaagggctggatag

SEQ ID NO: 61178 - DNA, 1126 bp, Glycine max
  Clone ID: PAT_MRT3847_26257C.1
gaattcggctagagaggacataaaatattattgtcctttgacttgtttcatcaattatagcaaaaatgagaacccattttcactctctcccattgatttttttgttcaccctttcccttctattgggtaaaacccgacccgaccctgatccacttcaagattattgtgtagcagatagcaaaagtgaatttttcattaatggggtgccttgcattgacccagataaagtttcctcctcccattttgtcacatctgctttatcaaaaactggcaacactagcaaccaatttggcttcagtgtcacagccaccaccactgctaatcttcctgggcttaacaccttgggcctggtactggtccgggttgacatagcgggcaatgggatcgtgccacctcactcacatccacgggcctcggaagtgacaacttgccttaagggaatgcttcttgtgggctttgttgacacaagtaaccgtgtctttacccagaacttgaggcccggtgagtcgtttgtgttcccaaagggcctggtccacttcttgttcaatagtgattccagggaaccagcaattgccatatccggtctcaatagtcagaacccaggtgcacaaattgcatcacttgcaacatttgctagcaagcctccaatccctgatgacattcttaagaaggctttccaaatttccaaaggagaagtggaaactattcgtagaaaccttggaggatgattaatttgattatgctgctcatggaggtgatccaattatggttaccattttaccaatgtacttaatttcttattgcattttgtttgggatcctaggtgggaacatggggttagattggcatatttaaaatgtcagattgtgtatttaaaaatgaaaagaaagagacatacaaaccatcatgccacattacaatgtttaataatcaaattaaaatccaatggttgatctgagtcatgtattgaatattattgtggagtgaagtatgcttgtcctttttttttttcctctttgattggattgatcagttttcctatttttaatttgttgacacaatttaaatagctggcactttcttgtaaggataatgaaaaagtgaatgcctggtgatttgaatgtcc

SEQ ID NO: 61179 - DNA, 138 bp, Glycine max
  unsure (1)..(138): unsure at all n locations
  Clone ID: PAT_MRT3847_26258C.1
gncgcatgactngcgtacgtaagctncggaattcggcttcgagggcattatatnactagtnttnancntgttttgtncgtntgcnncctntcctntgattaatgntnactagctttaaggttgtcatgtgtggttncg

SEQ ID NO: 61180 - DNA, 938 bp, Glycine max
  Clone ID: PAT_MRT3847_26259C.1
gatttattttttttctttttttttttctttttttttggatgaaaataaaacacaaacatgagggaaacaatttacaggaaaaaaaataataatacgagctcagcactcctaattttcccagcataatcggaataacggatgtaagaaaacgagatggaaggaaacaaaatttaattcatatctttttttctcctaaaacatattatcactcttacataattaccattagtccaggccatgagcttgaatttattttcacactctattcgttagaaattttggtgaaagaaattaagccaaatttgtttaagctgcaacttgttccatgtttcagtttcttcaattctgaaatgatcaaaacttcaccaaaacttctatttgtttaatcatcatggctacaccttgctatctgcttctgttgcatgttcagacaatttctctgatagaaggggttgttccaaatctatcctactacttatctcatcatctagtaagtttgatgattgtggtgcctctggtttaatctcagcaaactctttggctttaccccaaagcacaacatataaaccggcaataactccaacagcccctaccaaacttccaacgtacacctcttcctctaggaaagttgcacttatcaaagcagtgatgactgttgccaaagggttgaacattgcacagtacaggggacctctttctgagatgcaccaggattgaatgaagaagctaaccgctattccgattcctgcatataaagaacatgaaatctgtaaaggtgattgcaaaatccatgcttgaagatccgactctgaaagcagggcatatagggcagcctgtattgttgaaaacagacacatccaaaaggttgataataaatggtctgggcagcacgaagtgattggtacctgcaggatcatcccacatgaccaaaaaacact

SEQ ID NO: 61181 - DNA, 478 bp, Glycine max
  Clone ID: PAT_MRT3847_2625C.1
ggctcgagctcgaatatcttgttgtttggagcgatcctagaaaaactctgaaaacatgttggtttaccaggacctccttacaggtgatgagcttctctctgactccttccgttacaaggaaattgagaatggcacgctgtgggaagctgaggggaagtgcgtcggtaaaggagcagctgatgtacacattggtgcacacccttctgctgagggtggaggagaagatgagggagttgaagatgcagctgataaggttgctgacattgttgacacattctgactttatgagcaacccgccttcgatgagaagcaggatgctaccttcatgaagaggttgatgaagaatttgactgccaagctcgatgcacagcgacatgagtggtgtaccaagcacatggagggaggccctaattacctgctgtctaagattaaagatttccaatgttctgttggtgagagcatgggtgatgacgcttgc

SEQ ID NO: 61182 - DNA, 319 bp, Glycine max
  Clone ID: PAT_MRT3847_26260C.1
gggcaaaggacaagcatatcccataaagaattggctatctgatctaacagtccatagggggaaaaaacataatggatataccacatgataatattggaagaaaattctaacctttaaaactccaaattgctcctttgctaactccaactatgctgaacgacttgcaaagacggccaaacaaggagcccattaaagccctgccaagaatggaatgaccttgaggcccaaaaaggcacttctgaacaagtggaccttttaaatggtgcaccaatgaaggggcacgagaattaacagctgccttaaaggacgctaggcttac

SEQ ID NO: 61183 - DNA, 325 bp, Glycine max
  unsure (1)..(325): unsure at all n locations
  Clone ID: PAT_MRT3847_26261C.1
aattttccctttttttttttttttttttttttttttttttttttttccaaaatattaatcaaataataataataaaaaaaagggcctctgatctgggacttaatttacaagaccacagaaaatatccagaacaaacaacaccaataggggaacatcgggcaggagggaattaacagtctcgctcgtttagggccaganaaaaagacccaatagcaggggggaggcatgggaaacaacacccgccccacgaaggcaccaaaccaaggctnccaaagaccaccanagnacccaccaacgctaaagggagcccggcccaaaggaacac

SEQ ID NO: 61184 - DNA, 250 bp, Glycine max
  Clone ID: PAT_MRT3847_26262C.1
acataacggggaccagttaaaccactataccccaagccctatacaatcaaaccttaacacacacccatttgattcagtttccatggctagcctcaaggttgcatttttggctgcagtgctctgcatggttgtggtgagtacacccatggcacatgcagctatcacgtgcgggcaagtgacgaatagcctgattaactgtatcccgtaactccacatccgacgaatgtcgccgtctggatgcttccaagga

SEQ ID NO: 61185 - DNA, 430 bp, Glycine max
  unsure (1)..(430): unsure at all n locations
  Clone ID: PAT_MRT3847_26263C.1
gcttcatttcacagggtgagaacctttgtttatatcatactgatttattattttatttacatgatggatagaaggaaactgtttgctgtgcatgaagcattatataatgatgttgggttgtatatagatcgatgcattcccttattacggcacatgatcttttggttggggtagttcagttaacatctgatatctccgttatttcaattgctaaaattntggttacttttcatctgcatttcctttataaatgttgtcgcctgattcttggtccaaatgggagcttaacaacataaatcccacacaacttagctaccatgtgcttaatgttgttctccttctatagctttagactcgatggcctcatcttatagtttagttcatctagtgtggttctgcacttctaccatggctgtggacttgaaattct

SEQ ID NO: 61186 - DNA, 367 bp, Glycine max
  Clone ID: PAT_MRT3847_26264C.1
gcactatttctagcaaggcatttgctctccatagcagctaaagtgtgtggggctttctggaggcctcactgccaggaacaaaatgagatgtttgggcgcgaggcacacaagcagctggactatgcggaatgctatcccggcggattttggtgaggaactaagatgatcaaggcatgcatatatgccaaactggaaggttccccaacgcggattattgatggccacgttctatgtggtgaggtagaattatcagacctgactcacatttctggttcaaagaatcttgcaacctttatgctagatgagcatcagatgtttcaataggaaatttgtagtatcacatacatagctgtacatcttatagatt

SEQ ID NO: 61187 - DNA, 162 bp, Glycine max
  Clone ID: PAT_MRT3847_26265C.1
gggtattagttttcggactaagagaccggcgcacgggtgcgtaacgcgtatgcaatctacctttcacagagggatagcccagagaaatttggattaatacctcatagtattacaggatggcatcattttgtaattaaagtcacaacggtgaaagatgagcat

SEQ ID NO: 61188 - DNA, 315 bp, Glycine max
  Clone ID: PAT_MRT3847_26266C.1
aaatataatttgatcattccttttaaaaccatatggttggatccctgttcaaattcatcttaattggtaattctagtcactttcatggcccattggaaaattattaccccaatttcaaatatctatgccggtcttggcttggttttctttaaaggtataatggcatattaccacatttcaaaaggtcagtcagtggttttgacagggtactttgcatactggtggtaatggtatgaacagggggctttcctggaaaagaatagatcggagaaatccgggataccatgctttctttttggtcactccactggggga

SEQ ID NO: 61189 - DNA, 501 bp, Glycine max
  unsure (1)..(501): unsure at all n locations
  Clone ID: PAT_MRT3847_26267C.1
catagctacacctgcatctcactttgccaatatggaagaaagcaaattgtcccacaacatacctacagggagttcgagaaaactcgtcacttcccaaagccctccttcactttcccttgaaccaaatgagaagctcaagaataacagtcaagaatgcaagtctccaaatactaatgacaaggccaaggacccagaaaaagggcatagtgagaatattggtaaggttgatgatgatgtagaggaaacggggcgtgagaggctgaagaggctccgggaagaggtgaccatggagaaggtcaacattccagaaaattggggtcaggagccaaagttgaaggactggatggactatactatgtttgatgcattctttcctcatagcttgattgtgactgctcgtgatgctcttatttgctatgcancgtaagcaaagtcaccaagactatattaaggatctagagtagttgctaatatatatttctatggactctatatatatat

SEQ ID NO: 61190 - DNA, 211 bp, Glycine max
  Clone ID: PAT_MRT3847_26268C.1
cttatatcatttttattttactttttcaaaccgaatgtcatactgtcctaatgataaatcacgtctatacttcatactgtcttctgacttcaatcccattaattcaagagacaactactcgacaaccatcaaaagccatgaaagaaacatcgcagatacaaagtaaattgtcgaatacaataggaaagttaacacatacattcaactttct

SEQ ID NO: 61191 - DNA, 350 bp, Glycine max
  Clone ID: PAT_MRT3847_26269C.1
tttaccatagaacaagcacacagagaagcatagacgcttttaacagcagcaactactctcatcttaaatggcctctccagtgatcgcatatgtggccctcaaacctgcccctttcactgttgataagtcctcactatgaggccttccctctctctcaaggaactattcttcattcaaagtttttgccagtgtcaagaagatcaatacttacaaaccttataaaattaactgcggcatggctctaaaaaatcgaactgtatcatctagcttgaaaagaaagggaaaatgtgtttaccattttgtagacatacactattctaatgtctatagttacattcctatctaccaca

SEQ ID NO: 61192 - DNA, 1106 bp, Glycine max
  Clone ID: PAT_MRT3847_2626C.1
ctcacaagcgatgcgtccgctgctacccctctaattcccaatcttcctctcctctccttacccttcttcttctaattctgatttattccacttccccgccaattttcctcaaactcttttcaaatttctcttccttctccttcaattcacaaaaacccttcgatccgctctgaaccctcgccccagtacccttacgagcattacccatctcccttttatgtttttccagatcctaaggccatggtttcgcacccttttgggaaaaggtgaaagctttcaggatcttgcaacagtgtctcatccataaagccattatttaagctgaacagcggttcttcttgttgttggcttgttgctatatataatgattttatatctttgatggccaaccacgatttgatacttggtcaaagtcacaatttagcacttggtcatgatcagcaattggtgctgggccatgaccataatttgggcctcagtcagaaccatgaattggaaatgggatcagcccatgagcaccatttagatctgggacaaactcatgatcatgaactaggcttggggcatgcccatgatgaattgggattagaacagaaccatgaacatgaaggtgatgatggtcacacttacgagcatgagcatgagcatgagctagccatggatcaaaagcccgaacatgatgaccacgacttgccccttcctggacaaaatcatgatttagtcctatcagagaacaatgatttgactgtttcagagaaccaagatcttgatgagaacacggccctgtctgtggttcagaactcagacatgggaattgattctgcaaatgatatggatgttcaacatccacagcttgtggctgtttctacaccccctataattcaggctcgtactgcaagtcctagttatgaattgtcagtggggcaagaattccctgatgtcaagagttgccgaagggctttgagggatacagcaattgctctgcactttgagatgcagactataaaatctgacaagacccgctttactgctaaatgtgctagtgaaggatgtccctggcgcattcatgcagctaagctcccaggggttccaacttttcttacata

SEQ ID NO: 61193 - DNA, 303 bp, Glycine max
  unsure (1)..(303): unsure at all n locations
  Clone ID: PAT_MRT3847_26270C.1
ttatnntattannangtntgtnnagaatncgnctcganctctactcncttcagnttcgggnnangatggnatcacttcatnctaatgtganatncagtngttngcaagantggcaaccatgnttctcaatcgntnattcacaagcttcttnattcttgactngggttgatgncnttggnccnggctcaaangnttggnagtnagancttgtcccatcntncatttccntggngnctanagccanacnaatnattggtcccccaactagcaacttagtnnaaagccantcngggttgcgcttgt

SEQ ID NO: 61194 - DNA, 518 bp, Glycine max
  Clone ID: PAT_MRT3847_26271C.1
tactgtatgagtcctcctatctttgggggggggggtggggtgggggggggggtggggggggggggtgggggggggtgtaaaataggaggatgtgggggagagaacgaagggggggaaccacggagaggaatgaagttgtaaagagtaagggcgcaagaagccctaaaacaaaaaaagaacctagaaggtgaccaagaaaaaagtatgaattatgggggcataataaacgaaataaaaataattttcctccttataaaaagggggagaagagatacaataagaaagttagataaggtagatccataaggggggggtggtgagaggcgttattagggttgttgggttacccgtgcgatacctgtaggcctgaagcacttaaaaggggtactgttatggcgtacggtactacgatcgccttgcaggtgtgttaagggggttgcttgggttagaaatggcgggtgcgtgcccttagtaatgcaacgtctagttttaggggggtgagaaccccttagaagggt

SEQ ID NO: 61195 - DNA, 163 bp, Glycine max
  Clone ID: PAT_MRT3847_26272C.1
taactgtagtaccgttgggatacaaggaatcgcttgggccttcgttggcatgacctccgccctcgatcactgcaccgctggcatctcacggggacacataaacccggccgtgacatccgggctcgccctggcgaagaagcccgtcgttacccatggcgattat

SEQ ID NO: 61196 - DNA, 387 bp, Glycine max
  Clone ID: PAT_MRT3847_26273C.1
ggggatttggccgctctacatgtgtaggagtgccgccttgcttgggggggggggggggggggggggggggggggggggggcttaggggggtttgagggagctaggaagcagagggggatttgcccggaaggaaagggcaccccaagcaggaatgatgataaaagcgtggatcaggaaaagtgaatgcatgtcatgaacggtaaacgaatgggccatacagtgggacaaacaaaatgaccccaaatcataggacagaatgtcccattggagcatttggtgtgtggaattggtcgaaacctagggctaaacttgtagaagcggctattattagtactagttggcaaacagctaaacgttaagtacctcgaagtgctaatctgtggtctt

SEQ ID NO: 61197 - DNA, 421 bp, Glycine max
  Clone ID: PAT_MRT3847_26274C.1
tttttttttttttttttttttttttttcttttttttatccctacagttttttttatggaaacattataattttaaaaataaaaacatttccatttaaatatttaaaattcttataatttaaaatttctcaaaattttccattcaaacacacacaggcttaatatccacaaggtcaagggataaacttcttttaaaaaagtaaaaaaaaactggtccatcaaaatacccttcatttatatatttaaaaatttcattacgccctttactggaagaaattttaagacaaccactccgggtttacatttttactgacttatttgaatactgaatggtgttgccgccatttccaaattatctaatactgactatctcatttaaattaacatttaaatatatttattaattcaaaatcttctttacc

SEQ ID NO: 61198 - DNA, 434 bp, Glycine max
  Clone ID: PAT_MRT3847_26275C.1
ggctcgagatcatagtttccacaaaaaacattcactcatgcatgcccaaacctattaatcagcagccatcagattactctgtgctctccaactactttgagtccttgaccatcccttatccaataatcatcatacctaaccagcgagacatggtgaccgtggaggacatacgaaacgcatcaacgttcccagggacccggcaacatctagggcttcagcaccggcacgccatccaagctgcgtctgccaagacgatataccgtgactactgcttccgcattaccatctgcgaacacatgactgatcgtagacaaaagcgtaagcacatgtgcaacctgtccatgataaagaagcgatcatgcaccggatggatgagttcctgacagagtacccgaacatgcgcgaatgcatggagccatcgctagacgagagac

SEQ ID NO: 61199 - DNA, 623 bp, Glycine max
  Clone ID: PAT_MRT3847_26276C.1
catcaattacctcctccgcgagcagcgcctcctgttcatcctcgtcggcatcctcatcggctccaccttcttcatcatccagcccactctctcccgcatgggcccacccgagccggcccacacattcctccctcgaaccgggcttgcccgcttcagcggcacaaggcctcgcacgggccgcgttccggtcgggatcggcggcaggaggcagcgaatcgccggtgcactacaaatacaaccccgtcaagaccatcaagacgaatgtgatgggcacgcttaacatgcttggccttgcgaagagaattggggctaggtttctgcttactagtactagttaggtttacggtgatccgttggagcatcctcagaaagagacttactggggaaatgtgaatccaattggtgagaggagttgttacgatgaagggaaaaggattgtggagacgttggccatggattatcatcggggtgctggtgttgaggtcaaacatatgagaggcaatccatccaaaagtggcttgatcatgggttgaatgtttgtccaaaaactcatcagagacttactcttacaaatgtcattcctaattacactgtcaaatctcatgttattagattgattgaag

SEQ ID NO: 61200 - DNA, 263 bp, Glycine max
  Clone ID: PAT_MRT3847_26277C.1
tcgaatcgagcgaattcggctcgagggagacagaagttgttgccattgaaactggtaccaactgggattcagaacaaccaacacaagaaaatgtggaggatggaggaaatgacagtgagaataataatcaaaattgcttcagttatgagcagtaaagaccaaatctggtagtgttgtgtctggaattgatcttaaacggagagaggcctatctgtcagacaaagagttccaagctgtatttggaatggccaacgatgcattct

SEQ ID NO: 61201 - DNA, 1280 bp, Glycine max
  Clone ID: PAT_MRT3847_26278C.1
cacgtaattcggctccatggattgatatagaaaaagtggcatccatggcggggccgagttaccttcaattccaggctttgtgttgaatttccttataacaatcaaatcaccctcacacacagtgcatctgacaataacaacattgggtgaatcggtggtaaggtaacaaaaaacaaaaggcgcggttgtgttgtgtgttcctttttaatttaacctcgaaaggatgaaacagctccacaagcaaacgagtctgaatcaccggagggaggaagagatgctggggagcagcgagacctcaccatactcccccaaatccatcaagcacaccagatccctccccagatccatcaactacctcctccgcgagcagcgcctcttgttcatcctcgtcggcatcctcatcggctccaccttcttcatcatccagcccactctctcccgcttgggcccacccgagccggtccacaccttccttccccgaaccgggcttgcccggttcgccggccccgggccccgcacgggccgcgttcctgtcgggatcggcgggagaaggcagaggatcgtcgtcaccggcggcgcgggcttcgtcgggagccacctcgtcgacaagctcatcgcgcgcggcgacgacgtcattgtcatcgacaatttcttcaccggaagaaaagagaacctggtgcacctgttcgggaaccctaggttcgagctcatccgacacgacgtcgttgagccgattctgctggaggtggatcagatctatcacctcgcgtgtcccgcgtcgccggtgcactacaaatacaaccccgtcaagaccatcaagacgaatgtgatgggcacgcttaacatgcttggccttgcgaagcgaattggggctaggtttctgcttactagtactagtgaggtttacggtgatccgctggagcatcctcagaaggagacttactggggaaatgtcaatccaattggtgagaggagctgttacgatgaagggaagcggactgcggagacattggccatggattatcatcgaggagctggtgttgaggttcgtattgctcgaattttcaatacatatggaccccgcatgtgtttggatgatgggcgtgtcgttagcaattttgttgcacaggctattcgtaaacaaccattgactgtatatggtgatgggaagcaaacaagaagtttccaatatgtctctgatttggttaatgggctggtggctttgatggaaagcgaacatgtgagacctttcaacctgtgtaaccctggggagtttacca

SEQ ID NO: 61202 - DNA, 406 bp, Glycine max
  Clone ID: PAT_MRT3847_26279C.1
ggggccggaaattcataggcaggatatatatttaaaccccccttaaaaaaaagaccgggtttaaacaacgggaaaaagatttatgcaacaaaccaaaaacaaaattgggtagtaagcagcggggggcaaacaaaaaaacccgtaagggacaacagcaaggatgcttttaaggagggaaaaaaaagggtctcaaagggacaagggggaaaacgagcctaaaaacccacaaagagcttccggtagtttatgggcaggactaccacgtatttgggggagaggggcccatcaaggaaaaaaaggaagatttacatttacagccacagaaaaagggctttcatccacatatccacggggattttcaacaacttttggccagacgttggctattttttcagcatcccccacc

SEQ ID NO: 61203 - DNA, 491 bp, Glycine max
  unsure (1)..(491): unsure at all n locations
  Clone ID: PAT_MRT3847_2627C.1
agattatgcactatttatcatgtaaaataacctaatcaaaacctaaaagtcacttttattcttgcattttttttgaaagaaattattacacgattcaggattattacggttttggtcaattttcacataatatagtagtaagcaagttttattaacttttttttcataaattgtaaaatcttaatgacttggctggtagagattgaatggaactatggtcatgtgatgatcttggattaatcatttctccttctccggaataagacattaataggtcacactattgagtaagttgtcctttgattcagagaccaaaattatcagcattttaaaattagcccccactctaactaatgtctagctaagaaaaagaataagactctgctgtcaccatcagcttacatctctgcaataaaccctttataatatgaattttagctgtcatgatccttctttatcatagtcaagcangagatcatactgatagaaaa

SEQ ID NO: 61204 - DNA, 264 bp, Glycine max
  Clone ID: PAT_MRT3847_26280C.1
gctgggaacccccaaaaggggccgccctttttttttttttttgctgggaagagcggcgcatgaccagatcgtccacgacgggcgtcggaacagcgaagggcaaccagctgaacccagatacttgaaagacttataagaccagaagaaaaacgccgggcgataaccgaggacgcccctggagcccaaagggggggcaacatgaccaaacaatgccgacttaagcggccagcgggaggcactccgtgaccaagcacccagagcatt

SEQ ID NO: 61205 - DNA, 352 bp, Glycine max
  Clone ID: PAT_MRT3847_26281C.1
gctgccgctccttaaaaccggaaacaaacccaatggtgactcgattgcacgagcctataaagctgtagctacctctgtgtgcacgactgcggagggggataaacatcacgtctgtgggctgcccacagacttcgagaatcagtgtctatgccactctgagtacataagctgaacactcggctacttgctatgggacttcgcgggagataccaagtgacacagtctctagcgcagtgacttcaacagatgcaagatcgagctggacagatcatggaggagtactcccactcttcgatgtggtataggaatatgcgggtagactgatgcctctctatgcagaatttcactctat

SEQ ID NO: 61206 - DNA, 205 bp, Glycine max
  Clone ID: PAT_MRT3847_26282C.1
cgtgttcgcgtgggcgaaaggcagataaaccgacagcagaggttgtcggagcttgagaccggatgcaaaggccttattgtcttgatggaatgaatcatacggtggcttcctactgtttggcgtgcgatacattaatggaaagaaaatgactttttgagctggccacagagttgcggaataattctgttattcacactaagttgat

SEQ ID NO: 61207 - DNA, 437 bp, Glycine max
  Clone ID: PAT_MRT3847_26283C.1
cttgggcgggggggggggggggaaacggggggggcggtaaccccgctgacaatagaagaagtaatccgccgatagccgcaaacgactaggaacgtccaaatacgcgcagtagcgtagacagtatggagagcgtagcgcttgattatactatagtcgtgattaggaatgtgcacattaacgcagagaagcataagctatcttgagccggaagattagcgcgccaatagctgcattcaacaccacagcaattgactcgattacggctggctaggctagttaggccgacagcgcgatgatacagaaacataggcaccggagggatgtccatttcagcattaaccggcaggagcttaatctacacaggctacattgcggcaacaaccatatacgtctaggcacagacatcgctatgaccgacctaccacacctaaacgatc

SEQ ID NO: 61208 - DNA, 2174 bp, Glycine max
  Clone ID: PAT_MRT3847_26284C.1
gttccatataaaagcaaggctagaacacttgcaagttcgaaagagccatttttatttatcagtcaccgaaacaactatggatacaatcaagtccttcaagggctacggcaaagttgacgagttggagcagcaagcctatcagaagaagacacgtaagcgcctcataataatcacagtctcttcaatcgttctaattgcggtgatcatcgccgctatcgcaggggttgtcatacacaagcgcaacacctcatcatctccctcatccgactcgcccccgcaaactgagttaaccccggccgcgtcactcaaagcggtttgcgacgtgactcagtaccctaactcgtgcttctccgcaatctcctcgttaccggattccaacactactgatccggagctcctcttcaagctctctctccgcgtcgccattgacgaattatccaagctctcgagctttccttcgaagctccgcgctaatgcggaacacgacgcacgtctccagaaggcgatcgatgtctgcgggaacatttttggcgacgcgctggaccggctcaacgactccatctccgcgctcggaagcagcggcggcgccgggaagattatctccccggcgagtgttagcgacgtggagacgtggatcagcgccgcgctcacggaccaggacacgtgcctcgacgcgctcggagagctgaactccaccgccgcgagcggcgcgttgcgcgagatcgaaaccgccatgaggaactccacggagttcgcgagcaacagtttggcgattgtcacgaagatcctagggttgctgtcgcagttcgcggcgccgattcaccaccggcggctgctaggatttccggagtggctcggggcggcggagcggaggttgcttcaggtgaacagcagcgaaacaacgctggacgctgtggtggcgcaggacggtagcggacagttcaggacgatcggtgaggcgctgaaattagtgaagaagaagagcgagaagaggttcgtggtgcacgtgaaggaagggcgttacttagagaacattgatttggataagaatacgtggaatgtgtttatcttcggtgacggcaaggacaaaaccgtcgtcgtcggtagccggaacttcatggacggcacgccgactttcgaaaccgccaccttcgctgtgaaaggcaagggattcattgccaaagacataggttttgtgaacaatgcaggtgcatctaagcaccaggctgtggcatttagatctggttcggaccgttctgtgttctttagatgctcattcaatggcttccaggataccctctatgcccattccaatcgccagttctaccgtgactgtgacattacaggcaccatagacttcatattcggaaatgcagctgcagtgttccaaaactgcaaaataatgcctagacagcctctaccaaaccagttcaacaccatcacagctcagggcaagaaggaccgaaaccagaacactggaatcataatccagaaatcaaaattcactcccttggaaaacaatctcacagctcccacataccttggtaggccatggaaagatttctccaccactgtgatcatgcaatctgatattgggtcattcttgaagcctgtggggtggatgagttgggtccccaatgtggaacctgtaagtaccatcttctatgctgaataccagaatactgggcctggagctgacgtgtcacagagggtcaaatgggctgggtataagcccactctcacggacggggaggcagggaagttcactgtgcagtcctttatccaaggccctgagtggttgcccaatgctgctgtgcagtttgattccaccttgtgatttttaatactaccggcctcatagaaagatatcaactgctaatcatatttttacatgtcttttaatcacactcttgtaacatgtattacactctatacgcatttttttgacctacttttgaatggtttgtaacattcttctagaaaatctcttcagaaagatatgtcaaaatttcaaatgaaaaaaaaaacattaaatagatttttttattcgtgaggcttctgccccagaatgcaaccaccgtagcaccacaggatgaaaccaccggggcaccaacagaaacagtagaaaaaacacctacggaagtagcctcagaggagcctaatgaagttccagt

SEQ ID NO: 61209 - DNA, 1351 bp, Glycine max
  Clone ID: PAT_MRT3847_26285C.1
tgtacactatatatagaaaacacattcacacacattcaagagaatataggcgttaacaataacatggatcaaaagcttgtctcaagctggttccatcttcattcctcagtgcccttatcctacgtgcaaccaccggaaagtagaccaggcatggttgaagcttccagcaagagaaaaatcccggtggtggatcttgggctacatgatcgtgctgaaaccttgaaacagattttgaaagcctccgaggagtttggatttttccaggttatcaaccatggagtttccaaggaattaatggatgaaacactggatattttcaaggaatttcatgccatgcctgctgaagaaaagataagggaaagctcccgggacccaaatggaagttgcaggctttatacaagccgcgagattaacgacaaagatgtcgttcagttttggagggacacattaagacacatctgtccaccttcaggagaattcatggaatttttgcctcaaaaacctgcaaaatatcatgaagttgttgcgaaatacgcacaagaaatgagaacactaggactcaaaattttggagctgttatgtgaaggattaggacttgaccaaaattactgttgtggtgaacttagtgatagtccattattgctagctcatcactacccgccttgcccagaaccaactttaactttgggagctcccaagcaccgagatcctaaccttgcaaccattctgcttcaagaaaatgatataaatgcacttcaagtcttcaaggatggggaatggattgttgttgaaccaattccttatgcttttgtggtgaacattgggcttatgttgcagatcattagcaatggaaggttggttggtgctgaacaccgtgttgtcacaaattcaggcattgggaggaccactgttgcatatttcatccgtccaacaaataaacagattatagaacctgcaaagcctttgttaagttctggtgctcgcccaatctacgggtccattacatatgaagagttcttgagaaatttcttgagcaagggtcctgaaattgaacaagaattgctcttaaaacctttgtaggaaagtgcactttatagacacgttaatgcatgcccctctcaaatttcatacaaatttatacatatcttgtttgcacgtgaataatcttcggtggcttatctaaagaattcaatatgtttgtcaccttaggaagtattatttgtgatgtaatttttgcacttttaaacgctacggggtatgttgtgtagccagtatatgtacccatcctatcgttgaaaagttaattgctatttagaaattttatttattaatgaagtaatttgtaaaaaaa

SEQ ID NO: 61210 - DNA, 1938 bp, Glycine max
  Clone ID: PAT_MRT3847_26286C.1
attcggctcgaggttggaaagagccatttaattacttttttcagtactgagtggacattggcaccaaacaagcatggatacaatcaagtccttcaagggctacggcaaagtagacgagttggagcagcaagcctatcagaagaagacacgtaagcgcctcataatcatcgcagtctcttccatcgttctatttgcggtgatcatcgccgcggtcgcaggggttgtgatacacaagcgcaacacctcatcatcgccctcctctgactcgcccccgcaaactgagttaaccccggccgcgtcactcaaagcggtttgccacgtgactcagtaccctaactcgtgcttctccgcaatctcctcgttaccggaatccaacaccactgatccggagctcctcttcaagctctctctccgcgtcgccattgacgagctctcgaagctctcgagctttccttcgaagctccgcgccaatgcggaacacgacgcgcgtctccagaaggcgatcgatgtctgcgggaacgtcttcggcgacgcgctggaacagctcaacgactcgatctccgcgctcggaagcggcgccgctgaggccggaaagattatctctccggcgagtgttggcgacgtggagacgtggatcagcgccgcgctcacggaccaggacacgtgcctcgacgcgctcgccgagctgaactccaccgcctcgcgcggcgcgctgcgcgagatcgaaaccgcgatgaggaactccacggagttcgcgagcaatagtttggccattgtcacgaagatcctagggttgctttcgaagttcgattcaccgattcaccaccggcggctgctagggtttccggagtggctcggcgcggcggagcggaggctgcttcaggtgaacagcagcgaaacgacgccggacgctgtggtggcgagtgacggtagcggacagttcaggacgatcggtgaggcgctgagattggtgaagaagaagagcgagaagaggttcgtggtgcacgtgaaggaagggcgttacgttgagaacatcgatttggataagaatacgtggaatgtgtttatcttcggtgacggcaaggagaaaaccgtcgtcgttggtagccggaacttcatggacggcacgccgactttcgaaaccgccaccttcgctgtgaaaggcaagggattcattgccaaagacataggattcgtgaacaatgcaggtgcatctaagcaccaggctgtggcattgagatctggctcggatcgttctgtgttctttagatgctcatttgatggcttccaagataccctctatgcccattccaaccgccagttctaccgtgactgtgacattacaggcaccatagacttcatattcggcaatgcagctgctgtgttccaaaactgcaaaataatgcctagacagcctctaccaaaccagttcaacaccatcacagctcagggcaagaaggaccccaaccagaacaccggaatcataatccagaaatcaaaattcattccccttggaaacaatctcacagctcccacataccttggtaggccatggaaagatttctccaccactgtgatcatgcaatctgatattgggtcattcttgaagccagtggggtggattagttgggtctccaatgtggaacctgtaagtacaatcttctatgctgaataccaaaatactgggcctggagctgacgtgtcccagagggtcaaatgggctggttataagcccactctcacggacgtggaggcagacaagttcactgtgcagtcctttatccaaggccctgagtggttgccaaatgctgctgtggagtttgattccaccttgtgattttaacactatagaaagatatcaactgctaatcatattttacatgtctttaatcacactcttgtaacatgtattacactctacacgcatttttttgacct

SEQ ID NO: 61211 - DNA, 960 bp, Glycine max
  unsure (1)..(960): unsure at all n locations
  Clone ID: PAT_MRT3847_26287C.1
cagagaggggctgctgcagttctttactgggtgcaggtgtaatgttcgcaaaatcgatcttcgtttgcctctggacctcaacaacgaccatctcttggcggtggcaaagaatttcgatgggctcacgagcataaggcttcagagctgctgcctcgttaggggggggggccngaaagcnncaccgaancatattcatcagcataatataaactgaacctggttaacagagctaaagtgcccagctttaacaccgctcgcgaccaccgaacccgatttaaggaaagaaaggaaactcgcaccaacacggcacgaaatgttgtgtgacaaggagctcgtttcgatgccaccttcgtgcgttcatttgattgacttgacggggagagggtgcaggaggctcaccagtgttgacatggcttccatgctcaggagctgcaagcagcttcggaatgtggatgttgtgaactgttttgggattgactctgaagctgttgagttgtttcttaagaattgttctcgtttgaggagaatggaggttgaggggagcaagctctccgatgctgcgaagatgtgggcctcgagtaagtttattgaagttgttgtgtaattggcatggaaggtggaagaaacaagtgtatattttctctcaattttttaataaacaggtatacttcacagttcacacacctgattgatgtatttatgtattcatgcttctgtaatttatgcttggaaatgctatcaatatatgtgaataaggcttctaaaaaaactcattttgtgtgatcaatcaaataaagccggacctaggaggtgggcccatgtccttcgtgggccaactcggaggtcagaccggcggtgcctttagttattgtttggtcagcaggggaatcgagtcgtccggattactcgaattcggacgagaagcaatgcccgtacgcgctgcatgggttcccctgatcc

SEQ ID NO: 61212 - DNA, 258 bp, Glycine max
  Clone ID: PAT_MRT3847_26288C.1
acgcgtccggttcactacctatcgcaaagcaaaaactggtgtcgactcgacaatacaatgcgaaaacgaagaggagggttgtatcgaaggtcccaattccaaacaccaccttaccgacagaccctatagcatgtgacaggcttatgaccattcaaatgtcctgtgtgcttaatcacggtggcatgacgaactcttaggcgtgtgaaccagatacggcttgagaagaatttaactttgctcatcggacactgtaaaaag

SEQ ID NO: 61213 - DNA, 1358 bp, Glycine max
  unsure (1)..(1358): unsure at all n locations
  Clone ID: PAT_MRT3847_26289C.1
cggccgctcaagccggccctcacacatacaatacaacacaatacactctccatttctcactccttttcttctcttcactcttcatttcctctcattaatctctttctttgatccatattctgccataacagcacacgataactaaaccacaacaacacttgaagttagttacttgtactttctctgaaactttgattgtgtcaaaatgacgcagcagaatgtggtagtgtctgatactaaatcaggagtttccttaacggttttctcaacaacacaaaagccaccggcggcgccaggagggtacatttccattccaaggaggagggttttgaagaaccttgaaatcaatggaggccaaagaatcaatgcatgggttgagtccatgagagcctcctctccaacccatcataaatccacaccttctttgtctcaggagcataactcttggattcttcaccatccatcagcattagacatgtttgaccaaatcattgacgcgtcaaagggaaaacaaattgtcatgtttctggactatgatggcacgctgtctcctatagttgacgaccctgaccgtgctttcatgtctgattcgatgagaaaaacagtgaggaaacttgctaggtgtttccctactgctatagtgaccggcagatgcaaagacaaggtgtacaattttgttcgcttggcagagctatattatgcaggaagccatggcatggatattaaaggaccaacaagaagctccaaatacaacaaagatagcaaagctgaggcaatcctttgtcaacctgccagtgattttcttcccatgatagatgaggtgtatcaacaattagttgaaaagacaaaatcaactcctggagccatggttgagaacaacaagttctgtctttctgttcattttcgctgcgttgatgaaaagaaatggagtgaactggcacgccaagtgaaatcagttttaaaggagtacccgaaacttcgtcttaaccaaggaaggaaggtattggagattcgtccatctattaaatgggacaaaggaaaggcgctggaatttttgttagagtcacttggtaggttttaatccaatccaatgcatttttattcttcgatcgttttatttgtcacaagcaatgcatatattgaacaacataataattgcacaaagtcacacataagccactgttgaggaccagtagttggataattcttccaagtgtttgaccattacaaacaactaagacgacgacacccacaccctgtgggattaatttattcactgaaagattgttttataaccacatgcttctaaatatatagtaattntttatatttgtcaattgatatctaaaaaattaatc

SEQ ID NO: 61214 - DNA, 629 bp, Glycine max
  unsure (1)..(629): unsure at all n locations
  Clone ID: PAT_MRT3847_2628C.1
ccacgcgtccgcgcacgaatatcttgttggttggagcgatccgagaaaaactctgtaaacatgcgaggtttaccaggaccttcttacaggagatgagctgctctctgactccttccgttacaaggaaattgagaatggaatgctgagggaagttgaggggaagaggcctgttaaaggagcagttgatgtacacattggtgcaaacccttctgctgatggtggaggagaagatgacggaggtgatgatgcatctgctaaggttgttgacattgtagacacattcagacttcatgagcaacccgcattcgataagaagcaggttgttaccttcatgaagaggtttatcaagaatttgactgccaagctcgatgcagagcaacaggagttgtttaagaagcacatcgagggagcatctaaatacctgctctctaagattaaagatttccaattattagttggtgagagcatgggtgatgatgcttgcttggactttgcctactacaaggacggagctgctgatccaacattactgtactttgcatatgccttanaggaaggtaagtgctaagtgacttaatgtaccgagctatctactcattgtatctaggtctttgttacggtctgggcta

SEQ ID NO: 61215 - DNA, 241 bp, Glycine max
  Clone ID: PAT_MRT3847_26290C.1
ataagagacagaaagggactttgacttcgaattagacaattcaattcaatctgcctcgatcatggtgaggaaaacatttgggtttttgttcttgctcctccttggcgtagggtctgatgtgacggtgaagagaacaggggtgatagattgcatgacatcgaagcatgggatccatggtagatgcttattcgacagggaatgtgcagatgtgtgcaagaccgatggtttcatcagtggacag

SEQ ID NO: 61216 - DNA, 768 bp, Glycine max
  Clone ID: PAT_MRT3847_26291C.1
gtcttccaaatcaccaaaagctggaataatagccattgcggtcacatcataagcctcaaaccttgcctccccacattgaacgaacccagaattgattggtgttcatgaaatcaaattccttctggcaacaagaaaaacgaatcataagcaccacccacctcatcctttttttaacaaatgaaaaatcattatgctccacataacatctcgttgcggcattttattgaacacaagatgcacgcacattcttcatttccactacaaattgccttcaaattaacaatactttgcagtgagtttcaaaattgggggagaggtgatcgtattcaacataaaccagacggtggaggaggtctgtgaagttgggtgattgggtttgaatttgtggcggggcagtggtggtacgagtttagctccggagagtcactaagcttttgatacggcggctaggaaccgtcgtttgtggctgcaacttgagcccattgttgtgttgactaagtttgccattgtgccgaggtagagaagcttcgatgtcgagcatgacttgctgtggggttttctatcgacgcgacgaaggtggtggttttctacgggaacaagcggtggctgtccgatctcggtgcctttttgtcgtcatcggcgagggtaaaatgtacgtggcggcaaaaatgagtgcgaaagagaagagacagagagagactccgagggtggtagcggagcaggggtagcgggtgattgtagatgatgatgatgtacaatagcagggaa

SEQ ID NO: 61217 - DNA, 980 bp, Glycine max
  Clone ID: PAT_MRT3847_26292C.1
ataattgattttcataattttggagtaaatagtttagacacacgacccaattcattgcaatgctccatattcaacgaaatttctgtagacaaaacatacaatttaaaaaggtaacacaaatgtgaatcaactacttgcaagttagccatcaaattttgggtgcgcaagacttgcaattgaaggatttacaaaactatccgctagtgcatgagagaaattcacaggacacaagatataaaccctatcacaactcacaagtctccacatcatcaacaagtacatgagcctcccaacaaaccatattaacaaagtgctattcacattggctacactttcctgaagaacatcctaatcatcagtatgattaatcagtagaattagtagcttcaccatttgaatttgtatcatcagtacaacccgcagcaggatttttgggttcaacgaaaagcttccttgaaccagccaatgaggaatccaaatcctttaacacaatagctggcatttgatcgatatcccaacctacaactttgcagatgacttgtgcataggctctgtgagctcgcttccttcttgtccttaatatggcagatagagtgctgaattagtccaatacaatccttaaacctcgtccataccttcttcccaatacccatactataccaaacaataaaaatctccttccttaacattgttctcataatatcctgaacggtcaccatcttctgcaaacactttttcaaagaacttatactcctcagattcttcagaatcattatctaccagctcatcttcatcctccgcctcctcatcatcttcgtcactgtcagaaccagcatccccaactaagaacttctggcaagcttctaatgctctgtgctgcaattgcagcactgccacagttgctttctcttctgctgatagagaataagtgagagaagatgatttgatgtcatcaaaggaaggccatcctgaagctgtag

SEQ ID NO: 61218 - DNA, 855 bp, Glycine max
  Clone ID: PAT_MRT3847_26293C.1
ttcccgttctcgtcgtccttcgtctttccactcacaattcccaacttaccaacccatttcacttcacttcccctagtcaattaatcgattccattccacaatgcagtttcctccgctttccctgcaaccaaacagcacctaattccttccaaactcgagccttcttctctgtcatgaaccgcttgtcgcagctctcatcgtacaccgccgccatagtcggaagcaccgttcgcctcatcgcgaaccgctccctgcgccaccggtgctgctcgttcccggcgaaaccagagtaccgcggaattaggtctttccgttcagaattcgcgttgaccgccgctcgctgctactccgccaagaaagggcgcaagagcaaggcggagcctgaagtgccggcggtggtgatggagcaggagaaagacgctttctacgtcgttcggaaaggggacgttgttggaatctataacagtctcgctgattctcaggctcaagttggatcttccgtatgcaatcctcctgttagtgtgtacaagggatactcgttgtcaaaggacaccgaggaatatcttgtctcacatggactgaagaatgctttatacacaattagagctactgatttgaaagaggatttgtttggcatgcttgttccttgccctttccaggaaccttctaccaaagagggcacatcaaataaggacgtatctaaacagagatctttgggagtgcttgcacaagatgagaaagtaatccctgaagatcccttcagaaagcaagtcaagttagaatatgctgaagtggctgaagcaccttcacatgcaactcggacttgttttgttgagtttgatggtgcgtcaaaag

SEQ ID NO: 61219 - DNA, 381 bp, Glycine max
  unsure (1)..(381): unsure at all n locations
  Clone ID: PAT_MRT3847_26294C.1
ggggggttgttctatttatttgccccttttctccccactngatcaatgaaaatgcccacctttataccccagcctttagaactttgatccatcgtctggaccacaggccccccccttaaactgtacattgttagcgcttgtatcttttatttctaaggcccttgaatctccgttggaagaagggctggcccgagacttttcatcctcacaagagttttacactggaattaaagttttccagtggagggttgtgcaaaaggttgtaccgaagccattgaaatttgcacgttaacccgacattaaggaaagatttgggaccctggtcaatgagataatcaccaggcctttcaactaccatggggcattggcccggggtcattg

SEQ ID NO: 61220 - DNA, 946 bp, Glycine max
  Clone ID: PAT_MRT3847_26295C.1
ccacgcgtccggtaccaaataaaaaaatgaacaaagcaatcagtggtttgtagtctcagcaacataaaaaaaagaagcaattcagtgttagagcttttgttagttgtgagttgtcatagttggggtgtcggtaaaggtagcctgtgttgatggcaggtgtcctatattaaagccaagagtctcagagcctacagcctagaggagacattattattgaagagagccaagtctccttcgttgattttgttttctccacttctatactccaaacacctgaaccaacaatttattatgttagtccaaactaattaattaattccgatttcttttttataatatgatcggattcattatctggttataatgtatacgagtcatgattactttttgatgacattcacatgtcggagtttgtctggaggttgcgctgcgtgacggaagaattgctttactttattaaaacaaaaacgaagcagaattaaatcgaaactgcgtaactggaattgcatgcatgcagtttcgatttggttttattttttgtattaccctattacatagaaatttcattactcaacttttctagaaagatgatttttttatggattaatttttgtacaaaacgcacgaacatgcggtttccgtcaaatgtcgtttcattttattttattaaatatatatttgttttttaaaattaaatgacactttttttatctttaacttttgatgcttttgttgcatctgatcgtactcagtctcaaacaaccactctctctctctctctctcatagcaattgtacaatgcttttcaaaataaaacaaaaattgatcttataccattatgaagttgttgctttcgtaagtcgtctttatttttgttcccacaattctgttataacatttgtcctttgctggttctgggataacaaatgagaaaacacattttctt

SEQ ID NO: 61221 - DNA, 512 bp, Glycine max
  Clone ID: PAT_MRT3847_26296C.1
actagacaaacgatgacttgttccccgccgacaacgacgatcgtttcgcctcattgacaacaagccccaaagtgatgcttctagttgcacaaacaatgaggagattgaggtgtgcaagctcgtctaggagaagaaacgcgtgcgcggcaacgtgtttaattggattttttttggagcaatgtaggttgattcaatagaaagtcttttgagtattattgtttgtttggagcggtgtgcggtaatgtaattagattatatttttaatttttaaaatgaaagatgctcgctaaaaattaaaacagtgcatagactgttaatagaaaaatttgactattttacaatttaataaaatacttacactgcgataagaaattataaatcataaaaagttagagctatatgatttgcttttcagtttttgtttttaaaaactattttttaaaaataagtttttaataataaatttttatttgaaaaaaacatttgataacaattcaatccctttttttggg

SEQ ID NO: 61222 - DNA, 717 bp, Glycine max
  unsure (1)..(717): unsure at all n locations
  Clone ID: PAT_MRT3847_26297C.1
agtatttgccttaattgcagttagagatccancgaaatgggagctgaagttcgatagagggttgagtgtcattttatatcaggcaatagttgcaacaatgttacgttacaccctaaccacatggtgcgtccatagagcaggacctctgttttgtgctatgttcaagccagtgggaatcatcttcaccgtttctatgagtgcaatctttctgggggagaatttcggccttggaagtttgattggtgcggttataatcgtgataggattttatgctgtactatggggaaattccagagaggagaacaagattgagaatttggagtcatcgagccataatgctcctttattgcaagataggtcgtaacagataggttgaaatcatcgtaccataatttggcgtatcagaaacaggtgaatgaatcgtatcatgctaaccattgatatgcacttccttgttggatatattttccgtgagtggaatacttgtgtaaaaattttagtcactcatggcacccgtgaatagcttttgttggtgggattttaatccacaaattatagcttcttcttttgtaaatgataggcaaactatacctaattacaggtttaggtagtttacttttggttttgattcacagtttggcctctgtcccccatgtttgttttgtaatcttgcttcttttttttaatatattctggatgtgctgcttttcgtggttg

SEQ ID NO: 61223 - DNA, 323 bp, Glycine max
  Clone ID: PAT_MRT3847_26298C.1
aagacttcaagctctcgggtaagatccccgaggctctaaaatactgtggaaatagcattcaaaggttggatcttgcttcaaattctttctcttcggagatcccacatgagatctgtacttggatgccgtttttggtttctatagatttgtcaagtaaccagctttctggggttattccacccacaattgataactgttcatatcttaatgagttggtgttgtcgaataatcagctttctggttcgattccatttgagtttgggaatttgggtaggctcaagaagatatctgtggccaataatatgcttactggaacagatcct

SEQ ID NO: 61224 - DNA, 481 bp, Glycine max
  Clone ID: PAT_MRT3847_26299C.1
acctgtagtaacctctaacatacagacagagcgtgaggccgtaaccgaagcataaggggacgagtaacgccaataaaactgataagaataaaggaaaagttaggaacacctgtacgtactggatgcaagcagacccaacaggtatagggtgtaacctagcggtactaaagccaataagcaacggcagggtaggtgtgtaaatgtttacagccaggggcacgataatatatgggaatttgacagcaggacgttcaagaaataataattcggccacgtccagcggcggtattagatggggtagggcgagccagtggaaccgtgaaaagatcgcgtgattatagacatgtggggaaggctgtggtatgagttgggtcaggttaataaaaatgggcgttatgtaggccaagtgtaaaataatagaacggaaggtacgttacaatcaccggcaaccggaggtgtaaagttattacccataaatata

SEQ ID NO: 61225 - DNA, 433 bp, Glycine max
  Clone ID: PAT_MRT3847_2629C.1
gttggtttaccaggacctccttacaggtgatgagcttctctctgactccttccgttacaaggaaattgagaatggaatgctgtgggaagttgaggggaagtgggttgttaaaggagcagttgatgtagacattggtgcaaacccttctgctgagggtggaggagaagatgagggagttgatgatgcagctgttaaggtagatgacattgttgacacatgcagacttcatgagcaacccgcattcgataagaagcagtttgttaccttgatgaagaggtgtatcaggaatttgactgccaggctcgatggcaagcatcaggagttctctaagacgcacatcgagggagcagctaagtacctgctgtcgtagattatagatgtccgaattgtgtgtagtgggtacatgggtgatgatgcttggttggtttatgca

SEQ ID NO: 61226 - DNA, 279 bp, Glycine max
  unsure (1)..(279): unsure at all n locations
  Clone ID: PAT_MRT3847_262C.1
cttgaangtggaaagctctgacacnatcgacaacgtcaaagncaagatccaggacaaggaaggaatccccncnggaccaggnaacgttctcattttcgcnggaaagcaacttgaggacggccgtacccttgctgactacaacattcagaaggagaggactcttcacctcgtcntccgtctccgtggtggnnatgcagatcttggttaagacactcacngggnaagaccataannntagaggttgaaagctcganaccatggataacgtcanggccaagt

SEQ ID NO: 61227 - DNA, 1006 bp, Glycine max
  Clone ID: PAT_MRT3847_26300C.1
cccacgcgtccgcccacgcgtccgcccacgcgagaaagcacatagaagagaaagaaagaaaacaaagaggagaaagaaagtagttgaggaagatacaaacaatttttgcagattgttgagaatgcctttcaagaagcctcatcacacctcagacaagaactacataacaggggacgacggaggcaagttcgagatacaacctagaggactcaacattgtgtggggaaatgattctcgatactggaaaattccagaacaaggtcctgcggagctgatccaagtttcatggttggaggtatccggcgtggtaaacttaccaggtgtcaagaaatatagggttgaattcgaagtgagagttaaagacgatgggttcggttggagtggcacggacgtgctagtgatggctaagattgggaaaacgggaaaatatacgtataaggtgacgaaactaaaccctggtgaaaccttgaatattccaaaatcaactgacccacttgagattcaagtgaacaagcaatctgaggaccttcactttggattatatgaagtgtggagcggaaaatggaagggaggccttgaaattgtcagagccctcatcaaacctttaacttaattgcatgcaactcatcataccatatatcgttttcttcatttgccaactttgacaagtggattaattgtttgtggtttaattattattattactttgtatttggcgttgagtactactgtatgatatatagatgataatatgtgtccatgctctgcactagctgagacctggattattccaacttgcaagtgctgtgagaataacagtgtgttctggtcatgcatgcatgctgagagaaacaatgtatgtcggtcttaaaaagttcactgtatttgcataaactatatgtactaaataatggatttacaagtgtgttttttttataagtccgcaaaaaaaacatagggatcctgccctatctccgttccgctgccggtccgtgtacctgcaggc

SEQ ID NO: 61228 - DNA, 421 bp, Glycine max
  Clone ID: PAT_MRT3847_26301C.1
ggcctcagccgcatcccccaccactttctctctacttcactccgccaccccttcctcctcctccaccgccacctccgactgcccctccccctcgagcgtgcagagcacctactccctccgcagcccgcccgctgcgcacgcctgggcttggccgaggcggacccgctgctcgcggcgagtagtatcggcgcgcgtggcggcggtgacaggacgacgaaagggcgcgaggggggtggtgtcgatggcgaacaagagcgtgggggacctgagcgcggcggacctgaaagggaagaaagacttcttcatggccgacctcaacgtcccgatcgacgacgaccagaacattaccgacgacaccaggatccgagccgccattgcgacgctctaacatctgatccaaaacggcgcacaagtcattctc

SEQ ID NO: 61229 - DNA, 404 bp, Glycine max
  Clone ID: PAT_MRT3847_26302C.1
aaaataacacccactttacacattattaccacaattaaaagagggggggaaattttcaaatagaccgagctttctcaacaagagggtcatgtctaagttcctttattgaattaaacaaacggacaaaccaaagaaaacccaaattccaaatcatgccgagggttccccattttcaaaaaaactggcagacacccttggaacagaaaaagctggcataaaagttttacccgcagtttcaaaattttgagaaattcccaagagaatttcaaaaactgggcactgtttgggattgtcaataaggaaacctaagggccatgaagcttgatttgcccactcagaacttcacatttaaaaacccttattaggaccacattcctcttttgggaagatcaattcccaggaat

SEQ ID NO: 61230 - DNA, 255 bp, Glycine max
  unsure (1)..(255): unsure at all n locations
  Clone ID: PAT_MRT3847_26303C.1
caagatgctcttggcatcggtttgatgataacagtcctacagttggctcggttgcctaatattaaggttgcaactgtactcctatgttgtgcatttgtatacgacatctttngggtattcatatctcctgtgatattccagaagagtgttatgattacagttgctcgtggtgacaaggccggtggtgaagcaattcctatgcttttgagatttcctcgtctttctgatccttggggtggctatgatatgattgga

SEQ ID NO: 61231 - DNA, 209 bp, Glycine max
  Clone ID: PAT_MRT3847_26304C.1
ttatcggtcccggacatcccgggtcgacccacgccgtccgcttcaatcttgatcttcttcaaacccaaccggtccgaacccttggagcccccgtgcaacagttcctcctctcactctctccttcaacaaaccacttgacctttggtcttcagcctttctttggaaagaagggtttgtaaccgcctgaccgttgaaaaatttttttcttg

SEQ ID NO: 61232 - DNA, 430 bp, Glycine max
  Clone ID: PAT_MRT3847_26305C.1
tttcgatctccaaattcccgtgctttgagtttttggtttttgctcatatgtgctcaatgattgttcaactgttatggtgctttctttagttggtggttcttgtctttgaaagatttttaattaactgggttgttcagaacttgtttagggaatcaataggcacagcttgtcattatgttcttgaccagatagcatggaggagcctcaatgtgcaatcaagaaggatgccactgaattggtagggaataccccaatggtatttctaaacaacattgttgtcgggtgtgtagcccgtattgctgctaaactggagtacatgcaggcctgctgtagtgtcaaagataggattgctttgagcatgattgaagatgctgagaaaaaaggccttattactcctggaaagactgttctggttgagtatacaagtggt

SEQ ID NO: 61233 - DNA, 335 bp, Glycine max
  Clone ID: PAT_MRT3847_26306C.1
ttgtttttattatttaacaaaccatacaaataaaactggtcctttccttggaaatccattgcataatgagcgggctcaaatgacatgactccaaaacgaagaacagagatgcggatggcactcccctgatcactcttttatggagagacttatatatttatatatttcgctggcctgaataaactggacagttacacatattctcctttaccatggatactgagtcatagcagacttctcttaaaatgtaacttggttggagggcggctactggaatatgacatggatcctcctgactatatatggcgactcctagagcagaaaatcccatcttt

SEQ ID NO: 61234 - DNA, 1603 bp, Glycine max
  Clone ID: PAT_MRT3847_26307C.1
gaaaaaacaccaccatcttaatattatcatcatattcttaataaaataaaataaattgtttgactatagttacgcaattctatgaatttcggtccacaattggttgactgacttcgttctttttgtgagtctaaaacagtgaaacatctttgttttccacgttttatcttcctatcattgaagacataatagtaagatgttcttgaccagatagcatggagagcctcaatgtgcaatcaagaaggatgccactgaattggtagggaataccccaatggtatttctaaacaacattgttgtcgggtgtgtagcccgtattgctgctaaactggagtacatgcaggcctgctgtagtgtcaaagataggattgctttgagcatgattgaagatgctgagaaaaaaggccttattactcctggaaagactgttctggttgagtatacaagtggtaacaccggcataggattggcattcatagcagcattgaggggctataaacttcaggtgactatgccgtcttatgtgagtcttgagagaaagattatactgcgagcatttggagctgaggtatatcttacagaccctgccaaaggaattgatggagttattcagaaggcagaagaactactagccaagacacctgatagttttatgcttaaccaatttgaaaatcctgccaatccaaatattcattatgagacaacgggccctgagatttggagggactcgggagagaaaattgatgctttggtttcaggaataggaactgggggttcaatagcaggagctggaagattcctcagggagaaaaacccggatattaagctgtatggtgtggagccagctgaaagtccagttttgaatggaggacagccaggtaagcacctgattcaaggaattggtgctggtatcattcccaaagttctggatgtaaatctcctagatgaagttattcaggtttcaagtgaagaggctatagaaactgctaaactgcttgccttgaaagaaggtttgctgatgggaatttcatcaggagctgctgcagcagcagcaataaaggtggggaagagaccagaaaatgcaggaaagctcattgttgtgattttccccagttttggagaacgttacttatcttcaccactgtttgaatccattaggaaagaagctgaacaaatgacatttgactaaggtgcataaatagcttaggttagtacgcactgagtactcgttaagcaagcactattgtcggtatagtgtggtctaaaataagttgaataacatctggattgacacttcaagcttcaatttcttgcttatgaaaataacccaacattacttatatgggatttcaaaagttgttttgcactcatccaaatagaatcaaaatcaaaagtgtttaattttatgtgttcataatgtaaaaaagtttgtactatcaaccaatcagaaactaggataagtataactgtaaaagtcagcaaacttttcacacatgacagttttttattgaatgacggtataaaatttcattaaaaaaaaaaaaaaaagaaagaatgccaaaaaaggaatcaaaaacccatgaaacaacccggggggggccgc

SEQ ID NO: 61235 - DNA, 158 bp, Glycine max
  Clone ID: PAT_MRT3847_26308C.1
cgtacggctgcgagaagacgacagaagggggtctcgtggaagtgtaaagcaagcaaaaaccctatgcggcgcctgctttctttgttcgtgatgttgcatcagagatggacgtctcccaggtgaacgcacgtcgacttagttagtcaaaaattcatggg

SEQ ID NO: 61236 - DNA, 241 bp, Glycine max
  Clone ID: PAT_MRT3847_26309C.1
cacacatgggccccgtatgcatgagggtgcacacaagtgtgtacatgtctctctgagtaacacatcctaaaagaattagcattaataaaaaatcttgatctactagtgtcaaaaacaacccacaattgagttgtaattagcataagaacttcttcattgtcaaaaaatgactaaacgccacaactcacaataataacatgaattaaaaacaaaaaaaaaacaattagggataaagacacct

SEQ ID NO: 61237 - DNA, 415 bp, Glycine max
  Clone ID: PAT_MRT3847_2630C.1
cgcgtcgctgctccgtaccagtttcactgcataattttgagagaaaactctgcaaacatggtggtgtatcatgacctccttacaggtgatgagcttctctcggactccttccgttacaatgaaattgagaatggaatgctgtgggaagttgaggggaagtgggttgttaatggagcagttgatgttgacattggtgcatacccttctgctgagggtggagaagatgagggagtcgatgacgcatctgttaaggttgttgacattgttgatacattcagacttcaagagcaacccgcttttgataagaaacaagtttgtaccttcatgaagaggtttatcaagaatttgacttccaagctcgatgcaaagaaacaagagtttgttaagaagcacatttgtgggagctactaaatta

SEQ ID NO: 61238 - DNA, 242 bp, Glycine max
  Clone ID: PAT_MRT3847_26310C.1
cgctttacttatgaatattgcactcacaacttacatatgtctatctatttttgatacatatcctattaagaccacactgtataacacgctgattgaaacctggtaacatattgcaagtgagaggtgaaccatggaaagacatataggagacctcatatatcaaggacacgttattaccgatggttaaacgatgacatctacgaatacgaataagatgacgaatctaacctacgcttgatccg

SEQ ID NO: 61239 - DNA, 555 bp, Glycine max
  unsure (1)..(555): unsure at all n locations
  Clone ID: PAT_MRT3847_26311C.1
aaaattaacttatacacaaataatccaagctatataaatctgcaaagttatgaaggagaacataatctgttgttggaagtagaactccaatggccacttgccatcagctgttaaaagattttttttataatacatttggaatttttcctttgttttctcaaaaacctcttcagcaatgatataccatcagctctcttaatttcccatgttactttctgatagaatccagtaccttgcaaggcatctgcaatgaaatcatcaaaccccaatagcaattgctgcctcagccctctgttagaaaagaatattgcaataacttagctcaaaacaggataaacatggtataaaagagacgcataggagtagcaagccattctaaccttaattcgagaaaggtggattgcaccaaagcacatgggacaaggctcacaagaagcatatatttcgcaatctgcaagttctatctgcttaagcttcttacaagctttgctatcncaacgggtagggcatgtccatcatgtgcaaatttctttttattgctgtcaccgcagcatg

SEQ ID NO: 61240 - DNA, 370 bp, Glycine max
  Clone ID: PAT_MRT3847_26312C.1
ggcacacgtttgttgagatagctagaagcactatcatgaaaatgaaagtgcttgttttgtttgttgccacagttttggtaacatatgaatgccatggctcagactaccagaagttccctctccaaatgaaaactgggtttggtgggcactacaccaatgacgtggcatgtgacagttggaggcttgacgtggaagcacatcacgtactcaactgtcacactgttccagctgcttgcgtacagtacaaaactgactactttctacgagaccactctatactaaagtccatcacagttaatcactcaagcttacttctaagctaaatccctcaaactcaccaacagtatatgtccttgacgtggacgttgac

SEQ ID NO: 61241 - DNA, 162 bp, Glycine max
  Clone ID: PAT_MRT3847_26313C.1
ttgaaacccacggagaccaaagacccggaagggcacaggaggaaatcccgcccaccagcgcaagggaaaacagaactgcaacggcgaggcaacaaagcagcccaaccactgcacgccgcggagcccccctccacccctcccccccctgtctcccccaccccc

SEQ ID NO: 61242 - DNA, 159 bp, Glycine max
  unsure (1)..(159): unsure at all n locations
  Clone ID: PAT_MRT3847_26314C.1
cctgcntcngacaggaacaccnttgcagaatganttgaaggaactgtggtcgctttnaaatnnacttctnccagaggtttttgacaanaagaaagccttnaacgantggcttncaaagccanntcaaaaggaaggncccacacaacanacgacgcnnca

SEQ ID NO: 61243 - DNA, 466 bp, Glycine max
  Clone ID: PAT_MRT3847_26315C.1
ggttgatttacttagaggacaaaagtcacattaagcggatgtcactttactgccaggggagtgggatgccatggaaaaggttttacccgcaaagtatgaagaagcaaggtaggaagagaagttacgaaatcagcgtgaggatttcagtgacatggtggcagagaatgagaagaggaagaagagatagatgcaagaaaaggagggcaagtccaagaggaataaggagtttaagttctaaaggtggtttcgtgtctttttcttttgcagaaaaaatgggggacccggaagttatgcattcatcagattggcattttccaccaagggaggattggttgttagctttgttgtatggcatttctttcacatgttgttgtctgcaagtagctttcattgttttggttaggaacatactactcgtaatacgatgaaacaccttatacagcgctgattctttagttggaaacac

SEQ ID NO: 61244 - DNA, 118 bp, Glycine max
  Clone ID: PAT_MRT3847_26316C.1
agaagatggatacatttgcatcctaagaaacacgggtattttatcactagtgagtgggatgaattattgtgcttcatacccaactcgagatgaatcatacacacttgtgtctgctcgc

SEQ ID NO: 61245 - DNA, 233 bp, Glycine max
  Clone ID: PAT_MRT3847_26317C.1
cactgtctcaattaattctgctatttgccgtctagagttctgttcgctgaaggcgctctttctcgaacattcttcttaattcttgcaatacctcatgcgtggtgacgaacccctcggagctttgctcaagaaatgcaacttgtgcatcaatttctctggttgaaaccattaattattctctgaatcgagttctatgatagctctctttggaatgtgatcacattgatgaatcc

SEQ ID NO: 61246 - DNA, 483 bp, Glycine max
  Clone ID: PAT_MRT3847_26318C.1
atgtgctcctcaaaactcgaaaccacattcgtcttctccttcaccgtctcatatagcacatcaacaacgggagcaatcttcttcactagggttttgacgcaattacaattgagcatagaagttagaagcaagggaggatcaagaacgaggaagttgtgcatggtagaaaccaacgacgatggatatggttttgatgggtttgtagcacatcgtgcacccactccaacacatcgtacgcctgctcctctcctcgcttggcgccttcatcgaggctcgcaacgtttgaagaacgtgaacctcaccatcaactcggttcgcacgtgcgtcaagctaatggaggtctgcacatgcgtgatcgacatgaagctcgccatacctttgttcagaatccaatcagcccaccaccacatttttcttcggcaagcaccactgctgagatttgttactgacgatagaaatgctttaattcttatgattttttaa

SEQ ID NO: 61247 - DNA, 275 bp, Glycine max
  unsure (1)..(275): unsure at all n locations
  Clone ID: PAT_MRT3847_26319C.1
cnaacttacttttcaaattccttacttgctcctttacactttaccctgttgtccccgtttggtcctctaataaattatcttgctctgaggtgattagagttgacacatttgttaatggagaataaagatcctaaatcatggagttctgctcatatctaccagtctcagtggcttcaaaccaccatatcagatttggatgagaaattggatgctatgaaaaccattttaaaggtgacaattctccaaaccaagaaagcatggattgcnaatggaga

SEQ ID NO: 61248 - DNA, 716 bp, Glycine max
  Clone ID: PAT_MRT3847_2631C.1
gaggtttatcaagaatttgactccccagctcgatgcagagaaacaagagttgtttaagaagcccattgagggagccacttaatacctgctttttaagattaaggatttcccgttttttgttggggagagcatgaatgatgatgcttgcttggtctttgcatactacaaggatggggctgctgatcccacctttttatactttgcatatgccttaaaggagggtaagtgctaagtgacataatgtccccagttatctactctcggtttacctaggtttttttttttaaggtttgtcctaagacccttaatccaccgttttgtttttttgattttaatggtgagaccttttgtggtacctcataattcccaaccaatttaattatcgatggggtagaatttccttaatttatgattttgggtgtcggggtgggaaaaaaaaaaaaaaaaaaaaaaaatctacacactttatctagttttcttttacgttctgtcctggctcacttgaaactttgacctggtattttgattttaatggtgaaacgtgtgcaactgctacatcataattcccatcaaatttaattatcgatgggttagaatttcattaatttatgattttggtcgtgctagattcccggaagtttcttttgaagaatttttgggtgtgccctagaaatattttaatttggcttcatggtttaattgataaggatttgaat

SEQ ID NO: 61249 - DNA, 302 bp, Glycine max
  Clone ID: PAT_MRT3847_26320C.1
aggttaacgccggacgccccgggccccaattcccagttccatcacgcctcacgcgttttgtttttctgggggaacgatagcacagggagacgtcacacctatcgggggccagatgctcaaggatggcagattgaaagaaagatgattggcgagttacttgtggagatccctactggattagcgataacagataattgaatggcatggttaatgagatgctcattagatatagctttgaaaaaagactgtgccaggctaaatctcctattatgtatatacaatccttgcaaaatttaaatttc

SEQ ID NO: 61250 - DNA, 228 bp, Glycine max
  Clone ID: PAT_MRT3847_26321C.1
aacaaaaaacaagggggtgtatatggtattcctggctgatcttcgagcacgcatacataaataatgttatcacacaccattattttcagagcattgttacatagctgcccttttttataataaaataagaaaaacgtagattccaactcatccttcctctttttagtaaagaaaagtgtaaaaatggtgaggaaatattgaactgacaataacaccatccgttccctt

SEQ ID NO: 61251 - DNA, 237 bp, Glycine max
  Clone ID: PAT_MRT3847_26322C.1
cagaactaccctttagctcttgctctttgttctttaccattgagtggccacaacaacaatggccttccatgatgatgagggtgctgatagagagtcgccacaaagtaagtttcagatggtcgactccacgagggctttcaacgctaatgcaggcgaaattcgtgtgatgacaagccatggtggtaggatattttataggcacatgcacatgggctacatctctatggaacagagtcc

SEQ ID NO: 61252 - DNA, 145 bp, Glycine max
  Clone ID: PAT_MRT3847_26323C.1
acgcttccattcaaccaaagccttgtgtttgaccacaggtgtccaagattccttaattcgggtctattgctgcggcaagctgaacctgctgttcaagttcaagctttgaccgcaacctttcacacttgttccaggcttatcgact

SEQ ID NO: 61253 - DNA, 449 bp, Glycine max
  Clone ID: PAT_MRT3847_26324C.1
ctatcatacaaactgttgtgtgcacaatgtcacgtacagtaattcacatttctacacgagagccaaccaaccaaatctttcttcttcttcctctacattcctatattctattcactatcatttaactcttaactcttaaattcactacaacgcactgaccatcattggggtacttcaacctgacgctagctatcatagagatcgtggcgtgcggattacgagatactattgacgactaccatactttgaacttgcagaacagcgaccacatagaccaagctgacttacacgaattccacataacacttggtctatgcacatcatgccattgacatcctcatgctatcagacgactttgacaagagccaagcctgccgcctcgccttctacaacgagacctgcgacctgactctacctatgaatgacctacgggtcacaagccacatcct

SEQ ID NO: 61254 - DNA, 173 bp, Glycine max
  Clone ID: PAT_MRT3847_26325C.1
gtttcatgtgcgatcacaagctttactggaatgggtgatacatcaacggctgaaagttaagcccggagatattgtagtattgactgccaggtgggagttcacaacaggtctcgcggtttaagattgaggtactgcttctttattcacagcctcggtagtgagcatgaatgaca

SEQ ID NO: 61255 - DNA, 614 bp, Glycine max
  Clone ID: PAT_MRT3847_26326C.1
ttgatcagagtggtgagattttgagatccatttgaagttgataatgagccaaagagtattagtagtcctgctgcttgttttgaattatgtgttggttgcagaaggagaaacagctgatggagatttgaccacatttttgtctcttataaatacctgggagaacacccctcctaattgggtgggttcagatccttgtgatgattgggttggaatcaagtgcaagaattcacacattacatcaataacattatcaagcaccggtttggctggtcagctttctggagatattggatcactatctgaattagagactttggatctatcttacaacaaggacttgactggaccacttccagaatccattggggaattgaagaagctggcaaccttaattcttgttggttgtagcttcaagggtcctattccagacagcataggaaatatgcaggagctcctcttcttatcattaaattccaatagctttagtggaccaattcctcattctattggtaatctatcaaagctttattggttagatttagctgacaatcaacttcaagggaacatcccggtatctagtggcgacatatctggtcttgataagttacaccatg

SEQ ID NO: 61256 - DNA, 169 bp, Glycine max
  Clone ID: PAT_MRT3847_26327C.1
ttcgcgtgaccctgccaggcgttaaatcatatatagccgccgtttcaccgagactgagagaaacgatgagggcagtgagagcgtaaatggtggctaggatgttgacgctttaccactctctccctgttctttgcagtgaaagcatacccttccgatcggactggtggtt

SEQ ID NO: 61257 - DNA, 534 bp, Glycine max
  unsure (1)..(534): unsure at all n locations
  Clone ID: PAT_MRT3847_26328C.1
caagtgccgtacactgtcacttcgtacgggtattttgtggggtgtagtgtgaatagtagacgttgtacacctgacgtggttgaggagtataaataagcgtgcatacgtaacaagtgcataacaataggcacagagccaacagtaccaaaggcagtaacctgtgccaactgctgtcaccgaagccgattactagcagggtgtgcagaagcttgttatctcagtaaagggtttcccgtatgaacagcggcccacagcaagggccaatgctggtaaatagtaaaacgacccgcaattcatacgtgcgcggcccacttaggatggtgctgtactacaccggcaaatgagagaataaccgtttgttaaagccgggccggtgggatatgccaattagtcgtatgcaacagcctaaccaaaacaaccgcataaggcaggggcacttgggtaaattgagtaagctagtatgcgattgtgcgcagaataacgggtatatacaactatgcaagcaatgnngacaagtgcagcatagcgggccgg

SEQ ID NO: 61258 - DNA, 477 bp, Glycine max
  unsure (1)..(477): unsure at all n locations
  Clone ID: PAT_MRT3847_26329C.1
tataacacaagccattcttaagttatctctttatatttaataaaactttggaagataaatcttcatcacatcccttacttccgctttaaggcccttttcatctaaactttcatcatcatcattgggaaatttgttcaaatcaaatccacaatctacaagaaggtttaaatctatatcaagtactggtttttgttttgatgtgacatcaatggagtcttcatcttctgcatctattgagtcttcatcttctacatctattgagtcttgaaccacctctaaatccatggaatcttgaactatctttgaaaatatagagtcttcatcatattttgtatctataaaatctttaacaatctcaacatcaatggagtcttgaactatttttgaaaatntagagtcttcatcatcttgtatatcatcaccttgaactatcttcaaatccatggaatcttntaatatttctaaaaatatagtgtc

SEQ ID NO: 61259 - DNA, 496 bp, Glycine max
  Clone ID: PAT_MRT3847_2632C.1
gtacctgaatctcgaactccttacaggagatgatatcctcacgaactccatccgatacaatgaaaatgtcactggagtgttgacgacaatcatggttgattggatagtgaagggatcacatgatgttgacattgccgcaaacccttctgctgagggtggagaagatgagggagtctatgactcagctgttaacgctgttgacattgatgatacattcagacttcatgagcaacccgcttttgataagaaacaaactgttaccttcatgaagaggcttatcaagaatttgactcccaagctcgatgcaaagaaacaagagttgtttaagaaccacattgagggagcaactaaatacctgctctctaagattaacgatttccagccatttgttggggagagcatgaatgatgatgcttgcttgaactttgcatactacaaggatggagctgctgatccaacattcttatactttgcatatgccttaaaggaagctaag

SEQ ID NO: 61260 - DNA, 225 bp, Glycine max
  unsure (1)..(225): unsure at all n locations
  Clone ID: PAT_MRT3847_26330C.1
ggagtctggagactgaaagacgcatcagaatttaagaaactatcgagccattaaagaaattagaggcttatgtttatcctcccacttagtatatagcatcacaagtaaagatatatatcactttttccccccttataatatcctaatacgaccatttttaaggcgaaaaccaattattttactaattatgtacgaatnttaagaattatccctccccctacatac

SEQ ID NO: 61261 - DNA, 560 bp, Glycine max
  Clone ID: PAT_MRT3847_26331C.1
cgttaaaatgactctgggaaaattaatatacataaacacactcgttgcattacatactaacttttatgtgccttgtcatgtctaataaaaaccaagaaaagtataattgaacatatgtaatcttcatatactcttgatcaacagtgccaacgcctaatttggtgataagctttcgggtcttcgtatgaaaggccagcaactactaacattcacttcatgcctgctattacttctgctactgctactactgttgttgctaccagaacttttcatgcttccactattaatgctcgacacaccactatcactctctccaccagaaccagaaaggctcttctttttccaccactccttatcaaggctcttagatccatgatcagaaaccgaagttctaggagacaccttgttagaaccactattcactaaggactcatttttagtcttcttcttagatcccaaagaaattggaaagaccattttgagataaaaccctccactatcaatgttcccacttctcttcacttgaccctttttaatattcagtataaccttttttctac

SEQ ID NO: 61262 - DNA, 349 bp, Glycine max
  unsure (1)..(349): unsure at all n locations
  Clone ID: PAT_MRT3847_26332C.1
cttaattaattcccttttctacacgctcataaattgtctgccgccctcccaccccacaagggcnggattaatttaaaaaacctggggctaccaaaaacgcaacatatatacattcaatacagaagcaagccttactggtaccaacaaactttcctttatggaccttatacaacaccatgaatcctacgtcatcaccctctctcatccactagacaacattggtcttacaacataccacaaaacatgcagaaatgtatcgaatgcaaccccatgcataggaaccaactcattcctctcatttcaattcattccaatattatataaaaagaatttggattccaagcccaca

SEQ ID NO: 61263 - DNA, 1569 bp, Glycine max
  Clone ID: PAT_MRT3847_26333C.1
aattcccggcgtcgacccacgcgtccgctaaattagaatcaagaaaattcactgaaacatcaaagcatagtcttggcttagaacaggtgaagaatggagataagtttggggaaacttgcatttgacattgattttcatccctcagataatcttgttgccgccggtctaattaccggccaccttcacctataccgttatagccctcatactgtccctgtgaggctgttggaagttcatgctcacactgagtcttgcagggctgctcgattcatcaacggtggacgtgcactcttaacgggttctccggattgctcaatactggctatagatgtggaaactggttctacaattgcccgggttgataatgctcacgaatctgcggtcaatagattgataaacctgactgagtcaactgttgcctcaggagatgatgatggttgtataaagctcttctttattgtaggtatgggataccagagaacgctcttgttgcaattcttttaatgtccatgaagattacatttcagacattacttttgcatctgatgcaatgaaactgttggcaacaagtggagatgggactctgtctgtttgcaatcttcgaagaaatacagtgcaagctcgatcagaattttcggaagatgagttgctgtctgttgttttaatgaagaatggtaggaaagttgtatgcggatcacaaactggaatcattctattgtattcatggggatgcttcaaggattgtagtgatcaatttactgatctttcttcgaactctattgatgcaatgttgaagcttaatgaagataggattattactggatcagagaataggattatcaacctggttgggatattacctaacagagttatccagccaatagctgaacactcagagtatcctgttgagggtcttgcattttctcatgataggaagttccttggaagcattgcttatgatcaaatgttaaagctatgggacttggataatatactgcaaggttcaagaaacaaaaacaaattcaagtggagtgattgatagtgacgatgatgagatggatcttgatgggaacaagagaaataatgggcatgctgtagggtgttcgaacaagttctttgtagatttataggagggaggagatttggaggcaactttgttcgagcctattagaacatttacgtgatttcctaatcaatatattgagacgctggagccacatgatgaactgcctgaagtctcgttaaagcaggagatgatggacttgggtccatgatgcaacaaaatacatgcttgtgttttttagaaatttatgagatattcaaaattgttgtcacgcaaagcattatgcgatgtcactgttcatcctacaaggttgtctttaggtccaattttgttacagtttaacaccgacatcatttttcaaactaatatattttatccgacaaaatatgaaaattatccagttcaggtcaaacatatgcttgatattcaattttgctgttaccctttcgaaaaagttatttactataacaattcttgatcttgatcccaaattgataccttggtgc

SEQ ID NO: 61264 - DNA, 1172 bp, Glycine max
  Clone ID: PAT_MRT3847_26334C.1
gttgctatttgctatttgctctgctaatttgtatttctttttggtgaattgctgctaactttcattcttgtattctttttggtttttagtttcaggatgctggaagttcatgctcacactgagtcctgcagggctgctcgattcatcaacggtggacgtgcgatcttgacaggttctccggattgcttaatactggctacagatgtggaaactggatctacaattgctcgtcttgatgatgctcatgagtgatcaaatttcctgcaattacacctttgtcatgatttgggttacagtagattcacaagtatcttcattgctttagaatttgtttgtggtttttgttgtgatgcagggctgcgataaatagattgataaacttgactgagtcaactgttgcctcgggagatgatgaaggttgtataaaggtatgggatatcagagaacgttcttgttgcaattcttttaattcccatgaagattacatttcagacattacttttgtgtctgatgcaatgaaactgttggcaacaagtggagatgggactctgtctgtttgcaatcttcgaagaaataaagtgcaagctcaatctgaattttctgaagatgagctactgtctgtggttttaatgaagcgatcgatttactgatctctcttctaattctattgatgctatgttgaagcttgatgaagacaggattattaccggatcagagaatagaattatcaacattctctcatgataggaagtttcttggaagcatttcccatgatcaaatgttaaagctatgggacttggataatattctacaaggctcaggaaacacacaaagtaatgaagctggagctgttgacagtgacgatgatgagatggatctagatgatgatccttcaaagaatagtaaagggaacaagagaaagaatgcaaataatgggaatgccctaggtggatcgaacaacttctttgcagatttataggaggtttgaatgcatctctgttcaaatgtgttgacccaattagaaaacttccttgatttcctaatcaatattaagttgaaggcgcccctccaaaaaattgatacatacgttggaccgtgtccagatgatggcttttttgtgtgttatattggtacaaggatataattttttctttcaatatatgaagtaattc

SEQ ID NO: 61265 - DNA, 363 bp, Glycine max
  unsure (1)..(363): unsure at all n locations
  Clone ID: PAT_MRT3847_26335C.1
ggaanncggctggagcgaacccaacaaccatcttctccttagtcctccccgccatgatcaaattgttcaagaggaacacaaacactgacacgtgtcatcaccaccgttaccgccaccccgttttgggcctgggcctggccacaagggaggcccacaggcctcctaatgttctggaatccgctatgttgaggcccacggctcctccaccgagcgagaagagagtaattattggatccgtggacgacgtcgttacggggctggcgtcttgcaccgagagtctagggtttgaaagctccgacgaaattcacaacaacaacgataattgctgcgacgagaaagagaattgcgacgatgagatttggc

SEQ ID NO: 61266 - DNA, 726 bp, Glycine max
  Clone ID: PAT_MRT3847_26336C.1
ccacgcgtccgggataatatatgttaagctgtatccttcctgcatagaattggtcctggcatcagctcgtatacagaaacaggatattgatgttgatggtttcatgggatttgaggaagccattaacagatggccaaaagaagttcctggaatccagtgcatctggaatcagtacattgaaaatgctatccacaatcgaagaattgatctggcaaaagcaattacagtccggtggttcaagtgtatttggcaagtacaaaatctcccaaatggagggaaggagatcactcggacgcgtgggcggacgcgtgggttgggattggattcaaaatctgtttcagacagattcagttctgatcataaacagatagatatgatgtttggatttcttaatctgtctctctataattttttacagaatgataaaacagaagcatgcatagcttttgacaaggctaagagtactgctagttttggaggtttagaacaatgtatgaagacatatgtgatgtttctggtttatgatgcgtggagcttgaaggaggatggttctgatggtgccatcaagaggattttggagttgtatgcagatggttcctctcaggcattgctagtccccaaggtgttgaccagaaaatttggtgacaacatcaagaagccaagagtacagcatcttattggtaacatattaagtccagtttcatttgactgttctctgctaaactt

SEQ ID NO: 61267 - DNA, 897 bp, Glycine max
  Clone ID: PAT_MRT3847_26337C.1
ccggactgcacttcgacccacgcgtccgagcacatagagagaaaaaaacccagttggtgttttgagataatgttgagaaagaggaccaggtcaatccagaagaatcaacatcacactggtcaaatggcaatctctgataatgctgaggaagaagactttggggagcaagggaaatcaacaccactttgcaatgcccctcttctgtttgtgggtatgggtcataagggcttgttggattgtgattcagttaagagccccacttcaccactagattttggtttcctctcaaacctaagtaacccctttagaaccccaagttcattgtccaatgaggggccacataggagttgggactgtgccaaagtaggtctaagtattatagattctttggaagaatgttctaagttttcttggaaaattctccaggcttcagagagcaagaagactagtctttgtccccaaatgattactaaagcaccaaaatgtaaatcctatatggattctgctcaggcatctaaatctttacctaaagatttttgtaagattacttgtactcagaatggttctattttccctaagggcgagtccactgttctttttgagattggagagacccctctagaacatgagttctttgggaaagctgtgtctttttcattggattcttacagtccaataaaatatctgtctggtttaactggttccaactttgatactgactctgaaactgttgctttgaaattggtgtgctctcctccacttagtaatggaggaagcttaactggttccgactttgtgcctgattctgagaattttgcattgaaacagattgcagtccctcctcattttattggaggaagccaaaataacacaaaatttttgctaccttctgaggta

SEQ ID NO: 61268 - DNA, 245 bp, Glycine max
  Clone ID: PAT_MRT3847_26338C.1
tttgaaagcaaaaatgacactctccaaagcattttatgcaataatagccattgcactgtccttgtcaatgccattaattagagcaagcaaagaagaattatgtattatactttaatttcaaatatatcatgtgatcatgcccccatatatatatatatataacacaatatatatagagacagagaagagtgtatacacataaaaaatacacggtgtatacaaaggcgctctctctatatagagag

SEQ ID NO: 61269 - DNA, 318 bp, Glycine max
  Clone ID: PAT_MRT3847_26339C.1
gcattctctgactcgaataaagatggtgtgatctacccatgggagactcttaaaggcgttgcgtgaagtctggactggagcattgctgtgcggtagacgtactcttttcatgaatcgtcatgtctcaggcagagtactcgtcccggataggctccatatatacgttcatcgattgaaattgagactgtccaacgcggcactcacggcaatgacactggagtctacgatactgaatgaagggtagcaccttcagaatttgaagcaatttctaacatgcatgcacatgcacatccaaatgcttcgacatatgatgagtta

SEQ ID NO: 61270 - DNA, 239 bp, Glycine max
  Clone ID: PAT_MRT3847_2633C.1
gtcaacaacaattgtgatactactttaatttctccagaggagaacatgaagacagtgtattatttttaagggagggctgatcctatttacacacaagcaataattatcactaaaaaatacacataacccaatgagtgatctcaagaatactaccattttttacaaagaggatggtactgcaaactctattggtaaaaccataaaaatttttgaaggcaacacatcaaatttgtttctat

SEQ ID NO: 61271 - DNA, 560 bp, Glycine max
  Clone ID: PAT_MRT3847_26340C.1
aaacccccagaaaaaaccaacccggcttttatcccccccgggtttaaattccccttttaaaaaaaaccaaggggccccccacccatattttggccgcccccccaagaaaaaaaccccaacagatcttccttaaaagggggcaaggggggggaaaaaaaaccggggggcccaagtttttcccccccttttgaaaacggaagtttatgggggggcccggggactttaccccccgggggggcccccccagggggggggcccccggtttcattttttcccccccggggggggacggttcaccccccgtccccgggggttttgccggggaaatttcccggttgggagggggatttggggggggaaaaaaaaaaaaaactggaacccttggggccccggaaattaccggggcccgtttgggaaaaaaccttacccgggggtttgtaaacccccagggcccccaaggggccaaagggcccaggggggggggtttcaaaaaccaggccggggggaaaagaaaaaaacgggggaattccccccgccccaaaaaaaaagggggggccccc

SEQ ID NO: 61272 - DNA, 369 bp, Glycine max
  Clone ID: PAT_MRT3847_26341C.1
agcccaatcctccactcagagccagcaagtgatgggcgcccacaggcagtattcgtcagaatccaagtctctgattgccctgcgcgatcaataaatcttctacgacgcacacaccttcagatatttacaccatgtgcgtgtgagactgtgtatagtggactcctgcttgcacaaaagcaaggactatagcatgtaatgacaacccatgttctgatgcatggagtttggaatctctgcagcgtactggatctcattgcgatatgatttgtgtcactggatggactgccaccccaatgcatgatgttcacgctacaattgagtggcttatttcctctcaggaatgtgttcgcaggacctattgtgttttaa

SEQ ID NO: 61273 - DNA, 739 bp, Glycine max
  Clone ID: PAT_MRT3847_26342C.1
cggaattcccggctcgacccacgcgtccggtgactggtgggtgaagcagaagcacaccacatgaaaccaaaaaccaaattcaacaccgcccttttaatacttttctgttttcagagccccagcctcacacaagttcaattttttgtcacccttttctgattatatccttgtcctcttctccgagcaataaaaaaaccttcttctttctctttactgcgtgctcctctgcgtgaaactgggacacccctttagccctctttcgctctttgcctgccaaaggctttaactttgtcactttagctccgtacaatatgtgccccatgtcacttctttggtctaattcctcaaattgagcaactgggtcgtgcttacttggtttttgttgatggctgagaacgtttgacttgtgtttcccacaagtttgattcttttgtttttgttctttttccctttttaatccttcggtttattggtttattagttcagtttttctgcttgttatacctggcttgctgctccttattgctattcttctctctaggttcttggaggatttatttaaccttgattgtttgaaggttttgtggggttcaattttggattaattagattggattacacactaggtttgtgaatacatagagcagggaattcttataatataatatgattttttttgttgtattctgtgtctctgattcagaaatctccattagcttttttttctttttggtaaacc

SEQ ID NO: 61274 - DNA, 1056 bp, Glycine max
  Clone ID: PAT_MRT3847_26343C.1
gcacgagagagagagagagagagagagagagagagagagagagagagagagagagagagagagagagagagagagagagagagagagagagagagagagagagagagagagagagagagagagagagctggtgccgaattctgcacgaggccttttcagctttcattgcccaaccttgtagtgtggccttgctgttttctcaatgagaaaggcttttactctgcaacgcgcacttttgcgcttctctgttgcgttgttgctggttgccagcttcacttgtgctacttctgttatggcaataactgaagtttcagggaatgaagtgaatacagatgggaagcttgtaaatgaagaactagcaaaaacaagccaacaaggatatgacaaagaagcaaaatttaaaggatttttttcaaaacctattccaaaaccaatttctgttgttaagcctattcctattccactatataagtctataccaaaatcaattcccatagtgaaacctatcccaaagtcaattcctaatgaagaagaaaaatttaaaggactttttccaaagcctattcccatagttaagcctattccgaagtcaattcccattgttaagccaatactaaaaccaattcctgttgttaaacctattcctattccagtatacaagtccataccaaaatctgttcctattgttaagcctgtgccaaagttaattccggttgttaaacccataacaaaacccattcctacttttgagccagaatcttttctaaagccgaagcctttctttgaaaaacctgttcctaaattgccactggagcccaaattcaagaaaccacgtattccacattttccggttcaaaagccaatttcaactccaactccataaaactattttgctcagaaagttattcgatccattatctaacgcctatatatctacactaaatatctcaaaattatcagttgcatctgcataatcatcctatcatatttgtgtactgtattggataacatgtggcggatgtaaatcaatattatattaaaatacaagagtcgtat

SEQ ID NO: 61275 - DNA, 296 bp, Glycine max
  Clone ID: PAT_MRT3847_26344C.1
gaagggggctaaatttgattccacgaaaatggattgggtttggaaggattacatcgaggacgatgtactactctataagtcatcataacgatgagccacgaccatggtcgtcacatcttattgcagaacatcagcagtctaaactgggaagttcgtcacgaggtgcgagacatccgactagagtctcacgaattgcatcagagaactcgataaagtgttgcaatcattcaaagagtagactgatgacgataactcagatgatctatttatcggaatgtctgttccatttagcttat

SEQ ID NO: 61276 - DNA, 682 bp, Glycine max
  Clone ID: PAT_MRT3847_26345C.1
ttttctttcatcctctctctcgaacttatttatctctctctgtttctctgttttgctctgcttctcaaaacataaccttttattattatagtattttactattataaactaattttgcattgctaatgcaatggccatagagtgcataacaaatatacaatcaatgtctcaaccacaaaagcaccaccaagagcacaaagaagatgaagcaccattggtttttgatgcctcacttctcaggcaccaactcaacctaccaaaacagttcatttggcctgatgaggaaaagccatgcatgaatgtgcctgagcttggtgtccctctcattgacttgggggggttcctctctggtgaccctgttgcaacaatggaggctgcaaggatagttggtgaggcatgccaaaagcatggtttctttcttgtggtgaaccatgggattgatgccaacttaatctctaatgctcatagctacatggatgacttcttttgaggttcctctgtctcagaaacagaaggctcagaggaaaacaggggaacactgtggttatgctagtagcttcactggcaggttctcttcaagcttccatggaaagagacactttcttttcagtactcggctgaggaaaattcatccactattgtcaaagactacttgtgcacacattggagaaagagtttgagc

SEQ ID NO: 61277 - DNA, 299 bp, Glycine max
  Clone ID: PAT_MRT3847_26346C.1
agggattaaaccttaccacccacttcattaggtactttccaagattttaatgggccccttccttaccaaaggggaaaaaggacctccaagaggacttaaggcccaattcaaattattggttccaaattagaattcccttttaccattccggattttattagccggaggatttattcttaggcaccattttttttgccttggaaggacatttttaaacctgacctacctgagctagcctcgttaagttgggaattccttatgggggaagcaggtttgttactttttccatgctggttaaa

SEQ ID NO: 61278 - DNA, 257 bp, Glycine max
  unsure (1)..(257): unsure at all n locations
  Clone ID: PAT_MRT3847_26347C.1
tcgtccannccagcatgggatcggtggaaatcagttgactaagtctggaggngggcttagtttgccgccggtgcctcctcantgtggaaggccagcagtggatgtgaggaaagggaagaaagngtctagtcaacaggnagatgtgcattctcttacnctgttgtataatcgatatttgcnatggngatttgcgaatgcaaaagcgcactccacaatgcnagctcagcnaacagaaatcgnnaancatatattctcna

SEQ ID NO: 61279 - DNA, 241 bp, Glycine max
  Clone ID: PAT_MRT3847_26348C.1
agtttcttattattcttagcttctttgacatacacatctttatttagtccgtgcctgggagctgtccatgagctatctatgcaaaaactataagcaggtcccgcttctcttttccaattccaaaggtccctactatctatggaggaaaaaaacctagttcatgattttagagattgttgtgagttgtgacttattcctcctggaataaattcaaattcattcccctcttaagaatctaatt

SEQ ID NO: 61280 - DNA, 339 bp, Glycine max
  unsure (1)..(339): unsure at all n locations
  Clone ID: PAT_MRT3847_26349C.1
tttnattttttcacatacngccagctttttgggtgaagattgaatctaaatttcacccaccaaaccccacctaaaaagagtaccaaaaacaaaaacctcctagaaaaaatgccttttttttgtcaccaccccccacccacaaacataattcattataaatttataaaaacctccaaacactaaaaaaacaccccctttattatttcaaacagggtaaaacaaatactgtcctattcccacgcgcgctaacccaagaaaagagatttcttatcctctcaacaaaaaaccccccccaagaaccaccttttcctttggcacaacaaaaagcccaaacgaata

SEQ ID NO: 61281 - DNA, 290 bp, Glycine max
  Clone ID: PAT_MRT3847_2634C.1
aattcggattcgctctagttagaagggtaagctacttaaactttaaccagctgctcaacgtgattgggtactgggcctgtgctttctatctaaagacctgtaactctacatattatctttgatcatcatatggcaaaagcctcaccgtaattgcaaccgcatatgttgcatattgacgagaccctcacattgtggtcgacatgattagagcttaaaaatggttggccctatgttgggccactattcctccaaaggaaggtaatgacacccccttttgcatattctctaaa

SEQ ID NO: 61282 - DNA, 369 bp, Glycine max
  Clone ID: PAT_MRT3847_26350C.1
ataggtataaggcaaaaaacttgagttatggaagatgttctgtcctattgatgataaaacatttacaccaagcttattgcgatccaaatgcacacttaaagcctcgtataaaaagaaaacatctattgacttaaaacattcttccgcggaatatatacgcagtgaccccaaacttatcttactcacaagaatgcttactgccaaatctagttaaccaaattacaaaagcctggaaagcatataggagctgtttataatccaaagtaaaagtatcgtcccctactttaccaaactgggggagaaccgatccctcacctcctttccatcctgcgggggtttggttcactgttttcaccaggtgaaagattt

SEQ ID NO: 61283 - DNA, 316 bp, Glycine max
  unsure (1)..(316): unsure at all n locations
  Clone ID: PAT_MRT3847_26351C.1
ggaaccaggcagatgacaataagattacattgtaacaacccatataaagaaagtacattgtggaataataatgaatttgttgaatatgactattaaaattttttttattacagcatacctcccattgtggggtgggggggtaatatatatttcttatcatccttttttaactatttcaaataaattttntccatcaanttaatcaaacattttcattcataatttaccctncataaccaatataatattcactttatccactatcntaaaatctcatttaaatcttttacttctancttataacataaaattaaac

SEQ ID NO: 61284 - DNA, 368 bp, Glycine max
  Clone ID: PAT_MRT3847_26352C.1
ggcacagacatacgcgtaggccctcacgtaacccatttgacgttccttctccactttcgaagcggcatctccgactccacctacctttataaaaattcatgatttcaccgcaaactaaacaatccttcggttcactcttcctccttttcctcgtgttgttgcagaagcgattcgaaatgggcgtgatcgtagaaaaccctaatagttccaagccaatcgtgatccgcgaggtctgggcctccaacctcgaatccgaattcgaggtgattcgtgaagtgatcgatgattaccctttcatctcaatggacaccgaatttcctggcgttgttttccgcccccacgtggtggaccccacaaaaccctacctc

SEQ ID NO: 61285 - DNA, 411 bp, Glycine max
  Clone ID: PAT_MRT3847_26353C.1
tctacacgttcgactatatgttataccatataaaccactattctaatggacgaacgcggtggtagcaacacgttgtaacggccgaatcggtttcagactcggaattggtgtacaagagcgcgacgatgacacgggttcgaggcaggatcctaagtacggtccacaaggaacatgataaatgggtcccactgaccatactgagctggatagcgaaggacggaagaattcttagccttgatcagatctacctacactagctcccgatcaaggagcaccatgatcatcgacacgctagtatgttccaccatgcaagactatgtgatgaagatcacgccagtccctaaacatacctggaccatactaatgaccccgatcaggtactatctagaagttggatacgagttcggccac

SEQ ID NO: 61286 - DNA, 600 bp, Glycine max
  Clone ID: PAT_MRT3847_26354C.1
cacggtaccaaatctcttcaacgcgtgtttcagttcattaaatagagggaaaattgagtcataggatgagagaagtccttcaaaaactagaatatctctcaagccaaaagggtgatttaggattaaaagaaggtagtggtggtggggttggatcaggtaggaaaatgccacacaaattgccatcaacatctttactgagtgaaagtgttatatatggtacagatgatgacagagaaatggttattaattggcatgatatctgacaatgagaattgtaatcagctatcaatacttgctattgtgggtatggccgggttgggtaagaccaccctcgcccaacatgtatttaatgacccagagatggaggatcaatgtagtatccaagcttggctatgtgttacagatgaacatgatgtcttcaaggtaacacgaacaattgttgaggcaatcactaaatgaactgatgatagatgagacctatatatggttcaaggaaggttgaaagataaataggcaggatagagatgtctacttgttatagacgacatttggaatgaatatcgagagaactgtgaagccgcgcagactccgcttaaatat

SEQ ID NO: 61287 - DNA, 556 bp, Glycine max
  Clone ID: PAT_MRT3847_26355C.1
tctcgagccggcgtctaacaccaagagcaaagcactgtttgattcagaagaagctttgatgatggttaaggaactgagagtaacgtttgattgtggtaagactcggagctatgaatggagaatttcccagttgaaggcgattatcaagttaactgaagaaaacgagcaacagatttatcaagctcttcactccgatttatctaagtgtgaaaccgaagcctttgtgcaagagattgctatgttgaaaaactcatgtagaatcgcactcaaggaattgaaacattggatgactcctgaaaaggtcaaaacttcaatcgcaacttttccttcttcagctgaaatagtatctgaaccactgggggttgtgttagtcatctctgcatggaactacccattcttgttgtcacttgatccagtcattggagctattgcagctggtaatgctgttgttttaaaaccatcagaaattgctcctgccacatcatcactgctggcaaaactgctcggagactacttggataactcatgtattaaagttgttgagggagcagttgat

SEQ ID NO: 61288 - DNA, 387 bp, Glycine max
  Clone ID: PAT_MRT3847_26356C.1
acccaaaggagcacgctgagaactgaacaatattatatacagggtatactgtgtactgtaagaagaacccctgatattaagaattatcacttaaggatttaatatatgcatatgcttggaggaagctcagtatagtacaaaaagaggaataataggatgaatatttacagggatctgcacaaaaactcaagatctggggacatgaataaacttccccagcctattaaggagctatcacagaacacatttgataatgaacgacccacatgaaagctgatgacaaaaatagattgataatctgagcctaaggaataatgaggcggaacttattgagacagaaatgctatgaagagcgtaagtgaatgctgaacaaactgcaaagactgg

SEQ ID NO: 61289 - DNA, 343 bp, Glycine max
  unsure (1)..(343): unsure at all n locations
  Clone ID: PAT_MRT3847_26357C.1
canccanannnaggaaatntcnnaagcnngctcgatcttgnacagtnanaatnattcctgtaatcatnttctgcgnncgtgancatggancgatattnagagnttcaaatgatgatagnanagttagctgtnntctcagagtgtcnatnnacgagtaganaanactnnngatgacccaattagagnnatggangggatnanngcnngattatttantgnantaatgctacggnnnatncttcctgggtnnctatntnccacatnnttncancanaatgacggagantgntnacgngngatcctaanagcacnccnanngtgngnanagnagnatanctgttgn

SEQ ID NO: 61290 - DNA, 223 bp, Glycine max
  Clone ID: PAT_MRT3847_26358C.1
atgggacattcagcaggtgaacaacagtgcttatgaatgtcacaggaatcatgaagggctggggagctgataatgctacaagacaatcttgaaagacgagtccattgtagaaacgcgatttatgcacgacaaagtcgctgatagacgactcttcagaagctccgctagtggtagtcaactcctactaaagtcagctcaatcagtaagagtggaaagacacatg

SEQ ID NO: 61291 - DNA, 137 bp, Glycine max
  Clone ID: PAT_MRT3847_26359C.1
gcgcccgtgcgtcctgagtaaggggctaaggaggtgaacataaaaaagatggaccactggaccgtgaacgctactcttgagttctgatacccacaggtgcttaattacacgctagagaagctggggaagtcttctga

SEQ ID NO: 61292 - DNA, 3938 bp, Glycine max
  Clone ID: PAT_MRT3847_2635C.1
tttttttttttttttaggacaacaaacattgccgcacctcggccactagacgtgatgaaatcactcttcaaagggctccggcaacacaatggttctccctgccattcataaactataacataaagcacactggggtggttaaaaccacactaaacagaaacattatttggtgatgcaatcacactatatttaaagacagtgcaactactatattatagtaaactataaagcgacccgaaatgataactgtgaccaatttacttagcctttactgcggtgggcccatgcccaaaagagtgtgcatgttttgattcacatcccttgcagtgtgcctttcagtattttcggagttggttgagatgttcccatcaagtccaaacaacttgttgttaactcccgagagagctgcagccttcatctgcgctattgcttcccttgccctgtttggtgttttagaagtaacctcatagaaatcaaaagcatagcgagctagctctctatctctcaaattcctcagtagtccatatctaggcatatacggactttcagaatttctcatctcaatgtaagcttctgctgcatctgagaaatggtgcatgatttgtctcaaagttggttttgcattttcgacaatgggtttcagcggatattcaatctgttcctctccatccatcatcacccacacgccattagcatctggagatgtgccattgtcaatgcaccataccatgaaaccattcataaccacacccatctgctcatcgtcaagctcatattcatctttaactgcattgtaccacgcttcgaactgtgttcttgttgctcgagtgttgaataaatcaacctgattaggtttgtactcaagcaagtggtccaaactgaggatgatcttcccttcaaccattggaagattcatcttccttgtaatcttctgcaaacgcggaaccacctttccctttgatccaacatttacatctttgctgcttgtgccagctcccttactactactggtgctcttctttggatccttacctgcatccatatctccttccttctctttgcctgattgtaaggacactgattcacaacagtcatcagcatgattgaagtccagcacttcaagatatctttgtagctcacttgtttgcgcattgacatctgtgtatagctttctcaaagctgtctctgcaatatatggtgcttttccagacgaagcgagctccttaaattcatccttgttcaaaagccacaaataaaatttgcggatctcctgcagcaattcagtatatccccatgcctcaatcattgatgcgcatatcgcctcagtgcgatgcataagctctttgctcctgtcccactctaggatagagacaattctctcaggctcaagttttggaatataaattccatcaactaatatggctttgtgggacatgaaccacaattcctcccttttctttgtccgttcctcaaagttgtaattgagaccaagttcagcaaatgaagtgctaagagtgtcataaagccatgtgtccttatcactaactgcaagaatgatgtcatcgccattggcgaaaaacactaatctttcctgaatgtcctcctctgaccacccttgtttacaacaagaatagtacatggcaatgactaccatcaaggtattgtccacaactgtagatggttgcccactgttgtttcctctgaacttcttaaaaattgtgccatcaggtgctagaattggtgtgtagactatttcagcatagaggttctctagcatttctcttccaacccaccagtcttccatgaaaaagctcctaacatcaagaactgcattcagtagtaagggcgtcagggagctatcaaactgtgagccatctgcatgacagtacacccatccatcgggtaaacttctcatcaacttatcccaacctctataaaatttggtcatcccaactgtccatggacatgtaagattgaggctgtaaaattggttgttgaaatcatcaacacaaacttttgctccaagtagtgtgtcaattggtgctgctgtgaatgttctagttttgtttgcttgcactttttcaattggcctcaactctgctttcagggatccattccacactcctttttctccatagaacaacctttcacaactgagataaagcaagcgttccttgtcgaaactgtccattccagagaaataatcttgcttcttccctttgtattgtgcgccaactgcagctttcatattcaaggagtcgtatatttcatcaggatcagtcacatacacacactccttgaaatcaaattccatcatcatcaatttcactccagccactgccctctcaaaagattggaaatcaacttcattcagaacaactggtttgttatatttgaagaaatctcttttgaatgcatctttgttcaatcggcttggttgatacgcacccataagtggttcgaagaaggactttgcttcttgattcactgaaagatattgtgcgaaataggggcactttcctttaacaacatgctttgttaccagtgcactgtcggcttgcccacaagccgctaagttaccttccattgcatccaaaacccatctttcctttctcccttgaactgtcactgtgtttccaaagagatccgacacaagctttgatattttgaattcctcttttggttgttcctcgactaaattcaaagagccccatgctatcttgcttggttcccagaaccaatgcttatcccatgacaagttatcagcattctccagatattccttctcgaacccatcagtgagtgggacgaagaagttcttctctgaatcattagatgttaatccatgtattccaacaatgtgcccatcattaacagaaacaagaggcaacccacaaaaaccatcttgggttgtgatccaatgtatccagaaagaacctttcccctctggcaatatcatggaagattccgaaactgttgcgcgcaagctcttctcttggaagtttgtcccaaccatacaaacccgttcctcacgctttggttgtctaaagaggttgcgctttccaaaaggaggaaagtcctttggcatgcgaatcaaaatcacatccttcccttgaataaaatgtatcttgagctgcgtggtgttgtgtatcacaaactcaccatgccatgtcttaactgtaagcattccattgttccttctaaacaagtgtccatttgtgataatgaaagaaccatagccaaccccaaacattgtttctttgtgcccatctgatgaatttgtaagttgacatattagtgtggaaatgccactataatctctgagtcctttgtaaacagatttgctttccatttcaaccctttctttggcacgtgggacgtctgacttggaaactacttgtggcaatcctgtctgacgcaattcatcctccctctcaggaaaacccgctatagcattgctgttttgacagagaagtgtgggtctgtgcggtgtgaggtcaaccttgagtgcttcctctgtattcttcccaatgaaataagcttgtagaccaggattgtggtagactctttgccgatccaattcaccctccccaatcatgtctttccttatctcctcaaactcttgttgaaccattctaatatcaactctggggtgttcatccattgtatgtccagttagcgggtctacaaatctaatcatgctgtaattctctggctcaactccatatagatgtatgaagttcctcgacttgcgacccattccttttgtacgggtgctacccttctgctttcctttcttggtatatgcctccccaaaggtgtgttccatggtgtagtcatctgcatacacctcacggcctatttttctgtcaaaggcatctctaaatttgagtttttgtatctgcctcttctttccttgagttgatactggttcacgc

SEQ ID NO: 61293 - DNA, 113 bp, Glycine max
  Clone ID: PAT_MRT3847_26360C.1
tgatacgcactcaccatctccgcatatattttgggcccaccaaagaaaaactccaacaggccgctcccacttgtggttgagaaccaacttatactggtatgtttaccgaaaag

SEQ ID NO: 61294 - DNA, 239 bp, Glycine max
  Clone ID: PAT_MRT3847_26361C.1
ccactcatcctacgcttccaaaagcacaccgaatgggtattcaattccaatacattccattctggctcgatatttccctacctctgccggcaacatacacatcttcgtcaagaccctcacctgcaataccatcacccttaatgtgtaaatctctcacaccatcaacaacttctaagccaaaatccattacaatgaatcaattcctccttaccatctacattatcattttctccttaaaa

SEQ ID NO: 61295 - DNA, 279 bp, Glycine max
  unsure (1)..(279): unsure at all n locations
  Clone ID: PAT_MRT3847_26362C.1
tttttgatttgcctaattacaacgttacattacgaatgttnngnaatgtacgggtcccacattttacgttaaggttgccctttcctagctggcacaacgcaacacgatctttttttacacccnctcaacttcactacaattcacactcatagtcatgactcccccaccttcaccactttttataactcctctttgccttacattcttaccaacaccactattttcaactactacttctttcccttatgacgacaccacattcattaccatattccacat

SEQ ID NO: 61296 - DNA, 2732 bp, Glycine max
  Clone ID: PAT_MRT3847_26363C.1
tatgggtaccatatttttcaatgaacctgaagaatcacttttcgtttagagcactatttcagcaagagctgcggggttccatgagcaaggcacttcttttttcacactttcagaaagggttatgttggttctatctaattcaacattatataatgttatgaaccatccatcataggcaaggtttttagtagaagctgcgtctgtaggccaacattttttcatgttgaacatgatattgaattggccagatggaatctttccggacaaggatatctgtttgttgaaatgctcagacatctgatgtgctccctttaaaagggagcacatcagagtgaaacctggttcgttcacccttgtcacacttgatggagttgggaacattcttgacaacaaccccaccgggaaaaacaaggtctctactttgtgttttctcaatctcgatcaacctgtttttacaagccgagacccttatatcgctgcaaaggtcatacccttgaccaatcacatccgcagctctctctgcagccatctgggaatccaaccccgcaatgctcacattcatcatccccattaattattcttccttcctcacaaagagtgagagagacatagttggatcattggttcatcgctctttgtgaggaaggaagaataattaatggggatgatgaatgtgagcattgcggggttggattcccagatggctgcagagagagctgtggatgtgattggtcaagggtatgacctttgcagcgatataaggttctcggcttgtaaaaacaggttgatcgagattgagaaaacacaaagtagagaccttgtttttcccggtggggttgttgtcaagaatgttcccaactccatcaagtgtgacaagggtgaacgaaccaggtttcactctgatgtgctcccttttaatcagatgtctgagcatttcaacaaacagatatccttgtccggaaagattccatctggccaattcaatatcatgttcaacatgaaaaaatgttggcctacagacgcagcttctactaaaaaccttgcctatgatggatggttcataacattatataatgttgaattagatagaaccaacataaccctttctgaaagtgtgaaaaagaatgtgcttaatcatggaaccccgcaacttttggtgagttcattgaaaaatttggtcccaaattaatagtggggtgccaatgggagggaaggatgtggttcatatcaagcagacaaaaaattcagatttacagcaggccgaactgcagaaattgctaaagcaattagctgatgagaggttttctgaggcttcaaatcatagttccaatgtcgatcctgctgacaaatcaagaaaaataaaggataattgtgctaagatgtgggggttcaaaccggttcctgctcctggcaggccagttgtaacaagtcactccaagaatgatgatattgtgagcatttctgttcgaagagggggtattgataatggtcaatcttacagccagtggctttcaaccatatcacagtctcctagtgtcatatcaatgtcttttgtgcctatcacttccctgctgaattcggttccaggcaatggatttctaagtcacgcagtgaatttgtatcttagatataaacctgcaatagaagagcttcatcaatttctagaatttcaattgccccggcaatgggccccaatgtatgatgatctgcctctcggattcggccataagtataagaagagcatgtccccatcacttcagttcactctcatgggacccaagctttatgttaacaccgtgaaggttgactctggaaaccgacctgtgactggaattcgcttatacttggaaggcaagaaaagtgaccacttggcaatccatctgcagcatctttcagaagttcctggagcccttgaaatttcagaagatcatggttatgatcccgttgatgaaccagaagaacgaggctactatgagcctgtgaaatggagcatgttttcccatgtctacacagcacctgtgcagtacagtagctccagaatggacgagtccacggccattgtgacaaaagcctggtttgaggtgaagctagttggcatgaagaaagtccttttcttgagacttggattctccacggtagcatctgccacaattcgcagatcagaatgggatggaccttcaaccacgtcacgaaagtcgggattcttctcagctttgatgagtactaggctcagcaaggaattgcagtcaccagatcagaagccaaataaggtggatataaactcggcaatttataatgttggaccacctgtgccaacaagagttccaaaaatgcttagttttgtggacacaaaggaaatggttaggggtcctgaggatacaccagggtattgggtggtgactggggcaaagctgtgtgtagagggtggtagaatctcaatcaaggcaaagtattccttgttgactatattgtcggaagaatgtttgctgtagtgagaagtcgtagcaagttagttaatactgttattattttgttgtaaatatcttgtaccaatataccatttatttatttattttttaaaaaaaaaagttataggggggagtgtcgtctcgtgctaagtggcctgagtatggcaatttcatttgcttgttggtagattatggttttgatttatttttggcaaaactgccttcaatgatgttgataaataatagtatttggaatttggagtc

SEQ ID NO: 61297 - DNA, 121 bp, Glycine max
  Clone ID: PAT_MRT3847_26364C.1
acaagcaacccgagagtttgtatatatatcataatggagtcttggaaatcaaaattgtgcaaaaacctggtcaggctgaccactaactgttaataccgaactcatgtgtagaataagctcc

SEQ ID NO: 61298 - DNA, 398 bp, Glycine max
  unsure (1)..(398): unsure at all n locations
  Clone ID: PAT_MRT3847_26365C.1
ggaagagtgaaacataggtgtagtagaggtttgttgtgtttggtggagaagaataagcacataagtgctttagggaagagttctgggacaagtgaggataaggatgattcagatgaagtgcttcaagccacaattgagaagagtaagaaggttcttgctttgcaaagggaattgcttcaacagatttctgaaagaaagaaactggtttcttcaataaatagtgaaaccacccctgaaataagagacagtatttcttatgagcacagtgacaaatccctgtcaagtgactcaaatccacagaaaggttctgccagaagangcagtgcttttgagaacgaaaatggtggtgttgtttcaagcaattatgtcgaatctattgagaaaggaaatacagatgt

SEQ ID NO: 61299 - DNA, 364 bp, Glycine max
  Clone ID: PAT_MRT3847_26366C.1
ttctagggattcgctgcacaagatgcttgccactggtggcaagatgaaggcttggagaaagaagataaagtatgatcttgggcgtcaggccgcaaacaccaagttgtctatcaacaaagctttctcgaggatacctgttcgaggtggcaatgttaaatggatggcattgaggttgtgatcctgcacttactctctgggtattgaaacagattctcgcaagactcgtattctagatgttgtctacaatgctctaaacagtgagtttgtgcgaactcagaccttgttcaataatgctattcgttaggttgatgctgctccttttacgctgtggtaccttcatcactatggtgttgagattgctaga

SEQ ID NO: 61300 - DNA, 311 bp, Glycine max
  Clone ID: PAT_MRT3847_26367C.1
ccacgcgtccgatggatacttggtaggggtgggaaagcgggccgacctgccccacgtaaggttcgtcttcataagcccgcattggcagcggaccgggccaacccaccccgcattcttacacggaccaaataaattggttggcccccgccccgcgaaccttgcgggtcaaatgggccagtctgtgggtctagttttaaaagaattttaatttcaataaaaatacaacacaatcaaattaagttcaatacaaatgtaaataaaaaatcttaacaattagtcaattacatcaataaaataaataatgtcttaac

SEQ ID NO: 61301 - DNA, 700 bp, Glycine max
  Clone ID: PAT_MRT3847_26368C.1
ctttcacttcaccaccaccttctcctttctccttcttcctcctcctttctgcttcttcattctctccttccctcttgagcttttctttttagcacggaacatgtgagtgccacaaagggtttgagactttttgaggctttctctcactctaataagtcctaacctcattcacctcttgggtggtgtggtctataatgtaatttatcatttgtgcaaattttttctcagatctatccaacttctcttttttgtccttttattctgtttggaaatcgtcatcatcaccatttgatttgcagggccataatttttctgctttggttttcaactcttccacaccattttccattttttcttcttcttcttctctggtttttttttttcctgtgaaaaaaaaattgagttctttttggctaagcctccaagcagatccaactagggaaatgtaaaattttcaattttttttatcagtatcctctttccagaccttcccctcatgttctagatttgaagatcttgtcattgcctcactcttgtttgtgccaagatctgttctgttccgttccccccctttttctttttttagatcttggtcttctccatgatgtagtagaacttcaaatttgaaagctttacctttctgagattgctttttttttttttctatccccttccccttttggagtatgaaaattttcct

SEQ ID NO: 61302 - DNA, 1080 bp, Glycine max
  unsure (1)..(1080): unsure at all n locations
  Clone ID: PAT_MRT3847_26369C.1
gctacctgaaggtctggaattaggtcgacatgtcccggacgatgttgacgagggcgaaaaaaatcctctctggagtcgaattctaaagctaatcttgaagactttgaagaaggtaactcaaaatctggaattaggtcagcgttctgccgaagaagttgatgactgcgacgtgaaaggggatcaagaaaacctctgaactctcacgtcactgttaactcacaacaccattccaacagttgatgtttgatatagaagtgcacctaaacacatggggacaagcagttttctatggaactgtactaaaaaattcatcacagccgggatcgtcactgtgactgtgactgatcattttgtgacagttattccagttcgaggcggatctatgtctcccacatttaatcctaaagctggttctcatatgggagatgtttttgatgactatgttttggttgagaaattttgccttaggaattacaagttttcacatggcgatgtggtggtctttcgctaccctctaaatcataagaagacacagggttggaggagacaacacagcttctagcctggattcaaattcatttggaccaattcctttgggcataattcggggaagggttacccatgttgtgtggcctcctcaaagaataggagctgtcaagaatactccaccacagttggatcgactacaggaataacgctatattgtcttttttgtatagttggatcccaactctattgtttggcctcctcaaataataggtgtgaaagaactacttcagaagtgttatcttctgatatctgacgttgtttccttggatggggaaaaccattctttattttatttttctcagtggaaaggattgttacttaccctcgtgacctgttcgctcattggattgttagtgtaaaccctgaatccctcaaatgctggttacattttaagcgagcctaacctaatactctntactttaagaattaaatttgcatttatatgccatattttcctttttatatgatgtctggaagataatttagctggtggctgtagaagcctgtgaactagcatgtctttggataata

SEQ ID NO: 61303 - DNA, 308 bp, Glycine max
  Clone ID: PAT_MRT3847_2636C.1
ccgagggttgaattggactttcccaaaatttaagataaaataaggttggagtggcaacaccattacaaccgggaaaaataaagaccagccaccaacttaaacaagtttacttataaaagttttccacatttttgaagggggccaccttgggtagcaacttttttgtcctaaggccgttctcaaatagtcaaataaaaagactagggttcggcttatttatttctttttgaaaaggaagtgtgcaaccattcattttttaccgtttttgtattcaaaaagttcttcttcagcttttaaaaatgtttttc

SEQ ID NO: 61304 - DNA, 465 bp, Glycine max
  Clone ID: PAT_MRT3847_26370C.1
cgaagctcgaattcggctgcggatttccattattttttgtctcattgcccccaaatatcaccgtttctctcaagctctctcaatcttttctcaatttgagtggctgcaaaaccccacgtgttacctccttcacttttttggctgcccccactttttttgttcacctctttcttcaaccaataatccctttggaggtttagggttttggtcctcgcggctctctcctaattaaaggatatttctttctttttttcaataaccgcccatgtctaagaggtgtcgttgatcatcttttgttttgtattggattattaacattttcttgatgtagtttttctatcttgtgttctgcagtttctccaatttctgttgattattgacttttttatttatatgtttctgttatttattggtcttataatccggctttctttgaaccgagaaaagattggttttggtttccat

SEQ ID NO: 61305 - DNA, 230 bp, Glycine max
  Clone ID: PAT_MRT3847_26371C.1
tgtttcggtttgactttggacccaaaaacaaaagtaaagggtactggatatcgagcacctctcattatcttactacacagtcgagtgcgaggagttaagggaaagaatatcaatctctgtgcaagtcacagactagcaggcacagtttctgtcacattcttatcgaatccgccgaacacctgtactatatgaggtaggacttggagacagactaaaacttcacatgtttc

SEQ ID NO: 61306 - DNA, 308 bp, Glycine max
  Clone ID: PAT_MRT3847_26372C.1
acgagctttcacgtacgctgccctcatccctgagctcggattgcggctcgagcttggagtagagaactgtttgatattgagacttatcgctcgccatagagctctcggccaagctgtctagagttggtgctctgggaggagatacgattcggcggttgagttgctaaactggaatgcgttgtataggttggctgctttgcgtaacattagggcgaagctggtaactttgttttgacctatacacggaattcggggatttgagctttgatgcatttacatagtgatcgtgagacacagaaaaggattta

SEQ ID NO: 61307 - DNA, 342 bp, Glycine max
  Clone ID: PAT_MRT3847_26373C.1
tttttttggaacctaatccaaacaatttaaatcctttatttaccatccccacgtccaagtccctttttagtttggatcaccaccacaaaaggacttccttccaaggcataaaacaatttccttctaatggaagttctgccggcggcctttttattaagcgggatacatgggcaacaaaaacgctattttatataataaagcaaagaacctatgacctatttaacacgtaaccggaccattcttttttttttttttttacacaggtcctgaaattaataattaaatccaccgcatcacaggagtcctaaaagatttgtctgcttatcttgccgagtcactcct

SEQ ID NO: 61308 - DNA, 1328 bp, Glycine max
  Clone ID: PAT_MRT3847_26374C.1
tattagtgccactatacaagactatgactcgctgccgcgtaagctcggaattcggctcgagctgatttgatggaaaacgggagtctttatgatcatttattcggttctgctaagaagaatctcacttggccaattcgtcaaaagattgctctagggaccgctagggggttggcttatttgcactatggagctcaaccttccatcatccatagggatattaaggctagtaacattcttctggaccacaattttgaagccaaggttgcggatttcgggttggcaaagttcaaccctgaggggatgactcacatgagtactagagtggctgggactatgggatatgttgctcctgagtatgctttgtatggacaattgacagagaggagtgatgtgttcagcttcggtgttgtgcttcttgagctcctgagtgggagaaaggcacttcaaaccgatgatgatggccaacccgccgcactcactgactttgcttggtcgttggttaggaatggtagtgctttggatgttgttgaagatggtgttccagaacctggtccaccagaagttcttgagaagtatgtgttggttgctgtgctgtgttctcatcctcagctatatgctaggcctacaatggatcaggttgttaaaatgcttgagactgatgaatctgtgccctcattgatggaaaggccaattccttttattgctgggaggcttgatattgagaaatctgctctgagtaactcgggtcagctatgtagtccaactggttatcaagcatatacattacaagctcgacgaaaatctaatactaaggaggaagaagaagaagaagaaggaagttcggtggctgagactgtgacaacagattgaaattggggaaattgtattgttttcccctggctggtgtaggcatgatttttttatacattcagattttagattgtatcttttttttttttaaaggttgtgttgtaaagggaaaaaaggtatccaaaatttgattctttttagagtttataaagggacatggacaatggcttcctcttgctcttgaacagccctcacagattgaacctcttgtttttctaactaagccaagccacatctggtaccgaaaaccgtttgattttcatcttgtggggtttatactttttctttagagtgattccatgtcattccctcaggatgcatcatttttctgattttaagttagcattttttttttttttctgattcccgcagacagagaaaggaaggtcaatctatatcgttaaatttatttttcgatttcttacaaaattaatgaaatataaaatagcccttggatc

SEQ ID NO: 61309 - DNA, 262 bp, Glycine max
  Clone ID: PAT_MRT3847_26375C.1
gagctccgtgggagccagcgagcctctcgccctgatcttacgtgctcaagaagctgtagtgaagccagagcagcatctgctgaagagacagagaccagccccagaggcgtcacaggaaggcaccaagaaggacataggtctttgatttgattcagcagtcctgtcaagtatacatgtgatggctgtgctgcctggccctctgcagctactgggagtgatgctaccatttccctgagttccatcatgctcagtcaggctgatg

SEQ ID NO: 61310 - DNA, 716 bp, Glycine max
  Clone ID: PAT_MRT3847_26376C.1
gcggccgcgcctgttatgttagggtttaataaccttctgtactcatggggtgtggcatatctcccaatctcaacctcaggaattctcttatcctttcagcttgctttcaccctcattctctcagccatcattgtaaaacaaaaaatcacattttcaaatcttaattctatgatcctcatcaccatgagttccgccattctagcctttaactctagtcacgagaagtcagaagggctaacccaaaaggactacatcatagggttctcttgcaccataggtgcaagcttcttgttttccttgtacttgccactgatggagaggatctacgagagggtttactgctacgaaatggtgatggagatgcagatcataatggagattgcggccacggcgttagtcactggaggcatggtgtacaaaggagggttttctgagatgagggaagaagctgagagggtttttgacaagggatccactttttactggttgacggttgtgtcaagtgtggtgacatggcagtgttgctacatgggaactgcagggttggtctttctcacatcttcagtaactggaggggtttctgctaatgctttgttgtccctgaatgtgtaggcagggcggctttgtgtaccatgatgccttcaatggttttaagattgtggccactgttttgtgcatttggagcttctgctcttatgtctattgcatgtacttta

SEQ ID NO: 61311 - DNA, 495 bp, Glycine max
  Clone ID: PAT_MRT3847_26377C.1
tttttaaatttaatttgctactgctattttgttatttaattcaagactgtgcatcttcttcatatttattttccttcattttattttattttccaacaccatgcacatcatcgccacggcaaacgttcccaaaatcttccccacgctcgcggtggacgtaaccagcaaaagaagcccccaatccaccacgcttcgtaacttagtcacgtcagttttcaaaccactggcagcaaagtacaagggaaggaacaacgtggacacgaagtcctcaatcctcctcgtcattctatttgcaaattcgccacctttcggtatcgttagcccgaaaacaaatcccccgaaaattgaatgtaaccctatcatgtgtgtcactaaccccgataacattactcccgctagagttaaacatatgtagatttcgggtgacacgtcttgttcgtgagaacacttgcgagcaacacggttcatcaccggtcggaccaggatcatcatggc

SEQ ID NO: 61312 - DNA, 292 bp, Glycine max
  unsure (1)..(292): unsure at all n locations
  Clone ID: PAT_MRT3847_26378C.1
ctgacattaagtttagggctgtcagttagatatgtaagtactaaacaaagaacaaataatgaacttatatacctcaattagacactacttttttcctggatgtgacttttggctaacatatccttagcagtgctggttctccacatccacgacataggcaaccgcttgaaaaaggaatatatgnagaagtagacctcagagcattaaatcttatctttgatttaactgaagttaaagaatcagtctttctgtctagagaaaaaagctcaacctttcaatctaccaagatgga

SEQ ID NO: 61313 - DNA, 415 bp, Glycine max
  unsure (1)..(415): unsure at all n locations
  Clone ID: PAT_MRT3847_26379C.1
ttttattcaaacatattttgtttcaaaacaagtatttgacaaaatctaagtttttaaccatctcatacaagacctagataagataaccttcagttttgctatgaagttaaatcttgataatctcaaacatttggaaaaatgtaaactatatttttgtgtgaaaaaaaatagcaaggagatgacacctcaaaatactaggtctaaattggagtattcaaattccaatttataagattagtatacagatctaaattgcaaacaaattttgttatggttatttatacaaaaaaatttgngttatgatttattaacctacggatagaaaaggtgaaagtgtgtcttcgatctctaattatttctgctaacttttgtcgataaattgaatagattttaccattattattatattttcaca

SEQ ID NO: 61314 - DNA, 335 bp, Glycine max
  Clone ID: PAT_MRT3847_2637C.1
aagagttaaccctcaaatggcattggaaaatatcaaattcaacgaagattcaaacttgcccctcaacaacagcaaaacatcaaaatccctcccttcactttgtatgacactttgttccccaaggtcccctccaatgaatggattctcctccaatccctcaatggccaacaatcaaaaacttccttcctccaagccaatgtcaatccaaagcccaaagcctctccctctcaaaacctccaacaataacctcctctcgctggcaacaatccttggccttccgaatccaaaattccaatcatcagttaacaccctggtgatgccgtttccgtcgttgt

SEQ ID NO: 61315 - DNA, 142 bp, Glycine max
  unsure (1)..(142): unsure at all n locations
  Clone ID: PAT_MRT3847_26380C.1
ttccaggcgatggatttcggggccgcgttccagaggggctattggtcccttgggcccaaattcgggcgggagggctttataggacgcgcctcancaggccaggaactagttcaagcttctcttcgtttacttgcattccccc

SEQ ID NO: 61316 - DNA, 165 bp, Glycine max
  Clone ID: PAT_MRT3847_26381C.1
attatgttaaacagaggaaacgggaagatagaaagggataatagggacagaatagaaacaatcggaaacaggaatgtaactatggaagctaaacgtccgggaaattgacatgatactcaaagaaggtattcggagccaaaggcggacaagtgcagcacctgaaag

SEQ ID NO: 61317 - DNA, 282 bp, Glycine max
  Clone ID: PAT_MRT3847_26382C.1
cacgcatcctacaaaatttcttcacactatcatgttttatttatctcccacatactttgtaactacggtttgtttattaaataatcttctctgctcttcatgacctcctttaaatttctcatacacactctcaaaaatacttccacaccatataattaacccttattctttctttgaatctcttctctaaaactttcctacacttaatccaacacctatcacaattaccaggcttcaacacattatctttatctatactaacactgttataaatttatatta

SEQ ID NO: 61318 - DNA, 458 bp, Glycine max
  Clone ID: PAT_MRT3847_26383C.1
ctcacgcgtccgcggacgcgtgggcggacgcgtggggagagagagagagaaacaaaccatctcccatttggatcctgtcttctcttctttgatctctgttaccctttttgctttctcaacagagagagagagagaatctttcgaagttcgtttgtgtgtgttgtgtggtcagacaccgatggcagcaccacctgcgagggctcgtgccgattacgatgaccttaccaagcttcttcttattgtcgatcgcggtgtgggaaagagttgactgatttttgcgattttttgatggtttcttcacatccagttttattaccttcattggcattgattttaaaataagaaaccttgaactttgatggcaaacgcatttagtttccaaatttgggattcacctgtacaggagcgatattctacttttaccactacttattctcgaggagctcagggtttttttg

SEQ ID NO: 61319 - DNA, 372 bp, Glycine max
  Clone ID: PAT_MRT3847_26384C.1
cacaacttaacaagatccattcatttggtgatcactgggcactgttcatggctgaaactgtatgcccaccccacacaaaattcaaacacttggtggattttacaaaacttcgttcccgttcctcctctagttatccccccttcttactcaatttttgttcccaccccttggaactgcgaaagctaaaatttattttaatgttttaaccagcaaccctagaaataagttacaaggttcatgttacatcatcaaagccctgacggcttcaaacgctactcctaacctttaaacatttgaccccctagttcagagcatccaccctttcgggtaaaaaaataacaatcgggttagaacttcaaaccggggacgggc

SEQ ID NO: 61320 - DNA, 397 bp, Glycine max
  Clone ID: PAT_MRT3847_26385C.1
gttcaagatttatgtacagcttcccagatgcatacactaacggatcgggcgaggtcctgcgactgccagatcattgaacgacagggtcactaggcattgcatactgaatgccaagtgctgtactttgagtcttggccatctactgttggagcgaataaaccgcacctgtataatgctggaaccaatgctctgtgcgaacattggagagaccacccaagtaccgagctgtggatacagcagctaccattacttatgctggcttgctaaatagaccaagacttccagaccgagctgtatccgcacagccatcgccgcgcttgcatcgccagagggttgtgaagaatgccttgttactctctgggaggacactaacgtgtgttccattcaggccaggcgt

SEQ ID NO: 61321 - DNA, 999 bp, Glycine max
  Clone ID: PAT_MRT3847_26386C.1
ggttaagttgaagtctccctccataagatttatttaaagaatatacttattgcatatacttatgaagtgtggttctattggtagataacaaaattaaaattgcattaatttgaagttttaataaagaaaagttggaaaatcttactggttaggtaattggatttttagttatctagacaagctaactattgataacacgatcaacaattgtacttactagtgaaatggacctaacctgccctcattttattttgaaatgaatattggcaaaagtatctccgaacttaatgatttggatagaagtatggtacttgatagaacattatggcggaagttgatccatgtagccgaccccacctagtgggataaggcgttgttgttgttgttgttgttgttgctaaagtctcaccggaatggtatggactttcagctgaatgtcatatttctttgattgcttagataaatatttagtatctatgagctaatcttcttagtaatattctactttagtatgcataatttttttctctcagaatgtaattgctttaaatctagttaataatatatttcctgtaaatcactgtttattcttttgttgcaaattttctaattatctcttcaccatatttatgtgataaccactactcttttttcctgaacagctactctggaaacattaatcttcacagagaaagcagaataaagggacacatgtatgttattattggttcatcagttggagcttctgttctacttttggctactattatatcttgcttgtatatgcgtaaagggaagagaagatatcatgagcaaggtagaattctaaacagttatttatcgtgtctgtttgatatttgagatgataaaacatgctttatatgcttacacttttatagatcgcattgattctctccctactcaaaggctggcttcttggaagagcgatgatcctgcaggtcgactctagaggatccccgggtaccgagctcgaattcg

SEQ ID NO: 61322 - DNA, 411 bp, Glycine max
  Clone ID: PAT_MRT3847_26387C.1
caatgcctcctttggctccaagtgaagagcttcaattgggtctcatatacttccttggtccaattcccaaatcacgaatcccactttctctgcaggacttgggagcactagccatcaaggctaatgcagctcttgctgctgcaacacctaattatagctaccctatcttaaaacccaattcacaaaaaaagttccgtacgcaccctactctttctaacgtttctctggtgtattcccattagattttgaagatgggtttaaaggttgaatgtgtgatattttcacccatgttgtaaaagctgtggatgatggtgaagtcaagggatctaactcatttgattgagtaaaatgcatgagtatataaactccctgcactatattcgaattggaccgtttaaaaaaaaaaaggac

SEQ ID NO: 61323 - DNA, 588 bp, Glycine max
  Clone ID: PAT_MRT3847_26388C.1
ttcacgcgtccgctaaaagttaggtttttcccaatattaggcgcaagttggtgttgttgttttgaagggagaagctggcatgagtgagtgagtaggtgacacaacagcaacaagtggatggagctatgcttgcttgggaagttgaaaactttgaacacaacacaagaaccgcttaccagggagacaacccaataccactccactcccccatatacaaataccgctttcttctctctatcttcccttcctgccattaaataaatatatgcaatactctttcatactacacagataaacaagaaccatttattactaacatcatcatcatcagcatcatctttagcccataaaagtaaaaaacaaaacactgggcctggggaccccgctcactctcaagtctcaattagctggatgtgacttgtgtggttagggtttacatgcagaaacgcatgtgcttcgtgtctaattcatcctcagacaaggttttgggacagagatctgaattttatttagtagaaaagaaagtatctatctatctatctatctatctatctagaaaggtttgagaagaaaaaaaatcaagatggc

SEQ ID NO: 61324 - DNA, 246 bp, Glycine max
  Clone ID: PAT_MRT3847_26389C.1
cttttattagttttttatctttcatttatttcctgctttattactttttacccgttttcattcatttagtgcaaattctttaaaagtatcataaaccttagtattctctacggctagaaagagctctttggaatgaactgaaattcattccctataatagtttaaaagcttaccatttacaatacattgactagtttttttattagtaagagaataaggaccaatcatcagctataggaagaggtt

SEQ ID NO: 61325 - DNA, 422 bp, Glycine max
  Clone ID: PAT_MRT3847_2638C.1
gggaaaaaggaaaacaaataaggctgtaaaaaaagaggggccttaattaaccaaatcatccccgccctaggggggggatttttttttggggataggccaaaaaaagggctacctgttaaacaaaacatttttggggggggggttaaaaaaacgggtattttttttttcccccccccggatgttgggagaaaaaggggggggcctcgggttggtttaagggaccctccccctaaaattttggggggaaatctggattacccaaaaaagggcccccttgggcaaccaaatttggagcagcccaggaaaaagctttttttccctttttcctttggggccccccccccccaaaaaaagccccgtttttgaaggccttcctaattggcgttggggccaatttggcccccccaaacttggggaattgg

SEQ ID NO: 61326 - DNA, 206 bp, Glycine max
  Clone ID: PAT_MRT3847_26390C.1
agacatgaaaggccccctttttccaaccatggctggacacagtcaaaaggaagagagagagtgggaggggagggatgacagggagcatgtcaacaatgggcagaaaccagagactattgaccaaaaggaagctgaagcacaagagagaacgaagcaacaactgaaaaaagaaaaaaaggcgagagccaccaaatgggacgaaggga

SEQ ID NO: 61327 - DNA, 497 bp, Glycine max
  unsure (1)..(497): unsure at all n locations
  Clone ID: PAT_MRT3847_26391C.1
aggaatgcggccggcgtgcctttttttttttctttttctacgagagactgcacacaaatcttctactgtgaccatatcaaccatggatccggcggtcatgattaacgcccccgccaactcggtgtactataatctgaacaatgattggaacgtgttctgactcacatcgacgcctacacacgctgggtccttgaggagagggcacactttttcccggcacccacccgacatgccgtaccggggcgctacctgactagcatccgccgcaacaagcgccacctagcctgcgaggaggaggagagaatccactgagggcgctatcaccacctatgccgaggatcatggttgtatgagatggaaaacctttaatacaagggatagtgggactagtgaatgagatagctgtgcaagaaagcctgcaaaactaagcggctatccaccttccgagcctcccctgcatgactacactctctgcggngactagcctaggctatgct

SEQ ID NO: 61328 - DNA, 683 bp, Glycine max
  Clone ID: PAT_MRT3847_26392C.1
ggcttgtgctaatatggagaagattgaaaaatccctctacgacattagtaacagagttgatgaaagagggcaaagctctacttcccacaaaggcctctgcctcaatattaaggtgctcatatcgaacttcaattgttggaatatcaagtccaactctatcaatacgttccttgagcttgagcaggaacctctcattgtcctcttcagctactttgaccaacctctcaagaagtttctgtctctcttgggtgccgagatcagagacatcgatttcattggcgacgccatgggaagctgtgagcaagcctttcctgagacggttgtaggtagggagcttctcaagtgcagcccatttcagagcttcttcgtcatcctcttcgcgtgaagaccttgagaatacctccacaccactgtttctccaaaccgtggaacttcttcgtaaactgttacttgctctgtatatatcacttccctccattcagatccaccttgtttcttgtttcttcttcttcttcttctttggcttatatgttgtgacgaaaccaaacagcacttttcttcttctatgtgctaaagaattaaatgaatgtgtaatgtgtaatgtgtattcggggtttctattgcggtgatggtgccaaataatccccttctgtcgtcttctcgcagccgaacggacgcgtggg

SEQ ID NO: 61329 - DNA, 976 bp, Glycine max
  Clone ID: PAT_MRT3847_26393C.1
aaaaaaaaaggaaaaattactttaataatgatgaagcataaaaagaataaaaaatcatttttaccacttaaaatcaaatagttgagcattgagtacaagattaatatgtatcacagatgaagcttgtcaacaatcgccttcattagcataagcacccaccacctgctaatgactgaggtacaatatagacaacagcaaacctaaccatgccgccaaatcatgaaggagaaaaagaaaaagaaagccaacttttcaactgtaatcaagaacgaacgagagtcgggccacagagctatatgaactagcaaccatagacaattagtggtttctacatactacagatactttcgtgcaagggctcggactttagtatcaaaatgtgatgacgtgatccgggagccaggcaagtacaggggattaaggagagtctttatgtaaagctcatgcacctcttggaagaagctcttaataccatcatcattacgggagtcatgtagcaacataagtcgggtatgaccagctgtaacatacactgacaccacaagttcattaaacctgtctactgatttcaagtacatggcactagtagtccatgcaaggtcctgaacaatatcaagagcagcatgaaggataaattgatgcagttgagcagcatcttcccttttagcagctactccaacttcagcttcatatataggaatgtcatttctgctaacaatgatgaaacaggcagtggttgccattatcaagatcttgagaattccagaagaggaaatcgcgagcttgaaagaaggattgcacgatttgagttgaacaaaccggtgaattgaacgaactactgagtagaagcagagaaatcgattagttaggaattagaattggtcaacaaatgagtcaggaaattgtgcctaattcacgaacgaagcaacgaatgcatgattgttaagccccttattgagtggcgggggctaaaacg

SEQ ID NO: 61330 - DNA, 413 bp, Glycine max
  Clone ID: PAT_MRT3847_26394C.1
agtaaacagacctgttagaaggcgacatggtaaattattggaagagggtgctagtggctttctccaaaaaaagctttgtgatgaaacccaggagccaataaagactgaaactaagggggattgggatttgttcaataaaatagtttctgatgggagtggcattgatgcttcatttggcagtaagcattgggtgtctgtttatttggccagcactccacagcaagctgccttgatgggactcaaatttcctggagttgatgaggtggaggagattgatgatgttgatggcaattctacggatccatttattgcagctgccattgcaaatgaaagagaattagatctttctgatgagcaaaggaggcaatttaaaaaggtcaaagaagaggatgatgcaattgttgataggaaac

SEQ ID NO: 61331 - DNA, 307 bp, Glycine max
  Clone ID: PAT_MRT3847_26395C.1
gcgtttagctcgaagaataaactattgttatagctgtacaggatattatgtgagtccgggattcattggatatagaattaggattgctttgaatacctttaggtgctagtagtaaatggtggtgaccactgttccaaaacctgggaataccgccctcctttcttaattaaaagcatttctccagaggccctatcctgatctggcgctacaagttccctgccttccaaacaggtggtatgagtagcaacgacattcattcaaaatctccagggcgctctgggatgcaactggctaaaccatcaccttg

SEQ ID NO: 61332 - DNA, 306 bp, Glycine max
  Clone ID: PAT_MRT3847_26396C.1
tttaaaaaaatattaaaaaaaaaaaaaaaaaaagaaaaaaaaaaaaatttaagggagcttttcgtggattcctcccaaattcgggcctttttttccgacgttgctgattttgttttcggttggcttggtttattgctttcatgcgtttttccctccttttggagcgtcatatttgcttgttcccccgcgtttagttttatcattggtccgtccatttccaccttgtggccgaaaaggatctgttccctgcggttgttcctaccttgggtgtcatccacttttctgttctctaaaaatttgggttgg

SEQ ID NO: 61333 - DNA, 236 bp, Glycine max
  Clone ID: PAT_MRT3847_26397C.1
gaaagcaacacacccattgttaggaataaggatctgggtatcagtccgtagatattaatttcatggttattatactaagtttgacactacaagatagctgaaatagtgaagttatgctctttgtttaaaaaaaaaaaaaaaaaaaaaaaaaaaaaaaaaaaaaaaaaaaaaaaaaaaaaaaaaaaaaaaaaaaaaaaaaaaaaaaaaaaaaaaaaaaaaaaaaaaaaaaaaaaaaa

SEQ ID NO: 61334 - DNA, 382 bp, Glycine max
  Clone ID: PAT_MRT3847_26398C.1
ttttatgagaacaccaggtgggtattatctggggagggaaataacttggggggaatacattacactaaacactggggagggcacctcttgacttgagcatcacagtatttttataattattacctcccaccgctccaatttaatgcaccatcatatctcgggggagaagattttgaatttttgtagggcgcaatacaaacaaattatttttcacataagttagcatccttccaaaggaatttataatcaaccctgccgattctcatttaatcgatcggacactgcaagaaggggctcttgacaagaacaactacatttttaaatccttaattttcaagttggcctacggaagagaagaccatatatttcaggccttaaattt

SEQ ID NO: 61335 - DNA, 249 bp, Glycine max
  Clone ID: PAT_MRT3847_26399C.1
atggcaggcgcaagtaatgtccaatttgccatggatattgaagaatgggaactcggagattcagagcacaatccaccaccccatttgctggctgaagaatattacaaagaatactttgtcaccttcacaaatcatcaagaaaaggtagatatgactggggaaacgaggaaacgaaaatgcacgaggatggcaatggcacttagggacaaggccaattatgggaacccaaaaatttctggtactggctag

SEQ ID NO: 61336 - DNA, 275 bp, Glycine max
  Clone ID: PAT_MRT3847_2639C.1
gggcccaagattaggccccttaaaactctcaactacttgaccaccatttatttttttttttggcccaggattggacaaattttttgtctaaaggggggtttctgttgttggggcaaccgaaaatttggcttcttgtctacccccattcatttgaaaaaaaaaattcttgataaaaccatcttggacaagttgggcatctaaaacatttgggtgaaaacggcccccttggtttggttccaaacccacaaaccatttttttagaccctttcttcccg

SEQ ID NO: 61337 - DNA, 300 bp, Glycine max
  unsure (1)..(300): unsure at all n locations
  Clone ID: PAT_MRT3847_263C.1
ctcgtaagctctttttcggctccagggctgggggggggggggggggcttnaanattaccgacctggggatgtntcgctctctcttctacgngtgatttcctgcattgttgcccagctggcctacttaaatgcattgcggtttgggttgaagcgtgtcttttttggcggcttttttctctggggtgggtgcgggggccatggctgctnttctcttttgctcttcatttctggtctaatggggctgctcatgctttgttcttgcgtcctgatggctttctcggggccttcggtgcttttttg

SEQ ID NO: 61338 - DNA, 443 bp, Glycine max
  Clone ID: PAT_MRT3847_26400C.1
actcggttcggaataccacggctgcgagccacgcgtcgcgtcgcacgcgtacgatccaaagtatgctctcttcatcattagacaatcactataggagcatggggttgtaagaccatggaattgtggtaacactcggagagggaaatctgattctatgacggatcagagtataactattagttttggaactttgaagagacttgctatagaaactattacttttaagctctttctctgatatgttgacagctactttgactcaatgtaccataatgtcctcaactgaatactgctcactaccatgcactccaaggcacagtatattacggactgaaagtacatatattaatcacctttttgatcagtgacattggaattcggattgactattaaaaggatatattaaaattagatattgccacattggtttatacttcattatg

SEQ ID NO: 61339 - DNA, 688 bp, Glycine max
  Clone ID: PAT_MRT3847_26401C.1
ccacgcgtccggcagaagcaaaggttgaacggtcattgaatagtgctgctgatttttgtgagagtttttgtgaagttttggttttagttttcgcaatttgagggttttggttttaattttctcagtggagatctaggtcttagtgcgatttggacgtcactgcgagaagcacgaggtgagatctggactctgctgcgagaacctcgtccaaacccttcttggcttcttctaatgccgctgctaagtattcatataaataaattagtttactgttctatcttcctacctatcttagttttttacggaaagatgatgaaagcctgtgttgtatatgaggggttgagtttttcttctatttttttgttgtctatgcatttgattgaactctgattctttttttctttttacactaagtctttgcttcttattgcatatatgtgagagtgacttcaaccctttacactacgctctctttagattaggcaatgacaatatacatgattagaataatgttctatgtgttcctctttatttgtgcattgtcattgcattattccatatttattggctaataatccatggactattcctctgctcgacccccattcctagattctggaattggaaagaatagacaaagatatggaagaaaaactgctcaatggaaagtcgtatctggacattgcta

SEQ ID NO: 61340 - DNA, 561 bp, Glycine max
  unsure (1)..(561): unsure at all n locations
  Clone ID: PAT_MRT3847_26402C.1
tatgagactacactgagcatcgtctagctatctcgatcgaactgtccaaggtcctgtcacctacacgcaaaagggtacgggacctgagaaattgtaatagtaggcatagggcatagggcataagcctaagcttgcgggcaggtggtgtactatagaagtcagtgtctgtgcggcaggtcaggcaaagtcaacaacaaccacctaactggtaatttgactcgggttataagtcaggtgcagcagagagggctcgccgcgggcttggaccaggcccctcgggttccgcagatagaatggcatggcagcgccggcagatgaatccgatacgaagaacgtagtctaaccaaggtggggcagcgattgcgagtgcaggtgcaaagacatacaggggctcagcaacgaaacacagtggtgctgcggaggcatcacngtggtgccaattaaaaattggcaaatttggaccgtaaggacaggattcaacagagggcggctagtaaagttgtcccactgcaagtatgatttttccaagcggcgagtacaagacaggggagggatcaacag

SEQ ID NO: 61341 - DNA, 160 bp, Glycine max
  Clone ID: PAT_MRT3847_26403C.1
tttctttttgttggcctacagattgcatgatattagcgtcgtggctgacgaacgcgaatctacttgtactaaatttcctgttcttcctctgctatctgaaacagaagagactaacaaggcttggcgatgccatcgaagctatagcgcgaagcccaacagg

SEQ ID NO: 61342 - DNA, 879 bp, Glycine max
  Clone ID: PAT_MRT3847_26405C.1
attttctttcccaacacacacatcgtctctcactctctctctatccaacaaaacgaacaacataaacatttttttgctaacgcagtgaaactcaaaaacactagctagttaacactctctatggctggtgcccaattcctgaatctcttcaactcctcttcacgatcttccttggtcaagccctctaggccacttctctacaaccccattaagaattatgggcaagcaagcaaaggaaagcatagccgtttgatggaagagagggcaccttccacagctgaagaatttgagagggttgccgaggagaaggccaaggaagctcaaaagggggtggcaagtcagagtcttggcaaggcaattgatggtgcagaagaggcttcaataggtaagtcaaaggttgaatcagttaagaataggtacaaagggcatgaatgaaagcagggtttggttaccacaggagggggtgattattatatatataggaaccttttgtgctagctgacttgaaactgtgacatatatagctgttgtatatgcagccagagaataagggagtgtcttgtatttccaaaaagcttgtttaattgccagtgtttttgaagcagaaagagaccaaacaattgaaaacttttagtctgtttagttaattcgtgtcggctcattggatcttggaaagttctatgtaactaatttggaattctgggtttggggggtgcttaagcttcattattttggttgaatgattgagatatcattaggctttaccaacatggtgtggaatggtcattacttcccttaagattaggggttcaatccctaagtcaagaacatctattgaaagatcaattctttaaataaatttctttattttgaatgatt

SEQ ID NO: 61343 - DNA, 306 bp, Glycine max
  Clone ID: PAT_MRT3847_26406C.1
acgcgcacgcgtacgccttgagggtttttcttctatagagacacacggagagagtgtcacagcaatcaaggcccttgaatggctaccactggggcttacattgcctactattctacgtacggacatgttgagaaaggagctgaagagattaagaaagggagctggttccgatgaacgcgtggaagcagagctatggcatgtacctgaaacactttctgaagacgtgcttgggaagatgggtgcacctgcagagagtgatgcaccgattattacacccaacgagctacctgaggctgatggcttatt

SEQ ID NO: 61344 - DNA, 456 bp, Glycine max
  unsure (1)..(456): unsure at all n locations
  Clone ID: PAT_MRT3847_26407C.1
gaaagcagagaccccggcgggcaccggaccggaacccccgggacgacccacgcgaccgcctcccctcgaacaaaanacangaaaanggaggcaacggagaacagaaacccccggcccccccgccacaagagaagagaganggaacagcaccagcccccncaaaggaagaaaacaccagcccccagcgggcagaaancgaaccaaagaaaaaagaagggcggaccccaagacagaggcgcagccaacgggacacagaggcaccacgnngagagccacccngccccgacacagcgcaaggccccccccaagaaaggccngacaggggcccacaccgggaagcgaaaaacagacccagaagccgccgaaagcgaggacagaaagaacacacacaaagggagagggggancaccccccacagaagcaccaccngacagggccaagagcncancaaaaagg

SEQ ID NO: 61345 - DNA, 250 bp, Glycine max
  Clone ID: PAT_MRT3847_26408C.1
tgcctggtgatgggcccgggccaggaattggctgcgttttaacaaatccgcgaggggcattacctgaacgctgcgattcacgacagcatgaagctgttcccaccgattcaattctattcgaaattcgccactgatgatgacttgttgccatatggcactttctttataaaaggcactatggtaacttaccacccttactctattggccgaatggaaaatattttggggccctattgtcttgacttcatgc

SEQ ID NO: 61346 - DNA, 293 bp, Glycine max
  Clone ID: PAT_MRT3847_26409C.1
caactctactctaactaatttgctatagcaaaatcagcacaatattatggatagtgctctttagacagtctccgaacaaatcaatttccctccactaactcaatcatattaattattccacaatttaattatgcaaatataactactttccgattctttctatttccccaaaacatacttttaaatacattaaattaatacatgaattttcttaacatcatttcttatattagttcattaatttatatagattaacacactcaacaaatctgaattcctactatcatatttaa

SEQ ID NO: 61347 - DNA, 266 bp, Glycine max
  Clone ID: PAT_MRT3847_2640C.1
cactcgcaagcaataagcacgaatcccatgcgaggctctagatggaggtgactgagcaggctgtgtcgatgagagcgaacacgttccccgagagacagccgattgggacggctgcgcagagccaagacgacggcaaggactaccatgagccggcgaccggtgccgctggttgacgcgacggtatttacgtcatggtcgttttacagaacacggatagtagagatcgtggccacttatctgtttctctacatcagcgtctaaaccgt

SEQ ID NO: 61348 - DNA, 244 bp, Glycine max
  Clone ID: PAT_MRT3847_26410C.1
caaagtttatcttggccccgtgtttccccccccctaaattcccccgccaaattcttaaaaccccccccccgcccgtttaaaaaactcgcccgcccacctccgggggtgtactccccaaaaccttctcggggaaaaaaggcctgattccggggtcccaacctgccggatttttccccacccccggatatgggcgctccttcggtgccggggacaaattttcggttctccttcagggggggggggt

SEQ ID NO: 61349 - DNA, 423 bp, Glycine max
  Clone ID: PAT_MRT3847_26411C.1
cttaattccatactgctagtcatttcagatctactaggaatagagattcgcactgttgaaattactagaaatccatggctgctccacaggcaagagctcgagcggattacgattatctgataaaactttatttgatcgacgatagtgaggtcagaacaagtagccttcttgtacgagtctctgacggttctttcacaactagtagcatcacgactataggcattgattctaagatcagaaccattgagctggatggaaaacggatcaagctacaaatgtgggatactgcatgatcacgagcggttgacagctattacaaccgcttactatcgtgatgctatcggcatattgctagtcgatgacgtttcagacgaatcttgatttaacataatcaggaatcggattcggacattgtggcagctg

SEQ ID NO: 61350 - DNA, 149 bp, Glycine max
  Clone ID: PAT_MRT3847_26412C.1
ggctcgagctcaaatgcaagccaaaacgaaactttcaatacccaacaaagaccaccccacaagacaggacggcgcataatccagaagcacgccccagcagacacaggcacgaccccgccaacacggctcaacaacagctaggaaggcac

SEQ ID NO: 61351 - DNA, 166 bp, Glycine max
  Clone ID: PAT_MRT3847_26413C.1
tggatttcaaatcgtacagatacacacttgggtgagggaggtctgtaaagaaaattgagttgttcttttacaccgtgtctggtggtgattgtcacggttgtggcaattattgaactgaacatgaacaacaggggtcgaattaacacctatttcgcatttaaattct

SEQ ID NO: 61352 - DNA, 737 bp, Glycine max
  Clone ID: PAT_MRT3847_26414C.1
gaagaaggagtgggagaacagcgaggtggcctcttcggatgaggagaaaactgagaagaagaagaacaagaataagattgaagatggttcgccggagttagacaagtctgagaagaaaaagaaaaagaagaaagacaaagctgctgccgctgctgctgaaattagcaatggaaaggtggatgacagtaatgctgataagagtgaaaagaagaagaataagaaaaagaaaaacaaagatgctaaggaagaatagaggaaggcatatgtttgtgtttgttggttaagtggactcgttatgtattatgcctaattcttgatcatttatagtttcgctttgtttactttgttgtttttttttttttaacattttggtagtttttctgatgcttttttgtctttagtttccccccaacaactatgcttctgaaaacgtgtagcatctttttggcgtttaatagatctcctacaattgacatgtctctagcacctgtaatggcattgcttcatgacatgtctccggccccttgtatttttattgcttcattgtgtttgtctctgctcagatgcgtaacttttccgcttacatatgctgagacgaatttgtttaaaaatgccctgtttctcagctggaacatggcaacagtatggatgagcattttaggttctttttgtaaaacctcttctgtgcttctgctacttcaaagatatttttggaattgggggttgcaatttgtctc

SEQ ID NO: 61353 - DNA, 346 bp, Glycine max
  Clone ID: PAT_MRT3847_26415C.1
cgggagaccctcatcaggtctgactgactatggtcgacatgcccatcacacctactcatgattatgatccgttgactgctcatcgacataaacaggctgctatgcttcatagaaggagcatagctgcacctgaacctgcacatactcgtgggtgctctgacattgtcagacatacatcgaatagatgttgctctactctggacagctgacattacatgggagaatgtgcatgctgatgctacaaggccattgctacaggtcaacattgaatgaccaaccagaaactgcctgattggtgtcgaccatgctgagctatacgcagcatgtgagctcactgtactaggca

SEQ ID NO: 61354 - DNA, 435 bp, Glycine max
  Clone ID: PAT_MRT3847_26416C.1
acggctgcgagaagacgacagaagggttcgccaatgatacatgcgaaataaaagtgattttgccaatggtacaagcgaaacaacccaaggactcgccattgttactgacgaaataggtgcaactatgacataggggtctttagctgaatgtggggttacgtgctagatatagagagtagaagtgataagcaaatagggagcggtactgcacgagtggaacagacgggtctaaaccaaaaattaattaaaatatagaactaagatgattaattaaacttatttataatttatgagaaaatcggactgggtaaaatctcgtgtcatgcacatttttttgaaatatgcatgagtttgtaaaatttgtgaaatataaattttaaaacaattaacgaaaatttttattattgaggatttaaaaaatttttaaaaattaaa

SEQ ID NO: 61355 - DNA, 611 bp, Glycine max
  Clone ID: PAT_MRT3847_26417C.1
ctctacagaacagctcgatgctcataactgttgactagtatcacaggtccatttcaaaactatagcttcttgtctgaaagaaccacattatcagctggacaactaccaatagaaaatggagacttagcaagctgcttggcttgacacaggtcattatccaccaacacaagaaaattttaaggaaaactatttcattccttcataagaacaatgtaaacctttgcgataataacagagatccacactatcatgctacatgactacactttctctgaaaaaaagaaggcatataataatccactcatgtgaataggacttaactgacaacatgaatggactggacattgaatataccattattcaatgctcacctgcatgcatataaggacaacctgatcgaaacacgagagagtcatgtatatgatggcaccttactcaaggtgacttcaaagactagaactagaactcatcaatctacaaataccgatacgacctcttgtgattcgaagactataaaatgacactagaagcattcaacaaaccatggtgagtatgcaaatggaatctcaagacacaacacaagcattagtaccagacctagaccatacaac

SEQ ID NO: 61356 - DNA, 804 bp, Glycine max
  Clone ID: PAT_MRT3847_26418C.1
gctctctttgctttttggaaatttcgtgacatctgttgttctctttagacttcagattattatttatcttcactacctggatgagaacaagtccttgatcctgaagattgttgaaagccagaattctggcaagctgagcgagtgtgcagagaaccaatcaaggctgcagagaaatctcatgtacctagctgcaatagctgattctcaaccccaaccatctccaatgcctggtcagtatccttctagtgggatgatgcagcagggagcacagtacatgcaggctcaacaacaggctcagcagatgacacaacaacaactaatggcagcacgctcatctcttttgtacgcacagcagccgtactcagcacttcaacagcagcaagccatgcacagtgcactggggtcgagttcggggctccacatgctgcaaagtgaaggcagcaatgtgaatgtgggaggagggtttcctgactttgtgcgtggcggcagctccacaggggagggtttgcacagtggtggaaggggtatcattggaagtagcaagcaggaaatggggggttcaagtgaaggccgcggtgaagggggtgaaaacctctacctcaaagttgctgatgatggaaactagctagctagccacccaaaatgaacaagcttttcttagtttaattagttaggaagacatcaagggatagtagcttgctgctgctgcttatatataatgtgtgcttcaacttgaggcaaacgcttgccttgatgtctctacattactattagtaacataaattagcacatcttctacttcct

SEQ ID NO: 61357 - DNA, 1192 bp, Glycine max
  Clone ID: PAT_MRT3847_26419C.1
agtgttgctcttctctctctctttcactttctattcacgctttctaatatcttgtttccgtgtggtagcatcattgcaatagccaagagatagaagggaaaagtgggaacacacagaaagccagagaaccagagagagagagagagagagagagagtgtgcttctctctgcacttgcactattgcaggcctcagctttgtttggttttggattgagaaagttgatatagttagagaaagagaaagtgtacatctttctatcatatagtgtatatatatatatatatattgcgtgtgtgagagatgcagcagcacctgatgcagatgcagcccatgatggcagcctactaccccaacaacgtcaccactgatcacattcagcagtatctggatgagaacaagtccttaattctgaagattgttgaaagccagaattctggcaagctgagcgagtgtgccgagaaccaagcaaggcttcagagaaatctcatgtacttagctgcaatagctgattctcaaccccaaccacccaccatgcctggtcagtaccctccgagtgggatgatgcagcagggagcacactacatgcaggctcaacaacagacacagcagatgtcaccacaacaactaatggcggcacgctcgtcccttttgtacgcacagcagccatactcagcacttcaacagcagcaagccatgcacagtgcactcgggtcgagttcggggctccacatgctgcaaagtgaaggcagcaatgtgaatgtgggatcaggcagtggctctggaggagggtttcctgactttgtgcgcggcgtggcggcagctccacaggggagggtttgcacagtggtggaaggggtatccttggaagtagcaagcaggaaatggggggttcaagttaaggccccggtgaagggggtgaaaacctctacctcaaagttgctgatgatggaaactagctagctagccccccaaaatgaacaagcttttcttagtttaattagttaggaagacatcaagggatagtagcttgctgctgctgcttatatataatgtgtgcttcaacttgaggcaaacgcttgccttgatgtctctacattactattagtaacataaattagcacatcttctacttccttgctcaaaaaaaaaaaaaaaaaaaaaaaaaaaaagcggccgctctagaggatcca

SEQ ID NO: 61358 - DNA, 405 bp, Glycine max
  Clone ID: PAT_MRT3847_2641C.1
cttgtttttttttttttttttttttttttttttttttttttttttttttttttttttttttttttttttgggggacaaaagacacatttttttagggtaataactcgtgccttcaaaagggggtaatcctccaagccccacctttaacattgcaaaggggggctgggtgagttacccctgccttaaaacacattggaaaacattcacacaaaacggaacactggcctactactttcgccacattttttcatcccggattttatcatcaccaacgggttaaccattcacaacggttccacccttggggtgaaggacttgtccctttttgtaagaggagcattggttgggagcaagaaaaaccttggagggggcaaccttaataggtggaccaggtttttttattgg

SEQ ID NO: 61359 - DNA, 289 bp, Glycine max
  Clone ID: PAT_MRT3847_26420C.1
ccaagagcttttggtcttgctctaaaagatgaactctgactttggcccgcttgcgagatctaaggtgttttgtaatgtgtaccagattgcaagaacgagcaaccgttatacttccaggccactatgataactgtactgggacagaaatcaaaccccttctcagatatagctttttaggctgagagatttataacgacaagggccgcacctgtcgccctacttcactaatgcgcagcaaacatgggcgactgaggatctctctgcagcgaggctcatagcacgccgaatg

SEQ ID NO: 61360 - DNA, 2322 bp, Glycine max
  unsure (1)..(2322): unsure at all n locations
  Clone ID: PAT_MRT3847_26421C.1
cccacgcgtccgtacggctgcgagaagacgacagaagggggcgctcatttcagaaacactgagtgtccctactctctaaccttttctctctcactaaccctaatcccaactaattcgaatttcgcttccgtcgtgtctccttccatttcacaaggtcaattcatcttaacccaattcttctctttctttttgttctttttctatgtagtctcttgttatttctgttccttaattccgcgcgtaggtacaacatttcacgccgcttaacgttagggtttcaaatttgacaaatcttgccaattcgtttttttcttttctccctcctttttaaagcaattcgccgattcggttaaagattttcaaaatccaaaatttcatgggaagcaacgataatttcggcgacgggattttcaaaacccgtccccatctggcggacgtcacgaatctcccggccaaaaggtcgttttctttggtttccggcgacggtggggacttgcagttcaccaagaaaattcgcttaggggtggaaaatttagcaaaagggaaaagccaaatgcaattcggagcacatgcctaccttaacaacgaggtcctgttgcaaccaaaagaaaaacacaccattttgttaccgttttcggatgatactttgcactcgtttcaaaatcccagtttgaccgtggagggaatggaggagcagaatccgttggatttggagaattttaaatttgggaaggaaggggacggaattgttgccactgatcgtgcggttgaaagtggtggcaaagatatttgtgacgttgagaatttgggatctcccaagtgtggggcagagcaaatgccaacaatttctgtttctaatgattctaattttctgggattgaaaccgtgctcaagttctgttactgaagctgcggacctcaaatcttgcacttgttccttttgctccaaagctggttatatctggtcggatctccattaccaggatgccaaaggtagattaagtgctataaagaagagtcagaaagaagcaaaaatgatcattcagaagttttctggattagagaatacagtcatgcatgaccagcaccgaagtgaggaatcattgaagttagaattgtcccttgtgcatcagtggaagtctctctttcttcaaatgcagaatatgtatactcaagaaagtagccaacttgaaacaagctttgagacacttaaaaatttgagagagaactgcaaaaccgatcttgagttgaatgacaatagccatcatcaaaatcaatagttgtttcaatctgttttttccctgtaagattgctttgcacatcagttttttgtctctaaatttcaattaacatgcatatgctcgcccacctttaacttcatctgtatattttttgaacttggtgtctatagaatacctgcaagcataaaaaaaaaaaaaccaaaaaaaaaaaaaaaaaaaaaaaaaatgtgtacatttggcacatcgtctgtttccaccgactcttgtatgatttgattgaacttgctttggaggataactattctgcgtttttgggatgtccctgaggggattgaaagatgattatgctacatgctgctcaaagatatttggtccatggttttttcaactcctcaagattggtttcaatgaatgtttggcaacaacganttttaggaccgtccgcaatgatgtgcaactccttagctttaagattggtatgtgaaattaattgtcttagacagtcttaagctgccaaaagcatggaattaaaaatagcgcctagtggatcgccccgccattaaaaatagtcagccttgtggacttcacatttcatgggatgaagacctgtttgtcaatgtcacgggaatttcttgaggtaacgtttatttttttaaggtcatgcatttgtttttgctttagtgtagatatgtcaaagttagtctgatccaattatgttggtccatgatgatagtgagttaatctagtttggcttaaaataaagaggttaaatatgatgggttattagtttccttcaaataaagaggttaaatatgattttggttcttaaaatattgtcccaaaaataattttatctcttttgatctgtgaaattcttaaaaaaaattctttcaagtcttttatttaactttgctaatttttttgttaaaagtttacagcagtaactgtttcagtcgtggattntatattacaaaaattaacagttgcgttaactggccgtttgagttttaattaaattgtctgtaataggtgaatgtagcttacatttaataaaaagattacagtttaataaatgacttaaa

SEQ ID NO: 61361 - DNA, 471 bp, Glycine max
  Clone ID: PAT_MRT3847_26422C.1
tatttgaggggataatgacgggggaaggaaacatcacgttgttgggtggaaagctatgatcatgccctagcatagtggtggtgttggaatgtgtgaccttactattatgaaccaagcgtgcctaatgaaaataggttgggcctttagaatgggtgatggaagtctttgggctgatgtcttgaggggataatatggtcaaaattagttccttagagactctgtagtggttaaatctactgatccccctgtggaaatctattgtgaagttgtgaccaaacattattaatgttgagaggtggattgtcaacaatgggagaagtatcagagcttggtaggataaatgggttaatgatatcactatcctgaaagcttttatgtaggatatgcccccttatatcatggagttttgggtggtagatcttattaatgacgaaggaagttggaattttaatctactaaactttcatctac

SEQ ID NO: 61362 - DNA, 144 bp, Glycine max
  unsure (1)..(144): unsure at all n locations
  Clone ID: PAT_MRT3847_26423C.1
agaaattataatcgcaccttctcacattttctgcttccctctatattatatgaaaccttttaaataaaaagtttacgattcacttctgtataatactcgatcaaatgtgagacttnnatnnatataatgtaaaacattattcat

SEQ ID NO: 61363 - DNA, 344 bp, Glycine max
  Clone ID: PAT_MRT3847_26424C.1
cttccacgggtggcaaaagaccaccgaagggggttcccacccttcttcaacattcacaatctaagccttccaaaacttacttttgggcctacttcctaattggggaagaagggttccaagggaaatggtggattcacttatggtggacttactatggggctttatttggtttcatttaccatggggaagctttaaattttaaccccaaccaccatggccttttaaaaccggacctggtcctttaatggaccttcattggggggggggggccatggggtgaaccctggccatggttcccttaggataacaaccacccttcccttgtggaaccttatttaagggtt

SEQ ID NO: 61364 - DNA, 296 bp, Glycine max
  unsure (1)..(296): unsure at all n locations
  Clone ID: PAT_MRT3847_26425C.1
acgtcgcangcacgcgtacgtaagctcggaattcggctcgagnnagcaggangcatcnccattnncacaatggtnaaangtcgccaaggannacntgtangncnctacgtcangggttnantncnnggatacannaggtccaantcgnatcantacncangcncctcnctnatccagatntngnatnnaaactctnaggttcgangttcngncgaacttgtgaaagcgcagnnnttcacngtcnngcgantggtaaggngncgcaccncgttnggtctcttgggnnnggcnccngg

SEQ ID NO: 61365 - DNA, 413 bp, Glycine max
  Clone ID: PAT_MRT3847_26426C.1
cggccccctttttcttttttttagaggatgctgtctttaataacagtagcatatggctcattggatgacgtgtctccgcgactcaactggctgtccattgctaggtaactgggaaataccaaaggaaacgctcttttcatcaattgcaagccactctaaacattgaaagtgtttgattagctcttctctcaagggacgaaaactcttgccttaagataaaacatggtctttgcgaaccactgaattctgaagatcgaattgattcacatggactgaggattgtccaataggcaggcctcaactggcttgaagagagcatcaaactagactctgccaatgttgaggtcgtctggcttgggctgagcatctcctttgctttgttatttgacagttagcttaccagcagaccctcc

SEQ ID NO: 61366 - DNA, 244 bp, Glycine max
  Clone ID: PAT_MRT3847_26427C.1
agcaattttctcttctatttaactcgcaagaatccacaattgccttgtttttcatttcaaacggggtcgttcatctatatacataaactatctaatatattatataaacccaaactgatgtccataaaacgcatccaggcaaggacctctgacctttttttgatcatttaccccatcaagaaacaccgatttatttccaaatccccttaactaacatgaggacccaattttccatagcattatc

SEQ ID NO: 61367 - DNA, 386 bp, Glycine max
  Clone ID: PAT_MRT3847_26428C.1
tcgcatgcacgcgtacgtaagctcggaattcggctcgagggggctgtgtccctgcaggatggggaggtgattggagtgaacaccatgaaggtgacagctggaatctcctttgccatcccttctgatcgccttagggagttcctgcatcgcggggagaagaaaaattcctgtttggaatcagtgggtcccaacgccgctacattggagtgatgatgctgactctgacccccagcatccttgctgagctacagctccgagagccaatttcctgatgttcagcatggggtcctcaatcataaagatatcctgggcctccctgcacacagggctggcctgcggcctgctgatgtgatcttggccattggggagaaaatgatacaaaatgc

SEQ ID NO: 61368 - DNA, 593 bp, Glycine max
  Clone ID: PAT_MRT3847_26429C.1
tagaaaacagaaagctcgtgtcactgaacgtcaacgcaggcaacgcatcgctgataacctcaaagccttgcatgaattgcttccaaatccagcagagggaagtcaagcttacgtattggacgacataattgactatgtcaaatatttgcagcttcaaataaaggaacaaagtggaagtagattattgcaagcggactcaactgctataccactagtttttcatgagggttacggccattatatcaaccaaaagatgctgaatgaaccccttgaggagataatggggaaactagttgaagatgattcagcagcagctgttcagctactagagagtaagggtcttttcctgctgcctatggcattggttgatgagttgagtgaggctgtgcaaatgtttggtgggagtgcacttgtctgacaaaagctttcttttatttatttcaaattctccattatggatcatttctagacagtggcagtagtatgattattgtttatgtttttgatgttacaacaataacatttatgacttattacaaactatcaaaatctcagctaactcgattccactagttctagtttcgattattagg

SEQ ID NO: 61369 - DNA, 294 bp, Glycine max
  Clone ID: PAT_MRT3847_2642C.1
ccaaagtaaaaaaaaaaaaaatttaagaaggggtttaatgataaaattttccaatgaaatatgtccaccaagttggatgatccccattattaatagttataatttttttaaggggataggttcaatcagttactcctggctttttccttatgctcctgggctattccacgatttttttacaatgacaataaaattattttcataacctatcaaagtcatccaaatttcccatgggaaacttatatacatgcatattcgaataagatccctttttgggccctgaaatccctactt

SEQ ID NO: 61370 - DNA, 1302 bp, Glycine max
  Clone ID: PAT_MRT3847_26430C.1
aaaatatccatttataactcctcagcggtatttcacgttcgtgttcttcgcttagagtttatacacctgtttctttctctgaaatggtgggaaaacgtgagagttcaaaacgctgagtttcgggttccacaacactgggctcaagtgtacttaagtcgtgagttgttcaggtcctcaagatgcttgcactgacagattctcctctacttattgctaaaacatttgaagcaactaaaataccaacaagcacacgaggcactgtggtatgtgctgcaaaaggtccaagaccaagatatccccgagtttggaagacccataaaaaaattgggaccatttccaaggctgccaagcttgttaagtctattaaggaactgtctaatgtcaaagaggaagtttatggagctcttgattcctatgttgcttgggaattagagttccctttaattacagtgaaaaaggcactcaagaccctagaattcgaacaagactggaagcgggtaatacagataacaaaatggatgctaagcaaaggtcaaggaaagacaatgggaagctatttcacattacttaatgctttagtagaggatgaccgtcttgacgaagctgaagagctttggacaaagttattaatgcagtacatggaaagcttgcctcgtagattttttgataaaatgatatctatctaccataagaggggcatgcatgagaagatgtttgagatatttgcagacatggagggagctttgtcttctgggtatgctagacaaatactcgatgataggagatgccttcaaagagcggcgtagggaatacaaatacctgaaaggaaatgcaaaaaaagtcaaagtacaatgggaatccagatacgtcagaggaaagcgtgtaaaagtcaaagtggaagtacagaatagtcaggtcaacacatacatagaaaggcatgggaatgttgaaccaaactcagacttaaacaaggattataagatcgtctgaaaagacttcagagacagttgatcaacaactcagacaggatgcggatgtaatatccatggaacctgaacgaatttcagacataaacaacaattataggtctgaagagacttcagacatgattgatgatcagcaacttggacaggaagcagatgtaatatccatggaacttgaacaaatttcagatgattcatatgccagtattgaacctattttagatgtataatgggagaaagatgatataatatctctatcagatgagtttctgttggcagttattgttaatcatagttggaatcattatttccatgtgcc

SEQ ID NO: 61371 - DNA, 1498 bp, Glycine max
  Clone ID: PAT_MRT3847_26431C.1
ctattttggtgtaaaagccgaattcacactccctagtccctaccacatatctccccacccatgagcaatacgggcaaaatgtataattattgaacagcggaacatacgatgatcacccgccaccatgcctttgtccgctaaaattagttcgctgcaacgacaaatacaaaggttgcgtatcgtgctagtgctactactactacttgctgctactgtcactgcttgctacacctcactcttcagcttcggagattccctcactgataccggcaacttgtacttcatttcccctcgtcagagccccgattgcttgctccctccctacggacaaacccattttcatcgccccaatggacgatgctccgatggacgccttatcctcgatttcctcgccgagtctctggggcttccgtatgtgaaaccgtatctgggtttcaagaacggcgcggtgaaacgcgggaatattgagcagggagtgaattttgcggtggccggagccacggcgctggaccgcggtttctttgaagaaaaggggttcgctgttgatgtgaccgcaaacttttctctgggggttcagttagattggttcaaggaattgctgccttctctctgcaattcttcttcaagctgcaaaaaagttattggcagctccttatttattgtgggagagattggaggcaatgattatggctatcctttgtctgaaacaaccgcatttggagatcttgtgacttacataccccaagtaatatctgtaatcacttcagcaatcagggaattgattgatttaggggctgtaacgtttatggttcctggaagtttaccacttggatgcaatccagcctatttaacaatttttgcgactatagataaagaggagtatgaccaagctggctgtttgaaatggttaaatacgttctatgaataccacaatgagctgctccagattgaaataaatcggcttcgagtgctatatcctcttaccaatatcatttatgcagattatttcaacgctgcattggagttttacaattctccagaacaatttgggtttggtggaaatgttctcaaagtttgttgtggaggtgggggtccttacaattacaatgaaacggccatgtgtggggacgcaggagtggttgcttgtgatgatccttcacaatatgttagctgggatggctatcatttgaccgaggctgcttatagatggatgaccaaaggtttattagatgggccatacacaattcctaaatttaatgtctcgtgtttcataggtgaaaccatcagagattttaataactatgcaatgaaatataaatcaatgtaaaatatccacgtatttgatgaggtttaagtagtactccaataaggtgattttcactgcctcgtgcagttgtatctgtttaatgaatgaataatgcataacgttttttagcagcacctgtatgtaaaatgatgtttaatgaatagtatatgattgcatgctttagcataatta

SEQ ID NO: 61372 - DNA, 837 bp, Glycine max
  unsure (1)..(837): unsure at all n locations
  Clone ID: PAT_MRT3847_26432C.1
cctttcctttttccattaataatctctagaaccatgactccaaaactaaacacatcagatttcacagaaaattgtccatgcattgcatattctggagacatataaccatatgtccctacaattctgcccggacctttctccaatnttgatctgcaacaacaattctcgccatgccaaaatctgagattttgggattcatattactatctagtaaaacattactaggttttaaatcacgatgtattattttgagacaagaatcctcatgtagatatagaattccccgagcaattcctataatgatcttttgacgatcagaccaagatagtaagttttgatgctgcgtacccaataaaaaataatcaaggctcttgtttggcacatactcataaataagtatcttttcgtcatcttctaagcaaaatccttgtaatctcactaaatttctgtgttgaagttttgctataacctgaacctcatttctaaactccactgctccttgcctggagcttccagtgagcctcttcactgctatttcttttccatctgaaagaatacccctataaacctcgccaaatccacctttgcctatcatgttttctttagcaaatctatttgttgcagcttcaattttggctaattcaaatcgcaaagtttccagagtggtactgtcattcccaaagctttctttgagaatatcatgttgattctttgtttcttttctacgtaaaaagcagcagcatctcaacgctagaagcaccagtgaaacaacaattggaactacaatcacaattattggtagggtcttcttttttcttttccctgatgaagaaaatg

SEQ ID NO: 61373 - DNA, 354 bp, Glycine max
  Clone ID: PAT_MRT3847_26433C.1
aaaccaatgtttgggaggcaggataagaaatcatcaatccatggcttaactattttcaaaaaaaataaaaaaacaccggaaaattacagctgctcccgtgtttttgctagtaatagattttacaaacggacgaaggggcatttttttaaaatatgcccaagaaattacaagaagcttttgctttaatgcggaaacatctaagtcaccaaagggaactgaaccattgaggaagggaacaaaaaatttagaataggaaatgttgttcaagtgggtatccactattgaaaaggggggaccacccgttgtgcttcatcttttgttttaggaaaaaagcacggttatagtttttttaaa

SEQ ID NO: 61374 - DNA, 1213 bp, Glycine max
  Clone ID: PAT_MRT3847_26434C.1
gcttgagagaatgaaggtggagaatcataggctgaagaacatgcttgatcaggttaacaacaattacaatgccttgcagacgcatttggtgagtttgatgaaggaccagatggacaaggaggatgataaacaacaaccgcatcaagtgtttgatggaaaactagaagagaagcaagctgggaatggtggtggagccttggtgccaagacagtttatggatcttggattggccactaatgctgacaccaatgaaacttcgcattcccattcttcgtccgtgataagaagtcaggattcaccaccaacaaataatacagaggtggcatccaagaagaatgggggtgctagtgatgaaggactagtgtttgatcaagacaagaaggaatttggtaggggaattgagagagaggatagtccctcggatcaaggggtagctgctaataacaatgttccaaagtttagtcctccaagaaatgttgatcaagctgaggccaccatgaggaaggctagagtttctgttagagctcgatcagaggcacctatgataactgatgggtgtcaatggcgaaagtatgggcagaagatggccaaaggaaacccttgtcctcgtgcatattatagatgtaccatggcagcaggttgcccagtgagcaaacaggtgcaaaggtgtgctgaagacagaacaatactgatcacaacatatgaagggaatcacaaccaccctttgcctccagcagctatggcaatggcacaaaccacttcctcggcagcaagaatgctgctttcaggatcaatgtcaagtgctgatggcctaatgaatgcaagcttcctcacaaggacactcctcccttgctcttctagcatggcaactatctcagcctcagctccattcccaactgttacattggacttgactcagtctccaaatccattgcagttcccaaagcaaccaagccaattccaaatccccttccctggtgtccctcagaactttgccaattcacaagcctcattgctgcctcagatatttggtcaggcactttataaccaatccaagttttctggccttcaaatgtctcaagattcagacccttcccaattgagtaatcaatctcaaaggccaccaccacaccttgctgacacagttagtgctgccattgcagctgatccaaacttcactgcagctttggcagcagccatcacttccattatt

SEQ ID NO: 61375 - DNA, 176 bp, Glycine max
  Clone ID: PAT_MRT3847_26435C.1
aatcctattcctcccggaccctgtatagtatcagtatgaacgcgatatgatgattatcgagagggagagactcctcattgggaggcagatatgagatacttccttctttatctttcttcacagcacctaacaaaatacttgacaaagcatgggcgccgactactacaagatttttc

SEQ ID NO: 61376 - DNA, 519 bp, Glycine max
  unsure (1)..(519): unsure at all n locations
  Clone ID: PAT_MRT3847_26436C.1
ccacgcgtccgtacggctgcgagaagacgacagaagnggatcccgaacatttgaagcatcacactcaatttcaaaagatttttttaaagtttggcaatgcaagtatgggggcattagttagcttttgcttaagaacattgaaagcttcttcttgtttctatcccccatttgaaaccaacatttttcttgagcactggatgtgagaggtgtttccaatgtgctaaaatccttcaaaaatcgtctataaaaacttgctgagccatgaaaactcttcacctcggtcacagacttnagtgtaggccattcttgaatagccctaaccttctcctcatcaacttgcactccttttgaactcacaacaaaaccaagaaacacaacatggttagtacaaaagatgcgtttttcaagattgacatacaattgttcttctctaagcatacacaagacagattttaaatgatcaacatgcaaatcaagtgaagtgatatagataagaatatcatcaaagtacaccacaac

SEQ ID NO: 61377 - DNA, 300 bp, Glycine max
  Clone ID: PAT_MRT3847_26437C.1
accgtttcaacaacactacataaggggacttttattgtttcagaactcaaaacaaatgaagcttctatgttaacactatatgaaatacacacacaaccttcactttacatcatcttctatccaattccaaaataacccatcaaatcaaacttgaatttatatacaccctctacccttgtctatcccacgctaaataccaacttcgatgtttattcatccacaatatctaatcattcttttccatccaatttatcctacttcatctcattctttcatcaccgaattatctaccctaatcta

SEQ ID NO: 61378 - DNA, 439 bp, Glycine max
  unsure (1)..(439): unsure at all n locations
  Clone ID: PAT_MRT3847_26438C.1
tagctatctcgatcgaactgtccaaggtcctgtcacaggcaatctccacagaacaggcagcaaaagcggaaaacacaaagtaggaagtataccgtgtgaacatagttgaataggagtaccgggaaccaccagaggggaatattgatgtagtgccttaggcgaagccaagagctagtgccgccacaatgagggcacaaaagtgctaagctccctcggggaagcacagcacntgtcgggtggtgggtaataatgtagagtcccccgtactgagccctaggtaagccaacacaccgtattcccattgcaacgagccaaaatatcggcggccgagccaacatttcgcgtggtagggcaacagagcgcagggcccagatgttaacgtggattgcatggtaggtataattgaacgtaatgcgccacaatgttattagagaggctg

SEQ ID NO: 61379 - DNA, 498 bp, Glycine max
  Clone ID: PAT_MRT3847_26439C.1
ccaaaacttgaggagttgaacttgtcacgctcaggggttgatgatgaaatgctttctgtgatctcaaagtgttgtcgggggctgctgcatttggacttggaaaattgctctggtgtcacggccaatggagtgaggcaagtggtggggaagtgcacccgattgagagagattaatttggggtcttgtgatgaagtgggggctaatgttgttgcttggatggtgttttcaaggccatccttgagaaggataatggctcccccgagttttgatctcagtgatggccagaaggaactcctcttgcgtcatggatgccttgtttgctagcaaggttttaaaaattggtctggtttcggctgtaacgttggaacttctgatgtattcgcaaccgcatctgcaatttaaaaccttgttttagtatgaggctctgccccccccccctcctccatttgttgtcttagactatttgcttataagattgtccatgattatgtaattgtg

SEQ ID NO: 61380 - DNA, 249 bp, Glycine max
  Clone ID: PAT_MRT3847_2643C.1
tgggaagacgaaaacatgggattgttgatttcaaccatgtcatctacagtggtacatgtaatgtccctagtgttcgtccagtctccaaaatcttcattatggaactacttaccaatgaaatatcttacctctaccatttcattcagcttaatcatcttgatctcagtaagtgaaatgatcaactcgaaggcttgctgtgcaatcaaaccacatctttggcattgagaacattcctgaggagtgcgttca

SEQ ID NO: 61381 - DNA, 184 bp, Glycine max
  Clone ID: PAT_MRT3847_26440C.1
cggatccgggtggcatacaatcatttgagccatgcgtcgcctgctaggaacacccccaatctatcaagggaaaaagggtggatcgatgaaggcagctaatccctttgccactaatgattgtgttaacattaaggccgcttctctatttctagcgaaaaattgttgcaaatccttcaaagtctcg

SEQ ID NO: 61382 - DNA, 189 bp, Glycine max
  Clone ID: PAT_MRT3847_26441C.1
agaagattgtggccttttgtaaacatgctaaaacgccgttggatccaaccacgacagcaccatctggaccacaaaggaacagggcgaacaaaaaccacgggggaaaaaacggcgcccccagcaagggcagaaagatggtgggaaaaaaaaccgcaaccaattgaagagcaaaagaaattggggcaaacg

SEQ ID NO: 61383 - DNA, 329 bp, Glycine max
  Clone ID: PAT_MRT3847_26442C.1
ctttctcaaattttctattttttcgccaaaacaccacaacaaaaagaaggatatttttaaagtttttctcccttgtaccccgtttaacaatttttaaggaaaaatttaactacaagttcaatgccaaaaaaaaaaaattctgacttattccctaaagattattaaagcccactaagacctaaaagtataaatttaggtacttaatttcaatctggttggctcttatataaatacatggaatggtggcaacaaccaaccagggctttaaagaataaaaagtaaaaataataaatttaagggcattttggtccccctctttttacctccaa

SEQ ID NO: 61384 - DNA, 207 bp, Glycine max
  Clone ID: PAT_MRT3847_26443C.1
tacggctgctcggaattcggctggagccgatacaaacacctttatattagcttcggcgaccgattcttcgtcgcatatcctagatctctcccaagggtcactctcgggtcgccgataaaacaggacttctgttcaatataaagactactcatggaagaaactccgtgggaacaaaaacggtaactgtggctactgcagcataatttc

SEQ ID NO: 61385 - DNA, 489 bp, Glycine max
  Clone ID: PAT_MRT3847_26444C.1
cccaatgcaggttgttggagctgttggattccaaaataaacggtttgaaattccagaagatgtcaatccagtagtggcacaaataatacgtgattgctggcaaacgtaagttctatttctctacttgggatttctgattgttattttaatatctagcactctgaatgtcaaatgaagatatgaaatatgtttagtaaccatgttccatctctttatgacattagaatctggactaagattcacaattcttggaaagaggcccttttcaaagtttgctgtctagaaatttgagggcagattgccactgctgtaattatcaaagttttgctatcttcctgcttttttaaagttatgattttgataataatttaatgacaagttaatatgcatcagaataaaccttggtctttaattatatattgatggtttaaataaaattttgttccttggagttttcatccatttgggatttggtcgatatgttcattt

SEQ ID NO: 61386 - DNA, 439 bp, Glycine max
  Clone ID: PAT_MRT3847_26445C.1
ggctcgagccgtattcgtgcagatgtatatactgctagtatttgctaatatctagaatgggtactcttggtgtaacgaaggacacttatgccaagatcctaggatgagggctcactttttactatgtcttggggcacatgctcaatgacataactgctgcttacaggtgcacgctatctaggattgatcgtgacagatgctgaccgctcagctataagagatgatctcgccataactggacaaagagcgatgacctggagtagatgcttagctaaacacctctgatgtagcagggcagtgtaagcaccacttcaagaggccatggagagaatgcatctgctgtgaagctctcatgtcgagtggctgatggagatgccaccatacttgcaggagaactgatcgacatgtgtggacactttaggatatggcatggtgctgg

SEQ ID NO: 61387 - DNA, 294 bp, Glycine max
  Clone ID: PAT_MRT3847_26446C.1
attgtcgtttttccccgcccattaaaatattttttaagcccagccttgggaccttccaagggaggaaccccgatttgttgtgggaggtccccaaagccaaacttgcacccccgggatcaggaggggctcaacctcccattccaattcctaacggtacccctaatccaaatccaaaccctaacccgaacacgcctaaaacccccaaaggatccaaaggaaaatctggtaagggatgcacttcctacccatcgtttaataaggccaagtccaaaaaccccacttgccttggttttt

SEQ ID NO: 61388 - DNA, 251 bp, Glycine max
  Clone ID: PAT_MRT3847_26447C.1
cctcattttcctattcgtttcacaacaacaaccatcaacacggcgggggccacttaccttaatcccgatactcccatatctcccattttctctataaacccgcacaacaatatgcaaaatcaccttcaccatctcactccacctcacgttcttacaaacaaatatatccttctttacaccactacttcgcctactcttcacgccaattccctctacctctatctccagcacccaacccacaaccttaacaa

SEQ ID NO: 61389 - DNA, 274 bp, Glycine max
  unsure (1)..(274): unsure at all n locations
  Clone ID: PAT_MRT3847_26448C.1
gcgcggtcgcgttattgtttcgcttctctgttttttttttttttttttttaaaggaattagagcctttattcaagcaaaanggtaccaatggggggtacgtaaaaggnaaaaggaannnaagattaaacactgcggcaaatgttaaacgtttcgaggattcacaaataacaatcccttggtcggggggccgactaanntcggctaaagacgcctccgctaaatcgcaaaggagtcattcaaattgggccaatcttacaatttaaacgatatgtt

SEQ ID NO: 61390 - DNA, 433 bp, Glycine max
  Clone ID: PAT_MRT3847_26449C.1
aggggggggtttttttccccaaaaaaaagcccttaaaaaggggtgttcataaaaaaaaattttaaagagaattttttggctttttggctctcacaaaaaaaaaaggttgtttttatattaaaagggggtttttttttgccccccatttgggacagcctttgggtggtttcctttaccttttaaaccaaacccgttttaattggcccccccaggaaaatatttgttggaaaaggggggccccttaattttcacagcttttttcctttggccccaattggaataaaaaggccgaaacccgcccccaggggtttgccacttttatataaacaacccgcgttttaataatctgaaaaaggttggttttcatttaaaaagccccccaatataaaagggttttaatgctcttggggaaaaaaaaaggggccggggggga

SEQ ID NO: 61391 - DNA, 412 bp, Glycine max
  Clone ID: PAT_MRT3847_2644C.1
cccacgcgtccgcccacgcgtccgctcactcgtgacctaacaaatttggtgcttctttttctgggcagcctcttcgatcccgctggtgctcacttcgatcccgttggcgctctcttcgattcagtttagcaggttgtgctgaggcttaattgacccttgaagcatatttcggagttttatcagagaacaaatgggatatattggggctcatggtgttgcagctctgcacagatataaatatagtggagtagatcattcctacgtggccaaatatgtactacaacccttttggagtcgctttgttaattttttccccctatggatgccttcatacatgataactcttatgggatttatggtcttactagtgtctgcattgcttggttatatatactccccacaattggacaca

SEQ ID NO: 61392 - DNA, 536 bp, Glycine max
  Clone ID: PAT_MRT3847_26450C.1
ccacgcgtccggaaataaaagaaatctttctggaacacactcacgtgcttgtgttgtcttgtttgattctagggcctgaagtgcaagctagaagaccttctttgctgagtgatagtgaagatcgaatctttttgtaggtttagttttggcccttcctttttgttctgcgtcttggttggtagctgctgctagctaacaagataataaggagtatcaatttctgttttagaattagaaacccagaatcttgtgattcttttattctttaaagggtatttgaatttttcttatctgtctctagtttcagtgttcatttttgcatttatgaaattttaagctattggggtggataagacagcatcttatcaaggtcacatcttctattattatttctatttttattattaagatgtcttttttatttttccttccccttcaacctacttgtttttagtttttgggaattgggtttgtgttattgttgttcttctaaatcttgaatttccttcgatcacaagcctaacatcttttataat

SEQ ID NO: 61393 - DNA, 436 bp, Glycine max
  Clone ID: PAT_MRT3847_26451C.1
ctcagctttcatggagtgtaactggtcatctacttgagtttttgccacccttttgtgccttgcaaatagggttttatgctctaaatttggttgtgatgctttttactttccacccttttcttgtttttttcaaaaggattgttgttttgggctgttttggttttgtgggtcaagctgttgtttcctctgttatgccgtgtgtctgatgaattgatgtataaagtctggtggcctctgatgtgatccccttttgatgtcaaataccagaagagaatgaaactatgattgattgacgttgttttgatttaacaaaagaattagtggaaaatgggaggttgctgttgttctgccagaaaacctcatctgcaaggggcaccagtgtattactattgcccaccaacttttgaagagcgtgagtctttaacatctaatgatg

SEQ ID NO: 61394 - DNA, 174 bp, Glycine max
  Clone ID: PAT_MRT3847_26452C.1
tcaggaattcggcctcgacggcgatcgcggaatgaatcggtattcattaaagggcctccatattcggctacgggattcaccaaacgacttagaagctcgccaaactcgcccaattagcgaaatggactttcggcttttgatgaccctcctatggaaatccaagagcttacgggg

SEQ ID NO: 61395 - DNA, 439 bp, Glycine max
  Clone ID: PAT_MRT3847_26453C.1
gtaccggtccggctgtaatccccgtaatgacccggctcgctaagctcactacgccctggccgtcctttttttttttttttgattagaatgtaatttattttatgatctgagggccataatttttggccgaacaccaccaacacataaaaacgaaaagggtatggtctaattggggggaacggtattacgcagatccttgtaaaaagcataagctccgaccagtttttttgattggcccaatgctttgcccagatttggttccaaataacttactccaacccatttatgcctattctaatattactttacaccaccacgacacaaactaccaacttttattttgttgattaaacctcagatggtgaacaaaaacatcacccttaacaacctcctgacgaaactgctatttataccgaggaccgggttttggtcttactat

SEQ ID NO: 61396 - DNA, 585 bp, Glycine max
  Clone ID: PAT_MRT3847_26454C.1
cccacgcgtccgcccacgcgtccggtaacaacataagatggcagtgttgtctcatgtttgcagttgcatctcacactccactctcttcacttcaactgcaccttcttcatctctatctgtttcaccaaccactttccttcaattgtcttcgttctccaccgagtcaacgtggaacaacattcgtagaacaaacctttgttccaacgttaattctcttcgttattctgggaagacccttttgcggcataggcataaatattacaacccttgttcttcaatggcttcatcgttggatgatagtggtaaacgatccaagagagtttggatatggaccagcaacaagcaggtcatgactgcagcagtagagagaggatggaacactttcgttttcccatcacaccatcgacaacttgctcatgattggtcttccattgcggtaatatgccctctttttgttaatgagggagaggttttggatggacagaataaaagggtagccacaatttttgacgtttcaaccccggaggaactagaggaacttagaccagagaatgagcaggcagagaatattgtagttaatttact

SEQ ID NO: 61397 - DNA, 948 bp, Glycine max
  unsure (1)..(948): unsure at all n locations
  Clone ID: PAT_MRT3847_26455C.1
ccgaaattggattgagtgggaggaaaacagaaaagacagcttgcagaagagcaggtttgcgcgtattcgtgctgtcactcattgcaaacgtcagatcgtgtgtgcctctctgtctgtcttcctctttctctctctctctctcaagtctcaaactaaatttaaactctcatttgaagctaacaaacaacaaagatcaacggatctatctaccttcagtcatggtgtgttctttagtttcaagcctgcgggtttcccctccgcttaggagtcctgcctccattgattcttattatctcactcccaatttcccttctgacaccgttttcgattcataaccaacgcataccggtcggaattttcttcatgctaaaaagggttgttctgtgaatttcgagtttttaaactaagtaatcacaagcaaatgcaaaggaccccggtaccctcccaaagaatgttgtggggcttttaaagaatttgcttgcccttatgccgatgtattaaatgatttaacgaatgagtgtgcatcaaccatgtttagttacattaatctctatggaaaataccctcctggcctcttttctagtgagtgtcgtgaaggaaagtttggtcttgcttgtcctgcagtgccaccatcagcagtatcagcagatgacactgcaaatcaagctgtacactgtccatctctattgttgatgctcatagcctgcttcttaatcttgttattctgatatgtttctatacacaacttcattctttttctctcaatattgatgtataatcagttaccatttttttatatgtggtgtgtgaattactttttgcgcaaaaacaaaaaattggctatgtgcctggtagtttaagaagagttctattgatcaatttatgtaatgaaattacgtttgccaagtgagccttagtaaatggctaacttcttactgcttcnnaana

SEQ ID NO: 61398 - DNA, 890 bp, Glycine max
  Clone ID: PAT_MRT3847_26456C.1
ggcctaacacgtttgcttctctgtctttcttcctctttctctctctctttctaaagtctattactaacttcttaagttcaactctctctactacaacctcgaagcaagaatttccgatatcatcacattgcaaagaaaatacacattacattactaagtctttgttcatttgagtagtagtgatggctagcctcaaggttgcatgtgtggttgctgtgatgtgcatggttgtggtggccatgagtgctgcacccatggcacaggccgcaatcacgtgcgggcaggtcgccggcgacatgtctccgtgcttcagttatcttcgaagcggcggaaaaccgtcgcaggcctgctgcaacggagtgaagtccctcagcagcgcggcgaagaccaccgcggaccgccagggggcgtgcagttgcctgaaaaaccttgccaataatatgggacagagtttgaatgccggcaacgcagcctctctccctggcaaatgtggcgtcaacatcccttacaagatcagcacctccaccaactgcgccaccatcaagttctgaagggcaatttttcagtcgcagaattctatatatgatatagtagtgctgtagaatttaactattgtgtaaaataaagggagggcaatgagggatccaccagtgcgagtctcttcttggtattgccgtgtcccttagttgtttcagactttgatccagttattatgttatttttacgtgttcgctgaaatttgtctcagttggttgtttgcatatgtaataatgacataaatagtactttttgcagttatcctgaaaaatattaaaaaaaaaaaaaaaaaaaagagaaacgaaattttctccgcttgttgttgcatgtaatactatatgtagttctctgct

SEQ ID NO: 61399 - DNA, 1760 bp, Glycine max
  Clone ID: PAT_MRT3847_26457C.1
cacttccaacacttattcaatttttatctttcttttgctctttgcgcattataagcgttctcttgtcattacaacccccccgttactcaaatcagaaactctcatttgaagctaacaaacaacaaagatcaacggatctatctaccttcagtcatggtgttttctttcaaccaacgcttctgggtttcttcttcgcttctcctcctcgcggtcctctctgtttcttctctcactcccactttcctttctgagaccgttttcgattctcaaccagcgcataccggtcggaaccttcttcaggctaaaaagggttgttctgtgaatttcgagtttttaaactacacaccacgcgtccgcaaatgcaaaggaccccggtaccctcccaaagaatgttgtggggcttttaaagaatttgcttgcccttatgccgatgtattaaatgatttaacgaatgagtgtgcatcaaccatgtttagttacattaatctctatggaaaataccctcctggcctcttttctagtgagtgtcgtgaaggaaagtttggtcttgcttgtcctgcagtgccaccatcagcagtatcagcagatgacactgcaaatcaagtgcgggcaggtcggctgaatgggtgactcatcagcacatcactgcgggcaggccgcgtctcagaaccctattccactttactcaacaatcatacattgcgtccaccccgtccgcaagaatttccattgcatgcaaagcaaatacgcattatattactagttttaatttgttttgtcgtttgcttctttctttgattaatgatgactagctttaaggttgcatgtgtggttgcgatgatgtgcatggttgtggccatgagtgttacacccatggcacaggccgcaatcacgtgcgggcaggtcgccggcgacgtgtctccgtgcctcagttatcttcgaagcggcggaaaaccgtcggacgcctgctgcaacggagtgaagtcgctcagcggcgcggcgaagaccaccgccgaccgccaggcagcctgcaattgcctgaaaaaccttgccaataatatgggacagagtttgaatgccggcaacgcagcctctctccctggcaaatgtggcgtcaacatcccttacaagatcagcacctccaccaactgcgccaccatcaagttctgaagggtggatctagtataaggaagaaactgcagggcagtttttcagtcgcaggatactatatatcataatgttgtaaaatttatattaatgaaaataaagagaggacgatgagggctctagtacttaagcgagtcccttagttgtctccacttgttgttgcatgtaatactatatgtagttctctgctactttacttttttgacaattaataatatttacacgtcccttaattatatttatctaaaaaaaaaaaaaaaaaaaaggttctagatcgcgactttaccctgcaaatgctgtacactgtccatctctattgttgatgctcatagcctgctttttaatcttgttattctgatatgtttttatacacaacttcattctttttctctcaatattgagggataatcagttaccatttttttatatgtggtgtgtgaattactttttgcgcaaaaaccatggctatgtgcctggtagtttaaaaagagttttattgatccatttatgtaatgaaattacgtttgccaagtgagccttagtaaatggctaacttctttctgcttcccaaataaagctttacactggtcatt

SEQ ID NO: 61400 - DNA, 182 bp, Glycine max
  Clone ID: PAT_MRT3847_26458C.1
cacagtactgtcatatgcgcttcgcttctcgggagcacttatgcctaatcgcacagtcatcctctacactaggatctgcggtcactctgatcgctacaacctcattgagctctagtccgacgtctctccccgcaacgccgagatcttccgcgcgctttgctctggccaaaagggcgtagggc

SEQ ID NO: 61401 - DNA, 788 bp, Glycine max
  Clone ID: PAT_MRT3847_26459C.1
ttaattataacaaatcttgtcatgtatatcataaaaagttcagaactaaccggaccctcaacgcatagttttggctccaacacaacatctaaatccataaaatacgacatggtctgtacatataacaccacatcagcagagaaggatgcagatttttagaagtgcaagctggcttttgactgatgtcgaattactaaagacattcctacaaccctctaaaaccacacatctaataagccacaaggcaataataatatgctaagttttacagtaagataaataaagaaataaataaaccctactcaacaatagtacaaacccgttatcttcggtgtaacacaatgaaattattctagctccaggagattagtaccagccaacaactaaagttacaaagcacttactgtgcacaccagactgtagaagaatcagattaccataccaaggttatgggtggaggtatgaaggctttttctaagcaaccttacgccgaaaagatctaggtatggtaatctgattcttctacagtctggtgtgcacagtaagtgctttgtaactttagttgttggctggtactaatctcctggagctagaataatttcattgtgttacaccgaagataacgggtttgtactattgttgagtagggtttatttatttctttatttatcttactgtaaaacttagcatattattattgccttgtggcttattagatgtgtggttttagagggttgtaggaatgtctttagtaattcgacatcagtcaaaagccagcttgcacttct

SEQ ID NO: 61402 - DNA, 499 bp, Glycine max
  Clone ID: PAT_MRT3847_2645C.1
aaaaaaaaaaaaaaaaaaaaaaaaaaatttataaaaaaaaaaaaaaaaaaaaaaaaaaaaaaaaaaataaaaaaaaaaaaaaataataaaaaaaaataaataaacataaggggcggccttttttgaggttccaaggttccgtccccttttttgcaccatattttcttttttttggggtcccctaatttaatttttttgtgccgcgttttaaaaccattttaactgggaaacccttgccgttccccaatttaatcaccttggggttctccccctttttccctgttggcttatttccaaatttgcccgccccgttgtcctttccaaaaacttgcccattttaattttcaaatgggaccccccctttatcggcccttaaaccccgccctttttgttggtttccccccccttggccttttctttttccaccccctttccccccccccttttcactttcttaccttctttttttgccagtttttcggttttctttttaaaactt

SEQ ID NO: 61403 - DNA, 347 bp, Glycine max
  Clone ID: PAT_MRT3847_26460C.1
ttttttttttttttttttttttttttttttttgtttttttttttttttttttttttttttttttttttttttttttttaggcattaaaagccctttgaaaattagggaatggggaaaaaatgcccctaaagcttttaaaaaaaagtccaacggggcccccatccaaaaaagggttacttttccaaaacccaaagaaaccccaaaaccttaattttccctttcccttttccccaaaaaaattccataaaatccccccctgttaatttttaaaaaacaaccccctaattgccaaaaatttcccccgaaaaggggtgctcctttccaaaaaataccctgcgcctctgtgg

SEQ ID NO: 61404 - DNA, 249 bp, Glycine max
  Clone ID: PAT_MRT3847_26461C.1
ttgcattcgtggttgctatttttctcaaaaacttgcagatatggccgctgactcaactgttgtggattatggggatgaaaatcttgaaccacctattatatttgcagaagatgctgttgaaagatctagcttttttgaagttcctgcttttcaatatccaaaacatgatggtgatatatctaaattgaatagtttaagcatatcacaatattctttctggtgatatgaaacttgtgagtcaatacttat

SEQ ID NO: 61405 - DNA, 394 bp, Glycine max
  Clone ID: PAT_MRT3847_26462C.1
ggacctttgggctgatttatgtgcttgtggaactagtgcgggatgcgcttcggcctcttccctttagtgagcactccgggcccaaggtgaacataggacttggaattgacaaccgacctgggtatggcgacaatttggcctgcggagtttgcccataatgtggcgagggaggagcctaggaagtaggcgggaggtatcatacctatgagtaccggagttcctgacatgcgccccgcgaaaattcatgaaatctcggtgttgttaaccatgtcgtatcctgaggggccggattcgaaatcgttgccggaaaatagtccgacttatagtagtgtgggcctgtcggtgcgctccgtaacggtggtcgtatttgataacgcgaatctggcgccgaatg

SEQ ID NO: 61406 - DNA, 520 bp, Glycine max
  Clone ID: PAT_MRT3847_26463C.1
cttgttttttttttttttttttttacttggtgcctctgggatctttgttctttctatcattttcttacattcatgggagcatgattctttttaatgaagaaaaaagatgcacaccccctccctgtctggtgctcaactggtgataaactaaagaaaaaaccggggggggggaaactggctttattttaaaaaaagaggcccgcccctccatttataaaggggtccgccatggaacggggggaaaccaaatgggaggttttttggtcccccttaagcagaggggaaaaaccaaagcccggtgtttgggttttggccccctggtcaaaggggacattaaacccctccttgggaggggggggcgtacatgtgggggcccaaagggggcggaaaggcgggaccacttttttagattgaagccccaaacaacagggggttggggcccctaaacgagaaacaagaggggcaacccgggagggggggtgttcgcctttcaaaacttttttaaaaaaacctgccccca

SEQ ID NO: 61407 - DNA, 165 bp, Glycine max
  Clone ID: PAT_MRT3847_26464C.1
gtttctgagaggcttaacagacctggcagcatcagaatgaagctgactctgacacactttgaggggcgaaaacgctttacttctctatggattctccggtggcttatacgatattagcgtaccctttcattgcatgctatgtaaagataatacctatattactac

SEQ ID NO: 61408 - DNA, 334 bp, Glycine max
  Clone ID: PAT_MRT3847_26465C.1
acgaggtgcatggaaggcattatcttctggttgttacatttgattcatcattctttgaagtttgaaccctttataaattaaaatatattccatagacagttggcagagatattataactcaataatatataatataatagtactagtaattttgaactgcaagaccagtctcagtgtgtgacatcgaagttgatggtcaggtatggaatctgtacccataaaataaattaaaatttaatggccattattaatgtgctttataagaagtatgtttttggttgtgtgaacttgttgcttctgtcacttgatgggaattatgtgtgaatggctgaaa

SEQ ID NO: 61409 - DNA, 251 bp, Glycine max
  unsure (1)..(251): unsure at all n locations
  Clone ID: PAT_MRT3847_26466C.1
aaattgtctactaacgctatgggatgcatatgatggatatctgtgaaggaaaacccatcttcttttccctagggtggtctgatgacatggacaccctcctatcggatcggctgcccattatccgtgtgatgggcaaaaaatctacccaggggggctgtcggancgcgcaaccatgctcctctcgtcgatcgatctcccactacctggccttctactactcacagggctcccaccctgagtgtctcttagtc

SEQ ID NO: 61410 - DNA, 277 bp, Glycine max
  Clone ID: PAT_MRT3847_26467C.1
tttgctgaaacacccaccgcgttagtcaataacatgtttgctcgtccggttcaattcgcgggttctctcttcttcttcctcttctgctcgaccctcatatctcttttcgccggaatcctctgctcttctctcgcatctaaaccttccaactcttctacgacgtcgtcttgttcttaccctctgctgctgcttcttcatcttcttctccttcttctccgtttcggcttcgccttcccaagccttccaccgtgttctctgcttcttcttctgcttcgtc

SEQ ID NO: 61411 - DNA, 420 bp, Glycine max
  unsure (1)..(420): unsure at all n locations
  Clone ID: PAT_MRT3847_26468C.1
agatgtgtnnntntgncngngntgacgttnaagtgtcgttgnaanagcnnggnggtgtaggngtgntggttntgttgnttgtgtgnntnnnnngtntanagtgtggttgtgtnngcgtncgnggatgantgnttgtncgntgtngntgncnttgngagtttntgtgangagttgtagtngcntgacgtnnnngngnnnagagttgttcgtgannacggtgtgngccncgtntngntgtgggcngctgggtgncttntgatcttnncnggnggtnntntgngggcnntttgggnggttcttgntngttcgngttgtcnnngatggtggtttnnattgtttntggngntntatgnntttngtgngnnttntangtctanggtngntttgnagtntggggtgttgnatttgttttgtnggtgt

SEQ ID NO: 61412 - DNA, 195 bp, Glycine max
  Clone ID: PAT_MRT3847_26469C.1
aaaacccggcccgaccgacgcgtccgaggagcaggaactcacttttttcgcagctgtcttttgggggctttcattttcttggggtggcaagatgtaccccttggaggaaaaaattccccagggttagggtgctgtgcccactggatttgggggatcaggtggaccggccttggttggtcttaaaaatccccacca

SEQ ID NO: 61413 - DNA, 197 bp, Glycine max
  Clone ID: PAT_MRT3847_2646C.1
acgcgcacgcgtacgcgggcgacaaggctggcgctcacagtatatatcgtgccaacgtctgcggcaggacacctccgcggctggcgacgtgacagcctctcacctcgtacgatggatgacgtcccaaagacgactacgagcagagccacatctgcttcggcggacaagatcgaacgttgcaagggctcgtccagtac

SEQ ID NO: 61414 - DNA, 314 bp, Glycine max
  Clone ID: PAT_MRT3847_26470C.1
ggaaaggggcaaaggggaaaaaaccctttggggggaaacccaggtcccccaaaaggggcagggccaccccacaaagggggcgcgggtaacctttcccccaaaaaaaaaaaggggcccaaaaaaaaaccccctttggggaaaggggccccctggtttttttaacaaaccgaccttaaagggccggaaaagggccaaaaaggaaacccaggcccggcttcccccacctttgtttaacccaaaaaaaaaagggggggccccccccctaacccaaacaatggaaaggcgcctttgaaaacgacccaggggcccctttt

SEQ ID NO: 61415 - DNA, 307 bp, Glycine max
  Clone ID: PAT_MRT3847_26471C.1
ttgggaaaaaaaggatgaaaatattcaatttcaccaatacctcccaaagggtgtgtcttactatggcatgttgaggaacagcaagtattgcctatgccctactgggtatgaggtggcaagccctacagtggtggaggcaattaacacagggagtgttcctgtactcatatatgatcactatgtccctcctttcagtgatgttttcaattatatatgtcctccagtaacggttctactacagaaaataccaactggaaagacattattagtgactatttctctaggtcgtttattacatgtgcaaact

SEQ ID NO: 61416 - DNA, 846 bp, Glycine max
  Clone ID: PAT_MRT3847_26472C.1
gctgcgagaagacgacagaaggggggaaggaacgcactcacgagcaagggaagcgactagtgagcgagtagagtttctgcttctactttacaagattacaatttacaagttacatttcagcaagtcaaaatttcctccagaaagttgctcgtgtaatggatataatctctcagttacaagaacaagttaatttgattgcacatttggcttttaatacagttgggacattgcaaagggatgcccctcctaatcggctgtcgccaaattatcctgaaccacctgcgcatgctacagaggatgggtcaaatttttcagaacagccaaagctgatgagtactactttggtgaaggctgctaagcagtttgatgcattggttgcggcgcttccaatatccgagtcaggtgaagaagcacagcttaagaggatttcagaactacaagctgaaaatgatgcaataggcctagaacttcagaaacagttggaagctgcagagaaggaattgaatcaggttcaggagctgtttaggcaagcatcagataattgtttgaacttgaagaaaccagatgacagttagctatttgtgttccaggaaagctcagatgaattttgccacatgtatctcaacttgacaaaaagcagggacagctgcaggaggattttccttttctccttttaagtcttgattacctgaaatagttgtattctttcgtatgttgtgacttttgcctgacacgtgatgttttgcagaaattgatcatcagttgagatactggtaattatctttctttgctcccgagggaaaggcatatcggtgtttatattaaccatcttccttcacgcagtcc

SEQ ID NO: 61417 - DNA, 236 bp, Glycine max
  Clone ID: PAT_MRT3847_26473C.1
cccttttcttttgttttctctcttactactacttaccgccgaatgagtaatgagtcactactactacgtaacattagttgagttgaggataaggttgcagatccttgaggtaccttcaagccaatcgtgcatcaccacctctcccggatcagaatgcagcctttcagaacttttcaaagatattgaaaaaacaaaaacccatttaagttagttttcttttctgcatacatagcata

SEQ ID NO: 61418 - DNA, 441 bp, Glycine max
  Clone ID: PAT_MRT3847_26474C.1
ccaaaaaaaaaaccccccccccccaaaaaaaaaaaaagggccccccgccccccccaatcaagaaaaaaccccactgctgaaaggggggccggagagcaaacaaaaaggatcgtttggggagccaaaccccattttgtggccccaaaaaaccacgctgggtcgggggaaaccgcacaaagccccaattgtcggtggcaaaaaaaaaaagaaccggggggagcacacggggtcccaaatggtattcccaaaacccggggaaaccgcggaaaaagaaaaaaatttcttccccctcaaaaaccccaaaggggcccacagaagttttccaaaaaaccattgccacctcttgccctaaggaaagacaaaaattctccccccccccaaaaaaaaccaccggggtgggggaatccccaccggccccccctggccaacaaaaagccaatg

SEQ ID NO: 61419 - DNA, 451 bp, Glycine max
  Clone ID: PAT_MRT3847_26475C.1
ctctttttttttttttttttttttttttttttttttttttttttttttttttttttttttttttttttttttttgggcaggcaattgttctttttgttcatgaaaataaaaaagccgatttcaagagtcaccttttgaaaaacaaaacataaattgggggggaaaaaaaacaaaaagggggccttggggggaccaacccccaaaatttggtttatccaaaaaaaaaggtaggggggggtttggacccccaggcaaaacttacccccgaggggttgacccctcccggagttggtgctggaggcaacaatttaacaagggcctttgccccaactttaacaaattctttgacaagcctggtcatatatccggaaaaaaaatccctgaactggggggagcagtttttggctcccttattaacggcctgaacccctcctttgaccaaacccccaac

SEQ ID NO: 61420 - DNA, 1225 bp, Glycine max
  Clone ID: PAT_MRT3847_26476C.1
tcacccacggctctctagatccgaaaatccaaacactgccttaagcctttgattcccaaatcctcccttcctctcccattgcacagtgatcgttgcgatccatgacgacaccaccgtcttcctcctcagcttcgcaatcgcagttcgcctattcaaacccctcctcctcctcctcctacttccccgttccctttcaccttcagcaacccgcaaccactcactacgctgcgccctacgtcgccgccccctccgtgcaaatccccgctcctccagtcgtcggcccccgttgcgcccgcccctgtacccggcgtatactccgccgtgccgcaatatcaggcacagcagttatttgagagggatgcgcagataataacgccggaggctctcgagaatgtcaaggcagcgattgcaagcagcgacgtggagcacaaaaccgatgccaaaaagaaagcggttcctcgcaaagctgctggccacgcttgggaggatcctatccttgcagagtggccagaagatgattatcggctcttctgtggggatcttggtaacgaggtgaatgatgatgttctctcaaaagcattttcacgatttccttcctttaacatggcacgagttgtcagagacaagcggactggtaaaacaaaaggttatggatttgtgagctttgccaatccttctgaccttgctggtgctcttaaagaaatgaatggtaagtatgttggaaaccgtcctataaaactacgcaagagtaagtggagggagaggacagattatgaagcactggagaaacagaagaatcacattcaaaagaaaccgaaaatggcaaggaaaggtgtgctgcacaagtgacaggctggaatctgtgtaaatcaggaatttgtggcagttatttagtacgtgaggaaggaaactctgaaaatgtataaaatttgactgaggcttatttaattgatgaaaaactatagattgtgtgctcaaattggtacttggtggagtagcagaaatacaatctgtcgatgccatccagtaccaccccacccccatatcattggtaattaattcgataaatgcacttcccagctttgtgtgttgaaaaaaaaaaaaaaaaaaaaaaaaaaaaaaaaaaaaaaaaaaaaaaaaaaaaaaaaaaaaaaaaaaaagtggattcctcatctaactcgagttctctttatgtttagttatgattggtgtgctagtgtgagca

SEQ ID NO: 61421 - DNA, 338 bp, Glycine max
  Clone ID: PAT_MRT3847_26477C.1
aaacaaaaacaaggcttttttataaatgatatttgaaggggggggcattaatacaaaacaatttggaactttgaactatcaaaaaagggttttccccccccctcgaagggaattgcgcttaaaggggttttgaaggggtaatcccccttacgagggtaaccaacggccccttcctttgggggggccaggccccctattggtggttggaaaaaggacggggggcccaccccttttttttaacccggattttgacttaaaggggttcaatcataatccaacccccgggtgtttcccccccctggttttttaaccaagcccgaaaaccaattgtgcaaatc

SEQ ID NO: 61422 - DNA, 427 bp, Glycine max
  Clone ID: PAT_MRT3847_26478C.1
cggacgcgtgggctacattctgccatctttggtcactgctgaaattaaatataagcggaatctgagtaatattgatattaacggcttattatacgacggctgatataaagtgtggactaaacacgagaaaagtcttgctttgacagaagaggaaaagaaggaagtgattagaaatagaggcattcctgctgaagttgttgcacagcgagctcatgaatatgaaaaacatgtggctcatgaaagcctcaaggatcagattcctagctgtgacaagatgtattctactaaggtgaataagtttgcaaaaagtatgaaccttatacaaagtggtgttggagatcttaaactgactactgaagggaagttgtatgaggtgaagcacattcctgaatgtaacattagggcaggggaagatgatgtatttcaa

SEQ ID NO: 61423 - DNA, 457 bp, Glycine max
  Clone ID: PAT_MRT3847_26479C.1
tcgctttattgaaattgaagagaattgggataaggtcaaaactatattccttccgacggaaaaaccattgactccggaggcatgtgcgccattgattgctatacttcctttggagattagggggacaattggcgatttcataatgggtgtgtttgctgtcttcaaagatctggacttcagttttttagagatgaatccatttacactggtgaatgaaaagccatatccactggatatgagaggggaattggatgacactgccgcattcaagaacttcaacaaacaagtgcatcattgaaatttactatattgaatccgaaaggacgcatatggacaatggtagcaggaggtggtgcaagtgtaatttatgctgatacggttggagatttaggctatgcatcagagcttggaaactatgctgagtatagtggagctccgaatgaggaggaggtgttgc

SEQ ID NO: 61424 - DNA, 541 bp, Glycine max
  Clone ID: PAT_MRT3847_2647C.1
ctctttctattcaccacttgctcccagaactcatggcaaagggttctctctatacctcgcaaggtgaagaagtccgttctcgctgtcattgtcgacggcgtcgtttcaatcacggggggaaaattcacctcttcatcccatctggatgagaggagccgtgagaacttctttgtcgcataactgatctggcacggagaccaccgctccccgatttgatggaatgcgccttattgaaaccactctaactgcccatagatgatgattattccaggtttcccacttctcacttaattggggactcactccttctggctcatgccgtgcctttaccggttttcctagcttcaactatgctctctaggaaaaaagaaatcatctatgggaaaattttcgaggcttttactttagttactgcccctcttagtcttgggggagatatggaaagaaaagacttgtaattttacggaactatttcattggcctttgtgggaaagaaaaaaaaaaatgggtggggcccactaatcgtggcacaatgcgggcg

SEQ ID NO: 61425 - DNA, 439 bp, Glycine max
  Clone ID: PAT_MRT3847_26480C.1
ttcacgcttccggaaggaggggcaacggtctctgccgggtgacaaagtttctagagctttcactaccactgatgagagattggattgctcagagcattcagcatatgacgctttttttggtggatttctacaatacgcctcttccattactctcttatatgaagacattctctatatgttgctcagaacatgaatagcgaaagacatagatagaggtggctccaatatacctttctggtacagaaatataagtgcagctacttcagtgccatgttgtattgtactaaatggaaagaaatactgtagtcgcatctgtagattctacttgtgtgctgtcactcaagattgttgtaaggagcattctgacatgtgtgttctatgataggataaaggcgacgttgactccagggaccagaaggtaacaagctctcctcttgtt

SEQ ID NO: 61426 - DNA, 1631 bp, Glycine max
  unsure (1)..(1631): unsure at all n locations
  Clone ID: PAT_MRT3847_26481C.1
tagcgagnaagacgacagaagccgagaacagagtgtgataatagtaagacagagcacctactcactcgtaaatggcgaggaagaagatcagagagtaccactccaagaggcttctcaaggagcatctcaaacgtctcgcctctatcgacctccaaatcctctcagctcaggtgacagaatctacggatttcactgagctgacagaccagcatccatggctttcgtcaaccagattggtcgtcaagccagacatgctgttcgggaagcgcggcaagagtggcttagttgctctcaatttagacatagctcaagtcgccgagttcgtcaaagcacgcctcggcgttgaggttgagatgggaggttgcaaggcgcctataaccacttttattgtcgaaccgtttgttcctcacgaccaagagttttatctgtctattgtttctgaaaggcttggctccactatcagcttctccgaatgtggcggcattgaaattgaagagaattgggataaggtcaaaactatattccttccgacggaaaaaccattgactccggaggcatgtgcgccattgattgctatacttcctttggagattagggggacaattggcgatttcataatgggtgtgtttgctgtcttcaaagatctggacttcagttttttagagatgaatccatttacactggtgaatgaaaagccatatccactggatatgagaggggaattggatgacactgccgcattcaagaacttcaacaagtggggtaatatagaatttccattgccttttggaagaattctgagccctacagaaagcttcattcattccttggatgataagacaagtgcatcattgaaatttactatattgaatccgaaaggacgcatatggacaatggtagcaggaggtggtgcaagtgtaatttatgctgatacggttggagatttaggctatgcatcagagcttggaaactatgctgagtatagtggagctccgaatgaggaggaggtgttgcagtatgcaagagttgtaattgattgtgctactgaagaccccgatggccgtaagagagcccttcttattggaggtggcatagcaaacttcactgatgttgctgccacattcaacgggattattcgagccctgaaagagaaggaatcaaagcttaaagcagcgcaaatgcacatatatgtcagaagaggtggtccaaactaccagactggtttggcaaagatgcgctcattgggggaggagttgggagtaccaattcaggtttatggaccggaggccacgatgacgggtatctgcaaacaagctattgattgcatcatgtccgaagcataaagaagattaatttttgtctcatcatgtttcatttgtgaaactaatttggtggtgttttgatggatatattgatataagtccataatctgaaccaaagcaaagagtaataaggtgaagatgatagatgttacaagcctgaaactgttaaattcttatcttttcttcctattgtgattttattgttatattttgactaaacattataaaaatccccaatagtatccgtgaaaaatgtaatcttagttggcgatttttccttaaagtgttgagttccatatttgattcccc

SEQ ID NO: 61427 - DNA, 490 bp, Glycine max
  Clone ID: PAT_MRT3847_26482C.1
aggctgcgagaagacgacaaaaggggagaacagagtgtgataatagtaagacagagcacctactcactcgtaagtggcgaggaagaagatcagagagtaccactccaagaggcttctaaggagcatctcaaacgtctcgcctctatcgacctccaaatcctctcagctcaggtgacagaatctacggatttcactgagctgacagaccagcatccatggctttcgtcaaccagattggtcgtcaagccagacatgctgttcgggaagcgcggcaagagtggcttagttgctctcaatttagacatagctcaagtcgccgagttcgtcaaagcacgcctcggcgttgaggtgtgatcgccgaaaaccaaaaccaaaacttttcgatatttcgtctgaactgtatgtgtattggattgaactttttgtaggttgagatgggaggttgcaaggcgcctataaccacttttattgtcgaaccgtttgttcctca

SEQ ID NO: 61428 - DNA, 696 bp, Glycine max
  Clone ID: PAT_MRT3847_26483C.1
tacggctgcgagaagacgacagaagggggaaaagaaaccaaagaaaacgcgatggttgacgtggactttggaacctcgggctcgccgaagcgccacaaccacaacggcttcatcgtaacaatctcggcgatcttggcgctgttaaaaaagcgcaaagcagcagtgaaggcgagcaaagaggatgaattgaagaagtcgtcgcggccgaagaagcttctcagcaacataagcagcaaagcgcttttcggtcacaagaagaataataagaagcagctgcgaagcgtggaagagacacaacaagcacaagggtggggaaacggcggcgtttggcagaaggagattctcatgggtggcaagtgtgagccgttgaatttctccggtgttatttattacgatgggaatgggaagcagctaagccaaatccctctcaggtcgccacgcgccagccccttgcccggttacctcacgcgccgccaatgaatcatccatcaccaccgccacgagcgatttcagatcacgcgcgtctcttatttttgttttaattttagttttcttgaatttaatttaatttcaagcttctgtttgtttggctggttttctaggttgttgctttcttcgattttattgtttttttcatcggataaatattaattattagtacttatagtttttgttaataaaatattttcgaatttc

SEQ ID NO: 61429 - DNA, 399 bp, Glycine max
  Clone ID: PAT_MRT3847_26484C.1
agcgcgttaactaatgctggtttctctttttcacaacatgcatcttattttgtgcactggaacatgctatgtagacccctaggacctaattctgtgaaccctgggatacggagacttcagggaccgattgcatgctccggttatacatagactgattgcttgggcgccaaggttctctatgatcatgtcaacttttgataccggccgctgttgatcagattatatgctggaaaaagttgagatcacaaggattggatatggacgcgtggaaattagaatgatcgaagagggatgtccagaatcacttgaaaaagagttgcatcctacgctttggatcctacgacggtcagggatggaaactatggggatgcctatagagaacgggtttgagatacattt

SEQ ID NO: 61430 - DNA, 389 bp, Glycine max
  unsure (1)..(389): unsure at all n locations
  Clone ID: PAT_MRT3847_26485C.1
agggaaaaggtgggaaccacttttggaagtccattgggcttggatttaagactcccaaggaatccattaaaggtatctctctcattcactactatctcttataaaatgtttattctatgcaatgtgaatctatcaggttattgttctatgatgaagatccaccttaaagtgtacagaagtatgttcttcattagtgtaggaaatggaatttggtttgggtgggaaggaataaggttgctgcattagagcctaatgaagtagaaacattgttgggcttcccaaggagccacactagaggaggtggaataagtangactgacagaaagtgacccattatcaggtttctctccatttctccttgtctggctactttaagataagtttcgctg

SEQ ID NO: 61431 - DNA, 583 bp, Glycine max
  unsure (1)..(583): unsure at all n locations
  Clone ID: PAT_MRT3847_26486C.1
ttcctttttttttttttttttttttttttttttttttttttttttttttttttttttttttttttttttaaaacagaaggctatggttttttattggggaaaggaaaggaaaacccttaaaaaaggcaaatggattttccccatctaatttttgggggggaaaaaaaattcccctccctataattnggggggccccaaaaggccaacaagggggaacagggctttattcctccgaaagcgggggaccagagggcccaaaaagggggaaaaaaaaccttcattacagggaacaaggggaggggggggttaaaaaaagctaaaaaccaaccggatcctaagtccttgggggggaggacaaggcctgggataaaaagcccgggtttccaaaggccaccttttttttcaaacaaagagacctctagggggccaacatttttctaagaggccaaaaacccccccacgggaaaagggacccacccccccctaaacctgggggaaaaacccccctgggggcccgggttttcccccccgggggggcccgggctaaattttatgggacacccccccccgggggggaacctta

SEQ ID NO: 61432 - DNA, 783 bp, Glycine max
  Clone ID: PAT_MRT3847_26487C.1
gtgcgtgaaaagctcgatatcacttccccatctatcttcaagtttcagaagacacgtgggtggatagcaacttagaacacaagtgaactcaaagtggaacaacccaagcttgtttcacagctcaacaacaatggcttctatctcatgcatcacccaccaccccatcacttccaagctcaataatgccttctcttcaccccacgtctctgcctcaaacttggcctcacggtttctgggcaccagaaaaagagttgggttgcatagcctcacctctagaataattggaccctctaatggctccaaagccacatgctggttcaggttcggcaagaacggtgttgatgccaaaggtgctggcatctatggcagccagggccgtgatgactttgatagagatgacgtggaacagtacttcaactatatggggatgctcgctgtagaaggaacatatgataaaatggaagctcttctaagccaaaacatccaccccgtggacatccttctcctgttagctgcctcagaaagtgacaagccaaaaattgaagaactcttgagagctggagcaaaatacgatgtaaaagatgcagatggacggacggcgttggatagggctaccgacgaaattaaagatctcattcttaatttttccgtgcagagggcatgacttgtttgttaccattataagtgagttcagctatatagttgttacattttgataacttttgaactatgttagcttatatgctttggattgatcccgagataaaaaaaaaaaattattaa

SEQ ID NO: 61433 - DNA, 1971 bp, Glycine max
  Clone ID: PAT_MRT3847_26488C.1
gcaccgggggcggggccatcgcttccgcggtcagctgctccggcaattgtgctggtgcttccgtggttcctctgtcccggcgtcgcctcgctccctccgggtgtcctcgccgccattgcgcttccgcttccgcgcattctccccattcaccccaagatcgccggtccgccattgctctgcttcgctaaacccgagtctgcgtcacagcttactgttacaactccctgtgtttagatgtcccttctgaggcatctacatttgaggcttttgcaaagttattggcaacactcgccgcatccagcgtccttcggtcccttctgtgccttctacagggcgcgcgcgtggtattcttctttttagttcctgatactccgtccacattcgttgtacgttagtttgtgcgtacttcttgtccgcatgcggacgggagtcggtcgtcctaagtggcgtgggcttctccatgagttgcttccacggttgcctgagccccctcgccggggttgagtacatgttcccctggggccagccggcctggtgaccgtgcctgccgtcctaaatcttatttatgggtcgcgtgttccctcccctctcctccctggaaaagaatcgagtggaacagcttggagaaattctatcctgatcttatatccccccagtgcttaaggcctgtggcgattacctcttgagcttcttcataaagagtctgttatccctgtacggggccgcaactcggacccgcaacgccgggccctcatcgccgagcgggcatagagggagagagaggggatggctgtagtggtcaatatgatcaaatttgcaatgcacgattaccccgagctcttgatccccactctgttccatcagaagagctttccacttctttgggatacatggtgcaacttctaaatcttattgttcataacttggctgccccagcacttcataactcaggttttgcgggttcttgctctcggatatggcaacgagattcttattgggatgcacgtccttcctcaaggagcaatgaatatcccctttttatacctcgccaaaattattgctctactgacggagaaaactcatggtctgagagaagctcaagcaattttggagttgcttcggtggaatctgagaggaggcatcgcctagattcatctgggagtactagctttaattattctttggcttcttcacattctgttcaaacacacaaagatttgcagaaaggaatttcacttctaaagaaaagcgtagtctgcatcacagcttactgttacaactccctatgtttggatgtcccttctgaggcatctacatttgaggcttttgcaaagttattggcaacactgtcatcatccaaggaagttcgatctgttttttccttgaaaatgcctcgctctaggacatgcaagcaagttcaacaattgaacaagtctgtttggaatatgaattctgctatttcatcaactactttgctggaaagtgcgcattctgtgcccacaacgagaattgaaaattatctgccaagtgctacggctagttttctttatgccactgattctgacggaaaaaatgagtgcctagttgaaggatgggatatcgttgagcatcccacatttcctcccccaccatcgcaaagtgaggatgttgagcactggactcgagccatgttcatagatgctaaaaggaagtgatcttgatctgcaacagacgactttctgtttctgttgaagggagtgatgttaggtagcaggaagtaaaaagccaacataatgttcttcaggatggattaatgtgcaaactaattggaatattttagttcccgttcatgtttgtaaatacagattatagactaatgataattatgtaaatatgtataggtaaggttcattgaattcttaaatgcccctaaaatctcatcaataataacttattcaatatatatttagtgattcatgatttgacaggttt

SEQ ID NO: 61434 - DNA, 325 bp, Glycine max
  Clone ID: PAT_MRT3847_26489C.1
ctttcactacccttattctgatatatcatcatttgctgttttttaaaacatgggaaacatcaccacacaattaataagttctacagcacaattttaattattcaatttaatgtcatatactaatgaacttattctaacccaatattttcactacccactattacattacaatgcaccaattgtttaccttctacaaactaaaaccctcattttaccctatataccactatctttattctcattccaactcttcaacaaaaccttctctcacattactcaaacttagtctcttcatctcattcatcgctatagcttgctaattttt

SEQ ID NO: 61435 - DNA, 337 bp, Glycine max
  Clone ID: PAT_MRT3847_2648C.1
cactcatgcgacgacgccacaagactacagaatccatttacatgattaacatcacctcaacagccaggttaatacaccaatctgatcgcacaaatctctctcttaacccctctaacgccaaatctgcaccatacttcctgccctctccaacctcagagaaataacactttataactgacgactacacactaaaaatcaccttatcatagacaatatgatactacaatatgcttccactacataacatcacacaccccttactctccacagtgaaaagaacacacacatctgcactgaaagcccatataatctatactctatttaaaatgcacaaaaa

SEQ ID NO: 61436 - DNA, 1164 bp, Glycine max
  unsure (1)..(1164): unsure at all n locations
  Clone ID: PAT_MRT3847_26490C.1
ttttatataaacannnnatcatagggaaagacatcgaagactcctcttcctcccttctggcatcccacctataacagtatattatattgtacgtatatatattggtgggtgattgcaagacataggtggttggtccaatatatattcgaggattcagtaatgatgtttgcatgaagtactttaggattcacctttcatggtgatccccaggtttttgttagaatttctgtacgtatctgcatcataatcatgccccatggtatcattgcgcaaacatgtcaggacaatgcatgagggcgatgttccaccaacgtatgattatcaaggtttaactttaggtagattgcttttgtccttgtattctaatgctaataatcacttctttttcttttttgttctttttcttgctaataaatactcgtttttgactcattgttcttgcatccgtacatagtttcctatgtcacgcagataaagatgcaaagtcaaaaatcggtatctctggtaattgttctttggaagaagtaaaaagaaacagacggattaagtgactattaattaggccgatcttctcacggtgccaaaagtgaaagaattgaatttgaatatcatcacaagacttgagcaaaattatgaaatatgaaccaagaatttggaacccaaaatgataggtcatgcagaaaccatattaaggtgaggcaaactgtataaattacattctcacatctctggagtcatataatcatgttgcatcttcccaaaaattgctttaattagtacgactttatgagccaaaaaccttcaaacactgctatatatcatatcaatgattacgaaccatagttccatttttcacctgacatccactttgctccaaggcaaattcgaaaaacccacctccattaatgctagaattcatatttggtggtgcaaactgcagaattatatctcttagtgtgagcaaccctgtaacttgctcattatcattgatcagaaagctgaaactgctattagtctcagtcgtatgctccattatttgcttgagcgtttcagtttccttgttggcaacgggcaagtccattctgggtatgaagctgtttttcagacggagacttcctgctgtgagtaaagccccatggtcatgttcaatggcttgttcagtta

SEQ ID NO: 61437 - DNA, 581 bp, Glycine max
  unsure (1)..(581): unsure at all n locations
  Clone ID: PAT_MRT3847_26491C.1
tacggctgcgagaagacgacagaaggggacatacaaacgacgcatccttctctttctttcggctttgatttctctctcctcgactcgatcccaattccactagggattcaattccgatgcgattccgagcttgttagatccacgacaaggtttcgtttcccagattcttttgtaaaaaaaaattcttcctctgcccaacaggtattggacactagttgaactgaggggtcatgtatgcatgtggaatgaaatctataataacactaaaaacagggctagctgactatcttttaacaaggagtaagttgtaaaaaaatggaccatgacaagactgggtgccaagctcctcctgaaggtcctatattgtgcatcaacaactgtgggttttttggaagtgcagctaccatgaacatgtgttctaaatgccacaaagacatattgctgaaacaggagcaggccaagcttgcagcatcatccattgngaatattatgaatgggtcatcaagcagcactgaaaagggaacctgtgttgctgctgctgctaatattgatatcccagttattccaatagagcctaaaac

SEQ ID NO: 61438 - DNA, 211 bp, Glycine max
  unsure (1)..(211): unsure at all n locations
  Clone ID: PAT_MRT3847_26492C.1
cagtccgggagctcggctcgaggaattatgaggcaatggttccccaacaacccacagttattaatatacaagctacctatatcaggatcacaacatagttcatgatcagaacctttaagaaaatcaaagaactgcaatgctgacactntctcacttgctaatatctgaaaaatgtcaacaactgatgcatcagacaaagacacgttcatac

SEQ ID NO: 61439 - DNA, 1547 bp, Glycine max
  Clone ID: PAT_MRT3847_26493C.1
ccttgacaagttcataagaacattggcaagctgaaatgaaacacacaacacaacacagcataccgtgatacattttctttcacacacaaaccttctattactgtttactctctctttcctcctcgaatcccaattccactagggattcattttccgatgcgattcctgagcttgttagatcccacgaacaacgtttctgttttgcccagattcttttgttaaaaaaaaattaatcttcctttgcccaacaggtaagttggcaaaaaaatggaccatgacaagactgggtgccaagctcctacctgaaggtcctatattgtgcatcaacaactgtggattttttgggaagtggcagctaccatgaatatgtgttctaaatgccacaaaggacatgttgctgaaacaggagcaggccaagcttgcagcatcatccattgggaatattatgaatgggtcttcaagcagcactgaaaatggaacctgttgttggggccgctgctgctggctaaatgttgatatcccagttattccagtagagcctaaaactgtctctgtgcaacctttatttggttccggtccagaagggagtggtgaggcaaagctgaaggatggaccaaaacgctgcagcagctgcaacaagcgagttggtttgacagggtttaattcgtcgatgtggggaccttttttgtgctgtacatcgctagtcagacaagcataattgcccatttgattaccgcattgctgtcccacattgtcatagctaaatcaaacccatttctctcgtcttagcctgctctgataaaatctaagttttgaggtcaaagttgtttggaagttctgacgatgttatggattattttcatccataaagtggtaggatctcacataagcattgagatgagattcctagttttttttagtttgttattggcggtctttgtatatttttgtctgatgtgggcttataatgttattctacatttttttattattacagtatatattagcttttgtgttttatataagttgtaaaacttatgcaaatcttcatcagctgaactggtggaatgtgggggaattatgttagtaataacttgtaactgttttttctaggaatacgacttaagcattgatgctcacaatgaattatcttggtctttagcacgccagttcaatcttttgactgtgaccatggataaggcatcatgagtgacataaagtgttcttagagcgccaactataactgtgaagcttgaggaatcacatgctacacttaaacttccagacctactactgctgccaatgttgaagtgttaatcaaagaaactggtagagctgtcgaggctgccaacatgaatgtgttatttggaggaaacaatgagtccaaattagagaacatttaaatgtaaattattggaatgaattaaaaaaaatgtaaattagtggtgtatttgggatagaatattcttattttataaagtagtttcactaaaaaaaaaaaagagtagtatatacattaattacctggttaatacccaccctttttc

SEQ ID NO: 61440 - DNA, 1216 bp, Glycine max
  Clone ID: PAT_MRT3847_26494C.1
ctctacctctttctcttttcttcatttccgacgttgcctcaattctcagtaaacggaattggttggtaccacacatacaaacgacgcatccttctgtttctttcggcttcgatttctctctcctcttcctcctcaacttgatcccaattccactagggattcaattctgatgcgattccgagcttgttagatccacgacaaggtttcatttcccagatttttttgtaaaaaaaattcttcctctgtctcaactttcttacgcatttggaggaagcaaaaaagtgttggtagctgaaattgacgctcacaagaacaagactttgccttaaaataaagaatcaaacgcttcctggattgggttctcggaaaattaggatctgctgcttcagtgcttcactattttttttgtcttgaggagcacttggtgcaacttttcttgttctacacaagattgaaaacaagaggtcctctgcttctcatcaatgtcttttgagggctacgaatataaagaaagctcggggatcttatttttcggaggaggtaactaataaggctttgtgtcccattccttggtcttccattttcggggatcttatatttcggggatcttatcaataaaataaatagatcctccatttctccactaccaatggtttactcttccacactgtaccacttgatttcccaatgcatttgaagagcttcgccaggaattagccaaggtttatagtctccaagtttggctgccaagtgcaatgcactgtttcccttgttatccacttttccgaatatattacttttctttagatttttcttgttgagcaagaagttatataagtaagtttgtctgttctctactgtcaatagcactatattttttttcttggcatccatatcatgaacagctactagaaacgagtcaatgattttctctaccatttctgtcggggttcttattatattgttatatggggggggtgccttgagttattggccatctctgcaatttgaaggactctttcatgtgattggtgaaaatatatatgttggcccctgttgtttttaagtgctggtttggtaaaagttggttggtgttgttagctttgtaatgcctctattcttgtatcagaagtggtatttgcaatttaaagagggtttccagggccaaaaaaaaaaaaaaaaaaaaaaaaaaaaaaaaaaaaaaaaaaaaaaaaag

SEQ ID NO: 61441 - DNA, 409 bp, Glycine max
  Clone ID: PAT_MRT3847_26495C.1
gggacccgggggcggacccttgggtggacccgggggacgacccgggaaacccgggccgggccccgggggcggaccacctttacctaaaggggggcctaaaaaagctgggcgaaaacaggggcaaagggggtccccgggggaaactgaaagcgggccacaatcccaccccggagacaacccggaaccaaaaagggcaaacccgggggggccaaaggggggaccaaacccacaaaaatgggggggcccaaacggcccgattaccaggggggaaaccgtgggggccaccggcaaaaaaaaatgggccaacccccggggaaagggggtttgaaaaaggccccccgggggggtttttttttcaccagaaaaacgggcaacagggggatttcccttaaccgccgggcccggaaaa

SEQ ID NO: 61442 - DNA, 938 bp, Glycine max
  Clone ID: PAT_MRT3847_26496C.1
accggttcgaattccctttcgcttacgcgtccgcattatccactagggattcaattccgatgcgatttttagcttgttagatccacgtcaacgtttcgctacccagattcttttgtaaaaaaaaataatcttcctttgcccaacaggtattggacactagttgaagaggggtcaatgggccatgtatgcatgtgaaaagaaatctatctagtaacactaaaaacaggactagctgggaaaaggaaccactgtgctgctcactgtaatcttataatgagtaagttggaaaaaaatggaccatgacaagactgggtgccaagctcctcctgaaggtcctatattgtgcatcaacaactgtggattttttggaagtgcagctaccatgaatatgtgttctaaatgccacaaagacatgttgctgaaacaggagcaggccaagcttgcagcatcatccattgggaatattatgaatgggtcttcaagcagcactgaaaaggaacctgttgttgccgctgctgctgctaatgttgatatcccagttattccagtagagcctaaaactgtctctgtgccacctttatttcattcgaatccagcagggtcgggtgcggcaatgtggatagatataccaaaacgcataattacccatttcatgcccgctaggttgctcgggatgccatagataaagcaaacccagttgtcaagtctgtacatcgcgattcagacaagcataattgcccatttgattaccgcactgctgctcgggatgccatagctaaagcaaacccagttgtcaaggctgagaagcttgataagatctaagatttgaagtcaaagtttcatggcctgagatgaagttacgcataccttcatcatgaaatgatccgagtttccttcacaatataataagaacaccaaataaaatgtgaactcgagcc

SEQ ID NO: 61443 - DNA, 1191 bp, Glycine max
  Clone ID: PAT_MRT3847_26497C.1
attcttctttctctctctctcctcctcgatcccaattccactagggttagggttccgttacccttatctccttctcaattcttgctttcctctttaataatccgctctcgtattcgtttattaattgatcattctttctcgttttgttctttttcgctgaatccaggattcaattccgatgcgattcctagcttgttagatccacgacaacgtttcgtttcccagattcttttgtaaaaaaaaataatcttcctttgcccaacaggtaagttggaaaaaaatggaccatgacaagactgggtgccaagctcctcctgaaggtcctatattgtgcatcaacaactgtggattttttggaagtgcagctaccatgaatatgtgttctaaatgccacaaagacatgttgctgaaacaggagcaggccaagcttgcagcatcatccattgggaatattatgaatgggtcttcaagcagcactgaaaaggaacctgttgttgccgctgctgctgctaatgttgatatcccagttattccagtagagcctaaaactgtctctgtgcaacctttatttggttcaggtccagaagggagtggtgaggcaaagctgaaggatggaccaaaacgctgcagcagctgcaacaagcgagttggtttgacagggtttaattgtcgatgtggtgaccttttttgtgctgtacatcgctactcagacaagcataattgcccatttgattaccgcactgctgctcgggatgccatagctaaagcaaacccagttgtcaaggctgagaagcttgataagatctaagatttgaagtcaaagtttcatggcctgagatgaagttatgcataatttcatcatgaaatgatccgagtttccttcacattttatttggtgttcttattatattgttatatgtggtgggtgacttggagttattggacatctctgcaatttgaaggactctttcatgtgattggcgaaaatatatatgttggccacagtgtttaagtttttaagtgctggtttggtgaaagttggttggtgttgttagctttgtaatgcatctatcctgtatcagaatggtatgtgcaatttaaagatggtttcaagagcatccgtggacatgtggtagattgtaattattgtgggctatctatgaattattttcgatatgctagaattttcag

SEQ ID NO: 61444 - DNA, 1199 bp, Glycine max
  Clone ID: PAT_MRT3847_26498C.1
ggctcgagctttcggctttgatttctctctcctttactcgatcccaattccactagggttagggttccgttacccttttccccttctcaattcttgctttcctcttttaaccgctatcgttttcgtttattcattgatcattctttctcgttttcttctttttcggtgaatccaggattcaattccgatgcgattccgagcttgttagatccacgacaaggtttcgtttcccagattcttttgtaaaaaaaaattcttcctctgcccaacaggtaagttgtaaaaaaatggaccatgacaagactgggtgccaagctcctcctgaaggtcctatattgtgcatcaacaactgtgggttttttggaagtgcagctaccatgaacatgtgttctaaatgccacaaagacatattgctgaaacaggagcaggccaagcttgcagcatcatccattgggaatattatgaatgggtcatcaagcagcactgaaaaggaacctgttgttgctgctgctgctaatattgatatcccagttattccagtagagcctaaaactgtctctgtgcaacctttatttggttcaggtccagaggggagtgttgaggcaaagccgaaggatggaccaaaacgttgcagcagctgcaacaagcgagttggtttgacagggtttaattgtcgatgtggtgaccttttttgtgctgtacatcgctactcagacaagcataattgcccatttgattaccgcactgccgctcaagatgctatagctaaagcaaacccagttgtcaaggctgaaaagcttgataagatctaagatttgaagttgaagttccatgccctgagatgaagttatgcacaatttcatcatgaaatgatccgagtttccttcacattttattggtgttcttattatattgttatatgtggtgggtgacttgagttattggacatctctgcaatttgaaggactctttcatgtgattggtgaaaatatatatgttggccactgttgtttttaagtgctggtttggtgaaagttggttggtgttgttagctttgtaatgcatctattcttgtatcagaatggtatttgcaatttaaagatggtttcaagagcatccgtagacatgtgttagattgtaattattgtgggccatctatgaattattttcgatatgctagaattttcagaagttgctct

SEQ ID NO: 61445 - DNA, 218 bp, Glycine max
  Clone ID: PAT_MRT3847_26499C.1
cactaatcggtggccgcccttaatttctgaatccctgttttttcattttttttactttttttcgccaccgcggggcaggggcatcttttggaaaccaaaacgacgcaaaaatgcacgcagggagggaccaaggccatatctgtttactgtgacaacaagggatccgcacacattaacacacagcggacaacccaaaagcgtaacgaattccaacggcc

SEQ ID NO: 61446 - DNA, 614 bp, Glycine max
  Clone ID: PAT_MRT3847_2649C.1
tagagcgggcggttttttttttttttttttttttttttttttaggggtgttaaattttaccaccttttctacccaaaggaaaagatttttggcatgcgatgcgagtgatagatttatcgaatgggttattataaaagtttttttatatcggcaaactacattagatataatttaaatttaaatagatatttttaaaatatttatgtaaaaaatacgagcatttatcgttttgaaaataaattaaaggctaatacacagttaaaaatattaaagagcaaagcgatgaattaaaataaatagtgtttaattattttaaaagcttgcctctattatttttcatttttaatttatgaaaacaatcattaaataaatttcaatgatgattttattaaaaaaatcataaatatttgagtgtatatatatatatagagagagtttcactgtcatcctgtaaaaaatattataattttaatttattgattttataataatatttaaagttgactcaaattatatgtttattggggatagatgaaactttgtttagatatttagagaggaaataatctataaatgttatgtattatttatataaagtcagataaataaatagt

SEQ ID NO: 61447 - DNA, 327 bp, Glycine max
  Clone ID: PAT_MRT3847_264C.1
ctcagacgtgcgtttctgcattatctagaacccagctgataaaaccgggggccgtgccagggccgtcatcgttgcctaatgcaccggcctcacttccatggatgtctttcttacgtggaactctaacagtgacattacctgcattgctatcaactttgtaagagtgcaatgcatacaggtttggccactaattgtctagaaaaagtgcgtgactcttttctacttggcagacctcgattataccgcatttgcaaaggaagtcgtatacctactaacgaaaggatgcattcctagcttgcaattctagattgagcacgctttcatgta

SEQ ID NO: 61448 - DNA, 360 bp, Glycine max
  Clone ID: PAT_MRT3847_26500C.1
aaattgtttagtagtagagatgacccctatcatgttccttctttgctaggggcttctaagatatggagtgagaaccctcatcttgcagaagatgatgaccagcttagctcgcatagtgcctgagaacttggatcgaatatgcgatctgttgtaacgtcttttcagcagcttacttcgtatctcactttcactacactcgctaattgatatttctaatccttaaaggattgtcaaacattctttagcgcttcattctctgaaaacttccagcaaagcgacccaaacgattaaccctgctcgaacatactacttaagcttagaatgaccagagctgcagaagatggatgctgcactccatta

SEQ ID NO: 61449 - DNA, 394 bp, Glycine max
  unsure (1)..(394): unsure at all n locations
  Clone ID: PAT_MRT3847_26501C.1
ganaaanncccncaccctacggaacntatgtnnncganacaacanactnnnttccangcgtaccaaagngatcatanncanngagnnntcagcgcacgacgaccagtgatgangatctacnctcnatnatngnagtnangngncnnctnaacagtncnccgngnnacgnaacnantngcggnnacngnncttnnnanaacagcagnanctgnnnccanganncacagncacannngngacagcncnncggacgnnnngnnnnggatcgtcagnncngntgnganaancnnnancganngnntgnncccacntganagactctgnantgannncannnggnnatcgcatagnntcnnnggannctntcnagaaaagggtnncnttgncaacagnn

SEQ ID NO: 61450 - DNA, 198 bp, Glycine max
  Clone ID: PAT_MRT3847_26502C.1
gcttggtgcaaccattggcatccacaccggttttgcgtttacagggtgcccaattacaacaaagttccattcaaaggtttaaaattttttccaacccaatgccccttaaaaaggcctggagggaccagatttttttggcttaaaatcaatttatggggggccttttcttaccaatcttgaagatttttcttttttgga

SEQ ID NO: 61451 - DNA, 568 bp, Glycine max
  Clone ID: PAT_MRT3847_26503C.1
gggtccgacttccttagacaaaacttagttttaaagttttaacccatacgtattgtatggaataaaaccatcaatagaaaagataattttaccatattagaaatgttcgtagctcaacacaaggttgctttttgtgtagaggatatatatggggtttatttgtttaagtggaaaagaaaagaaatgattgttgaatgaataaaaatcataaaattttggatttttctattgtttggaaacatgagtctcattcaaagatatcttttcctttcacattggaggaaaaaggatagaaaaagattgttttttgttgtgtaaagacaaaaatatttattatttaaataacttaaatatatttttaatcttttaaatttaaataattattctttccttaaaaaacaaaatcatttctatcagtctttcaaattttcaaaaacttatatttaatccttattggttcattatgttcatgatttcacaatttgtgacctttttaaccgttaaaataaatatttttaatttaatttttttaaaaataatttcaatttattttaaatcaccaaaatat

SEQ ID NO: 61452 - DNA, 476 bp, Glycine max
  unsure (1)..(476): unsure at all n locations
  Clone ID: PAT_MRT3847_26504C.1
acgctgcgagaagacgacagaagggatgtattgaagatcttatacccgtggatattggaaggtatctaaaggccctgattgcctgaaatatgcagcttgcctgaaattgaaggctcagatatatcagagagtatcatatatgggtaataaggtttaaacaaatatgatatttttgaacaaattgtgttcactgaacttcttttgtttggatggatcgtaacttgtcagatggcatgacttttggttattgctggttcttgattgagatattggttaaatacttctataatcctaattttatgtgctaggtaaatatgcatatgtaatctagtgaaaacataaaaagaaatggatgaaaaattattaacaataacaactcatccctaattttgtcactagagaacttangcaatatgcagatttatgtctggctgcttgtatacaaaattataatttactaaactacctaccaaaac

SEQ ID NO: 61453 - DNA, 247 bp, Glycine max
  unsure (1)..(247): unsure at all n locations
  Clone ID: PAT_MRT3847_26505C.1
ttgcnccancgaggaacccctcctctaactctctcttcgcctttctttctctaaaatctcagagctgccgatgctatctgctccttcgattacaggagttataagaggagtgatagtgaaatagtgcttgatcacggaacggctgagatcacgagccctggatcaggcgttggaaagaccgcacagggaactcccagcgaaaaacccccccaaacggggggagcaggggcacaaaaacattcttccc

SEQ ID NO: 61454 - DNA, 137 bp, Glycine max
  unsure (1)..(137): unsure at all n locations
  Clone ID: PAT_MRT3847_26506C.1
cggcgccgncgctttttccaaaccagcacacagcatcactctcgtcggcgccgtcggcgaccaccgcaagagccatcgcactccgccggcatccgttggggcacagctgactcgaggatgtggcggggggtgcgatc

SEQ ID NO: 61455 - DNA, 187 bp, Glycine max
  unsure (1)..(187): unsure at all n locations
  Clone ID: PAT_MRT3847_26507C.1
agaggaaaggagagaagagaggaagtntngncngttngaatcnatagnatagaancaaaccaaattgnnagaagatcgatgcgancgatcgatggcnctggncggaggtgaagtgnagcatgcggcggagggcgcaccggaggagaattgcnccgccaagcccaccaagcagggcgagggcctacgc

SEQ ID NO: 61456 - DNA, 1701 bp, Glycine max
  Clone ID: PAT_MRT3847_26508C.1
ccacgcgtccgcggacgcgtgggttgctaccgttttaagcaaaaaaatggaaaaccaagctttggtggagctgttggatcgaagacttggcttcgactcaaaccttaagatcaagcaggtaatgactgctacagctgagcttgcatttatgtgcatgaaatgtccacaagaattaaggccaaacacggaacaggtgctagagattctcaatggcataaagccagggagaattgaaacaggctcttactcaacaaaagatatctcagctttgaaaatcttccacaatgctgaacttgaagaagctactaacaagtttgacacttgccttggaaagggagggtacggcaccgtgtactatggaaaacttcaagatgggcgagaggttgcaataaaatgtttccatgatgagagtgagacagaagagaccattaagcaattcatgaaagaaactgcgatcttaggtctcctgcaccatgaaaatctggtttcactttatggccgcacttctcgcaattgcaacaaacacatgctagtttacgagtacatctccaatggcactcttactaaacatcttcatgaatcttctggtggtaaactaccatggcataatagattgaatattgccattgaaactgctactgccttggtatttcttcatgaatcaggtatcatccaccgtgatgtaaaagggagtaatattctgttggatgaaaattttactgtcaaagttgcagattttggattctcacggtctcttccagatcatgctactcatgtttcaactattccagtaggaactcgtgcttacatagatcctgactactatgaatctggaagggtcagtgacaaaagtgatgtctatagttttggggttgtattgttcgaactcatatcatccatccgcccaagtttaatggaaggcacagattatgttactcttgcacagtttgcaaagagaaaaattttaaacaaggaattaaccgctgtagtggatcaaagtttttggcttggtgttgacaaaaacatgatggaaatgataacagcagtggcagagttagcatttcagtgtgtgcagtgtcccaaggaactcagaccatccatgaaacaggtgctagatacccttgagggcataaggaaaggaacatggggattcaaccagataacatagtccttattcatgctaccaacattcctggttctatcaaaccattcatttggtttgtggtctagtaattggattttggcttaacagagatgattttgttctgcagtataggaatttcaggttagccctattgtaggttagaaatttacttgactatttagggtgtgtttgttttagctggattacactttgaggcacgttgaacatggatccttatgtcacttggattcacgttcaacgtggtttaacagcaatacaaacatgctgttacatgatacatgtaaatgcattccatgttctaaatgtataagaaagaccaaaagctggaaaccatctcagaattgcagtacatcacttcaaacattatcctcctcctcctctttaaagtaaaaacatggataattccttagtagagataaagggagttgtcaaatgtcaatattaaaaataaaaggcgtaacccgtcggcagctgttgtacatggataatggactcttcatagtactctgtatagtgtccattgaattaaagagtct

SEQ ID NO: 61457 - DNA, 851 bp, Glycine max
  Clone ID: PAT_MRT3847_26509C.1
taacaagaactaatatacgttcttatagttctttccgttaaatttttcaaaaattgaatttagtaaattaattttaacttgtgaaaaaaaaattaattgatttacttcattttcttctcttataaatactgtgatgtgataaagctgatctaaattgtgacccatttatcattttatacacactccagatcatttcaactatgtaggtactaccgagatgagagatatgaagaagttccagcaagtcaaaagcgtgtgcccgaaggaatggggcatcttgtatagttccatggtgaaaaaataacgcgttataaaatgtcagcttagtagggcataattgaaatgcattctagtaaaagaaagcaagagaagaatatgcataatataaaatcaatctactatgcctcgatagaaaacaattgttacgatactaccaatgaataagaccattaacagccaagaccgcatgttttgtatgtttttccccacttgaccttgatgaactacttatatattcttaccaatgagttgagaacagcctgctcccatttctattttcgacctcccccaccccaccctgcactcccaagacacagggaaaccatgacattatcaagctggatttgtgttaataattcaaagaccatgcttctccagattgtccatcctgggggccatgttgaactccatgacagaccagtgactgcaggtcgactctagagcctccccgggtgatgccctcgaacttatccgtctgtgttccccgcgccccccccccgtcggcccccccccgggttttccgggccggggccgtgcggggggggccggggtgttgcctgtgcggggcgggg

SEQ ID NO: 61458 - DNA, 258 bp, Glycine max
  Clone ID: PAT_MRT3847_2650C.1
tcactaatgaatacacattaccatcatccgatgcaaaatgagacgtctaatatgctaaatgacacaaatataacctacgcataacttgacaaccaatatctgcatcaccataacaccttgctaaacagactttacactctatcacacaaatctcccaacattacccacaaacataaacttgcacaactcattaaccaaacaatctacagtccatcttaccaatggcatgtagtactcacaccctattcgaaccatcat

SEQ ID NO: 61459 - DNA, 259 bp, Glycine max
  unsure (1)..(259): unsure at all n locations
  Clone ID: PAT_MRT3847_26510C.1
gcaagtttcaactgttagctantcctagctgttgctacnnacgctgattgaccacttantctgatgcttgatttgtgtgattgtnttntctatttagcttgtncactattaaatancacaagggnatggntgctgcctgcaagtcaangtctntatcccattgcaccgttgcaaaactgtngcacctggnnnggcntncgncannnaattcntgntggtcgcaggagcganagaccatgntgactgcnacctattctgg

SEQ ID NO: 61460 - DNA, 447 bp, Glycine max
  Clone ID: PAT_MRT3847_26511C.1
cataccaccaaacataccctataccactcttcgtacacgacctcgccctcccgatacatcatcccggctctgccagcagtgggacaccgccttgctctgctacaccccccagagtcttcacgtcccgcccgcttgggactgcgcctgcaaaccactcgaccctttccaaatcccacgcgaacaaccgacgtcatcgatcacggcaccccgccacaaccacaatcaatcaggacattcacgaccgcatcaagaagatataccgcaggtaatctgcacaagaggattcagcggcggatcggagaaagataccgggcactgcatctggcagcacgtgtgcgaacgggatatcactccctctcgccttgcccattcgaccaagcagccttcgccgaaagaactctgcggcctatggagccggcaaagcctggaggagctcaataatataag

SEQ ID NO: 61461 - DNA, 814 bp, Glycine max
  Clone ID: PAT_MRT3847_26512C.1
acatttaacaaaccgattgcaagaggaaaagaagaagaaaaaaggctccaccgaaatcaatttcccacagaatcaaacaaatcgttggagttggaaaacaaaacaagagaaaatgggtggacgcaagtgtttgttaacgttggtgttgagtttggtgttgatgatgagtatggcagaggcgcaatctggtactagcgcagactgcgcccaggagctaattccatgcctggactaccttaatggcacgatcaacccaccaagctcctgctgcgaccctctgaaacgaacagtccaaaacgaactcgcctgcctctgtaacatctacttctcccctggccttcttcaaagcgtcaatgtcactgtcgatgaggctctcggcctcagtcgccgctgcggcgtcactagcgatctcagcagctgcaaaaacgggtcagctccagctccgggttcacggccaccaccagccactcctggaggtgacaaaggaggagcaggcacagtcacattcaccgggctttctttcctcctcttattttgggtgtctatgctgtttaattaggaaggtggttgtttatccttcggagcctctactatgttgaagttatctttgtatttctacacgttgattattgatatatgattgtattttcttttccccgttttcttcttttttgtttctttaaaaacctctgattcaattgagtaaaaagtttatttaaatgaacactcttcgttgtcaaattttagttggtagagttatctgtggtgcttttggttgaaccattttatatgaagtggtttgttgttcatatga

SEQ ID NO: 61462 - DNA, 462 bp, Glycine max
  unsure (1)..(462): unsure at all n locations
  Clone ID: PAT_MRT3847_26513C.1
ggttgaagctgaggataaagatgcagtatgtccgacctgttttctttgcccttgtaacagtagaaaatgtttccaataataatctaaaatgaaatggactaaagcatcagtacaagtaatgagtaaaatatagtgaatttaattagaattatatttcatttctattttttgctggatgatttgtcactgaagtttagaatttacagccacgaaaaggatttgtccaacatcttggattcttaataaagatgcaagtttctataagtatagctttattatttttgtgacacatgtcatttctaacaaatcaaaagatatattttataaaacaaaatcctcgatgttttcaaaatgaggtgtatccttttgtttgtttatttatttattttcctagtgattgggctcaggttatgttacttgtcttgtcttctttgaattgctaaatgatgtgtntgtacagtg

SEQ ID NO: 61463 - DNA, 386 bp, Glycine max
  Clone ID: PAT_MRT3847_26514C.1
aggaaagcataacgtctttttgcatattgttgggccatgaatttcatctagggccccacttgaaaggctgctttatagaggtctagctatagcgacttccctgattacaagggcagctaaaaactgctaagggatttaactacccccagtaaataccaactttaataataatgataacaccatttagcttaaattaatatcctattgggatatataaggcagctaactaaatcagttgcatcaactaattgggcaaacttatttcgtcaaaatcatccaatgacaagaaaacttcttccaaacaagaaagctctgttccatcaccatcattttaatggttatcccgttcataaactcgacatatcacccatttactatggcccggt

SEQ ID NO: 61464 - DNA, 1955 bp, Glycine max
  unsure (1)..(1955): unsure at all n locations
  Clone ID: PAT_MRT3847_26515C.1
cgattgcaagaggaaaagaagaagaaaaaaggctccaccgaaatcaatttcccacagaatcaaacaaatcgttggagttggaaaacaaaacaagagaaaatgggtggacgcaagtgtttgttaacgttggtgttgagtttggtgttgatgatgagtatggcagaggcgcaatctggtactagcgcagactgcgcccaggagctaattccatgcctggactaccttaatggcacgatcaacccaccaagctcctgctgcgaccctctgaaacgaacagtccaaaacgaactcgcctgcctctgtaacatctacttctcccctggccttcttcaaagcgtcaatgtcactgtcgatgaggctctcggcctcagtcgccgctgcggcgtcactagcgatctcagcagctgcaaaaacgggtcagctccagctccgggttcacggccaccaccaggtaagacgcctcccaacatccccaatttttttttttttttttttcttgatgagcttcttttttgcagtgataaatgagagtttgatttgatagactttcatcacatgtccatgaatataacatttccagtaatttgaatctgactaaagactgttttattaattttcagattattttttaatttatttttaatgaactttagaaaaaaaattagtttattataggaaattttacggtgaatttcagaataaattttcatatgatacgactttattaaataaaaagtatctctatactattttattgctaatttacaaatatctcatttttttatatttatggaaaaaaaattggtatcttattataagaataataatttatatttataatataaaatatttgagtagttaatgaacttgtttgttaagattaagatgcagttaaataaatatcttggttcacccaaaaaaatatatcatttgatgagtagcatgaaaaaaatcattcaatgagatttgtcctattgaagaaagaaagacaaacaaccaccaactctgctgctctgacgagtcccactcacgagttgggatttttttggtaaaactaattttgaattcataaatatgattaaaatttaatttaaatcagatagtcagtattaaatcatttggaaatggcccccccccccccaatccagtattcaaattagtcagtcaaaatgtagaccccgggtgtcgttgtcttcttaatttctttccacctccaggcccattatgaaatttttatatatataaatgacgcgtattctcatctaccagttctctcttacttttttaatagcagtttctcccttctccttctgcatattatgcctgtgtgtgtttgaatggaaaattttgagaaattttaaattctaagaattttaaatattttaattgaaatttttttatttttaaaatttaatgtttggataaaaaaaactgtaaggataaaaaaaatgaatgaaaaaaagaaaaaatatgtattaattataaatgttccttgtaaatagagaatttcagataagtcatccttaattaaattatgttacaagcataaagcgtaagtatgcaacttccatttctcataatacattttttctcattttgtctttttccctattgtttctctcccactccttcacgaggcctatcatgacatgatccatgaaccttccgagggacaaaaaataaataaccatggtcaagtcaacatgcatgtgagcttcacatttgttattaattgctaaagtacactgccacaaaaaaaaaaattgcttcagtacacataattcgtaaccaatatccaccgcaaatggttgaaattcccaatatctgcaaagtacaacttcttccctcaaaacataattcataacaatgcaattttgccattgcagccactcctggaggtgacaaaggaggagcaggcacagtcacattcaccgggctntctttcctcctcttat

SEQ ID NO: 61465 - DNA, 118 bp, Glycine max
  Clone ID: PAT_MRT3847_26516C.1
ttaatcgagttatctctggactcttatatcgttctttgtcacaacttaaataatttccaaaattacatccttgttgcctgtggtcctcatccttctacttatgcttcgacacaacata

SEQ ID NO: 61466 - DNA, 372 bp, Glycine max
  Clone ID: PAT_MRT3847_26517C.1
atacctaacagaaatttctaaatcaccttctattgctacattaattctcacccagacttcaaggaaaatatcatgaccccaaaataccaaagtgcaacttggacggaattctcctgtaatcatattcactccataaacttacacctaagaaaggttgagcgggactttatgtgacgactcgcatttcagacgtgacatctgtatcctacccaacaaaggcttaccttccttacccacgcagctctacgaaaagactagactttcctacccaaccacttttcttcagtccagggaaaagaacactttagcctatcccattgatgtggacccaggcgatgttaaaaacaccggcacatcttttcccttggcccg

SEQ ID NO: 61467 - DNA, 562 bp, Glycine max
  Clone ID: PAT_MRT3847_26518C.1
ggagcagaaaggaatgctaccagttctccttagcaatttttgacttttcgagtatgaactttccttccttgtacttgtgggatgcttcgtaagctctttcatacttccaacccaacacttcacggcaatcaccacaataaacatcagcaacagtgtggaggccagtcaagagatgtctgtcttcttttggccctgtgacaatattcattgcatgggaaaacagaaaggctcggccgtttcttccatgaaaagccttggaaatgatatcatcatggagtgagacatggttcctacaattagagcagctgtacaagcgaggccctatcagttccgccatgaatttggttaaggaaatttcagattgaacacctcactacagcaagctcaatgatgacccgaaagtctgcaacaataagataagaagaaaagaagaaaatatggcgttagttagcgtgcaagagtaggcttgatcacaaaaatatgaatcaagattcccaattaggggtatgaaaaaaattacactccatatatggtcccccttctgtcgtcttctcgcagccgt

SEQ ID NO: 61468 - DNA, 766 bp, Glycine max
  Clone ID: PAT_MRT3847_26519C.1
cggaccagatactgttcttcatagataaccatgatattcatagaccagaaaaatgaatacacaatgttattaacagggaataaacagtttatcttacaatttcacttctggtcataacatgaggaactacaatgaagtaggagaaacaatgacaaatttcaaatggttgaaggtaagaacatcctgtacaagatgacaatcacaaaacatgaacgaaccaacacgaagagcggaatgaatagaatggggagcagaaaggaatgctaccagttctccttaacaatttttgacttttcaagtatgaactttccttccttgtacttctgggatgcttcataagctctttcatacttccaacccaacacttcacggcaatcgccacaataaacatcagcaacagtatggaggccagtcaagagatgcctgtcttcttttggccccgtgacaatattcattgcatgggaaaacagaaaggctcggccgtttcttccatgaaaagccttggaaataatatcatcatggagtgagacatggtttctacaattagagcagctgtacaagcgaggccctatcagttccgccatgaatttggtcaagcaaatttcagattaaacacctcactacagcaagctcaatgatgacccgaaagtctgcaacaataagataagaagaaaaatatggcgttagttagcgtgcaagagtaggcttgatcacaaaaatatgaatgcccccttctgtcgtcttctcgcagccgtcggacgcgtgg

SEQ ID NO: 61469 - DNA, 1978 bp, Glycine max
  Clone ID: PAT_MRT3847_2651C.1
gtgatggggttgggctttgcgattgcggcggaggaagggtgatgggaattacaatgggagtggtggtcgggagagggaggatgctgcggaggatggttttatgtttgaggaggaaggggaggtgacagggtcaagtttgaagaagaagaggaaggtggcgaaggggatggagaagaaggcgtggcggattcttgctaaccagctggggcagttgagagagatggaaacgcgggttcagcagcgtgaggtggagagggagcgcgagcgctatcggaaaaggttttggtgctcgcggaggaagagaaagaggagaaggaagaagaagaggaaaaacatggcgagagcgtcggtgtagagattattggacaagcatgattcctccgaggcggaagaaatggaccgaggcggaggagaaaaccctaatcgacaagtacggggagctggtggaggacggttcgctggctaagatgcggacgcgggagaagaagttcaagccgattgcttgtcacgtgaattcggtgcatcacgttcgcgatcccgtggcgtacccttggcagtggagttggaaggacgtttcgacgaaggtgcagaacatgcggcaccagtatttgcttgtgaagcagaagatcaagaggcccgagttttctgggtccggaggaggaggggattgtgatgatgtgagtgagtttgactgggtggaggggcttactcattggtctaattttcttaggtataaggatgtgtttggggatgttgcacttgttgttggtggtcatggtgggaatgagttgatggggattgaggatggggatcacggggatcgtgatggggataatggggatggttttcttgctggtggtggggggatggatatggttgagtttgggcagatgggtcattccggggatggggatttcggggctgctatggatggggtggacaatgaggtgatggggttggggtttgagtatgaggctgaggaaggggaggtgaattacaatgggagtggtggtcgggagagggaggatgcagccgagaatggttttgtgtttgaggaggaaggggaagtcacagggtcaagtttgaagaagaagaggaaggcagtgaaggggatggagaagaaggcgtggaggattcttgctaaccagctggggcagttgagggagatggaggcgcggttcgagcagcgtgagctggagagggagcgtgataggcagaggagggagaatttgcgagtggagcttgataagcagtgggagaagaagcttgaggagagggacaaacttaggaggcagaggatggtggagtgggaagctatggagaaggaaaatgaagagatggaaaggaagaggagagaggaagagttgattcatgagagggaatgggaggagggaatgaattgcaggaggctggaatggaagaagagggttgacgagatgctgagccagcaccgagcagaaatgggccagatgcagactcgttttcttcatgagcagcaaaatcttactaaccaattgcttggtatattctcgcagtggcctgcccaacccgctggcctatctgatcacactagtgctagcaaccattatctttcacatatgatgcaaaatttgcatcatgtgaatggaattgttcacggtgacgctagggttgagggagataatcaagaagatcaattcattgttgatggatgatgtatctctgccattttgtgtatctgtgctggggagtccaggaacatttctgttacaagaagtggcgaaaagtgcacataattgttgaatgcattcttaattgtactttcttcatttaggtattgttgtatactatgtttagtttataatattttagtgtaactaatcgatataaataatgttttttgttccttgttttcgtccgtactgaactttgaaactcagaaactgtagtgtaaaggccacattttttgtcccaaaaaaaaaaaaaaaaaaaaaaaaaa

SEQ ID NO: 61470 - DNA, 595 bp, Glycine max
  Clone ID: PAT_MRT3847_26520C.1
aatatatgacatgcatgcatgaccacaagctttttaagatttttgttcctacttgaatgtgtaaccctgtcacacgcacataataaaggaatatggtcaaacaatttatgacttggcatataatgtgttccaaaaaatggctgactctttgtgtctagtccatcatgattacaaggactggacaatcattttgaggactattaaattcacttttaccccagatgatataggctacatggcactacaattgcactcatatacatgatctatcactctacttcaagatgatgaacatgttaatggtattgatatgatacatgatattggcacattaaacgcagttcctcccataccagcggccttcctttgcattgttggagatgttacgacatgtgtacgagcaatgaaaatttctaggaatgctatacatcgtgtcttatgcaaggaaacgggtactgattatgcatttagtgcatatctgttatcactaatgcatggtattgtatacgcgcctattaaacatgtgcaaggcgtccatttactacgctatagaccattaaacttctaagatttgagggatttgaaaatcaccaca

SEQ ID NO: 61471 - DNA, 2493 bp, Glycine max
  Clone ID: PAT_MRT3847_26521C.1
accaaagctccaatttttaaaatagggttacatgttgaataaatatgcagttttatagacaaggattaaagatacgtcattaagaccatgctgtacgacaatttttacattacttctactgacaccaccagggaatagtgaatttaaaaaaaaatgacaaattttagataggtaaagatgcgacattaagaccatcctgtacgtcttaaaagcatgaaagaactgagcaaactcttgattacgattggagtgaaattgcctgcgtaaggaaattgcctctttcaagaagcatctgagtgtttattattttgtaatatatttatatatagtcactcaagcttctaggatttctgcctgctacatgaaaatgggaagcaacttgaggtttttgagtctttgcctcttggcattgattgcatcaactcatgctcaacttcagcttggtttttatgccaagagttgcccaaaagcagagcaaattgttttgaaatttgttcatgaccatatccacaatgctccatcactagcagctgcattgataagaatgcacttccatgactgttttgtaaggggatgtgatgcatcagtccttctgaactcaacaaccaatcaggctgagaagaatgctcctccaaatctcacagtaagaggcttttgacttcattgacagaataaagaggccttgttgaagctgaatgccctggtgtggtctcttgtgctgatatcctcactttggctgccagagacactattgtagccacaggtggacctttttggaaagttccaactggtcgaagagatggggtcatctctaacttaaacggaagccagaaataacattcctgctccatcttccaactttaccaccctacaaacactctttgctaaccaaggacttgatttgaaggacttggtcctgctctctggtgctcacacaattggtatccgctcattggctcatcattatcaaaaccattagttcaatttcactgggcaagggtgatcaagatctcgtcactagatagtgaatatgctggcaaatctgaaagcattcaaatgcacagacctcaacaagttgaaaaccacaaaagattgagatggaccctggaagtcgcaagacattgtgatcttagctactatagtcacgttattaagagaaggggtctatttgagtcagatgctgcattgttgacaaactcagttacaaaggctcaaatcattgaattgcttgaagggtcagttgaaaatttctttgctgagtttgcatcattaataaaccgattgttcaatttcactggcaagggtgatcaagacccgtcactagacagtgaatatgctgcaaatctgaaagccttcaagtgcaaggacctcagtaaatgaacaccacaaaaattgagatggaccctggaagtcgcaagacatttgatcttagctactatagtcacgttattaagagaaggggtctatttgagtcagatgctgattgttgactaactcagttacaaagtctcaaatcatccaattgcttgaagggtcagttgaaaatttctttgctgagtttgcaacctccatagagaaaatgggaagaattaatgtgaagacagggacagagggagagatcaggaagcattgtgcatttgtaaatagctaagaatcttgtcttgttcatggatgaatcttgtatcatttattttttgggtttggttatttatgctatgccatgttttttgattagttatgctatgccatgtggtgtctgtctacatatgagtgatcccttatggtatggttgttgtatgtgtgttggaataagtgggttccattgttattcttatttccaactttgctggtagatcatgctcttgtaataagaagcagaatttcttgtgctacccacagcagagttaatgtatgtttagtcttttttttttgtattgatgtactttttcattgttattctcaatttaatgcatttttcctctcacttgtacttctgtgatgcttcataagctctttcatatttccaacccaacacttcacggcagtcaccacaataaacatcagcaacggtgtggaggccagtcatgaggtgcctgtcttcttttggccctaccacaatattcattgcatgggagaacagaaaacctcggccatatcttccctgaaaggttttagcaattatatcatcgtgaagggagacttggtttctacaattacaacagcagtacaagcgaggccctacaatttccgccattaatttgtcaacaattgcacactaaacacctcgctgctctgcaaccaacaaacgatgacccaaaacaaagattcgcaacaataaattaaggtaaaagaaaaagaaatgttttcggcgcacaagtgtatgcataatataataatattctgaataaagaagaataaaataaaaatacaaaaccaatttcattcatcaagttcactgtcgcatcccccttctgtcgtcttctcgcagccgta

SEQ ID NO: 61472 - DNA, 409 bp, Glycine max
  Clone ID: PAT_MRT3847_26522C.1
cgagtctggatgcccttgacaactcacgccatcacgactgttccttccggactttctgcccctcgtactcgtcacctccactcatcttacacacgacacttttcttaatcctccctggcgcctgcattttctcctaatgactcccatgcagtagacgtttctcatgagctggccttgacttctctcaacttcattctttgtttctttctcttctaccttgtccttcctttcttcttcgccactttctcttagacctgctgcagggcagctcggcgactaccaactaactttcactcaccaccacaccaactttaatacaactgtccatcactactaataccctttcgacttcgaccatgttattcaataccgccctgttgggcggccttctcctcgctggccatgcctc

SEQ ID NO: 61473 - DNA, 1490 bp, Glycine max
  Clone ID: PAT_MRT3847_26523C.1
gaacctgtctagggtttctgtccattggaaattgcaaaatctgcatatgtaaacatgttcccttccactaattatacctcctcaggctcttaccctcgtttcccttcatcttcttcttccacttcaccctatccttcttttactctccttcatcctgaaaattcttcttccagcaacaacacctttcttcatgatccacttgctcttacctacataccctctcattaccatgctccaatcccagaaacactagccaattgggcagttgcagattgtgcaatactgaatcaggatctaggtggtgccctttatggcatcaccaagaaaccaatgaagaaagcaactaagaaagacaggcacagcaagattcatacttctcagggtttgagggacagaagggttaggctttccattgagatcgcacgcaagttctttgatcttcaagatatgttagggtttgacaaagccagcaacacccttgactggctcttcacaaagtccaagaaggcaattaaggagcttactcgaagcaagcacagtgttgaaagcttcgagttctcctcatcttccgagggtgaagtagtttctactatccagcaacaagacctacaacaacaacatgggataaatttggaaaatgggaagttgaaagaacctgcagcttattgtgttaaagcaaagatgaaggaatcaagggaaaaagcaagggcaagagcaagggaaaagactagtagcaaggtattgtgcaacacaagtggcgaagggaaggtgcaagagttgaagaaaaagtgccctgcaactgaaaaccctcaaatcctgaaccagttaaggtcaacccttcaacctcctcatcctcaaaatgtgggtggagaagtgccaagagatgatgacttcaacgttattgaggaatccattgtcatcagaagaaagttgaaacacactttgatgtcttccaatattcatcatcaaaacgctgtgatccctaaggaagcaagtgtaaacaacagtgactaccactccttccccaatttgtctccaaattgggaagctaataatggtgccaatggacgctccaccttttgtgcaatagccagcatgaatctgtctacagggcttcaaatttttggaaaatcttgggaggagtgcaccaatcctcatccaagctaatatgttagctttcagtattatccgatgattgtctctagtgttttgctaagaaacatcatggtcatggaggcatctttctgtgtttttctacctgtaactttttctgtcctatatttcctttctacaatgtactgattttttgttgttgctctatatcagccaagaagggcatgtgacagttggcaaaaaaggatgcttcgtgtataatttctgaccaatattttaagtgtggctgatattataagggtcaaatatatttatcaggaaccgtcctttcttttgctagctgatttcaatttttatataattagtttttgatcaat

SEQ ID NO: 61474 - DNA, 312 bp, Glycine max
  Clone ID: PAT_MRT3847_26524C.1
gagctccctcgcactaggccgcgcccgtccttttttttttaaaaaattattttttttaatggcctttacacactatccaacgggaggtggagattgcacacaaatggagatttttgccactcaccattctccaattatccgcaacacccagattagtgtcttttctcttgtggagggtttcccccacggtcgtggcgcgcccaccctttgctaggggacctataacacgaggccaacacctttcaacatacttttgactggtggggatatgagactatttttggcgccatgagactgaaagaagcgggcctc

SEQ ID NO: 61475 - DNA, 471 bp, Glycine max
  Clone ID: PAT_MRT3847_26525C.1
attcgagcagccgctttttttattggggaattgaaatagtttaacatcccaaacaccaagcttaaagaagagagacaatgagtgacacaaatagagcaacggaggagaagagcaagagaggtttaaaggaatggtttaaatcgtctcaggttctattgagcatgatattagtgcaagtgtttgttactggattgcaactactatcaagggttgtattagttcaaggctctttcatcttttctctcattgcatatcgttttattgttgctaccatttgtgttgccccctttgcactttactttgaaagaggccgcacaaaggattttactccgaaggtttggttttgggtgttcgttaacgcattgatggggatgactttggctcaaggattattctattatggtctcaaagacacttctgctacttatgctggcaactttctcaacttggttactatatggactttcttta

SEQ ID NO: 61476 - DNA, 3302 bp, Glycine max
  Clone ID: PAT_MRT3847_26526C.1
cggaattcggctcgagagcaaacaagtctccttacatctgcacccagtccatattccaattccgtgtgcccattcacgtgtgcggaccgacggcgcctaaatcccaatttcctcccattagggtttctctctctccaattcatgttctctttttcttaattcattctcttctattcgattcgattgttctatggaaccgcagcttcagcccaagctggagcccgcgccagagcttgtgagcgctggcgctgaggattccgagaagtcgcatgtcagtgatgtcacggaggttcgccacgttgccatggctgaggcaaacgccggttgttgcgcttccgttttgaaacggaagcgtggccgtccggccaagggaagccgcgttccgaaagggatgactccgccgtcgaggcagaaaaaggaagaagaggatgtttgcttcatatgcttcgacggtggaagccttgttctctgtgatcgccgtggatgccctaaagcgtatcatccctggtgtattaagcgagacgaagccttttttcgctcgaaggccaaatggaattgcggttggcatatatgtagcgcttgtgggaagggatcgcattatatgtgctatacttgtacctattctttgtgcaagagatgcacaaaaaatgccgattttgtctctatcagagaaaataaaggtttatgtggaatatgcaagaggactataatgctgatagagaattgtgcccagggtgataaggcggagtgtgaggtggattttgatgacaagagcagctgggagtatcttttcaaggtgtactggatgtatttgaaagagaagctatctttgacatttgatgagatccttcaagctaaaaatccgtgcaaaggagttgcaagattagaagcatctggtgttgcggtggatgtttcatcattactcctttctccaaagatggagctgccaatcaacaattttgcgaatgataaaccgtggcattatcaggatccaactgggaaggttcaaggacctttctctttattgcagctgtataagtggaatgcttgtggatattttccttcagatctcagaatatggagggtagacgagacacaaaataactctatattcttaactgatgtgctgaatgggaagtgttcaaaaaatgtgtcattgccaaacaacagccaacagctgtctttgggaaccaatagtacattggaaaataaagaaaatagtcaggatggtggtgagaatgagaacaatgcgacaaggaatggaaattctgcaaaccatcaaattgttgagcagtgtgatgagcaaaaagtggctgatacttatacacaatctaatggtaaagatgaatctagtaaggagcaatggttggaactctcagtctccaggtttgactatacaagcagatgggaataacaatgaggggcaaagtggaaattctgaaaggatggaggagtcacccaaatgtgaaatttcttgtcatgacatcccccatgtatacacttcactgccttcaactgcattttctgagaaactgaacgagaatccttctgataagttaacagaagttcataagattgaagtaatgtctgaagataatggaaattctgtcttgaacagaatttctgagggtcgaagtaacagtgggcaaagttgtcagaaacaatcagacagtgaggagaattcagggctatcttctggtcagaactggagatgccctgatgtaaccaatccagtatgtaacatatctacatggctatcaattggtgaaccaaatgatttggatgagtcagtttcagatctgctggctgaagtggaggcaatggagtcacttgggggcttggaatctcccacttctatcatgaaatgtggtgaggagttgactgacggttctataactgattgtcttagttttgcagatgcgcttagcccaatgcttgacgcaggtaagggtgatgcactaagctcctcaggtgatttacacttaccatctcaaaccacaacaccagatgacccattaaagcaagcagatgtacatcatcatcctcaaaaaatatctggggagcattcaacaaagagttcagaagttgagtctactttctctaagattagctggaacccaaccattcaatattcctgggatcctcctaattgttgacatgacagattatgttgcagggggccatttttcttatctttaggctaaacatatcttagacaaacttgatttggatagatattatcctgtttataacagcattctttgcaaacagtaacctctcgccttcattgtttgcttgttgatgaagaaaagaaacagtgttagggttcttcgtagtcttgtctattctatgtaatctcatctcattgaattttaaatgtgaagaactttactaggtttcattgtttgacagatccgtattcgtctttccttcaaaatttcgaagaaattaataatttacagtatgtatctgtgagatctttagattgaattgtgcaaatatagtaccaacatcccaccggtagttgcacgagtagggtcaggaaactcggaatcaagttgcttgtcatagattaagttggctccaacgttgtaagtattagtaggccatttccgaattatgaaggagggaattgacattcattgtgattactataatttgtttgtgggtacaaagaacggtgtttcaggtaatcaatgggattcaggctcagaaaattcacccattgttccatcccctggaacattgggcctggctatagacaccacttggagacttggcttagagaatacacacttgggatggagtggaatagatcaaggaaatgcaaatgtgggttggggagtaggacagactgcagtgcaggaaaacagaagttcaagttcgtacacttctacagtaactccaggccttggggatagccaaacaagatatggcagtgatcgattttctgtgtccagagatcggggttttcaaggtcatggtagggaatcaggttttagtagaagcagaattccatataacaggcaaccgtcatatggtgttggaaatggaggatcatataggcctctgcccaaagggcagcgagtttgtaaattttatgaaagtgggtactgtaagaagggagcatcctgtgattactggcacccatgattttagattccattagcactggtcacacttgttttttttgtaatccttaacatatctgaagttggctctttccaattgttgtaatttaaccgacagtattagtctagttgcataattttttttatatgaaactactcttgcttgatctt

SEQ ID NO: 61477 - DNA, 226 bp, Glycine max
  Clone ID: PAT_MRT3847_26527C.1
ctttgaaccacgctagagaatcgttgatcttatatattcgccagaagtcgttattcgtacataggaaccttgatcaaccgtaacgtgtcgctaatgctccgttattcatatctaagcgtattataaaaagtctcgcaatctttgcattatcaggcatagaagaagcctgccaggtcagcgaacttagactccatgctagggctgtgacggagtgctaagcccagcc

SEQ ID NO: 61478 - DNA, 446 bp, Glycine max
  Clone ID: PAT_MRT3847_26528C.1
tgcatacatgatatctatattttaacattgatatttgatattatcccttgttaacatgaacaagagataaaaatgacagaatccacagtctcactcttaccaaattgaatctatttctttcttaatttacaccaaaaaaattatttccaactactcatattttaacgggtctaattgaatctatttttttcgttacaaatctatctaattaatccaaggtaagtaaaaacatcctacaccaaattcataatggaaaaaggaaattgatcacttacgtaaagaagatatatcaattggcaaaattaattatcattagaggggtctgaaaaaatgctttggatatgagaatattaagaaatattgttgtttatctcattgcattttaattcaatcaattagtttataagcttctaacttgtaacttacatttataaatttttatagct

SEQ ID NO: 61479 - DNA, 262 bp, Glycine max
  Clone ID: PAT_MRT3847_26529C.1
acaacttcctcattttataattcatttccaataccaccttctctacttacctttcgatatgattcaacaatactgtttcttcacctaatcaacctcactctatttccatttttatttcatatttctgatccaaaatcttcctcaacaatatcacctctactcttcttaaactatccattaatctaatcaaaatccataccaaaatcatcttctatcccatccatatacttatacccaaatacaataaaccaaaattactttc

SEQ ID NO: 61480 - DNA, 1383 bp, Glycine max
  Clone ID: PAT_MRT3847_2652C.1
ctaaaggctcgcgttgtagaatcaaatacagattttcctcacaagttcttctactgcttttggtggggtttgcgcagtgtaagttctgttgggcaaggtctcgagacaagtacttatgctggggagataatctttgctatcttcattgctgtctttggattgattctatttgcatcacttattggaaacatgcagaaatatctacaatctaccactgtcagagttgaagagatgagaatcaaaaggagggatgcagaactgtggatgtcccaccgtatgctacctgatttcctgaaagaaagaattagacgttatgaacaatacaaatggcaagaaaataggggtgttgaggaggagacattaattcgcaacctccctaaagatctcaggagggacataaagcgtcatctttgcatagacctccttaaaaaagtgccaatgtttgagaacatggataatcagttgttggatgcactgtgtgataaactgaagccagtccttttacacggagaaaagttacatagttcgtgaaggggatccagttgatgaaatgctgttcataatgcgtggaaaacttgctactgccacaacaaatggtggaagaactggtttcttcaactcctttgagatcaaggctggtgacttctgtggagaagagcttctaacatgggccttggaccccaactcatcctcaaatctacccatttcaagctcgagagtggaaactatcggcgcagttgaagcctttgctctcatgcctgatgacttgaagtgtgttgcttcccaatttagacgtcttataaacagcaaacaacttcaacacactttcaggttctattccttgcaatggaagacatggggtgcatgtttcatacaagcagcttggcgcagatacaaaaaaaagaaggctgagaggttgttacgtgaagcagaagaaaggatacaagctttggaaaatgaggaagggtcctcacctagctttgctgctacaatatatgcatcaaggtttgcatcaagtggattgcgccacttgcgaagtggtaaacgcaccagagtgccacagccacagagatccctgatgcctcagaagccagatgatttcactgctcagaaaaactagttttaaaaaaaattattgcaactttaattttttataagactgtgcctgaggattaattctgcatattttacatatccttaacaattgtgcttgcataagttactagtaagtggtgtttaggatttcctacaacaacaaactaagcatatgtagacacagcagtgtgtaaaaatattggttgtgtttggatgaaccgtttcaaaacaaacttttacgagaagagcttttcatagtcatatatcagactgattctactccaaaaa

SEQ ID NO: 61481 - DNA, 299 bp, Glycine max
  unsure (1)..(299): unsure at all n locations
  Clone ID: PAT_MRT3847_26530C.1
nntncanaagnntttgacgcgtacgtaagctcggaaattcngctcgagcctgcccagaaatgaagcccggcccacacccgacaccagccctgctgcttcctaacttattgcctgggcagtgcccaccatgcacccctgatgttcgccgtctggcgagcccttagccttgctgtagagacttccgtcacccttggtagagtttattttttcgatggctaagatactgctgatgctgaaataaactagggttttggcctgccaaaaaaaaaaaaaaaaaaataaaaaagaagtaaaaagaa

SEQ ID NO: 61482 - DNA, 463 bp, Glycine max
  Clone ID: PAT_MRT3847_26531C.1
tagacgaatgggtctgacacgtgcgggtcatatatgacgagagcgtgtgaggagaaaagcctgtctagatagagcgagacactgaagaatgtgatggtgctgtaccactactaccctttcccttctctggcctatggatgcagctactgtcatgcttatgctactactaaattaaaagctactcactcactatctctaacactctgcaaccaccgccgcatttgtgcgtcacaacctgactcttgcaccttcgccatcatcaccaacctcttcttctatcaaaaccctagtttcatcacggggaacactctcttactcacgatgcacagattttgctgcgtaagtggcttaagtgaaaacaaatcactcgtggagaagctgcatcgctatggactgatcacatcaagtaacgtggctgatgtgatggagacagatgatagagccttgtttgttccagatggag

SEQ ID NO: 61483 - DNA, 648 bp, Glycine max
  Clone ID: PAT_MRT3847_26532C.1
agaaatttcttttttatgaaacctcacctccggtggaacctttagcttccacacactgttcattccactctcgttgaacagcaagtctgtcatgatccttcaccatatttatatattgttgatatgccgaacgcagaaagtaaaacccatctttattggggttccatattaacttatatcattctgctcaacatcaacaatagggctctccgccaacgcaagagctgcaagctcctcattaaagatagcatcaacaatagacttctccaaggataactgggattatggcccagactgctatttcacataccattgattctgacaagggccggagccatcctgatcctcccagtgatgatgacttggttgcagaaggttgtgtgaagtcatgtgcagatcatcataaacagttaaacattaaaagattgtgattctaattttaagagttgttgttgtctttatggtgttttattgttaattaaattatgacaaagtagtattttgtcagtctttatggtgttgctgaaaggagttcaagtatctggaaatgaattattgaagattcattattcatttttcaattccattgtaatatcattcccctgttaatgaattgcttattgctactggcagatgaccttgatgtcc

SEQ ID NO: 61484 - DNA, 330 bp, Glycine max
  Clone ID: PAT_MRT3847_26533C.1
aattacccgggttcgagcccgacgcgtcacgtaatccttattgtatttgatcagccaaggatattatcttgtcacagttgtcagaattgtctagactgtgacttaaatcatttgaagaggccaagcacacaagctctatggagaaagaggcagcgctactctggaaactcggcatgaagatcatttccccaggaacacattcgaatacaccgtggctgcactcctctacttgtttgcttggcctcttcacatgatctaagtcacagtttagacaattctgacaaccgtgacatgataatatccttggctgatcaaatactttagggattc

SEQ ID NO: 61485 - DNA, 486 bp, Glycine max
  Clone ID: PAT_MRT3847_26534C.1
gggggggaaaccaaaatgggttttaaaaagccccattttgtttaaaaaaaatttgggggccccccaaaaaataggggggttttggtaaccccaaaaaaaaaaaagggggtggggaaaaaaaaaaacccccatttttgggtccggggggaaaaaaaaaaaaaaaaaatcctttttaaaaaaaacctgggggccaaaccctttgggccaatctttgggaaattaaacaacggggaaaaaaaaggaaaaatttttttggggaatttaaagggaattccttttgggggcaatttttacccaaacccccgggggaaaacccctgattccctgggtccaaaaaaatttgggaaaatttaaatcccccctcaaatttttgggccccaggggctttggggaaaaattccttttttcttaaaaagcttgaggggctttttttttaaatgggcccccatgggggcccttggggggggaaatggggtattttttgga

SEQ ID NO: 61486 - DNA, 1210 bp, Glycine max
  unsure (1)..(1210): unsure at all n locations
  Clone ID: PAT_MRT3847_26535C.1
cccatgtttccgcccacgcgtccgcccacgcgtccgaaaccttaataaccttgccattgcactaggcatgggcgttaacgttaagagatacgcggctgttggagaaggaccaccgcatctcaataacagcgtcccattagcaacaacacaaacactaatctaaacctaaactctttctctcagcaatcaatctaaaaacaaacattattagcattattcttttcatcatcgtcttcgcgagacactcgcatctgcatctgccgcgtcgatccgcactacacgcggcagcacatcgtccaacaaataccctttcaatcttcaatctctaattctctattctcaaagtccaaaaagcattcccgtttttttattttcttttcttaaatttttcttggtcaccaaactctcactttctttctctttctcacttccactttcttcgtttcttgtaattttttaattttaaaattgataatccaggccagcatttatttctctctacttgaccttgatgcaatctatcaggacgtgcttcaaatcttatggttcttacaacaaacattctcggttttccggcgccggaaactctgattctgatcacgagcagcagctccccattcttcacgaccaagaaacccactgccaccctgccatgcccgccggcgactacgtcgtcaaaatcaacgaggacggaagcgaggccccccagggcaacaggatttggcgcgagtccagctacgaattctggaacaacgatggcgccaccaccaccgccggcggaagcgaccagagcttcgatttccgccagtcggaggacccgccgtcgcagctgatcgggcacttccttcacaagcagcgagcctccggcgagatgcagctcgacatggatttggagatggaggagctgcagcgcgaaggcgacgacggaaagttaacgccggtggatgaatctccggtgactcaccgcgtctcgagagagctcaaggtttccttcgaggaacctacctgcaatgtgaatttcctggaagcgcaaaacgacgccgtcagaagaaggcacagcaaggactcgccgtcgatcgcggagttccaacgccctccgcaaccgccccaacacgactgtcgccggtctccctcgccgtcgncagccggcgacgaggaggttgttcggtgcacctcgaacgctttcttcgagagaagcctttncatgcag

SEQ ID NO: 61487 - DNA, 429 bp, Glycine max
  Clone ID: PAT_MRT3847_26536C.1
acaatgcgcatgcattacaatatgttacctatacgaatgaccactggctattgagcctctactctggaacctaaatacacaaatagaaggcttgctgtgacaacacacaatagtgtttcgctttgagactcatttcctgaatagtgagcctgaagcgacaagatgctacttacatgactaacagatatagatcagactccataacagttaaccaacaaccttacttttatgccacagacctttaatttcattccatggacacattttgggtcagtatagatggcaacgtactctataatattccatactacaaaaaacatggatatggtgtggagaaattcaaactcgacttgtatgatgaatgggttaacactggcaaagcaccggcgctgtcctagactctttagaattacaacaagctggtgtctg

SEQ ID NO: 61488 - DNA, 289 bp, Glycine max
  unsure (1)..(289): unsure at all n locations
  Clone ID: PAT_MRT3847_26537C.1
aagagnttgtgtgctattcctgctccaggagtntttngtggaccanatttctctcttggcttccgctctangggganggnctttggcatancaagaataatncccttanctgnagattgacaaccangttaagtatatcaacaacacactgtatgangcgaaagangttcttgagcttctagncatagaggantttcagcaggaacttaaaggtgttgggtnaccaatnaagtgtcctttngngttcctgtannacccgngattcactnttgggtngaatccnctgtnt

SEQ ID NO: 61489 - DNA, 141 bp, Glycine max
  Clone ID: PAT_MRT3847_26538C.1
taaacaactctttctcttcttccttctctctttaatctcactcacttatatccacaatagcggatacaaaaacaatttggtatccattctaatatcaaccaacttctcactctcatcattaacaccttttactccaacaaa

SEQ ID NO: 61490 - DNA, 291 bp, Glycine max
  Clone ID: PAT_MRT3847_26539C.1
tgatgaagctataatttggatcagattcctttgaatttaaaaaaaaaaaaaaaaaaagggaaaaaaaaaaaaaaaaaaaaggacaaaaaatatagggggatcaagattaaaatacacatgcctgcggcgcctgtgcttccctattgtgttccctttcttgcgtccctgtgcctctgttttttggctgcgggaccggaatttccttggcgtggcctaacttattctccttggagtaaattcctgctttgccggctccctttttatgcgaagaggcaccgtcctattgccctt

SEQ ID NO: 61491 - DNA, 355 bp, Glycine max
  Clone ID: PAT_MRT3847_2653C.1
atagtgcatgggcttgtctatgttctaataagggggcagacttctttatctctctttgtgcttgacaacaacaacaacaacagcaagagcgtggactatgttcttaattaagccctgttttggtgggcaaatagtaccctgcccctgtgggtgaatagttaattaaaatgagagggacacagtcaatgggaacttctcctcttggcggcgaagctatacaccgtggtgcctgcattcattgaagatttattctaacgaagactttcaagaaacaaagcaaaagatgccgggaagccttttcacttatttgtcccagataggagctcaagatgccaaatggctttcttaaaactta

SEQ ID NO: 61492 - DNA, 263 bp, Glycine max
  unsure (1)..(263): unsure at all n locations
  Clone ID: PAT_MRT3847_26540C.1
attccaatatattccnattctcctctgtgtatntccctacntctcccttcaagatgcagatcttcgtcaagaccctcaccggcaagaccatcacccttgaggtggaaagctctgacaccatcgacaagtcaaggccaagatccaggacaaggaaggaatccccccggaccagcaacgtctnattttcgcggnaagcanttgaggacggccgtacccttgntgactanaacattcagagggnggtactcttnactcgnctncgt

SEQ ID NO: 61493 - DNA, 375 bp, Glycine max
  Clone ID: PAT_MRT3847_26541C.1
cacgaacaaaaggatattgttactgattgaaagacccccttcctttaactaaaccatggggaatactaaaaccaaaaaggtggggaataacaaattccctactattttttaattatgacatcttgcacaaaaagcgagcccatccttaatttttaaaaacaaaactttactaggcaccaaccccgggggacataacctcaaacggaggaacctgaaagatctgcaactgccagaaattggcaggcccctaatcaaaaaagcctaagctgtgcttaaaccagcgctcttaatctgcaagctcgataattttaaccactgacgcttacaccaactttgtggcggagaggtactcgggagcgggactctataactcct

SEQ ID NO: 61494 - DNA, 410 bp, Glycine max
  Clone ID: PAT_MRT3847_26542C.1
ctcgagccgcttttttgttttgtttttttttctggatttgttttcttttcttggtggaagttccttccttttagatctaagaccagcacagattcctgaaatcccagttagtttgactcaccctcgaccctagaactagttgcgtcagaagggtatcactcaaagctcaactttgccatagttctacctttttaatgccccacttgtttggaaagttggaacaatcatgccgcttcattctgcttcgctgtcatttggctttatttcgcacctttggctctgtaacatgatcatctggaagctcttggcaaatgccaataggtcatgagtcatgacaattgttgtttttgactgtgaaagacaagaaagttatgattgttttggaatttggatacgttcctgccataact

SEQ ID NO: 61495 - DNA, 906 bp, Glycine max
  unsure (1)..(906): unsure at all n locations
  Clone ID: PAT_MRT3847_26543C.1
cggctcgagtacggctgccagaagacgacagaaggggacatgacaaacgcggtgttaaattttctttaaagtttgaaagaaacatagcactgtgcgtgtctttatgtctttttctcttcgcgttcctttgtcttgtttttttgcaggatttgttttcttttcttgtttgaagttccttccatttagatctaagaccagcacagtttcctgtctttatgtcttcgtccgctcaccctcgaccctagaactagttgcgtcagaagggtatcactcaaagctcaactttgccatagttctacttttttaatgccccacttgtttggaaagttggaacaatcatgctgcttcattctgcttcgctgtcatttgggtaactcaacttgttccaaacttccagtgtcaattgttaagttgctaaaaatgctatcttgagcaagacaccttgatatttgctttatttcgcacctttggctctgtaacatgatcatctggaagctcttggcaaatgccaataggtcatgagtcatgacaattgttgtttttgactttgaaagacaagaagtttatgattgttttggaatttggatacgttcctgccataactgtattcacagtgctcatttggggatactaaacattggtttgggtttctgttaatggcatctgttagaagaaccttgtctcccgtgcctagagctggaactgtagcaaatggagaagtgtgttcagtagcttctcccttgtcgaagtcctcatcgagtcctcagaacttctcaccatcggttggattggactaccgtgcacttgtgtttgggtgttttcttcccaaggtctttcagggctttggagagatcaaagccacggnggcagctttggaggaagatgctttttcattttttcatttgc

SEQ ID NO: 61496 - DNA, 498 bp, Glycine max
  unsure (1)..(498): unsure at all n locations
  Clone ID: PAT_MRT3847_26544C.1
cgctccgtgaggaggttcacgaaccagagagtgagaagagagatctgttacagaattttcaaatttactcccttaaagatagaatttgaaattctattctttcaactaactaaaatttcttttaaaattctaaaattttgaattccttttactaaaatatccaaacagttacttttaataaaaaagaatttaattctttataaaaaatatattatctagctaaattaccttatccaaacacactctaagtgattttcaacaaatttatcaatgaaagcctaaacatcaattttgtatgtatatgcaggtcatacaacttcagggtgatcaaagaaagaatgtttctactttccttatgcaggtaaacattctgataactntattataatgtggctgttgttctttaccataaaacagtgttgtaatttctaaattcctctgtgatattacaaataggctggcatagtaaagaaggaatacatcaagcttcatggtttc

SEQ ID NO: 61497 - DNA, 751 bp, Glycine max
  unsure (1)..(751): unsure at all n locations
  Clone ID: PAT_MRT3847_26545C.1
aaccaagggcaagtttcatgtctgaattcgacacnaaacattcccaactgcttttgatccctttgctgatgcaaatgctgaggactcaggtgnctgggacgaaaagagtatgttcatgttcgtgtacaacagcgcaacggaaggaaaagcctaacaactgttcaaggtttaaagaaagagtacagctatagcaagatactcaaggacctcaagaaagaattctgctgtaatggtactgttgtccaagaccctgagttgggccaggtcatacaacttcagggtgatcaaagaaagaatgtttctactttccttatgcaggctggcatagtaaagaaggaatacatcaagcttcatggtttttaaggcctaaccaaaagtggcaatttagcttcatgctaaaatacatatagcctgctgattacatttaatagcaacagcagcaacagcttataaatctgaatccaagcaattatcagtcacagcaacattctgttatattgtagttaaaagagtcgtatataatctgctgtggtactgtttttttacctattctagatagttactacttgataatatatggtaaggataatatgtctgcttctaagacacctgtgttgaataaatttgtgttattattcttccatgtgcaagtgactcttggttgctttttaatttgggcctttgacgtgccaaattgggaacctttttgaacataaaatttatatgtataggagaatttgagatagacacc

SEQ ID NO: 61498 - DNA, 542 bp, Glycine max
  unsure (1)..(542): unsure at all n locations
  Clone ID: PAT_MRT3847_26546C.1
cntgcccagtgtcccggggggacgccacncgtcgccccacgcgtgcctgcnatgccttgttgtcaatgggcaccttcttcaattctcaatcttcttcttcttccagaggccgcgggggtgaccagactctcaagagtttccgtgagagctctccgctggggcagaatcacatcaaacggggttattttaccttatgtgncgctttggggggtgctncggtgggggcttttcttcatgtgctgtggggcattgggggggttctcaccacggtnggttccattgggagcgatgggtgggtgcgatctacaccccctgtgnaggagcaaaaggggtgggctctgtgnagtgggtcngccttgtgtcagggggcgtccattggacctctgagtgagttnggtattgcgattgagcctanccttattgtgagtgcgtttgtggggacttctttggcttttgcgtgcgtctctgcgggnctttangtgcgaggcggagggaggcctctaccttgggggggtgcgttcttctgggcgtggcattcttat

SEQ ID NO: 61499 - DNA, 1261 bp, Glycine max
  unsure (1)..(1261): unsure at all n locations
  Clone ID: PAT_MRT3847_26547C.1
cgctccgtgaggaggttcacgaaccagagagagagaagagagaactgttacagaattttcaaatttactccctgaaagatagaatttgaaagtcggttctttcaactaactaaaatttcttttaaaattctaaaattttgaattccttttactaaaatatccaaacagttacttttaataaaaaagaatttaattctttataaaaaatatattatctagctaaattaccttatccaaacacactctaagtgattttcaacaaatttatcaatgaaagcctaaacatcaattttgtatgtatatgcgttccgtgaggccgtcctcgagcggacgcgcggcgtttttcgtttattccttctttcatccattctactttcttttcctctcgctagtgtttagtgctaggtgattgattaacttagaaggactttgtgtgttacaagaaaacaagggcaagtttcatgtctgaatttgacacgaacatcccaactgcttttgatccctttgctgaggcaaatgctgaggactcaggtgccgggacaaaagagtatgttcatgttcgtgtacaacagcgcaacggaaggaaaagcctaacaactgttcaaggattaaagaaagagtatagctatagcaagatactcaaggacctgaagaaagaattctgctgtaatggtactgttgtccaagaccctgagttgggccaggtcatacaacttcagggagatcaaagaaagaatgtttctactttccttgtgcaggctggcatagtaaagaaggaacacatcaagcttcatggtttttaaggcctagccaacagtggcaatttagcttcatgctacatacatatagccaacagcagtagcagtagcagtagatccaacagcttataaatctgaattcaagcaattatcagtctaagcaacgtctgttatattgtagttaaagagtcatatataatctgctgtggtactgtttacctattctggatagttactacttgattatatggtaaggataatatgtctgcttctaagataactgtgttgaataaatttgttattattctttcatgtgcaagtgacttaccctattttggttgctttttaaaattgggaacctttttgaacataagatttatatgtataggagaatttgagatagacaccaacctaacccctgcttgttacacagtagagagaaaatgagagcagagtgaaaggaaattttgaagaaaaaaatannnnaatnnnncaaaatagtt

SEQ ID NO: 61500 - DNA, 405 bp, Glycine max
  Clone ID: PAT_MRT3847_26548C.1
gctcagtgttcgtggggatccgccgattcaccgtgcgatcccggggtttcttcttttttttcttcttcaaccccttcttccatggcctcttccttcttcttcttcggcttcccccccccccccccctcccccaccccttttttccttttcaattttcaattttttattcgaaaaaaataccaaaaaataggatcaatgaacgatcatctggtgctgttcgtggaccatctggtgcggcccgtgccggtggtcgagccgctggcccaacaaccccccgagcccgtgacgcccgtcaatgaggccgcggtggccggtccctccgggtcgtctccggctgcggaggacgaccgatacgactaccgggaggacgcgccgctgctgcaactggcggagtgttgcatttgc

SEQ ID NO: 61501 - DNA, 1747 bp, Glycine max
  Clone ID: PAT_MRT3847_26549C.1
ctttctcttccaccgccatcatctctccaccctccaccgccctcacacccttttaatatcctcactccccccaccacctcccactcttttcttttcacacccctcctcattcttcttcttcacactaattcagaatcaacatgaacccaaatgatgctaactctcctaagccgttggagattctgcagatgaaccctgttcctccgtttttgtccaagaccttcgacctcgtcgacgacccgactctcgaccccattatctcatggggctccaccggttttagcttcgtcgtgtgggaccctctcgagttcgcgagaatcgtccttcctcggcatttcaagcacaacaacttctccagtttcgttcgtcagctcaatacttatggattccgcaagattgacacggacaagtgggagtttttcaacgaagctttccagcgagggaagaagcacttgctgaagaacatccaaaggcgcaggtcatctcaatcccagcaggttggtagctatattggaatcgaatgttctactgaggcaggaaggtctgatgttgagattgagatagaaaggcttaggaaagaaaggactatgttgatggaagaggttgttgatttgaaacaagagcagcgaagaatggctcaccgcgcaggagaagtgaatcaaaggctccaatccacagaacaaaggcagaaacaaatggtttctttcctggtcaagttaatccagaaccccgcctttttagcccgccttaggcatgaggagcaaaaagaaatagattctccaagagtggtaaggaagtttgtcaagcagcaccaacatgaaactggaacagcagaaactctccaagaagggcagatagtgaggtaccaacatgattggagaaatataggcatgtcttccgaaactccaaaactaagtccagtttccattgaacagtctcctcactacctttcacagggtttggcaggagaagtgagtgtaggcgcagaagatcttactgctcaaatagagaatattgtatcaaatgacttggctgcagtgcacgggatcacagtgtctcaggaaattatgattggagaaggattatctagctttggagctgaagacccccttttcaaagggaaaagtgtcatgagtccaattctagaagttcctccagagtattttgcttccttcccagagggtttgaccaaggggaaagactttcaagatttttctgctcttggaactgaaggcatgataaagctagaagatatatgggactctggccttaatgttagtggtgctgcttcaggtagtgggaatgagctgtggagcaatcatgtcaactatgaagagtttccagaatttggagtcacaagtggtatgtctgactcagacatctgggatattggcttaggaagtttgggaattgataagtggccaactgatgaaccttctcttggtgaaacaaatggtcaagctggtcaaccaaaagaagataggcctaagaattttggtccatagggtttcatttgctcctgcacttgttgccctttggttacttgctatatttatagttcctaggaggcatattattgaatcatttgatttataaatagtattcattcacctgcttttattcatcatttactttcaatttttttattcttttagatgaattctttaactgtccatgtttttcttcgtaaattctaattgtgtaattattgataacttccactcaagtaaatcatacttttcctttc

SEQ ID NO: 61502 - DNA, 604 bp, Glycine max
  Clone ID: PAT_MRT3847_2654C.1
gccaggcacgccccactacaaccatccacacctctcctcgtttacgtctaccccttgctgctcttcttgtacccttcaagcggtaaaagcataaagcacgggagaggacattcctatttacctcacagtcacgtgaacgacgggacaccctgacaagctctgcgaccaaatctaccatgctgtactcaactcttgcctcgagcaggacccagacagcaaagctgcctgcgaaacatgcaccacaaaccaacttgaccatggacttcggagaaatcacgaccaaggccaacgcatgactacgagaagatagtgcgtgacacctgcatgaacactcggcttcgactcaaatgatgcgagactggatgccgacgactgcaaggaccatcgggacattgagcatcaaaaccctgatattgctcaaggtgcacacggacaccttaccaaaaaacctgcacaaattggtgccggtgaccagagtgacatgttcggatatgccactgatgaaaccacaggattgatgccattgatccatgttcttgcaacgaactcagcgctcgctgaccgagggtcagagaacggcacctgcccttgcatgagcctgatg

SEQ ID NO: 61503 - DNA, 149 bp, Glycine max
  Clone ID: PAT_MRT3847_26550C.1
ggaattcggccctagacggctgcgagaagactacttaagggggcaatgagtttctggtgactcccgaacagctctggaagctcttcgcttttaccttcatgaacgcgtacaggcattgtcaagaggctacttgtcgtacaacgatgcta

SEQ ID NO: 61504 - DNA, 1849 bp, Glycine max
  Clone ID: PAT_MRT3847_26551C.1
ctttctcttccaccgccatcatctctccaccctccaccgccctcacacccttttaatatcctcactccccccaccacctcccactcttttcttttcacacccctcctcattcttcttcttcacactaattcagaatcaacatgaacccaaatgatgctaactctcctaagccgttggagattctgcagatgaaccctgttcctccgtttttgtccaagaccttcgacctcgtcgacgacccgactctcgaccccattatctcatggggctccaccggttttagcttcgtcgtgtgggaccctctcgagttcgcgagaatcgtccttcctcggcatttcaagcacaacaacttctccagtttcgttcgtcagctcaatacttattctcatggggctccacccgttttagttaggattgagacttgagagactactactactgctggaagttgcaacaggagaaatattccccttcctgtagaagggatttcatattccacagggattccgcaagattgacacggacaagtgggagtttttcaacgaagctttccagcgagggaagaagcacttgctgaagaacatccaaaggcgcaggtcatctcaatcccagcaggttggtagctatattggaatcgaatgttctactgaggcaggaaggtctgatgttgagattgagatagaaaggcttaggaaagaaaggactatgttgatggaagaggttgttgatttgaaacaagagcagcgaagaatggctcaccgcgcaggagaagtgaatcaaaggctccaatccacagaacaaaggcagaaacaaatggtttctttcctggtcaagttaatccaaaaccccgcctttttagcccgccttaggcatgaggagcaaaaagaaatagattctccaagagtggtaaggaagtttgtcaagcagcaccaacatgaaactggaacaacaacacagcagaaactctccaagaagggcagatagtgaggtatcaacctgattggagaaatatagccatgtcttctgaaactccaaaactaagttcagtttccattgaacaatctcctcactacctttcacagggtttggcaggagaaatgagtgtagtaggtgcagaagaccttactgctcaaattgacaatattgtatcagatgatttggctgcagtgcacgggattacgccgtctcaagaaatgatgattggagaaggatcatctacctttggagctgaagaccccctcttcaaagggaaaagtgtcatgagtccaattctagaagttcctccagagtattttgcttccttcccagagggtttgaccaaggggaaagactttcaagatttttctgctcttggaactgaaggcatgataaagctagaagatatatgggactctggcctcaatgttagtggtgctgctttaagcagtgggaatgagctgtggggcaatcatgtcaactatgaagagtttccacaatttggagtcacaagtggtatgtctgactcagatatctgggatattggcttaggaagttttggaattgatacgtggccaactgatgaaccttctcttggtgaaacagatggtcaatctggtcagccaaatgaagataggtctaagaattttgatccatagggcttctttggtcctctgcacttgttgccctttggttactttgctatatttatagttcctaggggtcatattattgaatcatttgacttataaacattattccttcacctgctttcattccttatttactttcaatttttcttattcttttagattaattaattctttaattgtccatatttttctttgtaaattctaattgtgtaattattgat

SEQ ID NO: 61505 - DNA, 3389 bp, Glycine max
  Clone ID: PAT_MRT3847_26552C.1
tgaacatgaaccccaacgatggcaacaactctcccagtcccaagcccttggagatggtcaacccggttcctccgtttctttctaagaccttcgacctcgtcgacgccccgactctcgacccgatcatctcgtggaactccacgggcctcagcttcgtcgtgtgggaccctctcgagttcgcgagaattgtccttcctcgacatttcaagcacaacaacttttccagcttcgttcgccagctcaatacttatgtgagtatcatttcaatcaaagaaataactgtgttttggttttgttttttgggtaggttggtatgtaatgttttctttggctgtttttgtaatttggtatgtaagtattttttttttattatgggcgaattttagtttgttatgttagattttttttttttttatcaatgttagtttgatagtttgactagaaatttcagcagcttggagattcgaacctcgaactcttctgtctccctttctcgtgggagttttcaattttatatctctgttagtggaagaagcacttgctgaagaacataccaaggcgcaggtcatctcaatcccagcatggttggtagctatattggaatcgattgttctactgaggcaggaaggtctgatgttgagattgagatagaaaggcttaggaaagaaaggactatgttgatggaagaggttgttgatttgaaacaagagcagcgaagaatggctcaccgcgcagtgaaggaatcttctgaatgcgtgtgggtttgtaatggttgggtgtgtagtgtgtttgtggagggaggtagaatgatgcttaactttgtttaaggccttgtttgtttgtttacttatttcaagaatagttttttgtttttagaaatttgtctgtcccagcccttgatcatattgggaagtgtttgtcccatgagcatattttttgttttttaaaagtttgtttttttgagtacttggatagagagtacttgaagaaaaccaaaagatggggaaacatctcctagtttttgccttttgatttttaaaactcttgttttagaaacgattttcaaaacttaatgggttttggatgagaaattaagcgctaagttgtatcaaattgatttagaaaacaatttttaaaacaaatagtgagaagacaatcagacaagccctaagtttcttggcttgtgttttctcatttgttaaaggcagggttggtttcatatttgaataaagattgtaggacacctccactctagttgacacctagagagataaagagagccaagagagaaatatataggtataataggtaatataatataaaaggaagagaaagatagagataaatagtaggtgttaatgaggtgttcctaagggatttagcagtttcgggttattttcttttctttctaacgagtgaagggcattctgcttaaattaagagagttcatcaaccctcaagctagctcgtgccccatatcgtatcgtttgaaatgatggaatgttcacatatcactactctaatattttgttatgttgaatctgctatttgtaattgctatcttgaggtgtacttttttgaatctgctatttgttcctaaggaatatttctcaatgatggaatgttcacatatcattacttatggaattgagtaataagaatatggtttggatgtttaccatttgcattgtagttaggattgagacatgagagactactactattggaagtggcaacaggagaaatattcctcctcttgtagaagggatttcatatttcacaggtagtactgtactactactcagggttctgtgggttgtttgtgtcattttgacttttccttatgtctgtgtaaagcttgctttggatttgcagattgcattaatccaatacaagcttgctctctctattagctcatagtgcctaagtttcagtgtacctaaaccatatatcttgttttgctttgctgatctttcttcccttttccctcctcctcattcttgtcttggggctttctgcttctgctccattcattctcaggtaacttggtgtttgtcttcagggattccgcaagattgacacagacaagtgggagtttttcaacgaagctttccagcgagggaagaagcacttgctgaagaacatccaaaggcgcaggtcatctcaatcccagccggttggtagctatattggaatcggatcttctaccgaggcaggggggtcagaggttgagattgagatagaaaggcttaggaaagaaaagactatgctgatggaagaggtggttgatttgcagcaagagcaacgaagaacagctcaccacgcaggagaagtgaatctaaggctccaatctgcagaacaaaggcagaaacaaatggtttctttccttgccaagttgatccaaaaccccgcctttttagcccgccttagacataagaaggagcaaaaggaaatagattctccaagagtggtaaggaagtttgtcaaacagcaccatgaaactggaacaacaacaacagcagaaactctccaagaagggcagatagtgaggtatcaacctgattggagaaatatagccatgtcttctgaaactccaaaactaagttcagtttccattgaacaatctcctcactacctttcacagggtttggcaggagaaatgagtgtagtaggtgcagaagaccttactgctcaaattgacaatattgtatcagatgatttggctgcagtgcaccggattacgccatctcaagaaatgatgattggagaaggatcatctacctttggagctgaagaccccctcttcaaagggaagagtgtcatgagtccaattctagaagttcctccagagtattttccttccttcccagagggtttgaccaaggagaagaaagactttcaagatttttctgctcttggaactgaaggcatgataaagctagaagatatatgggactctggcctcaatgttagtggtgctgctttaagcagtgggaatgagctgtggggcaatcatgtcaactatgaagagtttccacaatttggagtcacaagtggtatgtctgactcagatatctgggatattggcttaggaagttttggaattgatacgtggccaactgatgaaccttctcttggtgaaacagatggtcaatctggtcagccaaatgaagataggtctaagaattttgatccatagggcttctttggtcctctgcacttgttgccctttggttactttgctatatttatggttcctaggggtcatattattgaatcatttgacttataaacattattccttcacctgctttcattccttatttactttcaatttttcttattcttttagattaattaattctttaattgtccatatttttctttgt

SEQ ID NO: 61506 - DNA, 2768 bp, Glycine max
  Clone ID: PAT_MRT3847_26553C.1
ctttcgcgtccggttttaaagaattattatctagatccttaattcaaaaagatattgctattgcagaggaaaaatttcgaatgcatgacctcgtctatgatttagctagacttgtatcaggaagaagttcttgctactttgaaggcagtaaaattccaaaaactgttcgccatttatcattttctagggagatgtttgatgtctctaaaaagtttgaggacttctatgagctaatgtgtttgcggaccttcctaccacgtttgggatatccattagaagaattttatttgaccaaaatggtatcacatgacttgttaccaaaacttagatgcttgagaatattgtcattgtctaaatacaaaaatatcactgagctgcccgtttcaattgacagtttgttgcacttgcggtatctggatctgtcctacacttccattgaaagcttgcccactgaaacatttatgctttacaatttgcagacattgatactatcaaattgcgaatttcttattcaattgccacagcagattggaaatctggttaatttgcgtcaccttgacctcagtggcactaatttgccagagatgccagcacaaatctgcagactacaagatcttcgtactttgacagtttttattgttggaagacaagatggactaagtgttagagatttaaggaattttccttatctgcagggtcggctttccattttgaacttgcacaatgttgttaatcctgtggatgcatctcgtgccaatttaaagaacaaagagaagattgaggagcttatgctggaatggggcagtgaactacaaaatcagcagattgaaaaagatgtacttgacaacttgcaaccatcaactaatttaaagaaactcgacatcaaatattatggtggcactagctttccaaattggatcggagattcttcattttcaaacatcatagtccttcgtattagtgattgcaacaattgcttgacacttccatcatttggacaactaccttccctcaaggagcttgtcgtcaaaaggatgaaaatggtgaagacagttggttatgagttctacagcagcaatggaggttctcagttgctacagccatttccatcgttggagagtttggaatttgaagatatgttagagtggcaggagtggctaccatttgaaggtgaaggcagctactttccttttccttgtctcaaacgtttgtatctatacaagtgccccaagctgagaggaatcttgcccaatcatctaccttcattgacagaggctagtttctcagagtgcaaccaactagtgacaaagtcatctaatctgcactggaatacatcaattgaagcaatacatattagagagggacaagaagacttgttgtctatgcttgacaatttctcttattgtgaactattcattgaaaagtgtgatagcttgcagtctttgcctagaatgatactaagtgcaaattgtcttcaaaagttgactcttacaaatatcccatctttgatttccttcccagctgattgtttacccacatcattgcaatcacttgacatttggcactgtagaaagttagaatttctatcccacgatacatggcatagattcacatcacttgaaaagctaagaatatggaatagctgtcgttccttgacatccttttcattagcttgtttccctgcccttcaagaactttacatccgttttattcccaacttggaagcaattactactcaaggtggaggagcagctcccaaattagttgattttattgtcactgattgtgacaaacttagatcactaccagatcagattgatctcccttcccttgaacacttggacctttctgggcttccaaagctagcatcattgtccccaaggtgtttcccttccagtttacgatcactttttgttgatgttggtatactatcatctatgtctaaacaagagataggtttggtattccaatgcctcacttctctgacacatcttttatttaagggtctcagtgatgaagatcttattaacactcttctgaaggagcaattgctgcctatttctctcaaaattctggtcctgcacagttttggtggtttaaagtggttggaaggaaaagggcttcagaatctcacttctctccaacagttgtacatgtacaattgtccaagctttgagtccttacctgaagatcatcttccttcctctcttgcagtactcagtatgcgggagtgtcctttactggaagcaaggtatcgaagtcagaacgggaaatactggtctaaaattgctcacattcctgcaatcaagataaatgaaaaagtgataatatgagctgttgcatgaataagaatcctctaaagttggtagctgagatgagactggacacgcgtttcttcatatttgcttgctgagatggtgttagattactgtgttattcaattctctggtccgtatttcaatcttcttatctcatagcttttgccacttccagaaggtttcccttgaacaagctgtaccaaacatcaaatttttctctgtataactggtaattggttgaactaaacctatggtttgttgaggttattatccagttaagtagtttttctggggtgaactatttctaaaaccagaatgttattctatttatgatgtttttgttgaactatctaaacctttatatgcataacagaaactagaatttgtgttagacttcaatgttgtttatagtgttttcttttaataaaatgttacccttgtaattttgtc

SEQ ID NO: 61507 - DNA, 242 bp, Glycine max
  Clone ID: PAT_MRT3847_26554C.1
actcgagccgaatcggctcgagcgtgctcgagaaaaaaaaaaaaacacaaaaaaaaaaaaaatcaaaaattaaaaatgaaaaggctggaaggagaggacatatgaaatttcgtgaccagggttatttattacgacgaggattggggatagaccaaacgtctcattaagatgctcgtaatcgtcgccgggaagtctctattaggtattacttcgaggtgccttattttcaccctaacaaagta

SEQ ID NO: 61508 - DNA, 367 bp, Glycine max
  Clone ID: PAT_MRT3847_26555C.1
cttggctgctaccgcgagaaaactctgttggttattcctgtcttttataaggtggatccttctgatgtaagacgcctgcaaggaagttatgcagaaggattggctaggcttgaggaaaggttccatcctaacatggagaattggaagaaggctctgcagaaagtagcagaattggctgggcatcatttcaaagatgggtatccctccttaccaagcttttgctttataatttttgttaaaattgaaagagaaaataaatgtttattaaccttgacaagatatggatacaagggttttagtttaacttcactacaactataatttcttgtttgaaacagagctggatatgaattcaagtttattagga

SEQ ID NO: 61509 - DNA, 487 bp, Glycine max
  Clone ID: PAT_MRT3847_26556C.1
gctcaagagaattcaagaccatgccaaaatgatttgatgatgtgaaaacctcaagatccagctcaacaaggttggaagtgatgtttgacagccactattcacactcttcccatgctctgaacattgtaaaatatacaatgtcataatatatatgtaatgtactatataagtcaacaattctaagatacatgttaaattatgatttaatgataatataaaatactattttatactaggaacatattttatttaaattttaattcacagactcttttttattttattttttcttcaagctgagctctgggaagaattacataatactctgttccaagaagagtttctctggttttagaagttccattgcagatggatgaaatttgggaatagaaggcaactgaactttatccataaaattcagaatagcagtggagagtggataactgatatttcttaaattcatcaggagatgatagtatacttcttc

SEQ ID NO: 61510 - DNA, 214 bp, Glycine max
  Clone ID: PAT_MRT3847_26557C.1
aaaacacgaggaaccaaaggtggtttttcaattcatttttgaaatttggcctaagggggcctttgggtttcaattttgaatatgaagcctgggagtcaaacctggtggcgtttttcacctaaggttcaaaccccccttttttaagaagaaagccaccttcttacgggaaataaagggttttttggggggggggaagggaattttcctaataatc

SEQ ID NO: 61511 - DNA, 561 bp, Glycine max
  Clone ID: PAT_MRT3847_26558C.1
ctatatcctcaaatgtcccaaacccagttatatgaatttgatcatcatctttgactcattaataatacaacttacccattcaagtcattcaaactacaccgattagagtaaacgacatatagcatatttagcaacacgttcagatcgaataaaagaaaaaaaaaaaaatttcgcgtttgagatgtgaaaaaagctataactaataacttctgaaaatcactttcaaaatgtggaaaatcacatccgaaacgtgaaaccagactaataaatttattttatcttcttctaatgggatgatgagtttctgaaaaggtgttcttctcctgattgttgatctatgtgtttgatccaacggctaggacgagtttttgaagttgttgctggtgggggtggtggtgccggtgatacaccacttctactactccctatgtatgcaatatccaaacccttcccaacaggaaggaaaactgacctaactttacggacccctttttgtagcaccatgttccatttgaagcccccccaaaaatttttctgccatgcattcttgcatgccaaaac

SEQ ID NO: 61512 - DNA, 145 bp, Glycine max
  unsure (1)..(145): unsure at all n locations
  Clone ID: PAT_MRT3847_26559C.1
gttcaagtnccaaattctacaatagngacantcggctgaaaagatnccttagtgcaagtgatgctggtcgaantggtcactnggntntancanaagcatgtgctgaagnatatttccctccaatctctcaacnaganggncnanc

SEQ ID NO: 61513 - DNA, 672 bp, Glycine max
  Clone ID: PAT_MRT3847_2655C.1
ccctgctatagttaattatataaaacgaaaagtacaatatttataaatgggatcaaggatgttgggatcaaggatgttggatctgacatcaaaggtgtactaggtttgaaatggatttatcagttgttgcaaacttatatcaattgtaatcagacattttttgccacatgtttcaaagccaaacttaacatgtatcgaaagacactatgacaatgcttattggatcttctataccataattgtttgtctgtttaaagcatatacaaaattcttaagtgattgcatttattaagtttccacatgctcctatgttgcatttgcctattgattaaagttgcatctgtgactttctgtgtgaccttgtcagcatccctagcagcaaggaaaggatcaacatcaatggctgcatttcaaatctgcttacagatttggatggcaacctctttgcttgctgatggattggctgttgcgggacaagctattattgcaagtgcatttgcgagaaatgattacaaaagggttatcgcatctgcctcacgtgtgctgcagcttggcttgattcttgggctggtgctctctgtccttcttttaagtctactaccatttgcttctaggttatttactaatgacaacaatgttctgcaacttatcagtattggcattccatatgtt

SEQ ID NO: 61514 - DNA, 313 bp, Glycine max
  Clone ID: PAT_MRT3847_26560C.1
gtggtacatggagagcgacccactttgcattctcaacacgtacaaagacattgcctgacacgcctggcaaatccctttatatatattcaacggctggcatcaaaggtcagagactaaggtccctgtggttgaaactggaactttgaatctagctgaatcatgcatctcgtagttgatcaaaaagattatgatttgaacattacactcacaatttgtggcggctctgaggagtcttcttctccttcactcactctatatattagcctggtggagttaagagcgagtcaggagagcacagagttagttcataata

SEQ ID NO: 61515 - DNA, 490 bp, Glycine max
  Clone ID: PAT_MRT3847_26561C.1
aaaacaggttggtttaacaggataacaattataagtttctcttttttggtggtggtgggaggggggatgacaaagagatatagatacattaccttaggtgttgttagagttttagtactattctctgagaaaaaaaattaaaagttaaaccttaataacctacacaatggaggtcaatactcaatattaaagattagtactagttactaagataaaactgttttagctagagaaagtaacactaaaaacacttaaagtactacacctaaattctgtacttttactaattccagacattttttttattgaccttgctttttgctttttatttccttcttgctttcttcattttgtgatttactactattccattacagaattgcagaactcttctaaaagcttatgagatgaacccagtactccattttttaggctatggtatatcaatccccttgttgttggcacatgctatcagcaaaaccagaagtgc

SEQ ID NO: 61516 - DNA, 914 bp, Glycine max
  unsure (1)..(914): unsure at all n locations
  Clone ID: PAT_MRT3847_26562C.1
gcatatgacggacttggcatttccattcttttaacaacaaatccatctattcagtatactgcatatgatcagctgaaacagagaatattaaagggcaagataagcaacagaacaggtacaaagtcatccccggaagcactttctgcattttatgctttcatgcttggtgcagtttcaaaatgtgcagcgaccatcttgacatacccagctatcaggtgtaaggtcatgattcaggctgctgaatctgaagatgataagagtacagaagctgagaggaaggcgcagaggacaatctctggagcactctatactatttggaaaagagaaggtatattgggatttttcaaaggattgcaggcacagatattgaaaactgttctcagctctgcgttacttctgatggtgaaggagaagattgcaaagtccacatggattctaatgcttgtgattggaagatacttgtctgtgaattcccccaaattgaaggcagtttgaatgtgtgatgagtatatattcttaaaaaataaagttcaccaaagaatgtgctaaagttggttttgtctgctatggagcaaaataatggcagatgcaagaagtcagtgttgctggcaatttagattttgtttctgaagaaggaatttaaaaaatgaaaattcagatcaatggagtctgtctcatctaatatgcttttctttcataagaccttagccttgaagtataattgttaacccatttctctgctttctgttatcagttagcaccaccatgttatgcacctccaattgtacttgtgatttgtatcatttggtaaatgcaaagtttccaagctcaaaaatgatattattgggaataatgncaccaataagataacaatcctttcggaataaanaaaaaaaaaaaaaaaaaaannncct

SEQ ID NO: 61517 - DNA, 478 bp, Glycine max
  Clone ID: PAT_MRT3847_26563C.1
agtccattcgaaggtttaccgtacgaaagacctgcccaagatggtgttgatgtctgtgttgtcgaactgcctgatctccctgacgaacgcggagaagcgcggtaagcgtcaggtgctgatccgcccggcctctaaggtggtcatcaaattcctggaggttatgctccgccaccagtacattggtgagttcgaggtcgtggatgaccgccgcagtggcaagatcgttgtgcacctgaacggccgcatcaacaaagccggtgtgatttcgccccgcttcgacgtgacgctgtcggagatggacaaatggaccaatcagctgctgccgtcccgttcgttcggtcaggtggtgctgacgacgtcgtacggcattatggaccacgaagaggcaaagcgcaagcacacgggtggcaaagtgctcggctacttcttctaagcgctgcgttgcaccatctacgcagttgttgtaaatgccttcgct

SEQ ID NO: 61518 - DNA, 443 bp, Glycine max
  unsure (1)..(443): unsure at all n locations
  Clone ID: PAT_MRT3847_26564C.1
ccacgcgtccgaataacacagaattcagtatctcactccaaaatgcagcccatagcgggaaccacaaaacaaccaacaacacttttgaatcccatcttcgccacaccagaatcacgcgcaccgaacagctacccaggcctcagcaccagcactggatctgcatcaaacanngagaacgaagaagaagatcaggaaaaaaaaacagctcaaacaccaacatcgaatgtgcatcagaaaaagccaagagaaaaacgaaaaagagaaggaaaaaaatgtagtcagaatagaataaaaaaatccgctccaaagtcgctctccttctctatcaaaaactcttctgcgccgcactcactccaccttcttcttccgattccctgaaaccccggcttgaaaggtgacattatttaaaatcttcattcatgcgtaatgcaggctgtgagcgc

SEQ ID NO: 61519 - DNA, 278 bp, Glycine max
  Clone ID: PAT_MRT3847_26565C.1
acgaggatgaaaagtttaaaccaggattggtcaagttccgcacagtcgcagctaacataataagatccattcattatacttcatgaagtgcgagccacgttggtgaatccccgaagagggccgcggtagactctagagggggcgatgatgggggtgctagaaattgtggtgtgggcagcgaagagtggatcgttgcgggggttgaggacgtgcgttatggaaggcaaggaacaggattagaaagtgcgagtgcagtatgagccaggagtcatgcgctg

SEQ ID NO: 61520 - DNA, 780 bp, Glycine max
  Clone ID: PAT_MRT3847_26566C.1
taaaatgaatggatccaataacattatattatcatatacttttttcaaggtttctgaggaataaccccaacttgaatgtttacatgagaatcaaataacaagctccctccatttcaaaggacaaagatgtataatacattgatgaagctcaagttttggtttacttatggtggctgacataaaagactaaaattcatttacttatttgtttagcacatataaagaaggttgcctcttctgtatgattgccaagttcttgaatattttcagcttcagcaaaactaccagaaaacccttgtgatcaagttttgaaggttcaaggtaccatgccgtgacatttggaattatgctgattaagttaatgcaagccgaggtttggagtacctcttgaaattagccatttagatgaatgaatcattttgctttcagaatttattgattgtaaaatttatctgaagaactgtaaaggttgagatatattcgcaaaatggtaagtgacaatgacgtctatgaccaggtgaaactagcatggtatgaattttggtgatagtttaacgggtcatttatctttatacttttaaaaaaaaaaatcgaaaactaaaaaaaaaaagaaaaaaaaaagataatttaaaactttgaacctggtattaatactcgtggacaaacgctgctggcgtcctatattttcttatattcagcggggggggcgctcgctcttgttatggtcatacctggtttatatttggagacctttcccctgccgatggcccactttccttt

SEQ ID NO: 61521 - DNA, 663 bp, Glycine max
  Clone ID: PAT_MRT3847_26567C.1
gtatctgctgttggcaccccagtgatgaaccttcctccccggcaacacatagcatatggtcttggagcaccagttcccagggcagttgttgctggagcaccaatgaacttaagtcctgtgccataccctatgtcacatacatctgctcatagatgaagttctgttcagagacctaatgtacaaagagaaaacagcggattagagaaggcttatgaatgtaatgtaattcttttcctattcctatagctgcttatgtgcaagagttttatgctacatcaattatttcaaataagggatactaagaagcattagaatgtatctgcatcggctgtgatggatggaaatatctgacagccttgacatacgacagcatgaaagtaaggttgttttatagacacttaaattgttgtagttagtcatataaagtgacacatgctgtagaggaaggttctgtggctttgataagttattgttgtattttgatcacttggtttctgattttctgtaggatcttctaaatttcccatctagcttcacttattttcaggtcagttgctatgattgacatgatatgttatagcaaatatttgtccattctggcaacattgccatcaaaatgtttcaactatgaaatataaaattcttccattggtaggagttttt

SEQ ID NO: 61522 - DNA, 641 bp, Glycine max
  Clone ID: PAT_MRT3847_26568C.1
gcacaagcacaagcagcaatgttgtataactccacctcatcgtcattgtcattgccactgaatgttgttaactcagcttcttgtgttaataatagctatgccaatacgtcttcgttgagtggctttcttcagggccaagagaatcatcagcgaggttttgtgccgtctagggtggtggctcctcatattttcttgagggacaatgggcttcttcaggacattgttccaacgcagatggggaatgaggagaatgaagatcgtgtgtaggtgatgatcatcataatatatagtcatattttgggttaattaattaatcatagaacttaattatgacaaattagtttattttaattattttgttgtatattaattatatgtatctttgtatggtatattattatgtaccgttggttctttagctaactgaactaatgatgaaaagtgaaaacctctatgggcgggcttcttggggtgttttgtgttttactttagaggttaccatagagaaacctcgcttcaactgatggcttgtgttcatatgaaacattttggaggttcccactttttatggttagataatagatatatatggaggggctttatattctgtatggttctcatgccctagcatagcatacatg

SEQ ID NO: 61523 - DNA, 228 bp, Glycine max
  Clone ID: PAT_MRT3847_26569C.1
gccaatttaaagtgggaaaaaataaaattcaaagtgcatattgtcagggatcattaacaagagtggggggacccttcatgtgggagggcacatgacggacccgcatcttatggttgagcaccatgctggataatacttaaggaagcaccattgtgaacacagttctgagtacataggtgagcctcatagtgatcacaaagctcaagagtaccatggcttgcacaagcc

SEQ ID NO: 61524 - DNA, 467 bp, Glycine max
  Clone ID: PAT_MRT3847_2656C.1
aaagggaccaaagaagtagattcctaataaaggaaaatgcatcttggggagaaaaatacagacattataatgtttttagttatgattttaaattaaatctaaaattctacttcagtaagtttaataaaaaaaaccacatttaaaaattaaaataaacattgattaaaaataaacttcaatttaaataaattaaagtttactaaagaacacctatgcccgcccttaaatacaaaaccggcacaaatacgggagagtaataaggtggggtcagtaactgcactacactaccgtcgcctacatcctccatgtttctctttgtcgcacactcgacgcaatcgaccacactatcctgccagcgtggctcccatacctctcgccacgcgctttcatctccgccgtccatctcattccaccaacggctcaacttccccaaacgcgatttcgcgcgtgaacgcgtaagcgtcttt

SEQ ID NO: 61525 - DNA, 447 bp, Glycine max
  Clone ID: PAT_MRT3847_26570C.1
accagggcatctttactggccaaatacccagacatgcagcatcgggctcagagggcattcatcacatatttgagatccatccatatccaaaaggataaagacatatttgatgttatgaaactacctattaacgagtattcagcatcattaggtttaccaatgacccccaaaatccgttttctaaacccgaaaattaattctaaagatgtgtcaaaatcaattttagttgaaccagaggattcagacaaggaaactatctttgaggtttcgaggaagctagacacagctgctttcaaggatgaggaaactgaaaatgatattcttcagttagcggatactgcaaatgaaggcgaagttaagtcatctgaaattgaagaaatcataccagcaactcgtgtattgaagaaaaagaaactcaagattaatgtacacaggccacttgggact

SEQ ID NO: 61526 - DNA, 342 bp, Glycine max
  Clone ID: PAT_MRT3847_26571C.1
ggcgtcttggggtgtgagatcaaaccctagattttagacactggaacagtagcatcagcagccatggcgagtatgaggtgcctgcgagcgttaactcaaacgagaccgtatatcttgcgaaaagcatactatgttcgctcactcgacgtgcttccatttgccaactgcaacgcttttgcacactctttcaccgcacacgcctatgtttttgcgcagtgcccgcacctgcgttgtgtctcttacgacacagaagacgaccacagcgacgaacaagatgaatgcgacgaggattaacgtgaacagacaagaatattgtgacgatgatgacgtacatgtgtcaag

SEQ ID NO: 61527 - DNA, 1593 bp, Glycine max
  Clone ID: PAT_MRT3847_26572C.1
ggatatcgcactctcaagtggaccttcatttttcatagttacgatcttcttctaacccgcaatataaatatagcagtcgggcacatctgatggaacttgaatgctggtgaaagcacaatacaatatctaggagtttctcggataacttatatcttaaagatcctcaacctcaaccagaagatagaatggagtcgatttcggacccaccctttcacgaggcatacaagatcctgtttgacaagaccagaaacggaaacaattttgaagagcataaggagctcttggcggtggccgaggaatgcgaccttccggtgatcgatctgagccgtttagaagagagcgatgaggttgtgagggaagagtgcaagtcacagatagctagggcttcgcaggagtggggtttcttccaggttgtaaaccatggtatttccactgagattttcagcagcttgaggtgcgagcaagagaaggtcttcaagcagccatttgaaaagaagaccaaagaggacaagttcttgaacttctccgccggtagctaccgttggggaacaccctctgccacatgcattaaacagttatcttggtcagaagcctttcatattcctttaaccgatatattaggatccactggatcaaactctcttagttggacaattgaacagtttgctacaacagtttcgagtcttgcacaaacattagccgacatcctggccgagaaaatgggtcacaagtcaaccttctttaaggagaattgtttgcctaacacttgttttcttcgattgaaccgatatcctccatgccctattggttttgggattcacggtctcatgccacatactgacagtgactttctcaccatattatatcaagatcaggtcggaggtttgcaattggtcaaagacagcaaatggatcgcagttaaaccaaaccctgatgctcttataatcaacattggtgacttattccaggcatggagcaacggggtgtacaagagtgttgaacaccgtgttatgaccaacccgaaactagaaaggttctctatggcgtatttcttttgcccttcaaatgatacagtgatagagagttgcagagaaccctctttttacaggaaatttagctttcgggagtatagacaacaagttcgggatgatgttcagaagttgggttccaaaataggcctaccaaggtttctcacacatgcatgaaggaaatggcatataacataattacttcatagctagctagctagctatctatctagagagcataatatataattatgatcatgattatatttatgggtacaacagtgttcaaacatcaactacatagctaggttacgtcatatatatgttttgtgaagaagacagaagagagagatcgatctagaagtagaagtagaaagaaaacaagtgtgcttgtcagtgtacgtttgggttggtaataaaattaatttggcagagacggtcggtatgcatggcagctggtttgggcctgcatgtttgatgctgtctcattttgtctgctgttaagctacaacctgtaatatacgtaccccaatttctattctatttattactacatgttactagc

SEQ ID NO: 61528 - DNA, 571 bp, Glycine max
  Clone ID: PAT_MRT3847_26573C.1
ggctcgagcggtctcatgcctttttctgacagtgactttctcaccatattatatcaagatcaggtcggaggtttgcaattggtcaaagacagcaaatggatcgcagttaaaccaaaccctgatgctcttataatcaacattggtgacttattccaggtacttaaacttaaatattattattaattgctaatttggttaataattaacatttattagaccattgctatatatacatatgtaggcatggagcaacggggtgtacaagagtgttgaacaccgtgttatgaccaacccgaaactagaaaggttctctatggcgtatttcttttgcccttcaaatgatacagtgatagagagttgcagagaaccctctttttacaggaaatttagctttcgggagtatagacaacaagttcgggatgatgttcagaagttgggttccaaaataggcctaccaaggtttctcacacatgcatgaaagaaatggcatataacataattacttcatagctagctagctagctatctatctagagagcataatatataattatgatcatgattatattta

SEQ ID NO: 61529 - DNA, 655 bp, Glycine max
  Clone ID: PAT_MRT3847_26574C.1
gaaatctttcataaagaaaaaacgtggttatggctgtggccaccatatgattgtgcatatttaagccaaagctagaagaagtattatagagtgtgtgagaaaataatggacaacatttggattgtgtttgtgacagtgtttctcttatgcactgtgatcctctacaggaacaggcttagccttatgcttaaatcaaaacgtaagaagaataagcttccattaggcactcttggatggccttttatcggtgaaaccattgagtttgtttcttgtgcctactctgatcgccctgagagcttcatggacaagcgacgccgcatgtatggcaaggtgttcaagtcacacatatttggaagccctacaattgtttcaactgatgctagtgtgaataagtttatacttcaaagtgatgcaaaagtttttgttccttcttatcccaagtctcttactgagttgatgggagagtcttctattttgctcatcaatggaagccttcagaggagaatacatggactcattggagctttcttcaagtctcaacagctaaaggctcagatcaccagagatatgcacaagtatgtcaaagaatccatggcaagtttgagagaggactgccccattacatacaagatgaaacaaaaagattgcttttcat

SEQ ID NO: 61530 - DNA, 1335 bp, Glycine max
  Clone ID: PAT_MRT3847_26575C.1
ggcacgcgcgcgcacggaggaagagagaccatagacgtcgtgctcagaagtaattttgaagggaaaacgttgatctgattccgaatttgcgttcgttcccgtatcagagtccaggacgatgtcgtttgggtcctctctgttgtctcattcgcatacccttcaattcttgtccaacagaaacagaacctcccgcttcaaagccaccgccgaagttcccgatttcctctctgcagattggtaactattcttcttccgtctttttatatattcaaattgattctcgaatactccttccaatttgcaggcgtgcatcgggcaagagagaccatagacgtcgtgctcagaagtaattttgaagagaaaacgttgatctgattccgaatttgcgttcgttcccgtatcagagtccaggacgatgtcgtttgggtcctctctgttgtctcattcgcatacccttcaattcttgtccaacagaaacagaacctcccgcttcaaagccaccgccgaagttcccgatttcctctctgcagattggtttgaatctcgcaagaaaagaccctttggcccacgattagattttagtgcagaagatgcggtgcattaccagcttgaagccttgaagtataatgaccagccccgtccagattatggaatcgaggttatgtacaggtttgctggatttgatccctttgaaaggtctccctattttggccctttctttgatttgggccagtttgaacggtttaggcgcatttttcaccattctacttttcgggtcttactaggttacaaagagggaaagatcatgagcactttgtttgtcgaggagaacaaatacaagcagcgggtttggattcgtggaagtcgaccggaggaagaggagatatttcaacttacaatggttcaaaaggttggaggatgctgggatggttactggttaacagagtttctgcttcacgatacggatacatttgccggtggattagcatattgaaagtcatttaatgcaggaatcaggctcgtgaggttccactgtcaaaagcatgaaatgatctgcattcctgcaactactatcctaatctgtaaaatttgtgtacatatgtaaaaaattcagctgttaatatgtgtatataattggtcctcgctaatcaagtgtagacattcttgtatattttactgaatgttgcaggagctagcatactttaatgcttatgctcatatctgtatacttttgcccggtacaccccatcttgtgcgtcgtctgattcatttatactacagaatggttcaaaatttgttgccccctggttaatcaaaaccgtacgtttttccccc

SEQ ID NO: 61531 - DNA, 408 bp, Glycine max
  Clone ID: PAT_MRT3847_26576C.1
ccacgcttccggtctgcttattattgccttgcatcttatgcgctagccttaatccacaaccgggtgttttaatcccaaagaagaggcgccttacgtccctaatacatagcgagaaccctatgattaaacccgtacacgatggcgccaatcagaaggatgctcacacctgagttcacgagatataccatgcctaagaggcctgtggcgtggtgcaagccccaactccaacttgtacatctccagtgaccgcataaaaactgcggggcggccaaccaaagtcttatccaacgtactcatcatgccccttcgtgctccctgatgctacgcggcctgccacaagtgcagccgatcgttcctactgctttcgatcccaatgagatctcccaggctcatgttgaaggtacctac

SEQ ID NO: 61532 - DNA, 376 bp, Glycine max
  Clone ID: PAT_MRT3847_26577C.1
atatggtatcgtctagctatctcgatgaactgtccaaggtcctgtccagtcaagtccggcccacacaacataaagttgccaaaacactcaatccaaaaacggctcacgataggtaaccccaccaatagtagccagcaagcctaactggtcgcgtgttcagcacctgtctaccacggtgttaagtgttcgtctctgggtcatcaccggaatgtttaatgttaaattaacgggacttaccaattgcactttaggcaggcccaggatgagacaaaccgcaaggcctatgtcgggccagccagagcgataaccactaggagcacactaggcacaagttttacggggcggcagatacgaatgttgtaagagactttgaaag

SEQ ID NO: 61533 - DNA, 1048 bp, Glycine max
  Clone ID: PAT_MRT3847_26578C.1
cccacgcgtccgtacggctgcgagaagacgacagaagggtacggctgcgagaagacgacagaaggggagggtttttgtcgtcgctactaagagttgctgcttcttcagccactccgcacctcgcagcctctgtgccctcaacaaccatggctgaaatcgaaactaccgttccagatcccacccaaatcgacgtcaaactcttcaatcgctggagcttcgaggatgttgaggttaatgatatgtctctggctgattacattggagtgtccccatcaaagcatgctacatatgttcctcacactgctggtaggtactcagtgaagaggttcaggaaagcgcagtgccccattgttgagaggctcaccaactctctgatgatgcacgggaggaacaatggaaagaagctcatggctgtcaggattatcaagcatgccatggagatcatccacttgctcactgacctgaacccaattcaggtcattgttgatgccgtcatcaatagtggtccccgtgaagatgcaactagaattggttctgctggagtggtgaggagacaggctgttgatatctcaccccttcgacgtgttaatcaggctatatatcttctaacaacaggtgctcgggaagctgctttcagaaacatcaagacaattgctgaatgcttggccgatgaacttattaatgcagccaaaggttcatccaatagttatgctatcaagaaaaaggatgaaattgagagagttgccaaggctaatcgttaagccaacccaacaaccagtattgtggccagaaagatttcgacctttgtacttcatttatttaaattttgaatattgtgtattacttttgatgaatttagttaatttttagttcgcgtaaggattttacatgaacgatttatttagttaatttagtttgcgtaaggattttacatgaacgatttatttagttaatttagtttgcgtaaggattttacatgaacgatttatttagttaatttttagtttgcgtaagtattttacatgaacgattttgtttcttggacgac

SEQ ID NO: 61534 - DNA, 1352 bp, Glycine max
  Clone ID: PAT_MRT3847_26579C.1
ccacgcgtccgaagagttgctgcttcttccgccactcagcacttcgctccctctgtgcttcaccaaccatggccgaaatcgaagctaccgttccagatccctctcaaatcgacgtcaaacttttcaaccgctggagcttcgacgacgttgaggcacttcttcacttttccccctttttattcactctctgtatcgacgcttctttaaactatagcaaatttgattaattattaagtttgtcttagttattaatctagttatatcgtgaaattaccggattttgtttacgataactgtgttctgattgttattaggttaatgacgttgctctggttgattaggttaactaaaaatgtattttttgtggtatttagtttgagttacttttttgcatgttctgattgggattaggttaatgatatgtcccttgctgattacgttggggcgtggttgattagtttaactaaaatgttttcttttgttgtatttagtttgatttttttttgtgatattaggttactgatatgtctctggctgattacattggagtgtccccgtcaaagcatgctacatatgttcctcacactgctggtaggtactcagtgaagaggttcaggaaggcgcagtgccccattgttgagagactcaccaactctctcatgatgcacggaaggaacaatggaaagaagctcatggctgtcaggattatcaagcatgcaatggaaattattcacttgctcactgacctgaacccaattcaggtcattgttgatgccgtcatcaatagtggtccccgtgaagatgcaactagaattggttctgctggagtggtgaggagacaggccgttgatatctcaccccttagacgtgttaatcaggccatctatcttctaacaacaggtgctcgggaagctgctttcagaaacatcaagacaattgctgaatgcttggctgatgaacttattaatgcagctaaaggttcatccaacagttatgctatcaagaaaaaggatgaaattgagagagttgccaaggctaatcgttaaaccaacaaaggatacagtattggtgaccagaaagattttgtttcgacctttgaacttcattttcaaatattgtgtactagttttgatggctttagctattttttagttcgcacaaggatttacatgaacgattttgtttcctggacgaaaatttatatttaaagacttggagtttagtaagagcctgctttataaattgttgtgacgatttaaatggctaatggtgtcgcttctttgtttttgcctggagttcgtctgtgataattgctctaaagcccaaatctaatgtttaattagtgttgtcat

SEQ ID NO: 61535 - DNA, 670 bp, Glycine max
  Clone ID: PAT_MRT3847_2657C.1
gcacccacgcgaggatccacgcgtcagtacgatgtgcagtagactacagaagggggtctacaatgatggaagaatattcagtctctattacggaagcaattcaggctttagtgaatgcctcagagcgacttccagttggtgggaatgttagggtatgattatagacaagtgaatgatgcttattttctttctgttatgcatattcattggaattgtctgcatgttctaattcacaaaaatatattatgtcacaggttgatgtaagacaactgggggaggcactgaattcagcatcgaagatgatggaaacaatgatttccaatatacaaagattcatgccaaaggtgaaacaaataagagaatggagtttcatgcttgcttttttaacatggatattaaaattggactagtcattaaactggtgaaggccacttcatggttaatccttagttgaattggtaataataaattatatatttaattttatataatatataagaaataaattaatataaaattattagaagttttagtgaaaatttaaattagtagacaagaattatattacatgtcttgcggaataaaaatttaaataatagaaagctatatttagatatcatattcaaaccttttttttatttaaaaaattgtttttagaataatttgtatt

SEQ ID NO: 61536 - DNA, 399 bp, Glycine max
  unsure (1)..(399): unsure at all n locations
  Clone ID: PAT_MRT3847_26580C.1
gctaagtctaagtgcagtaccgttgggatgtaagagtcgcttgggccttcngtggcatgatcttcgccctcgtttactgcgccgctggcatctcagggggacacataaacccggcggtgacatttgggctgtttttgggaggaaggtgtcgttgcccagggcgattttctacattgtaatgcagtgggggggtgctatttgtggcgctggcgtggtgaagggtttcnaggggaaaacaaaatacggtgcgttgaatgggggggccaactttggtgcgcctgggtacaccaaggaggatgggcttggggcgtgagattggtggcactttcntgccttggtacaccggggtttctcggcacccggtgccaaacgtaacgccagagactctcacgtgcccat

SEQ ID NO: 61537 - DNA, 302 bp, Glycine max
  Clone ID: PAT_MRT3847_26581C.1
tctaattctacattacaagaatttttacttatagccattctattcgatgtaggtctatcaattctatatatatatatggatagtttatttcaactaaaacttataaatgaagattttcattattatgtatggatatagatagtctgtatctggttgctttaaggataaaagacattaatgaaagatagagtaaagcccaacctacatcataataaaagacatcccaagttattagtcggaaaactattctgtatataatggcctgttcttctagaagatccaagcttacttactcgttcatg

SEQ ID NO: 61538 - DNA, 237 bp, Glycine max
  Clone ID: PAT_MRT3847_26582C.1
gttaattgcttacactgcaattggagtaaattttctgtttagtaactgtaatagtgaagtttgtgatttgacttgtacactctataagaaatattaggtaatagatttgtgtttttcttaatattaccattattattactttggtgaggttcatgttatgattttttaagaatggcagtggaagcgaaatgtgaaaccgactttctgatttcagcagaactggttattttttatggt

SEQ ID NO: 61539 - DNA, 380 bp, Glycine max
  Clone ID: PAT_MRT3847_26583C.1
acgacttagttgtctgcaattcattgcaatagctgccagacctatggatgtacaagaagacatcctcgaatttccagggtcttcaaatttgaacatttggccaaggtgattagtgccctgtcagtaatgctagtacaataggatgtgtttatcatctcaaggccagggcaaccccgagcaattgctgaaatgcccaaatcatctaccccagtagacctgtatagatccagctcctttaattttgagcaatgcatgccaacataggtaagtcctctgtcagttatgttcaggcatattcctattttcaagctcgagagcctagacccagaagaaatggacataagaccttcccgacgcgtggagtcgacccgggaattccg

SEQ ID NO: 61540 - DNA, 488 bp, Glycine max
  Clone ID: PAT_MRT3847_26584C.1
ggtcgcgactgaaatcatggttgctaataattttttaaaacacagtgtcactatgtttttgaaggggtgtttttgattttcctaggtgcatgtttgcctttgtcatttataaatattccttttttttttcaatatagatttcaaagctgtgggtttgatggtgttgtagattgggaattctttgtgggttttttaaggtttcttgtctcgttgtttttggatgctgcaagcttgctaggattcaatccatgggatcttgtagttaaccgaatctagttaaaacttatacaatgctcgagtttggactataactaaactaagtaacactttggcccttttgttttagtccttttacatgtgaaaagaggaggaaaaactgaaaagcatagcagtcctaataagtgataatgaaaagttttgttataacatataaagtatttgttcagaattttcctaaatgggttatgagtgtagttggttgagtttta

SEQ ID NO: 61541 - DNA, 504 bp, Glycine max
  Clone ID: PAT_MRT3847_26585C.1
tagatgtcactaaaaaaatcatataccatttacagacacggatatttccatttacagacctggtggctgcatgtgggttagtagcaaaacaaaccctgatcaaggaccttatcatcgatcgatcactcgattcaatttcaatacatcgtctaaaatgatcaacccccataaaattaaacttcaagagagacacaattcgagcccctgtgaagaaatagtaagaaactaaaagaaactcatcatatatatatatatgaacctctctcattgactggatttgttcaactttaacaatagcccattagaattggcgcattcaaacaaagccttagcagtcatttccctctcaaacctccaaatatagttcaaccccacaagaagttcagtgatggcagcctcagtcttgtccttgttagcgaaaaacaaagtctgcaacaacaacacattggtcttgggcaccaaattgtgttgctcaaagcttctctcactttgccacttgatcat

SEQ ID NO: 61542 - DNA, 1098 bp, Glycine max
  Clone ID: PAT_MRT3847_26586C.1
gctttagtaatgaaatatgtttggcagtatgatcccattaaaaactcttggactgaggccagtccaatgtcagttggtagagcctattgcaagacaggtatattaaacaacaagctttatgttgttggaggggttactaggtgtcgtggtggactaagccctctgcaatctgcagaagtatatgaccctcatacaggcatgtggtccctgttacctagcatgccttttgcaagagctcaagtgttgccaactgcttttttggctgacttactcaagcctattgccacaggaatggcttcatacaaaggaaggttatttgttcctcagagtttgtattgctggccattttttgttgatgttgggggtgaagtttatgatccaaatttaaattcatggcttgaaatgccaattggtatgggtgaaggctggcctgcaaggcaagctggaacgaaattgagtattacggtcaatgatgatctatatgcacttgatccttcaaattctcttgacagtgcaaagatcaaggtatatgattatgaaggtgatacttggaaagttgcagcaggagatgttcctattcatgatttcaccgaatcggaatctccttatctcttggctggtttacttggaaaacttcatgtaataactaaagatgctaatcacaacattacagtgttgcaggctgacatgcaaaatgaacatgctgagtcagctttctctcaatcaatattgtcatcaccagataactcgatcagtgaagatgctgaatcttctgcagaaacacagggagaattttggaaggttcttgcaactaggagtggtagatctgctgaactagttaactgtcaatcccttaaaatatgaaagtaaaaatgggggcaggggtggtttagagtccttttgtggttatgatttgtgagtatatttctgttggttggtatgattgtaaatgatttcctttacaaattattcataatatgtaaccaagaacacaattaaaactatagttagcaagaacatcattcaaacacactacaaaataaatgaaggttttcaacattaaaatgggtataaaaaaaaaaaaaaaaaaaaaaaaac

SEQ ID NO: 61543 - DNA, 244 bp, Glycine max
  Clone ID: PAT_MRT3847_26587C.1
atacccactgaacgacagcatttccaatgccggctctccttgccaagatgtcattatggaagcaccgtccatcaccagtaaccgcttcaggagtgaatctgatgaggaaccagagcatgcggatgaacactgctacgaggaagaggagattgacctctacgccgaagagaaaacgtactcggactctaagcagctggggagcttgtatcattaggcgctgtcccgaccccactactccacattg

SEQ ID NO: 61544 - DNA, 357 bp, Glycine max
  Clone ID: PAT_MRT3847_26588C.1
ctcgagccgatttttcaatccggctaaagtctaattatccaacctaatgtttcatcaggctactatatatggtatagaccccaattggggacgcattgctgctgcagcttgttactcgggggtttcattccatcaagatttacttagggtagagctgggggatattttactaatgtatggtggggaaccacaattatttgaccgtgctggactacaccatacaacttgtagaaataggagtagagcacgatgctcccctggcattgatcattttctctttgcagtatgcccaagtcaatcacgtctattggaaatacaagatgaagcatattagatggaaaataacatcgaatgtat

SEQ ID NO: 61545 - DNA, 609 bp, Glycine max
  Clone ID: PAT_MRT3847_26589C.1
acccctcctacgactttatctctctatctctctctctctctctctctctgagtgtggcgttttgtgaaatcttattccacatggcgtcacgccacaacaagaaggcgttcagcagcctcgccgtcagaattcgcaccctctccgatctgaaccgtccctccgccgattccgacagcgactccgatggccctcaggagtactacaccggcggcgaaaagaggcgtaccaccgctcaaagagctaagtttgatttttggaacagtgttttcccctcaattatataaaattctagcacggctgatgtatatttgaaatgagagttacaattcgtgctggtatgtttcattttgtcttctaaattatatgttttggtgttgttattgctttctttatcttcttattattgtagactgcgattttttttgagtgttgattgactaccttttcttcccggttgttcttgcctgggttgaattgtgggcgtattttcctgccacatttattggcattctgcttgatattacagaaaaaagctttctcaaacagaaactaagggttagatttcatacctatgccaagggcttttaagatttttggcaaacctcattt

SEQ ID NO: 61546 - DNA, 356 bp, Glycine max
  Clone ID: PAT_MRT3847_2658C.1
ggggacaaataaaatgaatttttttatttaagggatgtaaaaaaaaaatgggtgttaatttatagattttgaaaaaaaaaggggtttatttctttggaaaaaaatgggcaccccaaaatcctggcacaagtccatttttaaatatatataaccgccattatccaccaatagaaaaatgtttttttgttcaaaaaaaagaaatttaaaaaaagcccttactgggcttgttgaggggcaccaaagggagtggtctttttagtggcaaatagagcaaacctttgtattaaaatattttttttacaacctgataaaaatggggccaaatccccccccctaaacttggagggaaatccaaa

SEQ ID NO: 61547 - DNA, 389 bp, Glycine max
  Clone ID: PAT_MRT3847_26590C.1
gcacaaaaaattctggttgttattacaagagcatgatctaccagcaaggttggaaatattaataacaatagagcccacttgttccagcacacatacagcatccataccataaaggatcacacgtatgtagacagagaccacatggcattgcataactaatcaaacaacatggcattgcataaagatgcaaacgccaaaaaataaatgatacaagattcatccatgaacacgacaagattcttagctatttataaatgcacagcgcttgctgatctctccttgtgatcctgtgttcacattaattgaccccattttctatagggaggttgcaaactaagcaaagaaagtgctagctgaccctctaagcgattggatgaattgagcctttg

SEQ ID NO: 61548 - DNA, 278 bp, Glycine max
  unsure (1)..(278): unsure at all n locations
  Clone ID: PAT_MRT3847_26591C.1
ttnnnnnnnnnnnnnncccccaaaccattttaaaaaaatggttttccccacctttaaaataaggttcaaaaggtcccgggaccagggcaggttcccgggaaggtccaccgttccccagggcctttgaggaaaaccaccccggagggtcccttattggggcaacctttaaataaaaaccctttctttaataacaattttaagtggcctttgcacaaatttcttaataatctttttcaagggcagaaagattttaagggccctaaaaaaactcccctttt

SEQ ID NO: 61549 - DNA, 526 bp, Glycine max
  Clone ID: PAT_MRT3847_26592C.1
ttacggcgcgtccaaccacgcgtccgcccacgcgtacttcggcgcgtccgcccacgcgtccgagcaaggcaagcttcgatgctcccttcaccaagttgccttaatactctgaaatcatagaacacttccttaaacacctttcagatgatgtttccttccccacgcttcaaaccctttctctatctgaactcactcacaagaacaccactgcttcaacttcaaaccccaaaatcgaatcaaactttcccaccatcactcactccgaaacacacctcaaccacttcacagcaccacccattcaaggtttcctacctcgtaagcacttgtggcttctccgtagaaaccgctctcaagatctccaagttcacccaattcaaaacccccgaaaaacccgattcaatcatcgccttattcagaagccacggtttctccaacacccagataatcagcattattagaagagcacccaatgttctctcaggcgacccccacaaaaggattttcccaaagtttgaatttttacgct

SEQ ID NO: 61550 - DNA, 157 bp, Glycine max
  Clone ID: PAT_MRT3847_26593C.1
cgaaagaagacgtcaaaatccccaaggacgttgaagccgttgatattgccaataaaatcggtatcatctaaattacttactattctggtggacagcttatgcattgttgtaatgaaatgctacgagaattttttatctattttttgcaataaaaaaa

SEQ ID NO: 61551 - DNA, 301 bp, Glycine max
  Clone ID: PAT_MRT3847_26594C.1
ttttttttttttttttttattttaattttttttttttttattaaaaatatattttttattatgccgtgtttaacttaaggtaattactgctctttcaagccacggtcattctattcaaaacaattttttctagacaccaacatggctatatatagctgaaaaccccacaccctaaacaaaactgctgggtgaatagaacttaacaaccgccttaatggaacagcaacatatccttctaggagacgtacttctttgcacataagggaatgttgtttcccccaacaaaaatttttgatgggac

SEQ ID NO: 61552 - DNA, 356 bp, Glycine max
  Clone ID: PAT_MRT3847_26595C.1
ggggagtgttccttttcctttacattttgctaacttttatttgtaatctggtagaatcaatttaacttttttcatatgataaatccgcgaaagagaaaaaccagtgggtacacgccatataggaccaggaaagtatcttttgggccgccacaatctaaaaattagggaggcgcgatcccccgggcctaacagaaaaaccccatacccagaccctagagcgaccccgcggaggacacccctttaattcaccctgaatatttagaaatactcgcctcacaaactcgcatgaatcatgggacgacgcccggacagaggaagtgcccccccctctttcgggccccaaaggaggggggttc

SEQ ID NO: 61553 - DNA, 314 bp, Glycine max
  Clone ID: PAT_MRT3847_26596C.1
cgcgctgagcggctcgagcggctcgagatcaccatggcggctgggaccctgtacacgtatcctgaaaactggagggccttcaaggctctcatcgctgctcagtacagcggggctcaggtccgcgtgctctccgcaccaccccacttccattttggccaaaccaaccgcacccctgaatttctccgcaaatttcctgccggcaaggtcccagcatttgagggtgatgatggattctgtgtgtttgagagcaacgccattgcctactatgtgagcaatgaggagctgcggggaagtactccagaggcagcagccca

SEQ ID NO: 61554 - DNA, 317 bp, Glycine max
  Clone ID: PAT_MRT3847_26597C.1
acggctgcgagaagacgacagaagggattgcagttaatagattgaccaaaaggtattttgtagacttgtaaactatttcaatcaaatgaacaactgatgatgacagcagacacaaacagttaaacacacatgcgtacacaattggtgacaaatgacaattcatctttgcctctctgctgattccaaaataggtagaataaaaacacaagtggacatctggatgtttagcccaaataaaatgataaaacaacatgctacctgtgagtgccttcaatgcaatagcctaaaaggctaaccaaattcttgtggccgacatg

SEQ ID NO: 61555 - DNA, 202 bp, Glycine max
  Clone ID: PAT_MRT3847_26598C.1
gaatacccctcttttgctgcatcagaggagttgtaaattaagagcattggtggacaagctcctggaacaacaacctcccgtaacttcccagcggaaggtggaaggccaaagccttggaccaggataattccattctcaatttggctcctcaagaaaggcttccttcctggttaaggcagtggtaccccccctgtcaagcaag

SEQ ID NO: 61556 - DNA, 224 bp, Glycine max
  Clone ID: PAT_MRT3847_26599C.1
gcaaaaccgttataaaatggtccactacttatataataaaacgtggaaatgggggagagggcaaaatccacttgagattttgctaaccctaattaagctattaatttggaaaagggtccaaaaattacattttaaaacttttgcaatttgggcaattggggaggcccctataattaaaacaaactctatgcaaaacccggttttttttaagaaatgaacctctg

SEQ ID NO: 61557 - DNA, 384 bp, Glycine max
  unsure (1)..(384): unsure at all n locations
  Clone ID: PAT_MRT3847_2659C.1
gtgggtttttttttttttttttattttttatttacatatttttgcttatagactgttttggttgatgtttattggtatgatccaacgcgcgggcaccaacctctaaaaaatacgcgttttgaacaatggctcaaaaggatttgttgggacggggacagtagaatatggggactcatgcaaagggaaggatacttggtcagatccaaacaaatatttattgtgggatgctgttcatccaacgcaaaaaatgtcaagcaagtagccggggagggcaccgggaccttctttaaaaacttgttttaacagcccccccaatttaatatatgaggcccgggtgacaaaatttctttgtgtcaatgnggaaaaaaaccccctggcccttcc

SEQ ID NO: 61558 - DNA, 1650 bp, Glycine max
  Clone ID: PAT_MRT3847_265C.1
atggccagggtcgacagaaaaaggaaaaaaaaaattattttagtctcttaaaacttaaatatgtcagataagaacacctgaaacaaagagaaactacaaggaggagaaatacaagaagggaaaggctttgaagatgggaatcacaaaccccttcaaagaccaatccctctccctcatcaagagacttcttccttggaccctctatgctcttcttcccatagttttacttcgcttgtacttctaccctctacccttccctccatctccagaaactgagcttcctcattccacccccaccaccatcatctcacagtcttctctttctgattccacacaaccttcttcaatggaagtgttaaaaggtgcttgccacggcctatagacacttggaatgagattttcctagagatgattaaagccctttgtacaatggctctacctgtgctacaatcaaagagagccagaattgcatcatcaatgggaggcatgactccacctaccttcgctggagatggaaaccaagtgaatgccatcttccaaggtttgaaccaaacacttttctccaactcataagaaacaagcatgtagcttttgttggggactctatggctaggaaccaaatagagtcccttctttgcttgctagccactgcatcaactccaaaacgtgtccaccacaagggttctcgtaggtggcactttgattctcacaatgcaagcttgtccctctattggtccccttttcttgtgcaaggggttcaaagaacaagcacagggccacagcataatgtaatgcatttggatcttgttaatgagaagtgggctagggatgtggatcaaatggacttgattgtgctgtctgttgggaattggtttttggttccttcagtttactatgagggtggtaaggtcttaggttgcctaaagtgtcatggtcttaagtacagtgatgttagtttttatggttcactaagaaaggctttgaggattgctcttaatagcattattgagaggaaggtgggtaaaggaaatggagttgatgtaattttgagaacattctcaccttcccattttgaaggtgattgggataagggtggtagttgttcaaagactaagccttatagaaagggtgagatgcaacttggagaagtggatgctgagatcagaaggattgagatggaagaagtggaaaatgctaaggcaaaagttaaacaatttggagggtttaggttggaggcacttgatgtatcaaaattagcattgttgagaccagatggtcatcctggtgcttatatgaatccttttccatttgctaatggggttccaaagcgtgtgcagagtgattgtgttcattggtgcttgccagggcctatagactcatggaatgagatctttctagagatgatgaaaaagtgggagaaacagccaagaagccaacagtgaagaattcctcttgttaatttattacactaatatttttccaccacacaataagtcctatttttgttggtggaatactaatgacattcttttttattagttaaaattgatgtaaatcttaccgatttgtaaataatatctactaaatcgagattgggactcatgtttagtagaactctcatcattttaattaataaaaaagaaagcgtcc

SEQ ID NO: 61559 - DNA, 425 bp, Glycine max
  Clone ID: PAT_MRT3847_26600C.1
aacggacgctctggtgaaatacaactggtcatagctattgactcgtagggcccattcaggcgcataatatatcgtgagcctcgaaactgcgcaataggaagcctctcagtgaatattcaaataggccttaactttttcactcgcaagtcagatccaggcacatattttatcgagacgctcgatattgaacaacagaagctctcgagaaattcatatggccattactcttcactcaggggtcctattcggacccatattatatcgagatgctcgaaattgaataacaggaagctggctggaaattcaaaagggcataacgtttcactgcggaggccgattcacgcgcattatttatcgagacacttgaaattgaatcaaacggaagccttctcgaggaaattcaacctagtcattacctttattct

SEQ ID NO: 61560 - DNA, 274 bp, Glycine max
  unsure (1)..(274): unsure at all n locations
  Clone ID: PAT_MRT3847_26601C.1
agcgggggctggttgatcccgagagcgatgatgaagaagatgggaacgatgaacatgacgccactgtggaaatcgggtccaaaagaaaaaggcaacgaagtaaatcgagacaccaagttcaaaagcctaagaaatttcatgaacaaaggcctgatgacagccatgaagaaggaccggaggatgatgataattcagaagacgagtatttgaaagacttcctagaatccagacccanattgaaaggtactgcangaaggcctccaagcactggtga

SEQ ID NO: 61561 - DNA, 459 bp, Glycine max
  Clone ID: PAT_MRT3847_26602C.1
aataaagagacaaagattatgaatgatggaaaaagaaaaaacatatcaattaacaaaaaaaaaaaaaaaaaaattctcataaaatctcaaggattttgatgaaaattttgatatattttctactaaaaaatctcaaaatctattaaaattcatcctaagaaaaaattcataaaaatttatatattttttgataccaaaaaacttttttgaagttttaaagaatcttaattgaataccaataaattttattaaattccttaaaaaaccctaataattttgattaaatatcacaaaatttatttctattatttaaaaatattgactgaatacctcaaaaaaaaaaatcttttaaaattatttgaaatcctaattgaattcaccccttaatttgccacactccatccctcatagacaataataagagccttttcttagcactaaacattggcttcaaatttc

SEQ ID NO: 61562 - DNA, 187 bp, Glycine max
  Clone ID: PAT_MRT3847_26603C.1
ccacgcgtcctcccacgcgtccgtacggctgctagaagactacataaggggggcagctcggtacatcttggaggggagtcactgagattgcgggtgtggtctttttctttgatcccaagccaattcagggttattggaatggtgcttgttctcacacaaactactgcacttagttcatgagaaatga

SEQ ID NO: 61563 - DNA, 204 bp, Glycine max
  Clone ID: PAT_MRT3847_26604C.1
gaaaaacttgcccactaccaacacaggcgagggttcatatggggagagagatttttacacatcttcttcataaggcaattacagcctatagtactacgatgtgaccaacctaacacctatcgcattatccgtcttaaatatataaccgaacgatcctcataaaaggacctcttacataccccgaaaacctaatttggttattct

SEQ ID NO: 61564 - DNA, 1684 bp, Glycine max
  Clone ID: PAT_MRT3847_26605C.1
caaacaactctttttcttcttcttactacttgtttttcttcttcaccattctcaattcttttcttcttcttcttcttctaacatgggaccctcttccaagcacactcctcgttcccccacgtacttaattccctgcgttatagctcttgctctattctccctcaccggactcctcctctacaaggtggacgacgttgcttctcgcaccggaacggtggtgggtcacaacctagaaccgacgccgtggcacgtcttcccccacaagcccttcgatgaagagtcccgccagcagcgcacgtacaaaatcctgcaatgctcctacttgacgtgccgctacgccgccggagccgtgggaggctcacggcggagcttcgccggcggccgggaggagtgcccggagtttttccgggcgatccaccgagacctggctccgtggttggagagccggatttcgaaggcgcacgtggcggcggcacagcggtacgcggcgttcagagtggtgatcgttgaagggaaggtgtttgtggattggtactatgcgtgtgtgcagagtagggcgatgtttactctgtgggggttgttgcagcttatgaggaggtaccctgggagggtgccagatgtggatatgatgtttgattgcatggataaaccttctgttaataagactgaacaccaagcaatgcctttgcctctatttcggtattgcaccacaaaggaacactttgacatcccttttccggattggtctttctggggttggtcagaaataaacatacgaccctggcaggaagagttcccagatatcaagcgtggttctcgatctgttacttggaaaaataagttaccatgggcatactggaaaggaaaccctgatgttgcatctcctattcgtactgaattaataaattgtaatgattctaggaagtggggagcagagattatgcgccaggattggggggaagcagctagaaatggctttaagcagtcaaaactttcaaatcagtgtaatcatcggtataagatctatgctgaagggtatgcatggtctgtgagtttgaaatatattctctcatgtggttctgttgcattaattatatcaccccagtatgaagattttttcagccgtggccttattccaaaccataatttttggcttgttgattctctaaatctatgtccatctataaagtatgctgtagaatgggggaaccaacacccagtagaggcagaagctatagggaaaagagggcaggattttatgggaagcttgaatatggatcgaatttatgagtacatgttccaccttatttctgaatactcaaaacttcaagacttcaagcctactccaccaacaactgccctggaagtttgtgtagaatctgtgctttgctttgctgatgagaagcagaggatgttcctcaataaatcaactgcattcccttcacataaacctccctgcaatctcaaacctgcctagttatatcacctctagtttacaccacaaatataccaaaggattttacacatccaagaacatgaaatctcagtgaacatttacacgttattaaatattgtaaaaatatagtgccttttaggttatcatttacaagatttagctttagtaattggtcatcatcatttaacagcgagcaagagcaacaccacaggaactttcattttaaaa

SEQ ID NO: 61565 - DNA, 145 bp, Glycine max
  Clone ID: PAT_MRT3847_26606C.1
tttcctttttccttagaagagtcgaaagcgtcttcaggaaaccaagacactatgaatggtgtcgattcttcttccagagagacatcaagtcggaggttggacgggatggaactagctgtcgtttaattgatatagaccagtatga

SEQ ID NO: 61566 - DNA, 546 bp, Glycine max
  Clone ID: PAT_MRT3847_26607C.1
atcagaaagctaaactgctgagataatgttatctactgtcaagcatcgggaaaatagttgcatgtttcacaagaacacaacacacccagcccaatatggttgggggctcaatattactttctggtgaagaatgtggaacattggaaatagctctgagcactcatattctacagttcaatggctcataaagttattttgaaaatcctttgcatacacagcttctgagatggaaacactatgttctttgtcctttaccgggtaaagctcattaccttcctgccatttgtttgactgcgaaatccattggtttctccactcaatcaaattgaacttggcatttagtgtcaacctttctgccaaatgaccaaactaggttgaacctcgagggagatagcacttttccagaagcccactccaaaacttgttttcctaatcatggacctcgctctcagtagcatcattggaatcaaaccacattgacacttgcgttctaacattcccttcatactgctttatctgacttggattcactgacagttttttagc

SEQ ID NO: 61567 - DNA, 1071 bp, Glycine max
  Clone ID: PAT_MRT3847_26608C.1
ctcaacggacttctcgaggtctcattttctctctcttttagatctctctctactatacatctccttcacttcaccattttccatttccatttctccctccctccaaaaatgcattcctcgctctctctctcgttctccgcgacctcctcctccgccgccaccgtttccagatcacgacactcattccactctcccgccgtcgccacgcctctcaatctccgcttctgcggcttgaggcgcgaggcatttgcttcaggtctcgctgcttctcgcaaccgccaccactcccaccttcctcgccggcctcgctccgccgcagtctctgccgcgctttctagcaatggcatccctcccaaatcgttcgactacgatttgctgattatcggcgccggcgttggcggccacggcgccgcgcaaaacagtttactaaaaaaaacgaagcctgatatatctgaatgagaggagttcatatttttggtttgcatgcagcagatctcatccatgaagcatccaatgcaattgcattagggacacgtattcaggacataaaatttgcagttcatgcacatccaactttgtccgaggttcttgatgaactattcaaatcagcaaaggttaaagcacaagcttctagcccagtaagtgaaccagttgctgtctaatcttcccaaacaaagtataaaattttgaagaaatttacttgtactagggacttccaaaatattcatcttcaggaggaagacacaaacacattcagaatcctgtaaaagaggggaaccgtttgagggaaatcaataatgacctgatgatgaataactgccgaagcttacatgtaatggtttcttttctacttggtattcttagtgcctgtcaaagatgcttatgctcattattgcagtttttaaactagtttgcttcatctaattatagtcaatgagagggcctctgacagcggcctatttttttagagtgcttctagtcttgcaccgaacatttatgtaccattaacagttttccttcagagattatgaaattatgctcgtcgccacacctttggcttcactacgctat

SEQ ID NO: 61568 - DNA, 629 bp, Glycine max
  unsure (1)..(629): unsure at all n locations
  Clone ID: PAT_MRT3847_26609C.1
tcagtcaaagtagaagagaatgaagttggctcagccaaggtgaatgaattctttgatgtagcaaccagttctgaggaaatgagcagaaccacagtggataaatcggaagatgtacctaatagcagctcgggtaacgaggaaaaatcccacagtaggaaatctagttccagttccagctccagctcgagctcaagtgattctgattgataccaagtggccactttgagcaagaagagtataagtttctcatttatgttgttttatttaattttttcttcagtgatgggaatttgggtatttagccttggcaccaatcatgtcttggctaatagtattcaggtcaggtttcttaaattttgttggattggtttcttcaagaatgagtttttggttttatttcttgaagcgtgcagttttttgttcaattttatcccacttagtgtgagcaatttggcaaatataggttgagtgtttatttccaacaggtgcacattgtgtagtccaaaaagaaaaagaaattggattattgtacattatacttcgattgtagaaatggtggtcggactttgtttttgtgtataaaaaaannnnnnnnnnnnnnnnnnnnnnagcggccgctctagaggatc

SEQ ID NO: 61569 - DNA, 463 bp, Glycine max
  Clone ID: PAT_MRT3847_2660C.1
agctggcacgcctgcatgagccggtaccctataccccggtcgacctactttttcgttttagagggagaaagcacacttaggggacatggaaacgggcgttattgaaccactgcctacaaaacctacttgggtggaaactcccaaggacagtcaacaggctcaaccttgagacaaaaaccctagtgactagactacaactgcttagagataggggggcacaaaccatgaaggatattatcctctcctaggtgagcatccaaaatatccccctcccatggtgcccctataggaagaaaaactttttaatgaccctcaccacatgcgtgtgcgaatgcttttgattgtgttgaagaagaggattgctacgtggaaactaatccaagcgcaggactgaaaaccaccgagggcactgactctatggacagaaaccctctcggcacatgtgagggattgacttacgtgc

SEQ ID NO: 61570 - DNA, 4837 bp, Glycine max
  Clone ID: PAT_MRT3847_26610C.1
ccacgcgtccgctttctcttcttttcgtgccgcccctcactctctttgtcaaaccatcaaagatacacatacccaatagcgtaaacacacgttcagctcctcatagctcccgttaccattgtttttgccccataaagtaaacaaaagaaagaaacattgaaaatcccaattaccctttgttttctttttgtttctacaatcatatctgggattggattgatctgtgggatttattttgattcatgttaaggttttaattagggggagagttatcaaaggagagagagagggagatgggatcagaaattggaatcaaagtaaggaaagttgttgtcatttcaatcagaggtggttacagatcagcttgcaaccatccattccttgtgggttttttttgcttcttgcttttgttgtacagatcttttccttttctgttttctgttttggtctctgcatctcctgttttggtctgcactgctattctgcttgggacccttctcagttttgggcagccaaatgtgcctgaagttgagatagaagagaaagttactcatgacatttcatccttccaagccgggttctccgagggtgacactgtttttgctgacagagatgagagctattttgtgaaggggtattcagaaaataggagtgatgtggaagagaggggcattgaggaggaagcaagtttggttagtgagagggataatagggccgaagaagatcgcggattgcttactttcaggatgtcagtgaagaatgaagagatcatctggaagttaattcagaccttcaagttgtaagagccagatctctagaagatattaacattgctttaaaccaagtctctgaaggtaataaaggggagttgccaaattctttggattcaaaagacacttcagtcaaagtagaagagaatgaagttggctcagccaaggtgaatgaattctttgatgtagcaaccagttctgaggaaatgagcagaaccacagtggataaatcggaagatgtacctaatagcagctcgggtaacgaggaaaaatcccacagtaggaaatctagttccagttccagctccagctcgagctcaagtgattctgattgataccaagtggccactttgagcaagaagagtataagtttctcatttatgttgttttatttaattttttcttcagtgatgggaatttgggtatttagccttggcaccaatcatgtcttgggtaatagtattcaggtcaggtttcttaaattttgttggattggttgcttcaagaatgagtttttggttttattttttgaatgagtgcaaattttttgttcaattttatcccgcttagtgtgaaaataaatctgctattaagtggacagaggatgaccaaaagaatctcatggatctgggaaatttagagctggaaaggaataaaagattggagaatcttattgctaggagaagagcacggagattgatgactgagaagaatctaatagacttagattgtgttgatattccctgtaatgttgcacctattgctatgaccagacataacccatttgattttcctgatgactcctttgctgccatgggattaccacccattcctggatctgctccgtctattctacagcctaggagaaacccttttgatattccctatgactcaaatgaagaaaaacctgatcttaaggcggacagttttcaacaagagttcaaagtgtttcatcaaaaagaggcctttttccggcggcatgaaagtttcagcgtgggaccatcagtattggggttatccaagcaagagaggtatgattggaaacctgtctttatatctgaaaggatggcttcggagggaacaagctatccttcattccagaggcaatcaagtgaagttagtgattcaaagttaagttctgttccagatactgaatctgtgagttcaattgatcaggatgacaggaaattcagtgagcaagacttgtctcaagaaactgaatttatatctaacattgaccatgtttctgatgttgttgaacatggaagccaatcctctggagaaaatgattctgtggagatgatacaagttgaggagagcaatgcttgtcaggatgaaggggaaatagttctgggcggggtggaagatccttctgagatggtattctatcctgaaacaggagaggttgaaatccacgaacaattcaatgcaggggaaacacatttgagaagagaaccaagtcatgaggagagtgtcggcagcagcagatcaagccattcttcactatcggaagtaattgacagcataccagatgaaaacatggaaaaagcggaaaatttgcagcaaggagatgatcatctctctgaatctagaatttcaacacaagcttcagtggaggaatcaatcttccagcaagttagtggtgaggtggaagaaaatcaccatgtagaccctgtttatgatcttagtccacaagcttctgaaacactccaattgtttccttcaatatcttctcatgattctgctatggagttgtctgagagggcattgcctcctgcttcagtagaaatgactgctaatgcggcagaagaagagtccaaagtgcatgatcacagactggaaggtaatacttctgatcatgataaaactcaagcagcctcttccgaactacatgaggaagccaaaaatgaattgagttctgagaaatctgaagatgtgaataatgttactgcaaatgagttatctgcagttgccccaaattttgttgatcagaatggatctacaatggctgagccgcaggttgtccctgtttctgtggattcaaatttgtcttctgatattggatcaataaaggatgtgactaatttaggcttagttcatggacaggatctagctgaccacatacgtgctgattctgaaattcttcatcaagacaatgtagattctccagattcagattatcaaatggcttctgaaaagtcacatctatcagataatgaatctgtggaggaatctgcactgcccaatgcagaatcaagatttgataatgcaaatatgtctacgccagtccaagatgcagatgaaatgtttgattctgcggcttctgatgcccaccatatttcttctaatggttcatctatgcctgcaccacgggattttcagctttcacctacagcagggccatcaccagtggttcatcctgattcaccttctgaagaaactgaacatatagaaaaattttcatcaaataatgatgacatatttcagattcagcaaggtaaaaccaacatccaccaagatttggataagaatacggttgctttcacttcgggcagtcaacatgaaattgatgtgaagtctccctctaacttggagaatgatctgtcaagctctgataaatcagttgttgcacaatcttctagtgatcatgatgaaattcagagttctaatgctatccaggttgaatctgcacactgttttggcacttccaatgatgaagttggagaattgcatgatgcagttgacaaatttcctccaagcatttcttctgtgacctctgaaaaatttgagacccctaaattcaggtcacccactggtgaagcagatttggaagttgataggcacggggaagttgaaaatgaagaccaaaatgaagtgctagaaactgcgcttcattcagaagagagcatgtctcaggttactgaagaaaatagcaatgaagaatttgatgatatgaaggaaattgatgaagaattcttgtcagaattggacactgttggagactttagtgtcaatgatgctggtgtatcacttcatactggcattgaacatgagaaaattagagatgctcaacttagttcactccctaaggatgtaaagacagaagagtttgagcaggacatcccagttcttgaagcaagatcacttgaagatattaacttggcttttaagcaacttcaagaaggcgtggatgtcgaagaggtcatcaatcgaagtactattaaggatcagaatgtcggtggagaatctaaagatcatctggaaattaattcagaccttcaagttgttgaagccagatctctagaagatattaacattgctttaaaccaagtctctgaaggtaataaaggggagctgccaaattctttggattcgaaagacacttcagtcaaagtagaagaaaatgaggatggctcagccaaggtgaatgaattctttaacgtagcaaccagttctgaggaaatgagcagaactacagtggataaatcagaagatgtacctaatagcagctccggtatcgaggagaaatctcacagtaggaaatctagttccagctcgagctcaagtgattctgattgataccgaaaggccactttgagcaagaagaaagagttgtaagtttctcatttatgttttttatttaattttttcttcagtgatgggagtttgggtatctagccttggcaccaatcatgtcttggctaatggtagtcacaagtcaggtttctcaaattttgttggattggtttcttcaagaatgagtttttggttttatttcttgaagcgtgaagttttttgttcagttttatcccgcgagtgtgagtaatttgacagatataggttgagtgtttatttccaacaggtgcacattgtgtagtccaaaaagaacaaaagaaaaagaaattgaattattgtacattatactttgattgtagaaatggtgattggactttgtttgtgcaaaaaaaaaaaataaaaaaaaagcggccattcagactgtgaaactgcgaatggctcattaaatcagttatagtttgtttgatggtatcatacttacacatgcatgg

SEQ ID NO: 61571 - DNA, 451 bp, Glycine max
  Clone ID: PAT_MRT3847_26611C.1
ggggaaaaaagtttttttgaatttaaaataagggtcggggggaacaagtttgggaaaattcctagaacatccaatatacctaagtttatcacccttaaagtttcaggcccaaacagtttttgggcttaccctctccccccaaattatgtgccccaattcccccaaacgatacatgggtcacaagttacaattcctaaacggggccattcaatgacccaaggagactttcctttgtttatttttccccccccaaagcaaaaatttgagggagaaaaaatcataaaaaccccggggtttcaaaaaattggtaacaattttggttaaaccatcaatttataacccaaactttatggcgaaatgtttccccccaccctaacaggaagaagaatataatttgctgggcccttgaaggtgcatccaaaagcaacacgggcctggaattctttggggg

SEQ ID NO: 61572 - DNA, 263 bp, Glycine max
  Clone ID: PAT_MRT3847_26612C.1
tcgctaattcatactacctaagtttccacctatatgtactctcactttctctggcttttaaccctctcagtatatccatatcacctagtcaaagctatcttcggctaaaagcctaaaacttcattgattcccttatttccttgactttcatgtttcatgttttaatttggacctcaaaatttcgcctcctttttttttcccttagacctttaactaagttatgctttagcaaattctagtgaattgttgtcctcgtttgctct

SEQ ID NO: 61573 - DNA, 314 bp, Glycine max
  Clone ID: PAT_MRT3847_26613C.1
gggggattaattaattcaaccccccttcttaattattctgaggccacttgatccaacacaaagtcatctttggtaaattttatgctaaaagtgttggcagtggtggaacaacatgttttgtaaagcggtggcagctcctcgccatatattggcaagttcaagatggctgccacatcatgcaaggttgggccaaccatagcttctggaagaacaaggccattgatagtcattggccagaatcctaggatactgacaagcaagtctcgcaaccaatgcatatcgacagttgacagcatgatcatgtcgtagactcc

SEQ ID NO: 61574 - DNA, 306 bp, Glycine max
  Clone ID: PAT_MRT3847_26614C.1
ttataatttctaatctaaaattgcacttcccaatagatcactacgcagaatggtgctttgaatagttcttttggggggcgtgccagagatgatatttacaccatatgttgctaagactgtgaattatggtattctgcttgcacaaaagcaatgactatgtcatttaattcaaacccgagttctggtgcatggagtttggaatttctgaagcgtaccggatttcattgtgatatcatttgagtgactggcagggctgctacttccatggaagaaggtcaggttacaagtgcttgggttatgtctttt

SEQ ID NO: 61575 - DNA, 275 bp, Glycine max
  Clone ID: PAT_MRT3847_26615C.1
tttttgatataaaattatattatcaattaaataacaaactgacgttttcatgagaacgcgtcacataccattaagggggatggaagggatattatcaatataagcacaacatgtgtgaagtataagaaaaacaaattggacatcagctcaacacgactaagtttgcaaagtgtttataagatacactaacacatgaaagatttaatcataggctcggacactagtgccaggtgtatgctggatcacccttgaaaaccatctggataaaccttgag

SEQ ID NO: 61576 - DNA, 680 bp, Glycine max
  Clone ID: PAT_MRT3847_26616C.1
cttcttctagctttcatgcttttgttgactgttcttcatcttttccatgttctcttgttctgattatttcgatctgttcccgtaatcgagttgtggtgttggttttgctttgtggattgttatgcttcttcttgctggttccgatcttaatcgactttgtatagggttttgccggttgatgatatgctgttttactggattgaagatctgaagaaattgattgtgtttcattggtttgcagcacgatgagatttccgtgtccgattgaaagattaaacggtggatttaaacggctaactgcataagatataactaatttctactttgagtttcctctattattttaatttccctggacttgatcacgaaacatacggatttaattgtgaacctatttttctacagcgtagtgttcggaatagtttcgcgtaataacgttctgtgtagagcatcaatcctcgtccatgatttggtggtgtctactggggttttgaatattcttggctttgtcttttttttgtttctttgcttcgcttagttttcttgatttaattctccgtgacttccgcttggatcttacagggaagataagcaacggatgtgtggtaggcaggctgtggaaaagctgtggcgggagattattgacagttcgacacacattctatgggaagtcaagtagt

SEQ ID NO: 61577 - DNA, 197 bp, Glycine max
  Clone ID: PAT_MRT3847_26617C.1
gtaaaggttcgatatttacccccttccccgtggttctgtatttagggagtacaaaattatataaatcaaagtatttcttttcttattcacacgtacatatttcttgtttgtacaaggcattgggtagacaacattcaatttttgaaagtgtacaacgcaaataaaatcaaggatttcaagaataattgtaatttgta

SEQ ID NO: 61578 - DNA, 335 bp, Glycine max
  unsure (1)..(335): unsure at all n locations
  Clone ID: PAT_MRT3847_26618C.1
tattacttcctatctctttcgataaccccttcatataatccacttttctcaccgatctattattcttcaacaacaccctccaaccacanttaataaggatttttcatatttaccacctacattatttatataaaatttaattttatatataatttattttttcaaataaaccctcctatttttaaatacactctaccccaattcctctattattaaaatctcttntttcttaattatattaaaatcacccaaatttaatatatctatttntcttttctttccattcccatcacactcctcaatttttccccatttcaccacttttttttttcaca

SEQ ID NO: 61579 - DNA, 184 bp, Glycine max
  unsure (1)..(184): unsure at all n locations
  Clone ID: PAT_MRT3847_26619C.1
aggaggcccncctgcccgcgtccggatgctggcctcttgagggggggccgtccttttttttttttttttttttggattaataaattccaaaagcacatactagcatgaagagagatataactaagatcttagttctacaggcaaaaaaatcatttgctccacaattgcctacagcttttaacaa

SEQ ID NO: 61580 - DNA, 1770 bp, Glycine max
  Clone ID: PAT_MRT3847_2661C.1
ggctcgagctcacacaaccttctttcgggtccaattcctcccaaacttataaaagggggtttggtggaaagctttgctgggaatcctgggttgtgtgtgttaccggtgtatgctaattcatcggatcataagttccctatgtgtgcaagtgcctactacaagagtaagaggataaacaccatctggatagctggggtgtctgtggttttgatcttcattggctctgccttgtttctcaaacgtaggtgcagcaaagacactgctgcagtcgaacatgaggacacgctgtcttcttcgtacttctattatgatgttaagagcttccacaagatctcttttgaccaaagggagataattgagtccttggtggacaagaacataatgggacatggagggtctgggactgtgtacaagattgagttgaagagtggtgatattgttgcagtgaagaggctgtggagtcactcgtcgaaggattcggctccggaggatcggttatttgtagacaaggcattgaaagcagaggtggagaccctgggaagcataagacacaagaacattgtgaaactgtactgctgcttctccagttatgactgcagccttttggtttatgagtacatgccaaatggtaatctttgggattcactgcacaaaggttggatcctcttggattggcctactcgttatagaatagcactggggattgcacagggtttggcatacctccatcatgatttgcttcttcctattatccaccgagatatcaagtcaactaatatcctgttggatgttgattaccagcccaaggttgcagactttgggattgccaaggttttgcaagcaagaggagggaaggattccactacaactgttattgcaggaacatatggttacttagccccagaatttgcatattcatcaagggccaccaccaagtgcgatgtctacagttttggggtgattttgatggaactgttaactgggaagaagcccgttgaggcagaatttggagagaacagaaacattgttttctgggtttccaacaaagtagaaggcaaggaaggggctagaccaagtgaggtattagatccaaagttgtcgtgttcattcaaggaagacatggtcaaagtgttgcggattgctattcgctgcacctacaaagccccaacaagtagaccaaccatgaaggaggttgttcagcttctgattgaggcagagccacgaggttccgattcttgcaagttgtcaaccaatgatgtatcaaatgtcaccgtaataaagaaaccatatgaattataattataattataatttgagtagcttaaagaaagggtaagaggcagcatatgacaactaagataagcagtctctctggatgtaactgagagactcattgtagagtagagaacaaattagtataatctttttttttttctagacaagtagtttgtagattctatctttgactatgtctcttctctctattgctgctcccttttactgtctttgaattttgacttttgtaaaaatttcaagtcagattgctatccaagcttttcggtaatgtacagtatctatattttaaaggcccacacttgaaagcatttgcctgagagactcattgtagagtagagaacaaattagtataatcttttttttttctagacaagtagtttgtagattctatctttgactatgtctcttctctctattgctgcccccttttactgtctttgaattttgacttttgtaaaaatttcaagtcagatt

SEQ ID NO: 61581 - DNA, 310 bp, Glycine max
  Clone ID: PAT_MRT3847_26620C.1
tttacttctattttttttttatttttttttggaccaaaaggatatttaaggtaactaaaagggaaccttaaggaccttaacccttccacccaagattcaccggccaccgttctaccgggaaggaatccccaagggagggaaacccttccccgaaaaaatttcccggtgggatcaattataccccatttttttttttatattacaatttttcccctttagtatcaatggctggaaagttgttctgggtattggtttattaaaccaccctcgtaattaaccccagaatttccacttccgttagaggggccgg

SEQ ID NO: 61582 - DNA, 506 bp, Glycine max
  unsure (1)..(506): unsure at all n locations
  Clone ID: PAT_MRT3847_26621C.1
gtaccgcccctgcagggtacccgggtcccggggaattcccggnngtcggaccccacgcccgtccggaacgtcgtgctgatgctgcgatcactcggttgactacgtctagccaacctacgaacacacctagcaagtgcatacgccattcggatgcggagctcgggtggttccgtcctaccgctctgggatactctctatttcgcctgcgtcattcttgcgctcggaatcatgttaggcactaaccctcagtcgcatggctatgggcctcgtccgaccttgagattcttcacagcagttggtctacctgctataagatacacagcagggcatatactgtacgctggatcaaagagcatgaccaagtgctagagacttgattatgcgttacgctgacggcatggagagagggacttacaggaactattgcgatgctccatttggaattagttacgattaatgagctagaatgggttgaataacatgccttggatgcggcggagaggtga

SEQ ID NO: 61583 - DNA, 430 bp, Glycine max
  Clone ID: PAT_MRT3847_26622C.1
aattatttgaacgacctcaatcggcacaagcaattactcatggagtgatgcattgcgtgggctatatgtgctgatgttgcctttaggggttgcatgttttccctctatatctattaaaacttatggaataatacttgtaacggtgtgtgttagtgtccacctgtgggtgaagttgacaatgtcacaagctggggtcctttattaggcatggcaaaatatcgtagggttgtaaattggcatgaacttgtactgagcataatttctcaagaagcaatcatagtttgtatggttgactaacattaaggactaaaggcctctgaacaactaactatatttaaagaaacaatctatgtacaaatcttgcaacagagagcatttgtacctttttttgatcctgtagtgactggtgccatttaaacaatttaatacc

SEQ ID NO: 61584 - DNA, 251 bp, Glycine max
  Clone ID: PAT_MRT3847_26623C.1
ataagtatatatttccaatactgtgaatagatccctaaaaagattggatctgaacaatctaatgagatctggaaacaaatcaaagagaaagaaaagcaactagaatatacacttatattaacacaatcaacactaactcatatataagcatgttgtcagggtttggtttttggtctagtaaatgattttttttttcgttagaagagataaaatttattttaatgaagtttatgtatggaaagaaactaaat

SEQ ID NO: 61585 - DNA, 244 bp, Glycine max
  Clone ID: PAT_MRT3847_26624C.1
tgaaaactgagttacacattgctatttattcaatgttaaatgcatggctactttattttattgaagctctataacttgagacagctaatctcatttatctgtgtaattatttgttaaaaagggtatagtatagtaatctttttgttccccttttaattttttattttacattgtacaaggtttttttcccatcatcattctatgttctatagttatggctccaatctgaagtccaatcaaaact

SEQ ID NO: 61586 - DNA, 633 bp, Glycine max
  Clone ID: PAT_MRT3847_26625C.1
ttttttttttttttttttaatttaaattttttttttttttttttttttttttttttttttttttttttttttttttttttttaaaaaaaaaattttttttttttttttccaaattttaaaccaaaaaagcccaagttttttaaaattttttttaatttacacccttttttttttttggaaacattgatttgggggacgatttttttaggggggtttaaaaaaagcctgggttttaatttaaacaatattctgggggacccttgcttggggtaaaaaaaagcacttggtttttggggggggggggaaaggcccttaaaaccctcccctttacataatcaaactgaaaaaaacgtggcccctttagagacttgtttttaaaaaaagaaaaacccgtttttgggggccccctccttatattttaaaacctggggcttttgcccttaaaaaaattggtattttttgaaaattttaaaaaaagggggataggggattggttttttttgttttaaaaaaaatttttttttactttgtggggagttaatttcaaaaaactttttcggtgttggggattttgggtaaaggcgccacaaaccccttgttggggaagagaaaaaacaatttgggggggttaac

SEQ ID NO: 61587 - DNA, 158 bp, Glycine max
  unsure (1)..(158): unsure at all n locations
  Clone ID: PAT_MRT3847_26626C.1
gtacgtagctcgnattcgctctgcagagtagtggagacgagatgttgggatgccaccngngnggtctctgcaaggcacattagaagctcaaagcgtgcaggggtttaatctttagacaggatgactgcttttgggaaagcacatacaaaaacttttgg

SEQ ID NO: 61588 - DNA, 363 bp, Glycine max
  Clone ID: PAT_MRT3847_26627C.1
caaagatcaattaccttgttcttttttttttttcctttttgctccatctcgactacgttatttatccataccggttctactttcaaaagcggcaatttcataacaatgaacacaaatgaaaaattcaaattgtgcgagacaaacatgcatgggttgagtgatttgatgagttgaagagcctatccaattgagatgttgaggacgatgatggcaaaggatgagcaagttccaaatgtatgcaacaatggtgagagttgaagactcgattagagtgtagagatgatcccaaagagaggcttaaatttggattaaataaactttactacttttgagagtgcttgtatttaatttaaaaaaataata

SEQ ID NO: 61589 - DNA, 516 bp, Glycine max
  Clone ID: PAT_MRT3847_26628C.1
acgacaccttcttcaccaccggtcaatatttttttccgttctcgtagttctgcagcccttttctcgagccgttcacagtatgcctccagagatccaacatagcttctttcttttcctcggggaaattcatcgctgctggagcaggtatccgcttttcctgctctttcgcaagccgaacaagccgggagtttcccgtcgcatctgatcttggcggttcggcatcttgagcatgcggcgactggccgactgactttgagcagcggtctgtccaaaaacgaggaattggacattctaactgtacatgttccctatcgagttcatatcagtgtggagctagcatgatgactcggcagtgtttcacgaaatagtcttcagatacaggctgagtttcatgtgaactcagtccgtgaaagctaggaatcaatttcctcgttaacagtctctaacgctaggaagatttttatgttgactgattaaaagtaagagttactcaccacttcaactgtgtgcttcact

SEQ ID NO: 61590 - DNA, 699 bp, Glycine max
  unsure (1)..(699): unsure at all n locations
  Clone ID: PAT_MRT3847_26629C.1
gagaagaaagactggctctttgggctagtcacctcctggttcgaagcaaaaaagagattaaacaggcaactagctgccctggcctgtggtttattcgtggaaagtgaaggagttgattttgagagaaggcttggaactcttcttcctgtgattgaaaaggaaattgatcctgaaaattttaaagatatcatagaggagacagaagaaaaggctgcagatcgcctgctgttcggttttctcacactgatgaggaaactcatcaaagagtgtagcattattcactttaccaagccctctgagacgctgagtaaaatctggagtcacgtgcactctcacctcagacacccgcacagctgggtgtggctcacagcagcccagattttcggattgctctttgcctcttgccaaccagaggagctcattcaaaagtggaaaggcaaaaagaccaaaaagaagacctcagaccctatagcagtcaggttcctaacaagtgaccttggccagaagatgaagagtatctccctggcttcatgccaccagctgcattccaaattcttagatgagtctctgggagagcaggttgttaagaatttactgttcatagcaaaagtcttatatttgctggaacttgaatctgggaataagcgaggagaggtaaaagactcagaagaacaagacactntagcagatgctctggcc

SEQ ID NO: 61591 - DNA, 425 bp, Glycine max
  Clone ID: PAT_MRT3847_2662C.1
gcacagcacccgaactttgttgagctaattccagagaaggtgtagaccgtggatgcacagagaaaattctgtcattgtaaagaaccaaagtatgcacaaatcttgatagctgatacaatatgttaagcatgctgacaatccgatcgtctgctgcattcaccctaaagggtcacagacaggtgtgtccttttgatccttgctttgatggaggaagtattctttgccttctattacctctttgaactatgctaggtgccttttaactttctgaattctctcctcctcatgccttagatcattatgggattcacattcatcctccccatcatagatgcccatttgaaagggcattcctaatctagcaggaaaaactgttaccttggaagatttgtcatggtgaacaaatcctacacattgatctgcaa

SEQ ID NO: 61592 - DNA, 663 bp, Glycine max
  Clone ID: PAT_MRT3847_26630C.1
gtttaattttaacaaaaaatcctgcttctgaagttagagatgaagttgactcagtgatagtgataatgggtttgtctgtagctctgcttatcgtctaatgaataggtggctttgatggactggaaggtatgctgcagtgcattatgtctaattgcttattctttgttttagttgaatggcaagtgtgttgtctctctctggctttttactagagaaatttgcagccttaaaccttgtgtatttaacttgggatttaaagagggctgttgctcggtttctcaatcttttgcttctttggtagatagtcatcagttcttgcgtcttccctccctctgaaaaactaataaattatgcatgcttgccttttctgaaacaaaggcatagaaaacataatttcaatctgaatatatcgatacttcgattgcttgaaacaactgttttacttttcatgttgcattcaatgtgttgaatagaactaggtttgttatacatggcctgtggtttttctgagatgtttctatgattttattcattgtgaatccgtgatatttattagtaacatgaaatattgcattgctgctttttgatcgttctgggctttgccagttcaagttagatgatgctccttgttttagtccttcatgaataatcttcgaatctatt

SEQ ID NO: 61593 - DNA, 383 bp, Glycine max
  Clone ID: PAT_MRT3847_26631C.1
ctacgcgttcgtctatattttattttttttctttttttttttctttttttttttaatctcgtttttgatcctgaagagcagtttttcccttgaatgatgggaggtggcatggtcatacacaatgaataagagaaaggagttttcttacatctggcttcattgagttagcttcaagcttgtttatggtttcccttcaggggcatacccttcaccttctggggcatactcttctttccaagggttacttatctttttatggctttccttcacatggtggctttccttctgctggttattcccctgctggctattcttctgctgctggtggttacccctctgctggttacccttctctttgttatcctggttcatcttctccacat

SEQ ID NO: 61594 - DNA, 379 bp, Glycine max
  unsure (1)..(379): unsure at all n locations
  Clone ID: PAT_MRT3847_26632C.1
gagagagagaaagagaagtgtgtagttggtgaagtttttgagaagaatatggaacgaagtggcggaatggtaacggggtcgcatgaaaggaacgaacttgttagagttagacacggttctgacagtgggatttgtcaaatatgtggtgacaccattggattaacggctactggtgacctctttgttgcttgtcatgagtgtggcttcccactttgtcattcttgttacgagtatgagctgaaaaatgtgagccaatcttgtccccagtgcaagactacattcacaagtcgccaagagggtgctgaagtggagggagatgatgatgacgaanacgatgctgatgatctagataatgggatcaactatggccaaggaaaca

SEQ ID NO: 61595 - DNA, 150 bp, Glycine max
  Clone ID: PAT_MRT3847_26635C.1
aggtataaccgggacctcttccatttaaaatgtatccccaaacttgaaccccttaactccaagtaaaaacacattgactggcgggtctcgtgtcttaaccacttaatacacacatgtacctaaaatgaatagctttcacattcctgctta

SEQ ID NO: 61596 - DNA, 387 bp, Glycine max
  Clone ID: PAT_MRT3847_26636C.1
cccacgcgtccgccagccgtacggtttctgttcgaggatcctacttcatagcaattcatgtggcctacatatggggatcacttcatgaaaatattattgtgttggtcacattatccgagccattattcaggtgactagtatgcacaggaacaatggtatcactgctatactgccccatatatcataggttgactccaatgccattgaccttcatgatacactatggaacattgacggcgatttaattcttgcatctggatacctacatcatataccactgtattggatccaagcttgccttacatctatttccaacattcattcatcatttcttccagctttcgcaagagtggcattctatctcatgatagatcacgaagctgaaat

SEQ ID NO: 61597 - DNA, 458 bp, Glycine max
  Clone ID: PAT_MRT3847_26637C.1
ccttgagatcttattcagccctacaagccgatgatagattttggcctgctgactatggcggccccttgtttcttctacctggtttggtgattggattatcggtgactggcgtccttaatgtagttttgacgcctgagcatcagagtgagatgcgacgctatttgttcaatcaccagaacgaagatggagggtggtgatctcatatagaagggtcgagcacaatgttttgcactgctctcaactatgtgaccttgagattgcttggagaagacatcgatggtggagaaggtgccatacagaaagcaaggacatggattcttcatcatggaggagtcacttatattccttcatggggaaaactctggctttcagtgcttggtgtatacgaatggagtggtatgaagccaatcccaccagagacatggttgtttccctactttcttcctttccacccaggt

SEQ ID NO: 61598 - DNA, 391 bp, Glycine max
  Clone ID: PAT_MRT3847_26638C.1
tacaggtgtgcgaagacgtcagagggggctgcgtatggggggaacttgatagaagccagcgcgatctcacacaggtatgtggtggaagtaacagtaccaatagggggcgtttttaggctacggctagtggtcacaggttcataggctgagccttatagtataaagatttaccaacgcgaccaggcagcaaccgggggtcaaagctgcataaaaaggagcttgcggtggctaatgaaagcaactaacagatcagaactggctggtagaggcagcagattcaacacttgccctgatatgggagctgtggtgattttgatgacatggaagaatgctagcatgattaagtccttgtattttccaactgcatagactatgtgctgaagatagtgct

SEQ ID NO: 61599 - DNA, 371 bp, Glycine max
  Clone ID: PAT_MRT3847_26639C.1
atgatctagaagttcctttccgttaatcttataccacttcagccttttaagcacctcagatttaccttggtgaatcacctttcatccctgcatcttctaccattaaacccacatcaaacataaacatgctttattcacagtcaaggtagaagagagcaaatcagtagtgaatcgtaaaagagtgacactcaaatgatttaattgttccatgaagagtgtcactctcaaggaaaacaaactttccaagcaaaggtggaatgctccatcttgtgtctctaattaggatgaaagacccctttcatactatattgatcagctatttcatttagagggaacggcatgactttctgaccttatatatgactttagga

SEQ ID NO: 61600 - DNA, 183 bp, Glycine max
  Clone ID: PAT_MRT3847_2663C.1
agggcatacatacaaacagagagttcatgacctttagtgttcacgttataaattaccaaagaacattacaaataacaaaatatggaggaagaggagagaaacacacaaaataagagacggggaaagatatggatattagacataatattagggcaacgctcaaaaaaaatacaacctagagcc

SEQ ID NO: 61601 - DNA, 1433 bp, Glycine max
  Clone ID: PAT_MRT3847_26640C.1
cggctcgagctgtttggctcaagatcgaagcgctggcccacctctactatcttctcaactttcctaactttagcaaccatccaagaagttgatcagttccttgtctctccttgaattataaaaccattcacagtcttgaacccaatttcactctttgcacctcaaacaccttataagcctcaatttcacaaccaaaaatgcaaagttcaatctcacaatctgagatttgcatcactgattaccttctaccccaagaagttccatctcaatttcaatttccagatatgagcaacaataacataccaatgaaccataccaaccttcaaatgcctcaaatcacatctttctccaagcctccaaggtcctcatcaaatctaagcaaccgcaaaccgtccttgagaaacatcacaatcccttccataacctcaggtcttacaacaactatgtcacaaacaacaacaacaacaacaatagctacaaccatgtataacaacaatcaagttacttcttcttcagatgaaaccaacaacatcaaagagaacaagcactatagaggggttagaagaaggccatggggcaagtatgctgcagaaatccgtgaccctaatagaaaaggctcaagggtgtggcttggaacctttgacacagccatagaagctgccaaggcttatgacaaagctgctttcaagatgagagggagcaaagccatattgaatttccctttggagattggagagtcagaggaatcagtctcaagctgcatcaaggttggtgtgaagagggaaagagaggaagagagtaaaagcaacaactatgagaaaagtgagtttaacaacaataataatagtaataagcatgtgaagaaagaagagtgttctcccaaagctgtttgccctttgactccatcatgttggaaaggcttttgggacactgatgttatgggaactatctttagtgtgcctcctttgtcaccactatctccactaatggttgtttgagattgtggactttcgctatttcaatgatggtttgaggtaaccaaattaaggagagatgatgctggggattgtcctctctgatttaggttggtaatttgcgtaaatcaaaatggtagtactaattaatctactaatagattaatttgcaagtgaagatatatgggtttgtataatgtaaatataggatagtatgaagcaagatttttttgtttgttaaaaaaaaaaaagctctcatgcttatcttcttcccttagttatgtttcatttggtcaagaaatgtactgtacttgaagcaacattgaaatttgtttattcgtttattggagaaaaaacaatattgaaatttgtttattcgtttattggagaaaaaaaaaaaaaaaaaaaaaaaaaaaaaaaaaaaaaaaaaaaaaaaaaaaaaaaaaaaaaaaaaaaaaa

SEQ ID NO: 61602 - DNA, 1002 bp, Glycine max
  Clone ID: PAT_MRT3847_26641C.1
gtcctcatcaaatctaagcaaccgcaaaccctccttgaaaaacatcacaatcccttccataacctctggtcttgcaacagctatgtcacaaacaacagcaacaacaacaacaatagctacaaccatgtataacaacaaccaagtttcttcttcttctttttcttcagatgaaaccaacaataccaaagacgacaagcactatagaggggttagaagaaggccatgggggaagtatgctgcagaaatccgtgaccctaatagaaaaggctcaagggtgtggcttggaacctttgacacagccatagaagctgctaaggcttatgacaaagctgctttcaagatgagagggagcaaagccatattgaacttccctttggagattggatcagatcagtctaaagaagagtcatcatcatcatcatcatcagtttcaagcagcagcatcgtcatcaaggttggtgtgaagagagaaagagaggaagagagtgaaaggaagaacaactatgagaaaagtgagtttaacaacaatagtaatagtaataagcatgtgaagaaagaagagtgccctttgactccatcatgttggaaaggcttttgggacactgatgttatgggaacaatctttagtgtgcctcctttgtcaccactatctccactaatggttgtttgagattttgtggaacttttgctctttcaatgatgttttgaggtaaccaaactaaggggagagagagagatgatgctggtgattgtcctctctgatttaggttgctaatttgcctaaatcaaaatggtagtactaattaatctactaatagattaatttgcaagtgaatatatatatggatttgtataatgtaaatataggatagtactatgaagcaagatctttttgtttgttgaaaaaaaaaacaaaaaacccatgcttatcttcttcctttaggtaaaaaaatgtactgtacttgaagcaatattgaaatttgtttattcgtttattggagg

SEQ ID NO: 61603 - DNA, 474 bp, Glycine max
  unsure (1)..(474): unsure at all n locations
  Clone ID: PAT_MRT3847_26642C.1
cttaaggaacataacatcatctgcttccacctttaactttggtttatttgaaccatggagcacttagacattgtgagtgaagtgaagcatcaaagaatcaaaaccaacgggatatggctacacgtggcagagaaaggaacaggtccactagttctgctgcttcatggcttcccagaaacatggtatgcctggcgccaccagatcaatttcttggcccatcatggctaccatgtggttgcacctgatcttagaggatatggtgactctgattctcctattgaccccagttcctacactattcaccaccttgtaggtgacatcataggtttccttgatcattttggtcaacatcaggcatttattgttggatctgattggngagcagtcattggatggcatctgagtctgtttaggcctgaaagagtcaaaggatttgtttgtctgggttttccttactacccaagatctccaact

SEQ ID NO: 61604 - DNA, 506 bp, Glycine max
  unsure (1)..(506): unsure at all n locations
  Clone ID: PAT_MRT3847_26643C.1
tttgggggtgttttttttttttttttcttttttgttccttttttttttttttcttggggcacgctacttgccccggttttccctttcttcgcgggtatgccacccctttctcccccaatgcttcgggctggtttgtttttttcccttncgggcttcccatttttgttgtgagggtgcccaanctggggagggccttcctgtctgtcttcccgctggggctggaaaaaaggggggtccccccttaacccccacttttttcctgcataccgactttatcctcctgcccgtttggaacacttgaatggatgtctgttcctggggggtggcctccaaccccccactcttttgttgaaaatggttggcttccctcgtttgtgggggtatccgtgcgaggttcccgccccccncgctcaaaacgtgtggctcctcttttggaaaccgggtgggagtaaactttttggggcctgccccttttttcgggttttcttccccctggctttcacccc

SEQ ID NO: 61605 - DNA, 466 bp, Glycine max
  Clone ID: PAT_MRT3847_26644C.1
tttctttctttttatatcttcaaaccccgcgggaacgcaccagagggttttttttaaagggttttacctatatcccaaacatagaacgggaatggtgatccggtttaacatagaaacggcatctagttctaatataattgccaaaaaacaaacaactggaacagaaaccccaatgaaggggcgagttccatgaaggctccaacaatgtccccgttgtgaggcttgagagctttgacagtcttgctttttgacactactggctgtgtcatcaccaaatcaatgttatggggctcgacaccagtttcatcaacctactcctcttcttaaggttgggctgctgaaccagcaggatcatcttgtttgggcgtcacagaccccagatctggcatcctgaactgttgagcagtctgtgattgcaactgagagctcaagtcctttattttcgcctccgaaaattgacataggt

SEQ ID NO: 61606 - DNA, 402 bp, Glycine max
  Clone ID: PAT_MRT3847_26645C.1
ggaagaggaaggggctagagaggaaagaactagctggctggaagctgagaactttagcatggactagtactactagtacattcatgcatattacgttggactatggtggcttaaccatagcatcgagagcgcaaagatggtgtgagctccttggtgagaaaagatgcgcctgaagaaagagccttgggctatcgaggaagatcaaattctaagatgttacattgacaaacatggacatggcgaattggcctgccctttcaaagcaagcaagcttgttaaggtgtgggaaaagctgtatactacgctggattaactatgtgaggcccgatgttcaaagacggaatttcacaattgacgaagaagatactatcattgagctggatgacatgctgaggaacaggt

SEQ ID NO: 61607 - DNA, 306 bp, Glycine max
  Clone ID: PAT_MRT3847_26646C.1
gggcccgaatctgaacagatttactgtgagatagactatggtatagattacattaagctcactgcaatagtttcaagttatatacaaacctaaagaatcaaaacccaaaaataaatagtttaaaatatgtgcataacaccttttaagtatcacttgaatcatatcatatcatctgcatttgtgtcgaaaatgtgaattaacaagcactccagaaccgagcatcacatggatgatgcataatttgagaaaaatcaaaatggctgcaacttgagcaatcaaaccatgagttgaacagatgcacctgat

SEQ ID NO: 61608 - DNA, 1006 bp, Glycine max
  Clone ID: PAT_MRT3847_26647C.1
atctttcaccattctcttattttctaaccatatttttgttttctaatttcaagggacatttggattcttagttttcacttttataccatatttcttgaaaccttgtgttaaaaattgtgtccttttgaacttcaataacaatttggacttttttgtagtttcatacccacatacccgttgttggatttgaactggttttacttgctccatggctcttcacataagcagtggttgttttactgtgatgtgtaattcaagagttcacagaataagagctgttgcttcagagggttctgctactcttaatacagtggtggaggagaaggtgaagttgggtggctctgatttgaaggtgtcaggggttggaattggagcttggtcttggggtgataccacttactggaacaattttgaatggaatgataggaatgagaaggctgctagagctgctttcaataccagtattgatggaggtctaaccttttttgacactgctgaagtctatggctctgggcttgctttaggagccataaattctgaggttcttcttggaagatatattaaggaaagaaaagaaaaggatccagaggttgagattgaagtagcaaccaagtttgctgcactgccgtggagatttggccgtcaaagtgttctcaatgcccttaaagattccctttgtcgactaggactgacttcagtggatctttatcagctacattggcctggagtttggggaaatgaagggtatattgatggtctgggagatgctgttgagaagggacttgtgaaggccgttggagtttcaaactatagtgagaagcgactccgtgaggcttatgagaagcttaagaagagaggtattccattagctacaaaccaagtaaactacagcctcatctaccgggcccctgaagaaaatggtgtaaaggctgcctgtgatgaacttgggataacaataattgcatattcaccaattgctcaaggtgctctcactggaaagtatact

SEQ ID NO: 61609 - DNA, 273 bp, Glycine max
  Clone ID: PAT_MRT3847_26648C.1
cttattgtttgctctcatggtgtgtcatgttggatgcttcgttcaatttgtacagaaaaatctactgcaattagtatgagatttcccacagagagaagttccagtgaattacagacagtggcttttgagatgcttggtgaagcaatctcaagagctgggccatccttccctgttgatatttggagatcgattcttgaggtattcagaaaaacaatggatgtcttggcattaaaaacccctgttgtggaagatagtgtcatgtccacgtagcct

SEQ ID NO: 61610 - DNA, 1093 bp, Glycine max
  Clone ID: PAT_MRT3847_26649C.1
ggaattcccggggaggacccacgcgtccgggacgctattgggagtggttgttgggggctgtggaaatggaatccgttaccgcagtctcgacggcgtcgtattcgctccaattcgggttcggcggatgcggccggcggaggcggttaccggtttccggtgaagcaggcggtgaccgccgcctccctcgccctcaccggcgacacaatcgctcagctcagccaccgttggaggaaagcaaaggagggcggtggcagtgtttctcaggatgaattgtggagatacctttcagaccatgattggctgcgtgctctgcgaatgacttcatatggattccttttatatggtcctggttcttatgcctggtaccagtgccttgaccactgtctccccaaaccaacagtccagaacctagtgttaaaggttgtactaaaccagattgtgttaggtccatgtgtcattgctgttgtttttgcatggaataatttatggctacagaagctctctgagcttccagaaaaatacagaagagatgctcttccaacgctactttatggatttagattctggatccctgtcagtgtattaaatttctgggtggtgcctcttcaagcccgagtggctttcatgtcaatgggctcagtattttggaacttctacttgtcatcaacaatgaccaaataaaatgcattgtttaccagcatttcacattgtttacaatttttacattgagattaatcaaaagtctaatagctttttggtgaggaaagttgtggaggatgagttatgatttggatgttaccattcgtgtgccgtgcaataggctttgcctgctgaatagcttatgatatgaaagaacaatggcatttttccttcaatgctgacaattgtaatatttatctttcatatgaaaagttataatgtagatgttagctttcaagaatgactattttttttatggataattgttgaatgcatgaatctgaatatcagaagaccaaaaaaaaaagcactttggcattttttttagtgccaccttggagtggcattacaatgcttgtatgttgccaggggggatatatttttcttttttttt

SEQ ID NO: 61611 - DNA, 259 bp, Glycine max
  unsure (1)..(259): unsure at all n locations
  Clone ID: PAT_MRT3847_2664C.1
gtctgatttccttatcgcaattaangaatacgtangagcaanggaaacaccctcgtcgaccgcaaaaaaaaaaaaaaaaaaaaaaaaaaaaaaaaaaaaaaaaaaaaaaaaaaaaaaaaaaaaaaaaaaaaaaaaaaaaaaaaaaaaagaaaaaaaaaaaaaaaaaaaaaaaaaaaaaagggccccccaaaaggatcaaacctaacttacccttgaatgcaacttaaaaccccttcaaaaatgtcaccaaaattaaatt

SEQ ID NO: 61612 - DNA, 391 bp, Glycine max
  Clone ID: PAT_MRT3847_26650C.1
attgattgattgttattcttttttttttatttatggttttgtatattatttgtttttttgcttttctgtttgaaatttattcgccaaacaaaggcaacccggcttaaatgaaaaataccactaagactctctaaaacattcttctaaacacactctattatggaataaaaataattgaaaataacaatttattttctaacttctaacttctaacaatgaggagaaagaatctcactctttgaaagaacccaaattcccacaccataataaaaagtgcaaaaaaaaagatctcaaaaagtgctgggagagcacctctaactaaatacataatatgcctagaaacataaaagcatatgtccttcaagctgcaggaccacaactgctaacaact

SEQ ID NO: 61613 - DNA, 358 bp, Glycine max
  Clone ID: PAT_MRT3847_26651C.1
acgagtatggatctccgttaaacaaatacatgacaactgcagcgagagaaatacacatccgtcttagtaattatgctttattgactaatgttaattttttatggccttcgactatcatttcacacccgaaactacggcgcagcgatccacggagaatgcaagagttgtccgataacagagacgtgcctcggatgctcccacctccgacatggctcaacatcgctgacgggcgtgaacagagttgcctcgactccgagatgagggtggatcggtacaaccgaaccgagaaccatagcgaatccgaggatttgagggacttcagagcgggcattctaagtgaccctctctacaatcaact

SEQ ID NO: 61614 - DNA, 253 bp, Glycine max
  Clone ID: PAT_MRT3847_26652C.1
acctcttgtccaagacgacagaaagggagaacgggggagtctaaaaaccaaaggcggaaagaacaaccaaaaccaaaggcaggagagggcccaccggggaaccaaacccccccctcacaacatgcccaaggcccaagaaccaggccacgccgcccaggccgagacccacgaccccaccgaaaagctgcaaaccactacccaccaatgggaaagcaagacccgcgctgcggaacaaggacaccccaccaaggag

SEQ ID NO: 61615 - DNA, 235 bp, Glycine max
  Clone ID: PAT_MRT3847_26653C.1
tcctcaagccgttgcacagtggactgtatggaatcgaatggcaacgctgagaacaccattgattattgattctagcaggcacagctgttgtcaattatctattgaccttctgggtgtaggaattctagtggacggaactggagattggatcacacttatgcaaagatctccacattgtaactttgtgagagttgctggttggaagaatggctgtttaatggtcaagattgtgatg

SEQ ID NO: 61616 - DNA, 386 bp, Glycine max
  unsure (1)..(386): unsure at all n locations
  Clone ID: PAT_MRT3847_26654C.1
attaacttgatcagatgagtgtgaatgattttatttgtgtgtgaaaatgaaatgcaaaagataatgcaagtttcgtgtgtttacatattcctttttatgaatctcaagttcattattggtgtattgggttgtattgactgtgtgcttcggccatcagctgattgattatattattgaattttatttcttctacataatgtgttgccttctctgggttgggatttattcttagtttttgacatcttacatttctgccttagttgtttaatcttggtntattcttctttgttatgaaatcgttattttgtaaactctangaacaactagactacttgagacttgagagaattgtaattgatgtactaaattattttgtttaattcttt

SEQ ID NO: 61617 - DNA, 560 bp, Glycine max
  Clone ID: PAT_MRT3847_26655C.1
ttcgtttattttttttttttttttttttttttttttttttttttttttggtttttttttttttttgtttttttgttttttttttttttttttttttttttttttttttttggggaaagggggggcttttttttggaaaagggggggtttcccccccaaaaaaatttccccccccccaattttggccccgtggggggacccttgggcggccccctggggggccccctggttcaacccggaaatttcgggccgggccctgggggggaaccacttttccttttgggggggggtattaaagccgggggcaataatggaaaaaggtgtttccgggggaaaattggttttcccctaaaatatcccccaaaaaacaacccggaattaaaaagtggaaaacctggggggcccaatgggggggctccccccttttaattggggggggcctaatgggcgtttttgagaggggaaatctggggggccattggtcttaaagaataggccaacccccggggggggggggttttgttttttggccccaggggggtttttttttttcccagtggg

SEQ ID NO: 61618 - DNA, 226 bp, Glycine max
  Clone ID: PAT_MRT3847_26656C.1
ggctcgaggttcctcttatctctctttttctgctattatgcgaaggctttcaaaccctagaatgacttggactccgagccttttattaacaatcccatgaggttctaaattttttgaggattttgaggttgctttgatacggaataggagttggtggtggtgaatagggagggtatgacctctctctgtttatttcaacttccgcacagatcatggttcatataaa

SEQ ID NO: 61619 - DNA, 274 bp, Glycine max
  Clone ID: PAT_MRT3847_26657C.1
cgattgagctgtcaacacttgggcatggatctcagtcaatgtcaatgggctgattaaattgtcttcctaaatatagaaaaataataaatgggctgatttacttcatggcccactgccggttgaataaagaaaaaggaaagaataaaggaaggaataaagaaggtggaattgttgatagtgatgattattggtagggtttaaataggaaatagagtattggtgttcatactcaagcccaagcaaatgtaataatttcatacttagcagatagtgt

SEQ ID NO: 61620 - DNA, 272 bp, Glycine max
  Clone ID: PAT_MRT3847_26658C.1
ctgtctgtctgatctatctctcttcttcccttcttttacccattctactacttctccatcaatgtcttttttgcgtccttaatccattgccactcgtcatcccctaatattctccctcaattaccaccactcctaacaaaccctttccctctttttcccttcctagcatgcataaaatattaattcctctctcaacttgttgaataaaattgcactatacaataccatctcctactactaaatttactttccccctacctttaaatcctact

SEQ ID NO: 61621 - DNA, 186 bp, Glycine max
  Clone ID: PAT_MRT3847_26659C.1
gcccacgcgtccgcttttctacttggtcttctgacctttttttctcctgaactcaaacatggcgatgggtggtcgctgattcggccagtcattggatgaggcagatgcctgctgaagggttcaattgatcaagaaagctgagacgatcttttctcaagaccgtaagaatcgttatccaggaccatg

SEQ ID NO: 61622 - DNA, 379 bp, Glycine max
  Clone ID: PAT_MRT3847_2665C.1
gaacaaggccttttcaaagaaaaaaatacggggcttaataaggaaagggctacaaggacttacccccatgaacaaaaaaggatccttccatcggaatttaaaaccggaaaatatgctggtaccaaaggaggttttgaaaatggctgattttgaacgggtaaaaaaagaaccaccattttctctttatacccaaaaggttcccccacgggggaatcaagttccaaaaccctggtggcaagcccctggtaaaaccccggctgtgaacatggggccagtgggggctatataagtggacctttttactttaacccccttatttcctggggaaatggaaaaaaaccaactgaccaaaaaatacggaatcctgggaatgccaaat

SEQ ID NO: 61623 - DNA, 316 bp, Glycine max
  Clone ID: PAT_MRT3847_26660C.1
aatgcggccgctcgacttgagccgctagagatcttaacatacatcatttgattataaccatggtgcatatttacaagacagggcacattctgcaaaacttactagtcacgtgacatcgcacccataattaaatgttaacataataccgtagcatatttacactgggcaagggtcatatcttataaatgaaataaaacaatttcaaatcaaaaggaaagacattgactactaatgtttacaaactgatgatcatatttgccggagaacgttatggatatattggtgatttccacccaatacaagtggtgagggtgga

SEQ ID NO: 61624 - DNA, 369 bp, Glycine max
  unsure (1)..(369): unsure at all n locations
  Clone ID: PAT_MRT3847_26661C.1
acgccacgcgtccgaacatgcatcacgaaagttactgaagcggttgcagccgccganngaagggagggaagccggaaacatgaagcaagatgnaagggaccatacaacactgcgcacagcagacccgatacaagaggtgaagcctgtgggtgattacttaatgagcaagcatagaaaagatggccatgctcatgaactgaacctcaaaagctgacgtcgctactgcgaaatcatgagctgtacgaatccctataggaatagtcataaaggcaacaacatctggtcatataccgaattatggatatgaatttgagagtctagaaagcactgctggtacacttgtgacattcagagcattattatatacta

SEQ ID NO: 61625 - DNA, 235 bp, Glycine max
  Clone ID: PAT_MRT3847_26662C.1
gagaggctaaccattaaacattttatcttaactaatcttgaagcttatcaatgcatatttctttgagccactcagtatgaataatgaatttagcttagccattgcccactgtgttgtgctttagaaaatgttagactggagatgctatactgtctaagaatctttatttctcatgttgtcattctaaaccgaaataccggttgtgccaatgaagtggcaaatcatgtcttataaa

SEQ ID NO: 61626 - DNA, 210 bp, Glycine max
  Clone ID: PAT_MRT3847_26663C.1
gagccaaaaattttaaggaacgaaattggttcctttttttcccaacaaaattaagtaacaaaggggtttcccatttgatacccctcggggaatacctttaaactaaaagggggttaaggtaccctggtttcacaaatcccccaattgaaaatggtgggaaaaaacatacaaagagccctggtttttcaccccccaaatcttaaaaaaaga

SEQ ID NO: 61627 - DNA, 320 bp, Glycine max
  Clone ID: PAT_MRT3847_26664C.1
ggagacgccccgagagaaggaagccttctcggcgcccgatttgctttgcccacctttttaatcgtttttgaagagataaaaacatcccggggccagccaaaataaaattgattgaaaaggtttttttgtgggtcccctcttctaaagggcccgacttgaggtttttcaaaaagggggggccttttttaaatttccctcacgcaaggttttaagcgaaaaacgtcctttttttttttttataaacaaattttgtcagggaaaaaaaatacccccgggcccggggaactcctttgcctcttttttatcccccccccgggggc

SEQ ID NO: 61628 - DNA, 658 bp, Glycine max
  Clone ID: PAT_MRT3847_26665C.1
gactggtgcaacgtaatgctatgctcctgaatctgccaaatgctgtgctttcactgtggagatagtgccgttgggcatctccactttgaaggtgctaagatgacttctccctacattaaatgtacagactgtttcttcttatcgtttggaagttagactgatgataccatgaattgtgaggctcttccccacaagctgtggctagcagcagagatgccagagaaaggtggatggaaattttcacacgaggaattggttaccgcttggacaactcaggtgctgtcctgcagcagctatgatggctgatgggtgtacatatgtgtatgccacggcgcttgatagttcagtgactacaataccaggggattgtgtgcttggtgtctcgttgacaaccatgaacaccatgtgtgcgtacgggctcagacctgctatgtcacgttctaggcttttgggcaccattcctcattccgttccacatcccactgttcggaatcagagggcaacaggcgctaacaccattgaattgtgattctagcacgcatacctcttgtcagttctctattgaccttctcggcggaggaatctgagtggactaaactggcgaggggatcacacttatacaaagtcctccaattgacaactcgatgagaggcgctgc

SEQ ID NO: 61629 - DNA, 861 bp, Glycine max
  unsure (1)..(861): unsure at all n locations
  Clone ID: PAT_MRT3847_26666C.1
cacgcgtccgcacaaagtggtgcttcagtaagttgaagtatttgactgtggacggatgccaatttttaacagatgttgtcatacccttctatttacttcctttcttaactcatttgcaacaattacaagtctcccactgtggttctgtgaaaagcatatttgatataacacaagaaagagaaatcacaactatgggattgggagcagcagccttccctagacctctccctttttccctcaagaaattgactttagagaggctgccaaaactggagaatgtctggaatgaagatcctcatggaattctaaccatgcaacttctacaacatgttattgttgagaaatgtaaatgccttacaagtgtgtttccggcatcagtagccaaagatcttgtgaaacttgaagatctatttgtgcaagactgtgaggaattgatggaaattgttgcagaggataatgcagatccaagaggagcaaatctagagcttacgttcccgtgtccctgtgtgaggtcattgaaactacaagatttgcccaagttcaagtatttttactactgctcactgcagacacctaccgaggatgaaatgcctacatccaacttaccgtgcctgtcactcggtgaaaaaggactggagatgatgaagcgtggagaatttcagagaaacttcttacacaaattacaagttcttactctgtgctttcgtattgggtcgaatgtatttccatatgaaattctacaactggcgcccaatatagagaagcttgtggtgtgtgatggttccttcaaggagattttctgctttgatagtcttaatgtggatgangctggactcctattacagctcaaagtcttatgct

SEQ ID NO: 61630 - DNA, 634 bp, Glycine max
  unsure (1)..(634): unsure at all n locations
  Clone ID: PAT_MRT3847_26667C.1
gggaaaaaaaatttaaaaaaaaaatttaaaaaaaaaaaaaaaaaaaaaaaaaaaaaaaaaaaaaaaaaaaaaaaaaaaaaaaaaaaaaaaaaaaaaaaaaaaaaaaaaaaaaaaaaaaaaaagggggggggccgtttaaaagaaacaaacttaactaccgcgggatggcaaagnaaaagctttttaaaaggggccccaaaaaaaaatccaggggccggggttaaaaaacgcgggaagggaaaaaacccgggggtacccaaaaaaaatcccttggaaaaaaacccccttttcccaaggggggaaaaaaaaaaaaaggcccnaaaaaacgccccttccaaaaagtggcccacccaaaagggaaaagggaaccccccctgaaggggcccataaaccggggggggggggggggtaaccccaaggggaaccgtaaaattggcaaggcccaaagcccccgcccttttcgttttttccctttcttttggggcaacgttcgcgggtttcccccgaaaaactaaaaaaggggggcccctttaagggtcccaataaagggtttaagggaccctgaacccaaaaaaattggaaagggggaagggtcacagaaggggccaatccccctaaaaaagggttttccccc

SEQ ID NO: 61631 - DNA, 255 bp, Glycine max
  unsure (1)..(255): unsure at all n locations
  Clone ID: PAT_MRT3847_26668C.1
aatgtgaatgttgcgtcgcanaccngatgganngttngcncctaagcggaccgccgggctttcgtccttttttttttaataacagggaacccatgattttgtatttttcaatcctttatgtaacccatactgggacacgggtgacgattttcacaacacgatcccctaaacgaagtaagtttggcacatcacagtgaacacatagatgtgctttcaacatgcgttctacacttctcatgatgaataactttcccc

SEQ ID NO: 61632 - DNA, 243 bp, Glycine max
  Clone ID: PAT_MRT3847_26669C.1
caggcattcattgcccatcttgatgagcctttgcgcacaacgtttcagtggtttatgcactacaaggatataatagcactgcctataacatcatggaatgttcagcaaggatttgtcactgcaactttactgcgagttctaaaagcaagggactgggatccttacgaggcgcagaaaatgtccgttgacagtgcaaattcaacggtgcacaatgagattgccaatatattatctaacaccatt

SEQ ID NO: 61633 - DNA, 446 bp, Glycine max
  Clone ID: PAT_MRT3847_2666C.1
gacctccaacgaacaggagcatgattttcccgtttgatcaatttaaccaacctttttataaacaagacaacatggataatttccatataccgcctacaggattaaattaaataatattggagacaacataaaatcaatattaacatctactggactaagtgtgcctaaaccaaaggaaacaagaatttccattcctatgttccctattataaaatcataaataaatattcacatctatgccaagggggttggtctttcaactgaacaaaaccgggcacactgcaatttctggttcaaccttggttttaccccataaaaattttcccaatctggtttttgtgacccttttcatgggaagcaaaaagaatttttgacataattaaagagctctgaaacccttctaatagacttgacattgggtgaatcctgagaatggacctacgagg

SEQ ID NO: 61634 - DNA, 586 bp, Glycine max
  Clone ID: PAT_MRT3847_26670C.1
gcgagacaatgagagtgagcaagtgaggaaccaccacctcctccatcatcactcatccttctccctccatgatgagtagtggtgtttggaatttcattgcaagcactatagcggatcaaatcagcgtttgtggcatcaagttccttttggagcctaaggacttgcttttggagcactgaaatggccccaacacaaccatacactggatctttgatccttgcttcggcttcataggccagagagttcacagcatcctctctttgatggggttgcacctcattgaggagtttgctcacgttgcttgcaccaaatatcttgtgaacatttgcaaatttatgtggctcttctggtgggaaatatggggcaaaaatgcaatccggcatgcacttccttctcaaaaacttgcaggctgcacatgaagaattggagtagctagaagaggccatgatcttcgaacactgcccccaacactttacactaatcaattaccaaacaactacttaattacaaactctatgtatatagtactcaatttttaaccttaactattctaaatgatcatatatacatgtttgtgttttcccaa

SEQ ID NO: 61635 - DNA, 366 bp, Glycine max
  Clone ID: PAT_MRT3847_26671C.1
cacagagatatagcagaaaaaaaccgcgccaggggagagcttcaagtatgaccgtacacaccatcaaaaacgtagattgagggggagcccgtggagccacattctctaaagaagctaatctttaagtttttgctgcgcgctcttgtttttttttctttcatttattgtctccttgtttctttttatgctctatgcaagtaaattcttattttttacaatgtgtgcttggttttttgttgtatcaaaatcactgcttattaacctgtctatcaagttagttctgttacacagtattcatggccttttaacacttttgttctttcaggttcattagatttcattgttttttattaaggttgtccctta

SEQ ID NO: 61636 - DNA, 206 bp, Glycine max
  Clone ID: PAT_MRT3847_26672C.1
ttttgtccttatttcaaaaacggatgccgtatagctaaagccaaggatcatatgccacgatgctacttcgatgccactgttgctagctgggaataatcgcctgtctagaaatgtgcatcgaaacgacgtaattcgaagtcgcgcaatactgcatcggcatcatagtttaatacggccacacacggcagacagccgaagtcgaccaa

SEQ ID NO: 61637 - DNA, 243 bp, Glycine max
  Clone ID: PAT_MRT3847_26673C.1
gtccttttttttttttttttttttttttttttagatctttggacatgggagttttttgaatttggcccaaagcccatgtcttatcatctttagaaaacaaaagcgctaaaaagtgggattaaagcattaaaagactgggcaaattcacaagactcccttttcctaaaatgaaaagggttttttttttatcgggcctggggggagcaacgagggacctctggcaaatatattcttgggccccct

SEQ ID NO: 61638 - DNA, 461 bp, Glycine max
  Clone ID: PAT_MRT3847_26674C.1
tttacgttttcaagcatgtgctgctgttggctcgacataaggtctcactgcaactacattgtcggaatctggtttgcaaaaagacagtgggataattgtggattccttagtgaggacgttttccgttgcttataacgttgatgagcccctggagaccgatttcgtggagggaaattttggctttgatattaaatctcgctgtacattggaaaaagtctcctctacagaagcactattagagcgtggaaaaacctaccaatatgatataattggagcacgttcacatttttcataataggatcatgaaatggaagatcattatattcccattttgattgttgccattttgagacacataattgagcctagtataatgatgatcaagctcagatggaaacataacttgttaacattgtcttttgatgatgatgaaacttttaatggttacaagttggatctta

SEQ ID NO: 61639 - DNA, 551 bp, Glycine max
  Clone ID: PAT_MRT3847_26675C.1
aggagaggtggagaaaatggctggtgtgggcggcggaggtgggggggttcccattgcaaaggaaattcagcctcccctggtgccctgccagctccctgcaccccagggagcagactgactctgggaaagcgggcaggttatggcggctgatttatcgcaggcccagctgccttcccgcacctctcgagctccctgtgacctggcttcccagcaacccctattccccaaataacctctggaggggcttaatgaggggaggctggatacctccatcttccccactgccctctcctttctcccatgtccacctcttgggagtggaatttatgttgtctccccagagactgtgctgaaagtcaagatgtctgagccaaagactccttagagatctgctagtccagaaagacaaatcagcagccctttgctggtgtttttgttctgcttctcagtctgcacagttaaaaaaaaaaaaaaaaaagaattagttgccaacatttaaacagaaataggttgcacattaaaatctgatttctgatttctcttaaaaatcc

SEQ ID NO: 61640 - DNA, 340 bp, Glycine max
  Clone ID: PAT_MRT3847_26676C.1
gcttcccaagagacaaagcagacataacaaccaacaacaccaagacaaccacagcaacgaatgatgacaccactgttgaactggtttgggcacaaaattttccaaatgggtggctattggaaacccagttcaagtttgggttccaatgggtggccaagtaaacattggcagaagttgaggcaccattaccagtggccaaggtcagaaacacagggcttaagataatcaagaaaagccttggtccagctgcttgggggcaattgatggctacgaagagaaaagggggggatgcgcacaagtggccaccctctagagccttgtgaaaaccaaaaatcgggag

SEQ ID NO: 61641 - DNA, 380 bp, Glycine max
  Clone ID: PAT_MRT3847_26677C.1
ggcacttaaaaacccatttaaatttataaggaaaggttttaaagagaaaaatggcctttgaactttttagctttgaggaatctaaaagcaggtcaatcagaaggcggggttttagttaaaagcaaaacctttttttcttcctttaaagaggtccttacccctaagtgggcactatgcatattgcattcatggggaaagcttattttggcacccggttggcggtttttttttaatttcaaacaaaaacctttttttattgccccttttggcatattaaaagggggcattgtcctggccaaccgggtaaacagaagcagggccagtttttttttggtttttttaaactggataagcccacttggttccagcaatgtttgcct

SEQ ID NO: 61642 - DNA, 296 bp, Glycine max
  unsure (1)..(296): unsure at all n locations
  Clone ID: PAT_MRT3847_26678C.1
ttgaatcacttcacccggcncccaacaaccgacgcggctcacctgagaaaacaagccccgcacccacacacggagcgcagcaacaagcaccaacccggccccgacggggccaaaaagccccaacccgcaccgagcccccgccaggaacanaccaaacccagagcaaccccccacggcacccccgacggctacgggaccccaaccggagcccgnggccccggcgaacacggaagagcgacgaaccggcacgacggaagagacccaggggggcccgacccacggaggaaaggagccgg

SEQ ID NO: 61643 - DNA, 253 bp, Glycine max
  Clone ID: PAT_MRT3847_26679C.1
gccgagctagtctcccgccgcccttgtgtgatccctatgttttgggtttttcttccctttacatctattagtgggctctgtgtctcttgtttttagggggggggccccctccaaaaaaaaaaaaataatttcttcgaggagggctcccccttttatctctaccaaaaagggggtgagccccccctttccatcccataatcccctttttccggggggggaaaacctttgggccaacataacctcaatctttttt

SEQ ID NO: 61644 - DNA, 295 bp, Glycine max
  Clone ID: PAT_MRT3847_2667C.1
aaaaaaattattattttttaaaattgtataaaaataaatttctacaaaaaaaacaatcaaaaaacaaaaagtttaaaacataagatacctaaagagggagcaaactaacattaatagaaaaatactcagggcccaatttcaatttggaaaactagttatgcaacctgcattaataaataaaaaaacactcggggaaaaacggtaagaaaataagaacacgaggaggtatttcttataacaatagaaactgacaacgggagattaaccttaacatactggccctgaaaaaaaagaa

SEQ ID NO: 61645 - DNA, 281 bp, Glycine max
  unsure (1)..(281): unsure at all n locations
  Clone ID: PAT_MRT3847_26680C.1
tgaactttgtccatgatagtctgttttgtgatattcatttgcttatccgatancacaagtaaaaactgagattaaacctgttcttatatgttggaaagttgaacatagtattgtctaataaagtgggaaatttggtggatgatgttgaagtccttctcaacttggaagtaattggttaatcaagctgtgcctgaattatntcattaattgtgaatcttatctcntccctgtngtntacacaagttatctgggttttaaattaagtntccaatncttgccag

SEQ ID NO: 61646 - DNA, 271 bp, Glycine max
  Clone ID: PAT_MRT3847_26681C.1
ggcttcctatgtatccttcctagtgctaattcttgcatcccttatcctcatgcctaaaaggcttgctacttactacaaaccaattaagaagccaccattgtacaagccttcagtgtacaagccaccaatggacatactaccgttttattaaccaaaaagcatcggtttacaagccgaaaccaacgtgaataacaatccaccatataagaagccaccatacaaaaaaacaccttatggaaagtaccctccagtagaggacaacacccatgcc

SEQ ID NO: 61647 - DNA, 155 bp, Glycine max
  Clone ID: PAT_MRT3847_26682C.1
aacagacgactgaggttccagttgcgataaggcgaccgatggctggggttgctcgaggactaccgaagggtacggctcccatatgacaactgaagggtacggatgctagatgaccacagacgggtaccgacgccataagactccctatggctgcc

SEQ ID NO: 61648 - DNA, 396 bp, Glycine max
  Clone ID: PAT_MRT3847_26683C.1
ctcgaggttaaacaaggcatttcaattatcgtgtcttcttggctctctgtttagggtacgaacctacccatgtctccttttcctccatactctctttttcccttaattgcttttgtttgaactttatatcataattgtgttcatacgttgacttttcatactttttcatcaagtttgtatacatagtttgtttggttgaaagggaatctccgtttatgttctcgtaataatgaattttgttgtgcaaactatgtttggcttaattatagtgtcagagttgttggattcttagaggactatgagcagtttttctctacatctgattttttatttagataattttttattgcataattatactgtcttgtatgtgaattttttttacaatctgcatct

SEQ ID NO: 61649 - DNA, 446 bp, Glycine max
  Clone ID: PAT_MRT3847_26684C.1
ttgttgatcagacactgtggtggaccgggaacacaggttgctgaacggtcaaaccggatacagacgcgatggttactggagtccatgagtcttacagtttcttgctacgtcttggtgtacgatttcttaagggaaagaaatatcactctctgtgctggccacagactacgagaatcattttctttatcactctgagttcatatgttgcacactctactatttgatataggacttccagtcagatataaactttgtctgtttgtttctgagttgtgtgcttaacttcaagttcaagctggagaaatcttggattagagctcccgctctcctatctggtataggacttcgtgggtagacttttctatttctggcctgtcttgcactctcttgttctcactgatccgcattgacgttcaagtggtcttatttgaaaaacacttgggcgt

SEQ ID NO: 61650 - DNA, 694 bp, Glycine max
  Clone ID: PAT_MRT3847_26685C.1
aaataatcaggtgggacaataggatgtcagcatcaatacccgacgaggatatcttctacacagttggatttttgcattcaagtgggtttgataattggaaggcctatgatgctcaaaataaagaaattctacaattttgtaacgattctgggatcaaggttaagcaatatcttccccactaccgcacacaagaagattggacaaaccattttggccctaaatggaggacttttgtagaaagaaaacaccagtttgatccaaaaatgattctatcacctggacaaagaatctttaacaattaaactagctttaaaaaaaatatataatatggtgggactacccaagttagctagctggctgatctcaagtgtacacataggacccagaattcagatgatagcctttgtacttgtttttgttaagagggtggggttaaaagctgcatgactttggcatatatgtagatcaggttacacatactttagatacgttaggttgacaaaatcatgtgtgaaagatgcacacagctagctgtgtacctttctttctctctctctctttctttctctctgtccctcaatttgtctatcactaaaaagattactatagtttagaacctagtgaagatggaaaaaatcattatatagaggatttaattttgtcacacgttctaatcatatacattaatattctt

SEQ ID NO: 61651 - DNA, 534 bp, Glycine max
  Clone ID: PAT_MRT3847_26686C.1
ttgggggggggggggggggggggggggggggggggggggggggggggggggggggggggggggggggggggggggggggggggggggggggggccaaaaaaaaaacccctttgtttattggggggaggggccccccaaaaggaggggtttttttcccaaggaaacaaagcccccgcaaaatttcctaaacgggggtttacttataacccccccctggtttacgtttccccaaaagggggggaaggggaagaagtttccccccatttggggcccgaaaattttcccctgttaaggttaccccggggattttttggcctcataggattttgggggacttttaagttttgggggggaaatagggctttgggggcctaaaatagggggcccgtaaaaatggttttttgggggaggagggcccttccaaaaaatggggggggggttaattcccaggttttttttcccaaccgggggccaaataatggtgaaaaggttggccttttccggggcataagccccggaataaccggggggttt

SEQ ID NO: 61652 - DNA, 157 bp, Glycine max
  Clone ID: PAT_MRT3847_26687C.1
atttgcgttttgatagccctgaccgttgatactctcctttgcgtgaataatgttgtctactaattttactgcggttatttagctgaatgaaatgctaatataccgtatagctagttgcttgtttgtagcaatctgctcacttgcattgtaatctttc

SEQ ID NO: 61653 - DNA, 109 bp, Glycine max
  Clone ID: PAT_MRT3847_26688C.1
tctggtttcttccgcctgagagttcattacttaactgcctgagagacactgatctgtcatatgccataccagataggctagtcatatggaactgcgtttgacagaaatc

SEQ ID NO: 61654 - DNA, 115 bp, Glycine max
  Clone ID: PAT_MRT3847_26689C.1
gccacggcgttcgactacgcgtattgagtcagtggtagaaacgactaactggaactgaatcaatttgaaagggtgctaggtgagttgaatgaactggctggtggaacacaattga

SEQ ID NO: 61655 - DNA, 123 bp, Glycine max
  Clone ID: PAT_MRT3847_2668C.1
gctccggaccgacaccgagaccggcaagccgcagggggtggcggtgaggaactaccgtgactaggaacctatcttattgtagctctacaccacagttaagtccctgaatgctttttcgagaga

SEQ ID NO: 61656 - DNA, 198 bp, Glycine max
  Clone ID: PAT_MRT3847_26690C.1
ggttctacactttgtgtgtctttgttaacagaggaactgcataatgataaaacagtgaaaacttctgaaacaatagttccatcaccgccaccactaacaacagtagtcacgggaagggaactgggaagaccacaaaggagagcaggaacaattccattatgtagacagcaccttgataaaagctgaagaccacaattc

SEQ ID NO: 61657 - DNA, 346 bp, Glycine max
  Clone ID: PAT_MRT3847_26691C.1
tttttgaacagtggacaatgtaaattgtatataggggttttcctgtacttgaataatttaaatgacatgaaatttaagggttaaattcccgcaaggcgcttttggggggtcacctgaaacccttgcttattttgggaggaatcattaattattttggtgggcccaacccacccttacccttggggtttaattggattaaaaagctgggtttgaagccctttccacccatttcctttggttgagggaccattgggaaggtcctggccctgggaccccttaattgcaaaagccctgggatttgccttaaaaggggcctttcctcaaataattttcttccaacccccct

SEQ ID NO: 61658 - DNA, 299 bp, Glycine max
  Clone ID: PAT_MRT3847_26692C.1
gccactgctgcagaaagtcagcccgcaagcacctaatcttccatccttcaggtgacaccagcctatgcgggtcttacacatctacgactgggggagaacacatgaaagaatgaacctcaagaggcttagatatgtgtgaaccagtattgatatgcagctgctctaatgacagaccgacttagcacgggacctctactggcacaatgcacatatagcagaggacaaacgcctgattaacactgcacgtactcagagtcaccatacaggaacgctcgagcacagcgacacacacagccttg

SEQ ID NO: 61659 - DNA, 289 bp, Glycine max
  Clone ID: PAT_MRT3847_26693C.1
atctggaaatgcaagaagcttatcttggcaatctcgtaaatggggtaccagaattggatttgcacaggccaaaagaagctcccccattgagaaaggaagctctctttcgtattggatggctggaaaaagctggtgtgcctaccatagcacaaattggagaggtccattccatgccaaagatgatgaatgcttctggatcaaaaggatatattgatttactggtgggccttggtttggtggggttaccaagggcaaggtaagctttttccaaccaaaatggttttgatga

SEQ ID NO: 61660 - DNA, 183 bp, Glycine max
  unsure (1)..(183): unsure at all n locations
  Clone ID: PAT_MRT3847_26694C.1
aaaaattccaacttggatcatgatgtcacttacctntacaagctagtacctggtgttncagagaggagttttggattgaaggtttcccagcttncacagttaccatctcattgcntcaggngngctattgtcatggcntnnaaattngangggactagngaacagtngagtncaggggagggg

SEQ ID NO: 61661 - DNA, 1400 bp, Glycine max
  Clone ID: PAT_MRT3847_26695C.1
cggaattacccgggctcgacccacgcgtccggacagggcaataagcgcgtggaaattgtggcagtggtcacttgtacatgttgaagtctctcacacgcagaaatataaggaagcaaccgacattctcacccttagatcccatctccctagatttcttctctgtctttcttttccacccggttccgtttcagctacccaattcaattccatcactgcattgatccgtttccttcaaattcatcaatggacgagttcggcgttttgaccgaaaggttcggtctcaaaccacaaggaaaatccgctccaatggctagggcaaagcgacctccgaatgtcgctgattcccaaacacgccccaattccaaatccccccttaacggatccccgtctcaccaaaactccaccttcgatttcgattacggctttttcagcagcagcaacaacagcaacaccgacaacaaaacgcagcgtttcgacgacatctttggcgtagacgccaaatccaatggcgcttcgttcgactacgattccatattctccggatcgaacaaaccggtttccacgtcatcttatgtggatgacatattcggtggaatgcatggggagagtgtcggtgttgatgatctgcttgataagattggtggcttaaatacaaacgctaaaagtccaaacgcaaaatcacccgcttttgatgatttgatccctggctttggtgtttccaataatggtgttgggatgaacaatccaagtgttactccaaacaaacctgctgcagcagcggcggcgtctcatgatgatccgtttttgatatttgaaactgcttcaagctcgccgtcttcagaatctttcctggacgcgctggagcagattagtaagttgaataattctaaagggacaaaaggaggttccccatcattgaagtctccacccaagccaatgagtaaagttaataggccgagtgtatcaacaatcgatgagcttgaggactttgccatgggtggggcacagactaatgctagtagtagaaaggccaatgttaaagctgctgagactaaacaaaacttggcggctaggatgaacaatggtaaaagagttccagctgcaagagtgaatcaggcaaatggtgtggatgatcttgaatcctttttcagcatgggctctcgatcaagcagtgtgccaaagtcaaggactccaactatggatcgtatgtatgataaccaaatgaagaacaaagggaaacctgaggtgtcaccaagagtgccatctagatcctcaacaaatgtgaataaatctccaaggaagatgtatattgatgacctgtctctgatgtttgggggttccccgtcatctgaatttcaggaggttgaaggggaaactgaataaagacgaaaagcaagatt

SEQ ID NO: 61662 - DNA, 294 bp, Glycine max
  Clone ID: PAT_MRT3847_26696C.1
ctcctcctcgttggggcgtgagtgatgaatatgatgtctgagacaactcgaagcttttgcaaagccaccagtccctccaataccacttccattattgaagctacccattcccaagttcgtgtctttatgaggagaaataagagacccagaaatatggccctcaaacttgaacaaagcgatcatcaggatctcaaggttccggttacacacaagtttggcctaccagagattgaagaatttgcgtattgtggagcaaaggaattgactcagtgtgggaagtctgaaatgggatca

SEQ ID NO: 61663 - DNA, 355 bp, Glycine max
  Clone ID: PAT_MRT3847_26697C.1
accaggtcgcagtgtgagtgagtggggaccctaaataattaaaataaaaaaagggaagaagagaattgaaatgtcagctatatctagaaaagaaaataataacagtttttttttcaaacattgatatgtagattttttgggttattgagttttatagttttatgggtttgtaacaaatgtgtaggcccaagaggtgtagatgaatggaagttagttttctgcctctgaattggggattttttttagctaaaaaaaaaaaaaaaaaaaaaaaaaaaaaaaaaaaaaaaaaaaaaaagaaaaaaaaaaaaaaaaaaaaaaaaaacttgaaggggggcccccgcccccatttcccctt

SEQ ID NO: 61664 - DNA, 472 bp, Glycine max
  unsure (1)..(472): unsure at all n locations
  Clone ID: PAT_MRT3847_26698C.1
tccccacgcgtccgcccacgcgtccgcccacgcgtccgcccacgcgtccgcccacgcgtccgtacggctgcgagaagacgacagaagggggaacaagttgaacaaagaaatcatatcatggcttcttggaattcagttccactccatgtctcctatgaagttctgggttgggttgcttttgcttgctggtctatcagtttctacccacaagtcattttgaactttcgcaggaaaagtgtggtggggctgaactttgattttgtgatgctgaatttgacgaagcactcctcctatctcatatacaatgcttctctgtacttcagttctgctgttcagaagcagtacagagacaaatacggtcagaatgagatgatacccgtggcagcaaatgatgttgctttctcagcccatgctgttctgttgacagcaatttccttgttccagattgcaatctatgatcggngaagtcaga

SEQ ID NO: 61665 - DNA, 434 bp, Glycine max
  unsure (1)..(434): unsure at all n locations
  Clone ID: PAT_MRT3847_26699C.1
aaaatttccattccaatcataattttctcaatttcccnncanaaaatttctcctcgtgatgttgtaatattcaacagcaacagctccatcttcttctttaacaatcattactttgacctcatggtctacttccaatgtttaataatttgctataacaagacctatctttctctttttccaactatatatatacaattacattaattttttttctcatctttttataacatcttaaaagtctctattcaaagccatttcccttactattcataccccatatactactactcatataatcttatatcaacaacatattcacatttcctccatttttcacatttaataacttttaaaaattccaccttttaaatatagacaaatcttatcactcttgacttccttcatatatatcttttcaaatagatcgtacttta

SEQ ID NO: 61666 - DNA, 348 bp, Glycine max
  Clone ID: PAT_MRT3847_2669C.1
ggaaaggaagggtcccgggggggattcccccaaaaattaccaaaactaattaggttttgaaaatcacatacaggggaacccttttttaaaaacccttctccttttttttggggcattaaaggggcattggtccataatcccgccttaaagcttccttgggggtcgctttatagccgctagtttcggggggggggtagggcttttcctttgggttaaaaaccccaagccggggggaagaaccctccctcctttagcccaagaaactttttcaccaaagggggtttcccccccccctggggggaaataatccaacatcctaaagctttcccctttccggggcaacccaaa
